United States Patent Application Publication US 2007/0083945 A1 - sequence listing, part 18

SEQ ID NO: 119920 - DNA, 244 bp, Glycine max
  unsure (1)..(244): unsure at all n locations
catattacgattgngacgtcctgtacttcacgttcacctacaagatgtatgacctgtgaaatcaaattgatcaccctatctgcgaaaatccatactaactgtcatatccatactcctgcttcatggtgcatgctattatcttcttgaaaaaataaataaaaatgactatctgtataaaaactcttatgcgctacgactggctactagatgggattagaacaaaaagagccctggcctaaacatg

SEQ ID NO: 119921 - DNA, 91 bp, Glycine max
ttttaccgctgatcgcaaatggcttggatccaattaattaatctaagctggtcaacaattgaccacgtttgcaggcccttcgggtatgcaa

SEQ ID NO: 119922 - DNA, 233 bp, Glycine max
  unsure (1)..(233): unsure at all n locations
cacgatatatttataccattaaattagttatttgtttttaggaaactgtggcaaacaggccaatcaccatgaatggacttataggtgattatcctacaaggtatacttatagctctagtgtttagtagtattttttattagcataaacctattatttgcaatgtattttttaaatnaatttaccaattttcaatgaggtagatttttttgcccgaatgagtaaaatttttttt

SEQ ID NO: 119923 - DNA, 70 bp, Glycine max
ctgaggcacctactacaagtcaaatgctactgtgaagctagttatacctagaattacctgcagtggcatt

SEQ ID NO: 119924 - DNA, 294 bp, Glycine max
  unsure (1)..(294): unsure at all n locations
aagaaaataatcattcactataagaatactatgacttgcgcatgttggataatattacaactcatagctcactcggcatatgtcacatcatgatacatatctacacttagctccatgacggacttcataaagaaagatgatgtgatacagttatacattatngaacatgtcagtgatgaggatatctatttctaactttgacattatacgatactatgcaaaaagcgttaattgctacgaaattggttatattcgaattacatggtgacgatggtgctgaaacacattattcac

SEQ ID NO: 119925 - DNA, 303 bp, Glycine max
ttctataaagatatgtcattgataactataatgtattgctgaactcttattcattagtaacactattatcagggaagtacaattacttaaatctactttccagctcggtgctctcaaatggttattggagagatacaatatctacactcttgattatcatggtatataagcggctatttacctataactgtgacaagctgataactgcaacaaattattcataaaagttcaactggcttactgttatcatgggagaactctataatccccccaagttaaccacaatccgtaaatcacctatac

SEQ ID NO: 119926 - DNA, 283 bp, Glycine max
aatataaaataaattaggcttcgaggataaataaaagatagattacttcatttcatcaataaatattatattttaaataggaagcctatcactttatatatgtagctccacgatcagtagtaactgctgacaggtatggactcataaaaaatattattttattttatttaaatattggaaaactgaataatagttgtttataactaaaatcccttctatacttgtaatattatgtggaactcttaactggaatatcactaagccggttatttttttttttttt

SEQ ID NO: 119927 - DNA, 203 bp, Glycine max
atctttcacacactacgaaccctcatgcggctcacagctaacgacaatctatagctctcacatcgcttgaacgctctgcagacctgatttgaactcatacgggaatcgataatggaatatgcttgacatgccagacatctacagttacctcactacaaccaaactacctgaatcgacctaatccaaataaagacacccacccc

SEQ ID NO: 119928 - DNA, 228 bp, Glycine max
tacagcaacggcacaaagtaacagaggtctaccatgtgcagctctctagctggacgcatgccagcatacacatagccctcattgcacagaccttgagcgctatcttattacattagtgtttaaaaacgagcatactgggtagacgagcacctaaacactttcaaaggggggggtctcttataatcccgcaaagtttaacccttcttttcctaaaggaaaaatcttttc

SEQ ID NO: 119929 - DNA, 404 bp, Glycine max
  unsure (1)..(404): unsure at all n locations
aatatatcgaaatgtcatttaaaaattntaaaataaattttctatattaataaataatcatntatatagtctttagtaacaacacttatattttaattatagcaatgtcatattaatcaatacatataatgtataactattatttatatataagtatatcatacatataaatattttataaatattttgtcataatagttgcagtatttatatataaaataaatgaaaataatttaaaaatgaatgaaagtaagataaatggtgtaataaataatatttaagtgtataatctttatagttaactggattgagggggtggtgatatacatgttaccctattatcattttcttagcattattcacctactatactattaatgttattacaacttgttataactgtt

SEQ ID NO: 119930 - DNA, 154 bp, Glycine max
ctctgtcctgaactttgattctggatctaaaatgaatattccatttccttaaggcacaatgatttggacttactctctttgattgcataattttgttgcaatgcttctgatagtgaatcaatggagctctactttcatgcttcactgataatta

SEQ ID NO: 119931 - DNA, 232 bp, Glycine max
tatactgttaaaaaatattatttattattgatcaataatgtgctaaaaattttatttaaaattcaatactagtaatttatattaattactccattaattgccaaaatattgttgattaaataaattaatgcacatattatattcaatactgtgttaatatcataaatgtaggatatatgatatatattatgatactaaatattatttatatgaatgatcatagctaatggta

SEQ ID NO: 119932 - DNA, 205 bp, Glycine max
  unsure (1)..(205): unsure at all n locations
catgactntatacatgtattagaagaatacttaaacagatacttaacatcccatactattatcgattcttatattgatttgatgatactaatgctctagactgattattattgcttcttctttatcatgacactaaataatatgaagtttgcagaatgaaatggcttcaatccatgggtccctcatatttcatatagaatctgat

SEQ ID NO: 119933 - DNA, 180 bp, Glycine max
  unsure (1)..(180): unsure at all n locations
caaacattagataatggcttctggatgnttctgctcatgaagttcttcaatctctctacccttttgcagattacatntagtcacttctcattgattttggctgctacatgctagacagacacctagactagttgtttatctatctcatagtgctatcaactaatgcgcattctaatctgc

SEQ ID NO: 119934 - DNA, 110 bp, Glycine max
catgaatacacagccgatttaagctgctcaaggcaaaccaaatgatgcttatgagcgaagatgaagactacccaaacttctattgtaagaccgcaactacttatcaaaag

SEQ ID NO: 119935 - DNA, 188 bp, Glycine max
tgcacttcccactacaatatctctgcattacctttattccacactatacaaacctattctaagccctaataccaaccgctcaattatcgacccttaacacaacacacggaaatttcaaaaccttatccccattggcgtctctattattatatagcagagctcctacagtctactctttcagtcactga

SEQ ID NO: 119936 - DNA, 103 bp, Glycine max
gttatcccatgtgattgaaactgtgtcacatgccgacgcactatacacattatggtcccatatctacagcctaatgagaatgtgaagggaactctgctttatg

SEQ ID NO: 119937 - DNA, 110 bp, Glycine max
  unsure (1)..(110): unsure at all n locations
accgncaatcagaggaggacatttctttggccggcactcttgctctaacccctcagcgtgtctcacttagtgcgacagactgctcaaacaacgtgcatcccctatttgag

SEQ ID NO: 119938 - DNA, 199 bp, Glycine max
tacttttacaatatgttattgataaggtctgcatcacttcatctgaaataacctttcataacataacctccacaaaaataaatgtgtggacatatgaacttaatctattgagaaagataaacgaaccaaaggactctaaaaattacacacgtaattggaattgacaaccatatgattcctgcagggtgccgagattcct

SEQ ID NO: 119939 - DNA, 127 bp, Glycine max
aaggcaggagaaaagaagcgcacagcacgcaagaagaaagcaagcagggggacgcagagaaagcggcgaaaaaaagccccagggggcgccacagacggagaggcacaaacacgcgcagaaaaggagc

SEQ ID NO: 119940 - DNA, 176 bp, Glycine max
atacatacatgatactcaactttgggtccaaatgaatggcattgtttttatcatctccactatatattgatttccataggtctatctttagttgtcaacgtaatagtttttttaaatgtaaattttttaagtttttttttttcaataatattttgaatgtcataatctagttttca

SEQ ID NO: 119941 - DNA, 280 bp, Glycine max
gaagtggagcccactcaattgacaaactttattagcagaaatatgtgacaactattaagtcatgacaactagtagagtcatcttggaaccttctgatgactttcaaatcatcaaatgggatttgagtagctaaaagatctatgaaaatctttgtaagacatgattgtttgagactactcattatacctttcaaacagattaaaatgtctataaggatgcgtgtggcttgtttcatgactattagttagtctatagtaaaattttgcatattattgtgttg

SEQ ID NO: 119942 - DNA, 206 bp, Glycine max
gccgggcgggacaatatatgttgaaagtatattaattttgcatcatcgttatatacttatcagcgaacaacagcgttaaagcgccattacttgctaaaatatacgcccgcctgcactcatgcagactgtgtaattataagctttctgcgcgtgtagccatacaactggtgataacctgttcgccagcgggatagcacttgtcgctt

SEQ ID NO: 119943 - DNA, 362 bp, Glycine max
  unsure (1)..(362): unsure at all n locations
gctgcactttgagaaactgaccctatttattaaataatcgatcagcaagctgaaaccatcagttctacgatttaatcccgccattnctnatatctgcataccgaaagcatgattctcggggggaggaggttgcatgcttgcctgctacagcgggaatctgatccgtaagaaacaaccgccatccaggtgcttgggaaagcatcacctcttaccttttcgattctactctatccatttgtgggcggtaactactttgactgcgaatctcagtgctcgtcatagcaacactttgactgcactacctttaacagtgctgatgttttcttcatataatgtcctaccgaatgcgctcttctgactta

SEQ ID NO: 119944 - DNA, 127 bp, Glycine max
aaagatctagctgcgataccccaacaaattactcttcatatgcggactcagtccaccttcaggtactatcctcaacaggggcggctccaaagtgcctaacagccctaagatcgaggtattcaagacg

SEQ ID NO: 119945 - DNA, 175 bp, Glycine max
acctggtttaataacttgggccctaccactttgtacgcctacattagtttaaacaagcgagccttggggtaccaaacatactttacttgtacctgaaaatggcatttgtgcggttgacactggcggatttcttgcttattcaataaatccaagagtggtacattcattttttatt

SEQ ID NO: 119946 - DNA, 226 bp, Glycine max
  unsure (1)..(226): unsure at all n locations
aaacatggatngtcaagtaaaataagcattcacaactaactatgtacacncacaaaagtcacattcaatataagtaagcagaatatataataataaagaacaatcatcatgagcaatcaacaatcatcataactgtcaaacacaatcatcagagacaatcagaactcaatattaaacaatcatcgaaagcaatcaattatcatcattactatcatacacaatcatc

SEQ ID NO: 119947 - DNA, 120 bp, Glycine max
gcttctttgcattacttcatatggtgagtgaagttagactatgctgtacaaaaaaaatagtatatttttcactaatcattttacttgtcttcttctttaacaactctgtactgctttttt

SEQ ID NO: 119948 - DNA, 186 bp, Glycine max
gtaaattacaaataaaactttcacttggaccaagatcacaatctgcctaacagcatcttttacacttaaatcaattgaaggaggaagggtattgggtgcataacaaaagttaaactcgtttggaatcccaattaatggagatattagataggcattcatgataacttatttaagctgtttcttcag

SEQ ID NO: 119949 - DNA, 224 bp, Glycine max
cgatatagtatcccctgggttgcagatgtttttgaaagtgaaattctattttatatgtgacattgttataacaaagaaagtttttatatttatcttatttcttcccttgtacataaacaatataaattatgtgaccccctccctttacccttggcaggtgttgcaggactactgccagggtactgcttttgggataatagcggtttaggtgacatgtatgacat

SEQ ID NO: 119950 - DNA, 123 bp, Glycine max
ttctcaagggaatacagcgatgttacatagacccaatgttgcacattcaaaatgtactccctctatttgaataagagaaaaaatatctcactattcccacaccactatctgactgaaaaaact

SEQ ID NO: 119951 - DNA, 298 bp, Glycine max
aatactggcatactaaaactggtgttgtcgcgatagcgctttacgtcttctacgcgagcggctgtttctttatttggttacgactcaatgagcttgatttatgcgatgacgcttattgtctgcccctctctttctttttggacaggtataggacctggattttatatataattcaaaaaaacacggagtgcacaacatattcaataagacgacactgacaccaggtttaatactaggataaatttatttaaagaaacttttaccaatacaaggtcaaactacgttatttgcacacatt

SEQ ID NO: 119952 - DNA, 119 bp, Glycine max
tttgactatagtttccccagaagtatatgtttaggactactaaaacttaatgatgctgagagtaagacagtcatcacctaagccaaacatatacatttgcctaagaaggatgaatattc

SEQ ID NO: 119953 - DNA, 114 bp, Glycine max
accattgttaaccagcctgttttaatctgaataataaacataatatgagggccattataactttaatattgcattaactatcaatctaaagggcaaaggtaaaatagaaaatat

SEQ ID NO: 119954 - DNA, 104 bp, Glycine max
ttaaaattaatatacactgattacctttttggataatgatgacattacatctattctgatgtgacatataatgattgaattgatatatacatcagtgtctatgt

SEQ ID NO: 119955 - DNA, 217 bp, Glycine max
ttttttacatgataaggaatacggcaacatcgcaactcctttccagaaaggacctgtgtgaaatgaataaatgtaaacagagggacctaggtgcataacgaatcaaactcataaacttccattgcaacaaatgacagacgagagatggctggtcatcaaggctagccattgctctctttctctcttatcctacttaagtgagtgacttcttgcctcc

SEQ ID NO: 119956 - DNA, 228 bp, Glycine max
tgttgttcactttttacacccagcggtgcactctgccgcggcggcgaatagtctaaagctttccactgttctacgttctataagattttaagtcacacaccctggaacacgcttagagtatatttaatgtacggaatctgtaaccataaatagagtagccctacctttaccttagccccagactggccaacatgtgaataacgcttttgtttgtaaaagggctactta

SEQ ID NO: 119957 - DNA, 132 bp, Glycine max
aagtctaacacaaatactatgctattaaataacttctcaaagtattacttgtagtatgtgcttggagacatatcactttctttactcttcctaggctgaaacatcactgctaaatacatcttgtgaacattt

SEQ ID NO: 119958 - DNA, 98 bp, Glycine max
ttttgtatagtgcatgatggtcctcatgcactgagctaagcacagtattgaacatactcaaaaactgctattgtggattgcttgtacttataatacct

SEQ ID NO: 119959 - DNA, 102 bp, Glycine max
  unsure (1)..(102): unsure at all n locations
ccatgccgcgtcttagcagcgggctgagctgangtatgtgaccatacatgtgtcttgtggtgttggcatgggcacacatgttttcacatcacaatggcgata

SEQ ID NO: 119960 - DNA, 221 bp, Glycine max
ctttgctgtggcttttactggaagtcattgtggtattcatcggacttcaaataacctaataggtgtaatcaaaaacgctcaatgtgctgaatgaccgtcgattcttagtcttatttactcccccagtatagaacgctcacgtgtcttcaatcttttgcactacgtgttccaacctaagtccccttatgaggacagactcctgacttttgttaaagaagtca

SEQ ID NO: 119961 - DNA, 306 bp, Glycine max
atctgtgctacacgtcgtatccacctatgctaggcagagattgagagatactgacgtcctaccacgtattatactacgttatacctacaaagccctacatacagccacccaccacagtctatactgacattaaggattacgataacttgtgaagttaaaaagcaataaattgaattgttgaacgcaacactgacgacatgactgaacatgatatgaactaggagatctcctgttgactattgtttttgtaaagtcgtgaagactggatctggccggaattattaggtgggcagccgtacaactcta

SEQ ID NO: 119962 - DNA, 260 bp, Glycine max
  unsure (1)..(260): unsure at all n locations
acaagtcttgcttatgctctcaatgttgcctctgagtctntctttgttttgaagacccatctacatctaatggcttntacaccaacagacaactcaacgagatcccaaactttggtagatgccatagaatccatctcatctctcatagcattaaaccacannattgagtccttagaactcatggcttgtgaaaacgtcttaggatcantttcggctctaatgtgnagtctgattcttgtaggtacgctacataatcacta

SEQ ID NO: 119963 - DNA, 302 bp, Glycine max
cttgctaaaactgcctacatctatgccagcagagcctctcattcttatgcggaactaccacctttaagaggaacccttattctcacctgtctctagcgacctccatatgaaggagtgactttccacgcgtagctctaagtcatggtcaacacccctaaggtgaaacactcgaaggtgtggcaaatcggtatctataacggctaaacatagaattgtatgtgaacaactatgaacttgtcggccagagacgtgaactagctcagcctaaccatatactacaccatagttggtataaatgcact

SEQ ID NO: 119964 - DNA, 148 bp, Glycine max
caaactaacaaggcagcttcacatgcatacctacaaagacctaaacaattctacaaccacagtttactaaaataagggccgataatgtgaatcaaaaagcattaattaattttgattaaacactatgcctaactaatttattaacaag

SEQ ID NO: 119965 - DNA, 504 bp, Glycine max
  unsure (1)..(504): unsure at all n locations
agtcacctgcggcatgcaagcttgatngagggctaattgacagaatctgtttgtatatagtaatattcatctcgcatataaatggagctatagactagtgccacttatcacgctgtccaattcaactagggttcacatcgtgaattggaagggtcattttctaaatcgtgaatcgaattgtatcgcgaactgtatgaattataatcaataataaaacatagcatatgcaactaacaaatacatattaaagcacatattcatgatcaataactaaaaaaacataactggtggagcatgagatgcatgagttctgtaaaactctgtttgagtggcctctattgtagttgaatgaaaatgaaactcttaactccttgttagagtgcctgccagtatttgattctcggtttcatatctaatttctaaaccaacatgttcggcaacatggagttcaaatgttttcaattattttgaacaaggtcctaccccaacgtgctaccccactac

SEQ ID NO: 119966 - DNA, 427 bp, Glycine max
  unsure (1)..(427): unsure at all n locations
ttacccgttcacaacccacatatacttctctatctctcaatcctatttaacagatgtataactagttccctccattttagtcatttcagcccaagtgaatatagggccttaactattctggggccttctagtgtaaaccttgagagatttangggtcctaagggtatggggcttgtagtcctatcacattcagtcaactaggctcattttcacattcatttgtcttaagtagtaaataaatgaaaggtctcatgtgaccaatatgattccacaagttaagtacaaaatgaagataagaagtactaaaaattcattccaaactaattttcggttcatatattcaaagctaacaacacgattcatatntgtgcttctacatacaagcctagctcgtaggctctttcataagaattgatatctgctcaca

SEQ ID NO: 119967 - DNA, 346 bp, Glycine max
  unsure (1)..(346): unsure at all n locations
ctggccgaataaatggaacatgccagtttcgccccaacaaatgttcgtcgagctcgcaccaaaaaaacctacccgacctacatttgtaattttttatgcaacaccaaaacagaaaacttctctgtcgtaanaaaacatatcggcctagagcgtttctaagaaaaattgcgcaatgcctgttgaaaaatatcagtccgggctatttcacgaccgatgtcggcaatgagtttttattcaatccttgatgaactgcatcatgcagtaggaatgttcatcgcgtcatcgatgatcttcttttaatctcgacgtcattttcgacagactnactgtatttttcatcatatct

SEQ ID NO: 119968 - DNA, 228 bp, Glycine max
  unsure (1)..(228): unsure at all n locations
ctattctcaattgatccacctctcatggagcggcatatctcgttgttcaataacctctcatatgtgcatcaaagctgcattggaatgcgaaagcccactccatatttgattagacctgacattanacaacaaataaacgtacaaacaatatagtgctgttgaaacctacccctcagtgttacacatatggcttttctatgaacacttgctttacacttaatcctgagt

SEQ ID NO: 119969 - DNA, 460 bp, Glycine max
  unsure (1)..(460): unsure at all n locations
gaagctcatcagaagccatacaagacttgctcaatcgtgcttgagattggcatggttgtgctagttttttattctgagttgaatcaggaggaagcaaggtgcatgaatgtgcgacggactttgcaaccgattattacattattattttattgtatgtgggctagaaccctttttagccatgttctttagataagtttttaggcattgttctagagtgttgaactttgcactaattggcaacttacagcaagagcgagaatatctgtcttcctttctctcttcttcggatggatctttttcttttcttatttctatttttctattggaattgatggctacctatgagtaaatctctcttcttctaggaatggacattatctctattaattattaatggaagagnttaaatttatctgtgtgtgaatggttttagcgatatctcgctattgnngttatcatg

SEQ ID NO: 119970 - DNA, 93 bp, Glycine max
ctatggagcgatacattcctggcggcgttacacccggcgggaaacctggtcccaactaatgctggagaaatacccttcgcagctgggaatatc

SEQ ID NO: 119971 - DNA, 258 bp, Glycine max
actgagcatgcagctggaactcttctactcataagaatattgtgtgtatcttcctgtgctgcctactgggtagcacatccactaaatgattccacgctacatgtggatggcgtataccatgaatgcctgcagggccagcctattagccttcttatggttcttgagagctgacaacaacttctcctcttgcgcatcagcgacgggatgcagacataatcactcggaagactcttgctatcatcccagtgagcgtatttt

SEQ ID NO: 119972 - DNA, 281 bp, Glycine max
agaacctgtgatgtacctaacaggcgagctcctggcagtctacagattaaaggaacaaagaccacaaagcaaggaggctcgtggtggctggccagctgagaaacttgattgatatgtgagatatggtctctggtaatcgattaccaaaggtgggtaatcgactacaatgcttaaaaatgaacacaggacgctaagatggtctctggtgatcgattaccaaggggtgtaatcgattaccacgccttgaaatgaagtctcgatgctatggagcctctgtaatc

SEQ ID NO: 119973 - DNA, 239 bp, Glycine max
agcgttaccggcatgcctttacaatgatatgcttaaaaatgtctgtgcttgaactactatgttatcgagtctcaatagtaggatgtagcatatgatatgctcgggtagaatctgacatatttgttgttgggcacacacgatctaatcgagaaatacttcaccatatctagcgacttgaatgacacttattggatgggcatctctgcgatgtctgagaccagcaatacatacttaatgtg

SEQ ID NO: 119974 - DNA, 338 bp, Glycine max
gcgtctcgatctattgtctacccgagtcggacatctgtgttcaacgttatgaccatgttaatttctcgagtgctttcgtttttcatttcgagcatctcgatatgtgatgtccagatatcaaacatcagtgtgaaaagttatgaccatttcaatttctcgatagcttacgctgtataatttcgagcgtgttgatatattatgtcctcgaatccgacatatgtgtgaaaagtcatgaccagtcgaatttcttgagagcttacgatgctcaatctcgaacatctcgatctagtatattctctaatcagatatatgtgtgataagtatgaccgtcgaattct

SEQ ID NO: 119975 - DNA, 456 bp, Glycine max
  unsure (1)..(456): unsure at all n locations
agctntacaatcccactatagatccttatgtgatatgataaatgcgagatttcttgaggaagcngagtctgcgaaggaagagaacatatgacatgttgtctttgatgataaacctgtgtttggcagtgctcaagtccaaatacctataactgttcaagatataactcctctaaccgaaaatgatgttctgattattgttgatgaccttcttcaagaacaagataacaatgaggttctcccttgaatatctatacaacaacctcaatatagtgccattaatggagatctgttcgagagaggagaacgtcactcctaaatgatnatattatctctctccaagaacattangatgccatcggtttagcataggatgatgcaatcaacttctggcaagctatgcataactctaactctcagaatcgggtcgatgccatgaaggatgagatgaaatctatg

SEQ ID NO: 119976 - DNA, 468 bp, Glycine max
  unsure (1)..(468): unsure at all n locations
tgtcgcttcttccgaatcctccctctctaactcaggtcatatttttcctttccttcatantttttatcgngatgtgtaacaattcgcgaaatctgatgcaatcttttgtctgtacgatggtgttccttttggttgctttaagatgaatctggttaatgatgtagcagattttgcttgttttattgcgtgaggctgttcttactattattttnttagtctttagggtgtgctggnttcagatacaaaatcaaattagtctgttgctgtttgtactgtattgaatgttattgttggtgccaaggttttaaatatcggtcacggttgcgtcgcatttgttaatatcgcagcanatcgcggacaaatgcggccgataccgtcccaattgtcatcgcgttgcagtcgcagacagtttaataaccttgatgctgtgacccacatcacggtcacggaccgatatttaaaaccttg

SEQ ID NO: 119977 - DNA, 411 bp, Glycine max
agcttagccctagaggggatggaccttctcatgttttggagaggatcaataacaatgcctatacgttggacctccctgaacagtatggagtcagcaccactttatacattgttgatctaactccttttgcaagaggagctgatattgaggacgaggaactaacagatatgaagtcaaatcctcttcatggggatggggatgatgcaatcctccctaggaagggaccaatcactataaccatgatcaagaggctctcagaagattgggctagagctgctgaagaaggccctagggttctcatgaaccttatggtagatatctgagcccatgggccaagggtgggtccaattatctcttgacatattagactaggatgtcattatatttggtccttgtatatagggctccata

SEQ ID NO: 119978 - DNA, 436 bp, Glycine max
  unsure (1)..(436): unsure at all n locations
cttattagatagttgagattggcattttttcttgcacagttgtttttcttgtagcgagaacacatntcactataatgaatgtacaatattaacaaaggacttctacacttcattatgattatgatccttgcttgctaagacaagagaatgactcattgtagtgagactctggttaactcatagttgtcaccttgtaggttcgctatggcgagatgtagcttcattatagcgaatcttcacaacttccacttgatcattggtcccctttcactatggcgagagcccctttagatgtggcaagattaggtctacaactcctcattccttaaagcacaaaatcttctcttgtaacatccatatttatcacataaacattaaaaatgtctttgtcatttcttaaatgatcttatatagattatttacaacaacaacaatt

SEQ ID NO: 119979 - DNA, 382 bp, Glycine max
agctttactttgtggaaggcggctatctttttcttttgtctccaacgcgaacgtttgaccattgttcttccttccgcaaagctccttatcatgtctgcctgagtgggcttatagcctaaaccatacttaccacgattcccttgagatgtataagctagtgatgccggcattggtatttcctaacccataccgggttaataacgatccccaacataactcgggcataattaccgctgataagacagacaaagttgctcagaaggattccacgaggaatgctaccacttaataactggaagcagttctaagattgtgctgtgcttcacatacgcatgaggatggcagctaccagaatcttctttctgaacaagacagtgccctc

SEQ ID NO: 119980 - DNA, 412 bp, Glycine max
gcagctgaagtgaaaaatatgttttttaaaagttgaaagcaaaagctgtttatgactttatgtcggccaggaccttttaacagtatacttttgaaaaacttaaaccacttgaaagagtcaatccattaaagagtactctttgatttttcacaaacatcattggaatcgattaccaaatcattgtcttcaattacacaaagctcttatgagaaaggatgtgactcttcacatttgaatttgaatgtcaatgttcacaggcattggtaatctataaccaaaacattgtagtcgatgacagctgtctgaaatcaattggatcgtgaaatatcattcgaaaactttcaatatcattttgtactggaatcgaaacaatagttggtgtggatacacagagtaaaactcttcggaacat

SEQ ID NO: 119981 - DNA, 422 bp, Glycine max
  unsure (1)..(422): unsure at all n locations
attcaacttgttcacaatgatgttaatatcactgttggacgatcccctgatgattatatcatctacctaaatgagaataatcaggcagcagccatgtttgtcgcatatgagaagagacggatcacacttggattgttgcaaacctacggagatgagagtatgtgtcaaactctcataccaagcccttggggctctgtttanaccatatattgccttgtgaagtttgcatacaagagtggtatcaccctgaataaagccttgatgctgcttcatgtagacatcttcatggagtcgcccatttagaaacgcattgttgacatcaagtagaataacgagccattcggaattaagagctatggtgaagacagatctcactgcgattggtttaccactggagagaggtgcactgaatctcaccatat

SEQ ID NO: 119982 - DNA, 393 bp, Glycine max
  unsure (1)..(393): unsure at all n locations
agcttctatagaaagttcgttcctaatttctctacaattgcatcacctcttaatgagctggtgaagaagaatgtnggcattacctgtggtgaaaaacaagagcaagcctttgctttgctcaaagaanagcttactaaggcacctgttctagctcttcctgcttttctaanaatntgagctagaatgtgatgcctctggagtgggagttggagatgtatttgtacaaggtgggtaccctattgcttattttagtgaaaacttcatagtgccaccctcaactaccccacctatgataaagagctttatgccttaataagagccctccaaacttgggaacattaccttgtttccaaggaatttatcattcatagtgatcatcaatcacttaagtag

SEQ ID NO: 119983 - DNA, 504 bp, Glycine max
  unsure (1)..(504): unsure at all n locations
gtctaaaggaagtgaaagaattagcatgggtagaaatgtctccacattgattnggtaatctgttccccaaatccctaaaaaatgtaaagatccangtacattctccataccttgtattatagggaacagtaagtttgacaatgccatgctagatttaggagcttctgttagtgttatgcctctggtctattttaattctctatctcttggtcctttgcagtcaactgatgttgtaattcatttagctaatagaagtgtttcctatcctgctggtttcatagaggatgtctttgttagagttggtgaactgattctccctgtttattcttatatcttgaatatggaggcgggattttctcaagtatcaggtcccatcattctaggcagaccttctatgataactgctagaactaagatagatgtatatgaatgcacactatctatggagtgtacggatataactgttcattttacattcttgatgccatgaacacccacctgaag

SEQ ID NO: 119984 - DNA, 294 bp, Glycine max
tggggttggttaataaatgcccccctttttggataaaatatgcttctaaggattgttgatataagatgatgcagaacactttgactatgccttttcctgtgccctttgtctagtcctgggcaatttttatgtatacaagtctactattgaaccaaataaatagtaaactgttggtcttggggacttcacaccttaacaatataagtgtaacattctgttctgaagggacggcttacacacatttttgcttactctagcttctcgacaagttattttacttgtctcactttccat

SEQ ID NO: 119985 - DNA, 385 bp, Glycine max
ctatacttaacacgataagacttataacactacaaaatgaccagtaattggaagagattgatcaatttacacaagtgttatacaccacagttagttgtatcaatcgactaacaactccccaaatttacagtgttgcttggcctcaagcaaaaaaaaatagttcacttgtccttgagtgacgataacatgcagcgactatgtacaaaggtgtatgcaacaaacagtactgattgcatgataagagaatgaagcattatgtactcatcacttgtctgtcacaaaatatgtagttattcatagacaagaatacaatgtaagctatactattagatgatattaatcataaggcagatattaaggaatagtgcttaaaccacagtctcac

SEQ ID NO: 119986 - DNA, 255 bp, Glycine max
  unsure (1)..(255): unsure at all n locations
ttattagatatacataatggaagaaggatacgagagagggggatctcatcatttgtagattgagcattaactatttgtgacaagagaaatcctttgtgaangggacacccttgaaggagagtcttctctcttattttctgtacctttcttactagtcaataaaattcgttcttttctttctatttgaagtcttgcgtcctaatagataactcatagcgctggtgttggattgattgtgatggtggatcttctatg

SEQ ID NO: 119987 - DNA, 415 bp, Glycine max
  unsure (1)..(415): unsure at all n locations
gctgcagctggaagttctcatgataaaaataaatctttaatcatcttcgataatacgaacagaaggccataatggccaataccactcaggtcaaaaagataacatttacatattaactttcttttttaataacataacattaccgtacgtcaacgagaaattaattaataaaataattttctctaagtggatgaatttcttcttagagattgggaaataaaatatcctttcatatatttctattacaaatgaaaatcgagctggccaataataataatactaatatataaaggttaagcntctttctctcatagtaaaacaaaagaggacaacgcattgcacatgtttagagcacctaatcggcgtaaccgtagccttcttccatagcctgaacctcatttgaaggtcctcatat

SEQ ID NO: 119988 - DNA, 247 bp, Glycine max
  unsure (1)..(247): unsure at all n locations
gatgcaaagactatgggaccaccccagtagaatggatcccagggtgacctaacaaacaattataagcacgagttatatctatgacttgtaaggtgatttgaaacgtgcacgaaccactctgaatcatgagaatcaattcccctctcacatcacgccaactatcatcgaaggctctaaccaccatatagctttgcctcatgtatgacgcatntaatgacaacttgtctaatgtcgtttatgcatgaca

SEQ ID NO: 119989 - DNA, 400 bp, Glycine max
ggaaaatatatacatttctgtaaaagtcttctatacaaaagttagttgtataagatgactaatagccatcggacttgatcgtctctggatggcaaagaagacttaacagtctaagtcaaagacatttcgacaagcgggcagatgaccataagttgtctttttgtgccaatgtactcgcttgtctctcgatgacaaaggagactgtaataatcttagtcgaaagacattgagtcttctacaagagggtagatgaccatatttgtctttgcgtgccaaagggttcgcttgtctttggataccaatggagattggtattgtctcagaaagtcttttactaaaatgcgaacatgcttagcaaatatgattacctccatactgatcagagcaaccatatattttg

SEQ ID NO: 119990 - DNA, 260 bp, Glycine max
  unsure (1)..(260): unsure at all n locations
atgacctttccaagcacaggtacaatcctgggtggagggatcatcccaaccttagatggtcaaatccttcacaacagcagcaacaacaacaacaaccttattttaaaatgttgctggccaagcagaccatacgttcctccaccaatccagcagcaacaacagcaacagccctagaaacagcanacagttgagggctctncacanacttcccgtgaagaacttgtgaggcanatgactatgcaaaacatggcagttcaata

SEQ ID NO: 119991 - DNA, 383 bp, Glycine max
tcataagactccattcttcagagtacacaagtgtacacatcttcttttataactggtactttcgaaaaagctttcttgacgaaacttccattgataaagctgctttgcaataactcaccttgagaagtaaaggcttagttaccacacccctctataactaatctcacctccatgagaagcttccgtgagaagattcccaagtaaatagagcttagctacacacacccccttatcgtagctaagcgcacgcctcgccaaaatacttgaaaatataaaataagtccctactacaaagactactcacaatgccctcagaaacagcgtttaaaccctatcaactagaaagcgcaaatatcaggtccacaagaatgataacctattct

SEQ ID NO: 119992 - DNA, 487 bp, Glycine max
  unsure (1)..(487): unsure at all n locations
tggcctcaacttgctagtataactatctgaataatattatgttatcccgcatttttacttcaaaatcaatgtgaatcaaattactcccgcattcttttacgactcctcacgtttggtttgtttaagaaaaaccgcgcataactataacgctgctccacggcgatccctatcgcaccagatccaaatttacgacgatgggtgaccaaaatgagatgcatgatcagatgaaagccgacatgtcggctctgaaagagcaaatggcttccatgatggatgccatgctacgaatcacacaactaatggagaataacatggtcaccgctgtcgttgttatgtcggctgccgaagcatacctaactctcccagctaccgcgtaccatcctctcccgaacgtggtatgacgagaanaaagcacactggtgcacgtcagtaaccctcatctangatacaaccgagtggctcatcttatggataccacctaattcac

SEQ ID NO: 119993 - DNA, 378 bp, Glycine max
  unsure (1)..(378): unsure at all n locations
aagacgcccatcaacattgcactagatgtgtggatcgttacaagccaagtctatggtgacgccttatacgctatgccacgcttacccatcccatctacaccttgagtggacattantatggactctgtcctagggcttgctagaacccatataggtgtagactctatctgtgatgaggaggataagactagcaagatggcacactacataccatgccacatggtagatgatgcttctcacatatcataactactcttaatgaagtcgcgatactccatggcttgcctatgaccattgtgtcatataaacatactacagctcttatccacttctggactgacctatgggctaagctaggatctaagcttcgtttactac

SEQ ID NO: 119994 - DNA, 372 bp, Glycine max
  unsure (1)..(372): unsure at all n locations
agctngcatgaattacatcatacctctctctcaagctaattcttcttgataacatcacaatcttcatgagttacattctccccctttgtgaagatgacaaccacctgtaggttatgagccacatcacagagaaaatatctattcgcatataggtcactcccccttggtttgcaatgattgcttatatgagacagtagaagatttatattgttcatatgtaaacaaattgtctcataaacaaaagataattgttcttactagtttatactgtatctttctctcccgctttgtcaacatcaaaaacaaatcatcaaaatcttgatgatttacaccccctctccctttttaacctccttcgtgcatgggttgctt

SEQ ID NO: 119995 - DNA, 489 bp, Glycine max
  unsure (1)..(489): unsure at all n locations
acatgatactcagctcctatgggctaaggcccggctaaaacatctctttttgatctttaccccatttgagttttgctattctcttccgaaatgtcgtgaaatcttacaagattgtgcggcaattggctttaagcagctcaacgtgaccagcaaaaatctgcatgttgacaaacaattatccccagaaaaaattaaggtatgacagttgcccccctttacttatcttttattggagataaaagggaagtaaagataagacactaatttcgttcgagctgaatttccacccgaccgaccactagctcaatcattgaaacctgtcaaaagaaagagcataaaagacattatgcgcatcagcaaaagccttagtgctttgaaatngataaaaatggataaccgtgatggtcttcacatgctatcggacttgctcgtctcgggataacaggagagacttcagtagctttggtcgacagacatatagtctttcga

SEQ ID NO: 119996 - DNA, 395 bp, Glycine max
catgcaagcttgaagacaagactatacgacgtatcttctctgtgtatagcaacatcatcaacggctaccgtggctacaacttgcatactaacacactcgccatcatctcgagacgctgaagtcgaagaacatgcttcatggaattgggacgaagaaaaagaggataagaacgaccttatacccgctcaactacctcaataagaacatgaggaagaacacccgagtgaaccaccttcacctccatcactacaccaggatcaagaactatcgacacctgagtctactccaagacgagcgagatcgttggtcgacatatatgaaacactgaacttggccatacttcgaactggaagctctgaagacaccgcaaatcacgaagtatggtgcaaggcaat

SEQ ID NO: 119997 - DNA, 487 bp, Glycine max
  unsure (1)..(487): unsure at all n locations
tcgcataagtagtatcaatgctnctctgagtgaccaatttttttagttgttatctcctaacccttcttgtatcttcttacgcttataagagctagcttatctaaaattattgaaccaccttcttttttatgagaacatagtaaaaataatatggccaaacatacaattaggctacgtgcacggaaccatacaggaagatgttgcacaatttcttctcccactatccttttctattaccctataataaanaataataatttcattggacacgtgtcatatcatgatttgttggtttcaactttcctgcgtattccatatctggcccttgtcttctttgtcttttcctgtcaagtgtgtgttctgtctcttgcgtttgcggctgcaatattttttcttctaacgatattcacttgggctctggtgtgtgattagttatttaataaatagttatctttattcttagtntaatctattgataaatatattc

SEQ ID NO: 119998 - DNA, 490 bp, Glycine max
  unsure (1)..(490): unsure at all n locations
agctngctcctngngtgtctatcttatcatctcatattattctatgactnngttattaactattcgacactcagaaatagtacaccgcattttttgttcttgtataattttgtcatcatacttatatttctttatggctcaatctgattctaatatttcttcaaactcctgctgcatggacaaagtggctgagtaaggcagcaaaaatagtcataggtaataatataccttgtacacgatgtttatatttagcgtgtgccttganatttatcgtcttgtacaatatatttcattaacttgaataaccaagcatttaatgatattttccttctaaacccctgatttagggattctttctcttaaaagtatgacaattgaaaacgcctctaaatattcatttgattctatcaatgcaatatggatattttcccgagtcatgcactctaataggaaagagcatatgccttaaagtatagcatcttaaatctat

SEQ ID NO: 119999 - DNA, 261 bp, Glycine max
  unsure (1)..(261): unsure at all n locations
aaacatgaaaacanatggtatgctattttgcagatcaaaaagtatggtgaacgcatatgcatgatgatgccatgactcatgcaaaatgtgacgccggaatatgataacggacaaatgcaggatatgtccattatgatgttatgaagagatgcttatgcgatgcatgatatgaatgcattntacggacacgagagctcgcagaatatctcttttacttgncatttgacgcgcagtgctcatgtgtcaattaagaagtgatat

SEQ ID NO: 120000 - DNA, 499 bp, Glycine max
  unsure (1)..(499): unsure at all n locations
agcttatatatataaagagtcagtcccaagatactcttatactnggtcacaaatcaccacaaacaagtctatagataacaaaggaaagagcaccttgtaatatgaacaaattaaataagggagaaaactaagcagaatgacgagcaataaaatgaatgatgtgatatattgaaaaagtcatcggatcaattgaaaaaattaagataaaaaagtttaaaattaaagtttggagttgaaattatggatgagaaaaaattttatactgtttcattccataacacgttgttgttcgaattatcttaaaataattaattaaaaaattaataaatttaatataatggattgtgatcatatgactatataaattacacatttaatatataactttttttctcctacagaaatcagagatatacctactggttaattcagctcatatntaattaatttataagactcgatatccatgccttcacattctgcatatttaaatctgaac

SEQ ID NO: 120001 - DNA, 354 bp, Glycine max
  unsure (1)..(354): unsure at all n locations
ctcanacaaacaaatcaaacgtaacaagacaattatagttgctgtttgaatacctcacccactcaagttgatcacacaattatggccacaacaaagaacaattcaccaatatgtgtaagggaaggctagagagacaaggaataggtttaccaagaaaaatgcttacaatagttttatgcacaaacgaacgaaataacattataatttaggaatcaagtaacaatccttatgcaaccaatatataccttaagaaattttttaaagtcttcatgcatgaccattcagccaatttttttattaatttgctatacaaatctttttttaacaaaaatataggctaactttgcaaggtca

SEQ ID NO: 120002 - DNA, 470 bp, Glycine max
  unsure (1)..(470): unsure at all n locations
ngcttaancattttaacttgatccttaagagtgatagatntggatgaaaagaaataatcacaacacgaatgattaaatataattaacattgtctatagaataaaatataattaaccaagtataatgagaatcatctgatagaagaaagttatgctacacgtatgtgttattcttctgcatggatagatcactagctacaaaacctttgtcgttttctcatcaagccattatatatatatatttatatatatatgccagcgaaaaataaaagttatctaccatcctggctttatatgtacacatttctcttatattttgtcgtcgttcacatctagcgcgtatagtcaattagctccctttaattatccaagttttaaggttctaattagttctcgtacntgtggaataatgggacaaatttataattattatgggaacagatttgagtcattgcataataataacaatac

SEQ ID NO: 120003 - DNA, 431 bp, Glycine max
gtctaagtaaattacaagaaaatgatggttcatatcttctaattaagccacagccagcttgaaagggactaccatatgatgtaatgtcccaactagtagtataaatctatctatatccccaacaaaaaggtgaattaatgcttaatgatctttgcatcatcatcttaactccaagcagccataagatacctttgggattttgtgttaatatatgaaatcaaatacatatataaaaaaatttataataattcacataccgcactcaattaaatgaattaaacatctttataattgaactagaataaataaaaaaagaaaatatcactttgatagtgatcataagacattgtgagttgttataactcgttaacagtgggaatagcacatagtgcataaaaggtatatgatattaatacaacgcattgataaat

SEQ ID NO: 120004 - DNA, 402 bp, Glycine max
  unsure (1)..(402): unsure at all n locations
agcttctanactntatacaagaattaagctctgataccatcttgttagacaagtggcctcagatatcttaagagatggggttgaattaagataccacacgactattccgtaattaaatattctatattgatattaacccacatcccaagaatctatctaagatgagtttctcattaagtatttcaattaaacttactgacgataagctatacgcattaaataaaagacgttaagggaagagcaatcgcaaactcagtttatactggttcggccatacccttgtgcctatgtccagtccccacgcgatcctgttgagagtgccactaactagcacaatccctctgcgagttctgaaccatacaacgaacactcttcttttgtgtcaaatcgcatgacaaaaga

SEQ ID NO: 120005 - DNA, 504 bp, Glycine max
  unsure (1)..(504): unsure at all n locations
tactcagcttatatagcttggctganactcatgaaggaatttgtagttctcaccaagctggtgaaaagatgaagtgaatgttatttcgaaaaggctattattggccaaatatttgaaggatcgcattaattatgcaaaatattgtgaagaatgccataaacatggtccaatacaacaatgtccaacaagtgagttacattcaataacaagaccttggccttttcgaggatgtggtttagatttgataggtcaaattcatccaccttcctcgaaaggaaataggtacatcttagttacactggattattataccaaatgggtagaaacaattcctttgagaaatgttgatcaaggggacataataaatntcttaaaacaaaatatcattgtgtcaattggtatccctaanacacttacaacagattaatgcatatntttatgggtagaaaagtgattcanaatggccaattntgaaatatctagttataacttctactccttata

SEQ ID NO: 120006 - DNA, 432 bp, Glycine max
  unsure (1)..(432): unsure at all n locations
ctgcagctttaaggagtttctaagaaacttctaaggaagctacctagtctatanatagaaacatgtgtaacacttgttgtaacttgatgaatgagaggtctgtgagacatacttcanaggttcatttctctcccttttttaatccttccaatttcgtgccccccctctctctgtctcttcctctttttttccttcattgaagcatccttccaagcttcttatccaaggctcatcttgggtggtgaagctcctctttcatgggctggtccctagtggatggcgcctnctctcacctcttctcctttttcttccgctgcatctccatggtggaaaatcaccattaaagggacctcatgaagctcatagatccagcctccatagaagccccacaagcaagtttccatcacgtaggggagcaagatttcattacta

SEQ ID NO: 120007 - DNA, 300 bp, Glycine max
  unsure (1)..(300): unsure at all n locations
ccttatgaactaaaaaagggagaagaggaagaatggaggttggaagtctcaattatattatataatatatatatatattgtatataatatatattaatatattatatatactcttttgattcacaccccaattctctgaattttcagaaaaaagtgtctctctcatacaacaagaggcctatgttatatgcatcccacatngtggcaaatgtgtggaaatcttcaaatcattatatatcggtctatctcatatacaaaatcgggtgtcaaacaagccaccccgacccacgtggactggcc

SEQ ID NO: 120008 - DNA, 281 bp, Glycine max
  unsure (1)..(281): unsure at all n locations
tctgcaagagtattccagtgttgtaaatggttatctaacagacacttgacaattggatgcagttctagggattntgatcagcagagtctgatgggatggtgtcagtgagtgtttttattgcacattcaatgcatggatccatncatgacatgtcaagtgtcttttcagaagatggtcctgcattctcattcttggctttaatcagtttgtcataccgcatgttctntggatacaaggtctctaagatgataccacgcacctaacatcttgtttctatatcc

SEQ ID NO: 120009 - DNA, 219 bp, Glycine max
  unsure (1)..(219): unsure at all n locations
tgtacatattctagagatagccttcttcataacacaaaattcatctaccaaagtcactacataataaccatgaattggagaactatacaagttttggaatatgtgtctatacaaaatgagtctataaggtgactaaaaactccncaattacagtttgcttgtcgcaacaaaaaagacagctacttgcctcaaggcaagacagggcatcaaagaaatggg

SEQ ID NO: 120010 - DNA, 317 bp, Glycine max
  unsure (1)..(317): unsure at all n locations
ttggttggtttttttagaaatgggttatgatcccaacaatggttggctcacggtacctatcccaacatggttggctcacggtacctaacacatgcaactaagaatgtagtgtgaattttcacgctaccccatttttttgttttgttttgtagagtaaaacgcaaggatcatgcatgagcaaacatganaacataaggtgtgcagtttgtagaacaacatgtatgttgaacgcatatgcatgatgatgcaatgactcatgcaaaatgtgatgctggaaacatgataccgacaattgcatgaacgatatgttcattatg

SEQ ID NO: 120011 - DNA, 227 bp, Glycine max
gcataaaaaacatcgccgactacataaactaaactcggaaagacatttgtttaaggcataggttttggacagagacgctctgaacctcatcaaaatatgaggataggtgcctcctaacaatggcactaaacaaatattggccaactcctacagcttaagaaggcgacaatatgcgcttctcagagccatgacaagtagatcacaggctgaaccaacatgggtaattg

SEQ ID NO: 120012 - DNA, 362 bp, Glycine max
aaccgtgtttatttcactatcttactacaaaaatagtttttatcgtatttggacgctcataaccctcaatttatatttgaaaaaacaataccccacaactatatacgagtgcacttactcgtgaccacggagaataatttaatagacaccattaaaatttaagtatattttagtctatatgagggaacacttgttgtgcaaacaagtgccaactcaacccaatggaataggatcttcattaggttgagtcttatacgcgaacagaggatcatgacttatgagctcgtaggctgctttaggtaggtcatcttttttatctcatgcatacaacctatatattagccaaagccactttttctaaa

SEQ ID NO: 120013 - DNA, 431 bp, Glycine max
actaagctagccctaagggaggaccttaggtttggaaggatattaacaatgcctatatgttggacctcccagaagagtatggagtcagcaccactcttaacatttctgatttaactccttttgcaggtggagctgatattgaggaggaggaactaacagatttgaggtcaaatcctcttcaaggggaaggggatgatgcaatcctccctatgaagggaccaatcactagaaccatgagcaagaggctccaagaagattgcgctagagctgctgaagaaggccctagggttctcatgaaccttagggtagatttctgagcccatgggccaaggttgggtccaattatctttgtacatattagactaggatgtcattatatttggtccttgtatatagggctccatattgtaagtagggtaccctagaaatat

SEQ ID NO: 120014 - DNA, 391 bp, Glycine max
cacttttcattaaacagccttctcattacattttatttgtgccagttcatggggacgacatcatctatggctccactaacaaatctcttcgagaagatattgtgtacaacatgcacggggattgtgaaatatcagtgatgggtaaattaaattattgtcttgttctccatgtgaagcaaatggaccatggaacatctctccatcatagaatatctgcaggaactcctcaaggaggctgcaactcctacggctactaatcgctaccttagtgtggatgaaaaagaaaaatcaattgatcaaacaaagtatataagtatcataggttccctactctacttgactgcaagtatactggacatcatgtctagtggttgcatgagtgaacgttatc

SEQ ID NO: 120015 - DNA, 378 bp, Glycine max
  unsure (1)..(378): unsure at all n locations
ttaagcgactgcagcatgcagccttaacaatccaatatcccaggagtcttgttaatgataagcctttatgggacctgatnatcatctgccgtagagctcatataaacattctccccaaaacttgatatgatattcgaagaatactcccctgaacatattgtaaggaatatcaagggacctgattgcacttgatctgctagacatacctgtcataataaaattacgctattaagagccacatcaataaacagaggaaacttatgtacttggctatcggtctaatctgacaaagtatgtcattacaatgctgctcctatacaccaaaaaaaacgaaaaccgcgactttgtattaccttagacaagacgccctcttcttct

SEQ ID NO: 120016 - DNA, 430 bp, Glycine max
accttggtagtgaagccaacaacaacattgatttcttcttattagagagctatcatttgcattcaatgattgacttactagctaattaaacctcgtgatgtggacatggagatctcctctcatttccatattaatttatacaacttcattatcatgcaaagaggataggttaccaactttgactcatagatattcttgagcttctctcacaatgccttccgtgttgcctccttcaacacattgtcgtttatcctgggagtaaggactaaccaaatcatgctcacaacgctcctttggatcataatccacttggttgtcattatacaagtcaggtcttcatcttctaactgcctatcaagaccatgctgcaccataatgtcttgaatagtactctgccaaatcataatatttattcttccatatcaaaatg

SEQ ID NO: 120017 - DNA, 472 bp, Glycine max
  unsure (1)..(472): unsure at all n locations
agcttagcataaagaagtctgaaggtgcacttattgctatatcccgcgctaagcgtgaagtcagcgtgaaaagtaagctaccttaggcctataaaaggagtagcaagcagaatggaaagacacacggagtctaagagctctctattgaagtaatccaaagtctaagcctatttcataggggaaacccttattctttagccattcctttctttctttcttctattcatccaaccccttcttccatccatattagcccctgaaatgtaaagcctttcatggctatgagaggttaaacccccattggtgggagcctggcatgccaactcttgtaatgtaactctatctattatctatctaatgcaattctatttctattattcttctatgtgcttttctgtttattatggcctgcatcatccatataatattagaggataatgcatcgaanatgattatcttctacagaactgag

SEQ ID NO: 120018 - DNA, 469 bp, Glycine max
  unsure (1)..(469): unsure at all n locations
acaaatctcactacttggtctggctgtgcatctcctgataatatttctgaagcatgcctgatcaaatgttaaagtactttcaaaggtataggaattgtttaccctgatttatggcacatctatattagatgcttactatcatgattgtaaatgtaaacccccatctgatcatcatatctgggtcataactgttgtatcaagaactatacgccttgaataagtcaaattaaaaatatggtccttaccccttactatttcgtttcagtccctctatgaaaaaccctacattgtagttcctacgtcaaataaatgtttataaattgattcttattgttcgcaaagtattacggcattagatttggtcctattgcnacatcattattccgatagtcctacataatgaatttaccttcattgacatatacaaatcatgttggtcctaccctacatatattttgtttggcctatt

SEQ ID NO: 120019 - DNA, 489 bp, Glycine max
  unsure (1)..(489): unsure at all n locations
ggctgcagctgtggtagcaacttgagattattgatctctactgattactaaaattatcagttttcttcaatcaacttctggtccctttactctatatacacctgttgttattgatctccactcttgattatattatgtaattatattccggccagaggtgtatcacaaattataaaaattaaaattagtgacttcagagggaataaaattaaaaagtataagaatttactttccaattttcaatcaaaataaaaatttatttatgatctttttaaaaataagtgaatgcacttatacactcttattataatgtaggtctaccactgattcagttagttagactgactgatcagggtgtatgtgacctcaattaaaaaacatatatatatatatatatatatatatataaatataatatgagaaaaaatcatgagataaactaggttatgttatgataaactaaaanatagctacatatcatattactta

SEQ ID NO: 120020 - DNA, 184 bp, Glycine max
aattgcaaggaacactaggcggatccttcacacctacaaaccctatgccggctccacagcatacgaaatctatactcccacatcgtttgaaccctctggaaacgatttagaatcatactggaatatataaaggaaattctttgaatgacagacatcgccttacctgactacaacaatactccat

SEQ ID NO: 120021 - DNA, 358 bp, Glycine max
tgcgcaagtactacactctttgaaagattcaaccaataactcctttacatcattattgtcatgatgagaattgattcattgatttaaaagttatcaacctcatttcgttgtggacatactgcactttagaccttctttgtacgctccaatatcgattttaagtctgtgtctaaaacaatgatgatctgggcatccaaagaggccaagacttctgtatcaattgttttaactgatataaatctttttttgatcggtctattatagctatgtacaacttcagcatcatttcctggtttatctgtgaattcaaacctcaaactaataatccacacctgatctaactaattaagttctttta

SEQ ID NO: 120022 - DNA, 493 bp, Glycine max
  unsure (1)..(493): unsure at all n locations
cggatccttaagcaccgcggctgcagctaatatgttctatacctaaagactctctcaactgagtcacctncttggacaactaaatcaaacacagaaacctgatacatcaaagcataacaaatttcattttatcgtcccaccctatcatgaatattgaaatgacatgcacttttggttttctgtttttgggttcagtctagcttgctagctagctgtaagcaaaatgcattttaagtgaaacattaatcgatctaagatatttatatgcatacacttacaagaaaggacaaaatgtatgtgaataaacaaatcataatgttattcttcaagtgaagtcattaaaaatatataaatattaacattcatacactaatggaaaggacaagagagattaaggtcaaaatgagttaacattgacatcatcatgaaatagagtcataaaagtaaattggcaatctttcaggaataatattatgctctgcagaatcaatcc

SEQ ID NO: 120023 - DNA, 320 bp, Glycine max
cggttaaaatgaattccgaccgttcggtcgtgccgtaaccacttggaaataaaaaacaaaaggtgaaataatattttaataatcaaaaatattcttgaataaaataatcaaaaaaaatcaatcggacgtttttctttggaagtttcctctgatgaattgattaataacccaagcgagactacgactaaaatagactcacaaatcaatgttctttccgataaatcactacaaactcgtttaatgccaacgccttcacggctctcttgctttatcggtaacatgaccgttcaaacataaaataacatgtacctttccgcttt

SEQ ID NO: 120024 - DNA, 330 bp, Glycine max
  unsure (1)..(330): unsure at all n locations
gccactccatgaccgactccacttttantcagatccaccgcaatcccggtttataggtacatgtcccgagaactgcactatctctaaccaaaattcacatatcgacaatttggcgaacaatatcctatccctcatgatatgcaacacaatactcaagtgctcttcatgctccaccttattttgtgaatatactgtgatatcatccctgaacacagccacgaactgatctaagttatcatggaatatgcagctcatatagtccatgaagatagactgagcattagtcactccaaatagcatgactgaatacatcataatgtccataccgag

SEQ ID NO: 120025 - DNA, 403 bp, Glycine max
  unsure (1)..(403): unsure at all n locations
ctaagagagcacaaatcctagattgaccaatatattttcaatacaattagcttactcactagcctntcactttaatttgcatctgaccatattacacatcacacagtttctttgagtgcttttttttaacacaacatattngtcgcgtgtgctgatgctttactctttactttacatcccaatcaactcccacatatttggggtaatttgccttgaactatctgctctcctagaatctgaacaaggtatctagagatattcattcaagttcaacgattaattttgaaaatgtaattcagctcacagaggctgcaaaggatacaattatcattcaaggtaagctnnttggtcaattggcttgtatatacacaatcatggccttcatcatgtcctcattcataca

SEQ ID NO: 120026 - DNA, 491 bp, Glycine max
  unsure (1)..(491): unsure at all n locations
accttcatctcactactgactctctggataaagctctctctagtgatgtttacttctctcctttggtcagcaaacacttaattctggtcttcatttaatctcatgatatcctccatgtcttgtggtttggtgctgtttaaactagattcaagaaagtaaacccattaaatcttagatctacacttgttcttgcatttcaatggttcanattttatagatctactcttgaatcatgtttttgtggtaattttaggttctatcatttttcagntataatatnnttgtgctgaacctttagatctaatatttcttccaaaatattgattagaaaataaaacacacaaatctaagtgtaaatcacttaatccatattgtcttagagtcatagttagtcataataattgtcacattatattctatgtctgtgnttgaatttttatttgttgattgaattctatatacacttgttcatgtattcttttcattctaag

SEQ ID NO: 120027 - DNA, 170 bp, Glycine max
aagagtttatgagaaaaaaaagaagggagccaatgagataaaagagcagtgacttgatggctataacttatctcaatcacaggtcctgctttttaactagattctgaactttgaaactcttaaatttttgaactctgaactactactcccccttatctactactcttaac

SEQ ID NO: 120028 - DNA, 192 bp, Glycine max
  unsure (1)..(192): unsure at all n locations
aggcgagctcagctcgcccaggcgagccangntgctttcttcagaagcaacagccttctggagggcccaagggcctggggctattgccccctttttactagactcccctctgtttttttgggatcttttcgaagtacgaactacaattgaacatctgtttcttcgatgtacgaactgcgatactatatcctt

SEQ ID NO: 120029 - DNA, 494 bp, Glycine max
  unsure (1)..(494): unsure at all n locations
gcttcttcactccttgtctaaaangcagcgtatgtttaattgcgcactccaattgctcagaatcctaatgcccactcagacttcactattcacaacaacaccatcctgcagcaagggcaaaattggcttcccttgggtcatgaattcatacccacattattggaggaatntcataaaacttcgttagggggccatacatgagttgctaagacacttcaccacttgcaagataattttcgatggtcttatatgcgccacgatgtccgtcagtatgtggcacactatgacatctatcaacaaacaaagtatgagactcatagaccaactggcttactgcaacctctccctattccaaaaacaatttgggaagatctctctttagacttcattactgggttaccaccttctcaaggatacacaacaatattagtcattgttgatcgttattccaaggggacacacttgggagcacttcaacctcactatattgtgac

SEQ ID NO: 120030 - DNA, 345 bp, Glycine max
  unsure (1)..(345): unsure at all n locations
tacacacatcaggctttcatgtcaaccctggcacaagagcacagacgcactaaccttaacagttgggcttctaaacccgacagttatctttaaacacttcattanttgaatattaatgataatattgcaacctccttatgacatggcggatattcaattatttgtaagcttcaattatctacttgctatcatctacaaattagtaattatctgcaatgattattacaacaccataatagtccctacaaacaaggatacacaactcccactccactctataagtactaggttctatctcacccttntcatctttcattctcaccctactcacgtacttacttaagt

SEQ ID NO: 120031 - DNA, 77 bp, Glycine max
caatacaaccacccgcacaacccactattatttttccaacgatcacaactgcacagaccgatgtaatgtgagataac

SEQ ID NO: 120032 - DNA, 334 bp, Glycine max
ctgtgcgcagatactgttatactgaaattgagatgcccatatattctttataacctagtctacactgcaacatgtaccatggtcagatattgagggctttagtgagactggtctatgatccctacacgagttggctcgtggtgcataacacatgaaactaagagtgttgtgcgaagatacacgctaccccctttatcgtcttagaaatgtataggacaacgtcactggtgatcaaacatggaaacaaatgagatgccatattgtacatcatatagcttgtaggacacatatgtatgatgatgcctttactctcgcaaaatgtgatgctagacca

SEQ ID NO: 120033 - DNA, 411 bp, Glycine max
  unsure (1)..(411): unsure at all n locations
agctggcaaaaatcacccagcacacatgatgattgttgttgtgaaacacaaaggaagcgtanaatctgaagcatgcattagtatattaaagacaaacaagattggggcgaaatagtcattaaaattcaacgaaaaccaatgcttgcattaaatatttgttttaattcggattattattatggaaattaatgcatatgtaattcacgttgttataaaataaataatatttatttaatatatattaattgttgtaatacaaataaaatgttgtcataataaagattctctattcttaacaaagattacagattacataggtagatattgattattcaaatttacatgcacattaaatatgcacaataaatattggtatgatctaaattaaagttaattgtcacactatttatt

SEQ ID NO: 120034 - DNA, 436 bp, Glycine max
  unsure (1)..(436): unsure at all n locations
ctcgcccaggcgagcaaggttgcttcctcctatgcaacagccttctggaggaatcttctggagggcctaagttgggcctggtgctatttagcacccccattttactaaatacaccccctgcttttttttggtgcttcttttttcgtaaagttacggaaacttacgaatttcgtaacgatacttgttttctttccgtaatgttacggaaccttgcggatcacataatcatccnctgtttgacttacggaatgttacggaacctcactaattgtgcaacgatgcttccatttgatctccggtgtgtcacggaaccttacggatngtgcatcaatattttcttttgatttctggcatgtcccgtaacttcacaaattgcctaatgatgggtgccaagcacctcacaaggaccaatacaaagttgcatgccatcaagcaa

SEQ ID NO: 120035 - DNA, 420 bp, Glycine max
  unsure (1)..(420): unsure at all n locations
agcttgacaacactctcaactctaggatcacagtctcacttactatacgtatgctgaatcgcantatgtatttcaaattcgcaagatctgatatttctgcacggagtcttgctcgaactgcccaagacaaaacccttcagaacccgaagccgaatcatgttctcaataccctttggcattctgcccaatatatagcattgagacaaatccggatgtatgagatatctcaatggtgagaaatcactaggtagtgtttctagattgcacacgccgtgagatctacagcttctatgttctcaacttgaacaacgaagggtggtagctcagatattcttcatatcccaccaaggctaagatgcctcanattctnttgatccctatactccttcacgaattcttcacactactgcttaatatgat

SEQ ID NO: 120036 - DNA, 502 bp, Glycine max
  unsure (1)..(502): unsure at all n locations
tcttatccaagacactctctnggtggcgaaacttctccttacatggcttattctctagagaatggcgcctactcgcacctgtttcctttatcttatgctgcnactgcatggcttgaaatcaccattgaaggaccttattaaagctcacagatccagcctgcatagaagcttctcaagcaagcttccatcaacactaacacaccagcaactaaacgtccactagacctttctaaagtacttaacttcagaatgctttgagctgtgaagaagtgttcagaatgatgaagctacgctacattagaataagatatcaatatgaacttcttcaaggaaatacatccaggtgtggaatcatgctcagcaaacatcaacatggctattctgatagttcttcagaatgtccattagaaaagttcttcagaatgaggacctcagtatggaaccttatnatggntatgaggatngcacatcataacaattggaaattcccctactntcacta

SEQ ID NO: 120037 - DNA, 458 bp, Glycine max
gctccatcccgcttaaatgagatggtatcttattttttgatatacattatcataggcccatttcaagatccatcactccctttatattgttatcaacgattggtctttttaataaatgctttaagcagggttttgatctgcaacctgagttaacccagccaaagaatgcaaaacatgaacatgtaagaaagattcactggtagtgtttcaaaatacaatgagtttttaaattctaacaaatactctaaaactagtaaagtactttataagcaaatgacatacatgtataaccatacatgccaaagctcaagttcataccagctcttttataatcccctaaatcagataaacactgtgcagcagattctgccattcctatgccttcaaacaattcagcagcttctctatgcattgcatttgaatctcacgatcaaatcacgccacggttgcatttgcct

SEQ ID NO: 120038 - DNA, 344 bp, Glycine max
  unsure (1)..(344): unsure at all n locations
gatgattgggaacccaaaggttgattagaaaggattggttatactttactcgaaaaactacaaaattgcaatgggcaacttaagcacgagtaaaagtaagcttaagcacgacgaagctaagtgcgatntcactcatgcctaagcaccaaaaccaaagaagaggaaattgaactctagatttccacttaaacacgaatagcggcacttaagcgtcagacctactataacttgaataaaatggtttcaaatgaattaaattagaattctcctattgataatctaaatggatgaatgagtgactcatactatatcatgtatacatcatgacgatttgtgatgatata

SEQ ID NO: 120039 - DNA, 420 bp, Glycine max
  unsure (1)..(420): unsure at all n locations
tagctgcgagtggctgatcggtatcatacatttctttgtacttgtgtaaacatgctgtttatcagaatctctcttatcgataccaggggtaatcgatacttctctctcgttagttgtcaaagggacagacacttaatcgatacttgagtactaatcaataaatcgttcttggagtatctccagatgtnggtaagaacattttgattgattaaagagataatctaatcaattacttcgttgaattaattgattatcttggagatttaatcaattacaggtgggtataatcgttttctctataaataactaacttatgttccactccatatacattaagagaatactcaatatcttggaattacacatatacctctatatgagacaaagatcttgagttgtcataagtgacaagagaagaga

SEQ ID NO: 120040 - DNA, 417 bp, Glycine max
  unsure (1)..(417): unsure at all n locations
agtgccttatgagtctgcgttctttttctctcgnacctcgaacggctctcggtgtgtttatgacaattttggaccattcaatgcggtgtatgctggggcaacatgacaaatcctgctagtaagagcgcgttgtctacttcctaagtaagacagtcacgacctgtgagacgagattctcctctgttgagagaacgagctgtgattgaattcggcttcccatcgactaaggcaggtcatgctgagccatactacctggttgatatccaaaacggacccggttatgtacatctttctaatgccagctctcaccggacgaattcccacgtgggggtcctgctatccgagtttgatatagatcacgcactccaaaggcgataaaacgtaacgcctcacagattatttgctcacagcctctta

SEQ ID NO: 120041 - DNA, 383 bp, Glycine max
  unsure (1)..(383): unsure at all n locations
ctcagctttatggaaggatggaccttacattgaattgatttttactttanagcattggcaatcgattaccataacattgtaatcgattacaactctctgaaattaattggaacgttgtaaattcaatttgaaaactttttaaaacaactttgctattggtaatcaattacaacaatctggcaatcgattaccaaagagtaaaaactctttggtaaacatgttttgagaaaaatcatgtgctactccaattttgagaaaaacttttcatacttatcttgattaagccttctcttgattcttgaatcttgagacctgaatctcgatcctgattcttgagatcatgaaccttgaatcctgattcgtgactctaaactttgttcttg

SEQ ID NO: 120042 - DNA, 445 bp, Glycine max
  unsure (1)..(445): unsure at all n locations
cgaatagaatggtctcacataagagatacatgtgttttctttagaanacaagaaccatatgaatattaattatgattgcctcacatagcttttttaatctcttataacagaatgtctcttatatgaaaatacttcgcgattaatgttggggttagaatcaaatattatttccttttgacttgtaaaaggtctttgttatgcttctagcagaatcacgggaaggaaatgttttcgtgtttgatatctaaagcggcaactgttgatgttatatgcaatggagagggtcttatcatgaatggtgcagtgcatctggtaaggcgaaaatgttaccactctgctagtttttgttttacatggntacctacttctttcagtaattaataatcccgatcacacactatattcacctaccacaaaccgtatactgaatttttgtggtaatata

SEQ ID NO: 120043 - DNA, 430 bp, Glycine max
agcgactgcagcatgcaactatggctgacacagaatcatattattgatggcttggccttcgcaaaccaggaaaccatgaagtcggtttccaccattcccattcatccctccactacaaaggttacacttatgcggggcaacaaacaaacctgtggattgggagaactcattgaacctctccatgactagctggactgccataacaccccccctcgagaaaagacgaagatcgcccgcaaagctcacatctataatctgaacctttgccgcatttgccgaggatagtacagcatggaatagctctaacgccttttaattgcctatgcaaatacaccatgaccacaacaaagagcagaggggagataggatcccctggcctaataccactaccaacttccatctttgtgtgggaactccataccactaaact

SEQ ID NO: 120044 - DNA, 303 bp, Glycine max
agctattgataaatatattttttaaaagaaacaagctattttatcggattaatcaaatttgagctataacaatattacaatagcatacccacactactcaatcaaatgaaataactaaattcctttactatgaataaaattggtatgtgtgacttaactctctttatctttgttacatctgatcatttgatacctttaagaagttgaaataaatcaagtggtgattacattcttgaatgtggagactatctagcatctacagacgcctattttaatgtgccttctttgtaggaaaatataatg

SEQ ID NO: 120045 - DNA, 398 bp, Glycine max
agcttgatagaagccggatggtcgactctctaatatgacgggcccaacataaaaacaacacgctagacatcatggaggtgggcatgtcatgccatcgacgtgaataagacacactggcccaaactcttgaatgatgtaacgacctctacaatgtttatctacacagccttacaaaaagcgcgcatgattccccgtggcggtcacaaagaggattactgtaaatgcatacggacgtactacatgacatggatacatggtcaactggaagagatctattactactaatgatagaccattgccggcttgtctcaccaatgaatgggaggaggaacaacatgtatacatgcagtaggcaaataaagaaagaccttaaaagtctatacttttggtaatacact

SEQ ID NO: 120046 - DNA, 489 bp, Glycine max
  unsure (1)..(489): unsure at all n locations
cgcatganatcttgctgagattcatcgagatgatatataatgttcactcaacacatgaagcagaatatttggtatgggaaaccaatatgatatgacacaaagacgacaatacatcaattnttttaaaagttataggacagacacaacaataatatagtatatgaaattaatataaagttagcataaaatacaaagttatgcaacatggtggcatgacaagaccattatttagaagtgtatgtgcttcttagataaaagttgtgatacgaaagagtttatcatagaaatatggttgtaaaagatacgaaatagtagtgcactaccaaagttggttagccaaatattttaatgaacaaagaatcaattcataccatgtaactctcattaaacaacaaaagaatatggaaaaacagtgtatgaacaagtagctcgacaattctttgatatacgttaatatgtaataggtaataagcactctatagtagtact

SEQ ID NO: 120047 - DNA, 350 bp, Glycine max
  unsure (1)..(350): unsure at all n locations
agcttctctgctcatgctgtgaacgcctctatttatcatctcggcatcctatagcacccacccagagggaagctcctctagtatcaacttcgaacactgntcgaacggtcttgaattcctacacaactaggaacttacctacaatgccgtcgcctgatttcacctctctcccgatgactcacgaagatctgttaccctccctcatagactatcatgtggcctgtggaactcccagtaggagtcttgaaccccattttccgaagcgttgtgctccttatgctacttgcatttccatggggtgcccctgggcattccgtctaaaatgctcggcattaattcacgttcatctc

SEQ ID NO: 120048 - DNA, 376 bp, Glycine max
atttgtgtgcagaaagcgctaagcacaacctggtgcgcttagcctcagatgcccactagactttaccaactcaagtgggcttatcgtgaggtaagcttagcgcttggattttaaatcaaacgtcatgtgggcacgcttaacgcatctctgtgctaagcgcaccatacgaattttcagttttataaaccaaaggctgatgcacttgggtgtacccaaataccattagcttctacctttgttaaccttgagtaattggcgattctgttgcgtgttgtactacttgtctgcatctctttgcttatttcatcacatacaagtaagtggtacatttcaatttttattttcatccttcaacattacgaagatgattctcgtt

SEQ ID NO: 120049 - DNA, 309 bp, Glycine max
gtgactcgagacccaattttaccagagttttcagaccaaaaaagtctatcctcttataaagaaacatcgttttatcctcttacaaattccttgggcaaattacttgtgattcaatatggtattatttgagtgctcaaatatgtcaatctatctcttgcaagagagatatcttcttctcttgttcttcattctgaaaagggattaagagaccgagggtctcttgttgtgaaagaattctaaacacaaacgatggattgtccttgtgtgtttagaacctgtataatgaatatacaagatagtggtactctc

SEQ ID NO: 120050 - DNA, 276 bp, Glycine max
ttgatacgaggatatgtcactatttatcggctgactgtatatgtgcctcaaaatgtgcaccttcaattaatccccctctatttgtaataagcaatcaacagaccttctctattaattctatggggaattctgcggaacaagatgggaatggaaagctaacatggagaacgaactttttgaccctgaaattgacatggagctgatttatagtgacatttatcaggaacattatcactctacagggtctcctcttggaagcttgacctatggctatat

SEQ ID NO: 120051 - DNA, 325 bp, Glycine max
cccccccccctttcatcatctcatattcattctccctgtttaatttgcttctaaataagtatacttatgcagtttgtttgtcctatttctccctttgcataacaaaagccaagttgtacagttgatatcaatacactagctatccacagcattcatagaatatttttagatcatgaagcaagaaccatgaatagatcaaaatacaatcccattgccaataacatcttatagttgtaaactacctgcgaaaagaaagtaatggtaatataaaaataaatattgatatcactgcttatactctatctctcatgtgaaagatccacta

SEQ ID NO: 120052 - DNA, 361 bp, Glycine max
  unsure (1)..(361): unsure at all n locations
aatgatntctagaataaatcaagaacatattcaagaatcaagagaagtttgatttcaagattcaagaaaagatgaattcaagttctaagtgaagaaatcaagaagacttcacaagggaagtattgaaaagatttttcaaaaaacaaacatagcacagttgtgttcttcataagagttntcacaaactcttctaagttaccagaagttttactctctggtaatcgattaccacgttcatgtaatcgattactagtggcgaagttggatttcaaaagcttttaacttaatttacaatgttccaattgatttcaaaatggtgtaatcgattacaagatattggtaatcgattaccagttcatct

SEQ ID NO: 120053 - DNA, 413 bp, Glycine max
  unsure (1)..(413): unsure at all n locations
gcttaaattatacataacacttttggccgatcttgatttcctgctaaataacatgctacacgaacctcttggctttctttgagacttgcattctaaggcttagcgactcattactcatctgtggcaatttttcctcagcaactgatccataaaaagttcaggtcccactgccgatatgctttgtactcaatctccacttggaagatgacatgcctttccaaagacaacccgataaagagacattcctatgggtgctttgtaggcgatcctatgtgcctcaagagcatcatcaagcctagtactccaatctttcctgcttggctgcacaatcttctctataattctctngatctccctgttagagactcctacctgtccattgctctgagggtggtatggtgtggataacctct

SEQ ID NO: 120054 - DNA, 475 bp, Glycine max
  unsure (1)..(475): unsure at all n locations
taacttttgtagataaaaggccaaagtcaactatatttaaccttgtcagggtgacagaccggcttgttaagtaataatattaatattgtaataataataataactattatctataccatttttatgacattatagatgacaggatgaagtgacataaagtatttacatagttcacttgcatgtggtaaattttaaaaataaaaagattgaagttaaaggataatgcaaccagattaatacttccaaagaanagaaatatttgttaagacattntcagacaatttaaatatttttatttggctatattagtataaatcatncttaatccatatatcnttttaatttatgctgcttttttcattttcttttgatatnttttgtggtgtaataacttcaattcaatatgaatttgtttatcaattatttttggatntgtacattacttataaaaattntataagtttctctttttagt

SEQ ID NO: 120055 - DNA, 410 bp, Glycine max
  unsure (1)..(410): unsure at all n locations
tgccagatccgatcgtggaaggactagtcagtcgcctttattattcagtaccagtgcaatacggacatggctcccgatcggaaccaacttgatagtatgactaagcgagagcatgagcacattaaggaatatgcccaaagatggagagatctctcagcccatgtcgaaccgtccatgacggggagggagatgatcactattatgggggatacattacccacgttctactatgataagctgataggctacatgccagcttactctgctgatctcgtcttcaccggagataggattgaatctggactactataacgcaagttcgaatatgctggcaatatgggcccctacaacaacatgagagcccctatagtgggctcgaggaanaaggaaggtgacgcccacgcgtttac

SEQ ID NO: 120056 - DNA, 436 bp, Glycine max
  unsure (1)..(436): unsure at all n locations
agcttgtctaggtgtaggccaactngagttgttaattgaatactacgagtgttgagctaaccatgatatgttcatatttcctagaatgtacctacaatgttcgttgactgtttttgcttggaatgtaaaaaattttccaatctacttgtgaaactgaactgcatttgtcaattctaaaattcttcaatgtcatatatttttatgcaagcattaatatatttctaagctaactngcttggactgaattatataactatagtggttacattgcacataaactggtctttaatgctgaatttgttttatccgaatgatgtaactaacttttcggttgatgtgtcgttctattaaaagatatgtcgtttgagctgacaattgatgaatgaacaatattgattttctggttgctatgattgagactattgaaagtgaaatg

SEQ ID NO: 120057 - DNA, 441 bp, Glycine max
  unsure (1)..(441): unsure at all n locations
tatttagtagcttacctttccaagaagccaatctagaattcaccttttccatgacatcatncaaaatggatttggtcacttgatcagtcaaaaattgaaaacccaagcactttcctaagtgattagtgcacataatcccaggatactggacatctcatcttgaagccattaaaggactccatgtgagcaagtgaacatagacttgtcttggttcactntgaggtcagagactccacaaaattcatgcaaaaccgcatttacaactctttcttggtcattngaggccccacagaataggagaacatcatttgtaaagagaagatgagataaataatggtgagataagggaataggattccattcacccgtattaagctgattctcgatactaagtgtcaatctctccatgcacatgacanatagaataggcaataatggatc

SEQ ID NO: 120058 - DNA, 67 bp, Glycine max
taatatagctgctgctgagtcactctaagacccggtctcttcttttttccctatggagcgatactat

SEQ ID NO: 120059 - DNA, 327 bp, Glycine max
gatacactagcatctactatatatgactggctggaagccagtggatatatatattcctacctaacgtgtaccacacataacattatcaccactttgatatactttagtcatcttaacgccgacttacagaacgtagatcgatcttcacgccagaaatattgactatcgcacgtatgtggaaaagtgtggcccaactgatactcttcttaaatgaccgagagctggatcaacgtttgtgcacattcataatgttattttatggtgatggaaattagtgaaaacccaaggttactggatactttaatggacaatggttcaatcgaaaac

SEQ ID NO: 120060 - DNA, 491 bp, Glycine max
  unsure (1)..(491): unsure at all n locations
atcctcagagtcacctgctgcatgcaagctctatcaaatacgtgggccccgcttcatactttgttatgagtccngcaccacatatatgactctactatattgccttcttatcgatcttgcatataatgcccacaacgttgctattgttgcgtgtttgtccttacgaatcacttcttaattcatgtctagacttgatattgtactaaattctcaattatgatcatgagcatctgtgatagatgagttattaatctctaatcttctccctgacagtggcgatctagtttcctcttcggtactacttctgtcataaaccacgggctgtgtttaataagagtagagaaataaatctttctttgctattctatatcctaaataacgactaccaccctagcaggtggtatctaaaactctgagtgagtatcgggttatgcttatgctgcattaaactaaaatccaactgagcctaagtgcattattaaatatattgt

SEQ ID NO: 120061 - DNA, 441 bp, Glycine max
  unsure (1)..(441): unsure at all n locations
tgtcacactaatacttagaagacacctaatatctatttaattattataaggattatattatatataccttgtaacctccaaagcattcaaggggcagaggccaaccagtttccttccatggtaagtcatgtttgattctgctgtcaagagttcacgccgttctatcctctcgttgttaacaatctcatcatactcaggactcataccgggtagacaaccagttctcacccagacatccttttccatccgtagatgaagagcaaggtagggtcccttgctcttcatttgctcagcaatatcgttaccgagttcctgaacaggctttgcataccttaatgccttgaaagcaacctganagatatagaagaacatttagaatctgctatcaattggcacatgaaagtgagtacgaaattcctttctctctttgtctttgacata

SEQ ID NO: 120062 - DNA, 400 bp, Glycine max
  unsure (1)..(400): unsure at all n locations
agctntgatagaaagaagaatatgacgaccacgtttactaatgctggtagtagtcttcaagtgcgaatcatatcaatggaagacaaaaggtaacaagaggcgggcgggcacttatcaaattatcatggggatatattatttatatacaataaattnttatgatatactttttcttcaatatttttcatcacattcattttttctttgtcttcctgttccagttttatcttcttatagtacatttgtttttataaagaaagcattgtgtatatacaatttctgaaagacantttgcaatgccgataacgtatatcacgtcttgctgcttccgaanaataggagacaagttggaattttacggngcaattctccccttttcatttgtatcctttagattaaa

SEQ ID NO: 120063 - DNA, 283 bp, Glycine max
  unsure (1)..(283): unsure at all n locations
gacacttgaaactaagctgcctgtccgatgcagcagtaatgatagctcgagttatgttttgaacgngtacgaacccggaatgggtttaggcaaagacaacggcggcataactagcctgattaatgccaaaggaaatcgtgggaagtatggnttangctataagcccactcaggcagatgtaaagagaagcatcgcgggaaggaanggtggtggtcaaagctcccgtatgatacacgatagtgaatgtacctcaccttgcctcataagcataaacgttataatc

SEQ ID NO: 120064 - DNA, 160 bp, Glycine max
gctatgttttctggccaattaatggaacactacagtttgtcgaacaaacaacggtggctcgacgaaaaccatacctactgattggatgttttttgcaccacgaaaaaaaaatcttcccgcctaaaaaaaacttatcgccagcggcgtttttaaaaaaaat

SEQ ID NO: 120065 - DNA, 80 bp, Glycine max
ccaccaaccccaacaagaacacccaccgaaagcttttttttcaaccgccacgcgaacctgccaacacacaaagacacgat

SEQ ID NO: 120066 - DNA, 391 bp, Glycine max
  unsure (1)..(391): unsure at all n locations
aaaaaaaaaaatttatttgcatatagtttactccccttgggtttgcaatgtttgttatatgagacagttgaagattcatatttttcatatataaaaaggttgtctcataanagaatagaataattttcttactattttatcttttatctttctctctccctttggcaacataaaaaacaaatcatgaatagagaggagaaaaatgttaccacttgttgcaatgtatgagaatcaagtgatgccaaaaggcattaaaacaatcattcaatattaatcaagcanaaacaagtacagtaacacatcaatcaaaaacaccatctatcaaatatataatcataagcaatcaacanaacacaatcaanaacaattatcanagacaatcaatactcaa

SEQ ID NO: 120067 - DNA, 255 bp, Glycine max
cggaccttaagcgactgcagctgcactaggaggacactactgtgggatatctaagccaaaacggaacaacaatgcgaataggatgacctaggctgctcactcacaatccgtggttggctttgaaggggataaaattttgaagcaaaactttcctccttgcacattcttataatatggtgcatgggtggctcgcccagtcgagctaacctgccacttttttttttttttgagggaacattaccatgtcctctcctt

SEQ ID NO: 120068 - DNA, 499 bp, Glycine max
  unsure (1)..(499): unsure at all n locations
acttaaatactcagcttaagacttatggcctcatcatactacttgtttcccgagggattttctataattagacctcccatctntaatggagtgggttaccactactggaatacccgcatgcaaatctttatagaggcaatagaattaaatatntgggaagccatataacaaggaccttatgttccctctataatagccagaagtgcaacaatataaaaacctagagcacattggactgaggaagaaagaagattattacaatataatttaaaggccaaaaatattattacatctgccttangaatagatgaatactttacggtttcaaattgtcaaaatgctaaggatatgtgggatacactacaagtaacacatgaaggcacaacagatgtaatagatctaggataacactttaactcgtgaatatgacttctaggatgaatgaaatgaatgatacagacatgaaaagaaggtcacaccatagttatcatctgatctt

SEQ ID NO: 120069 - DNA, 404 bp, Glycine max
  unsure (1)..(404): unsure at all n locations
agcttaaggcagaaacccatcaaggtaaaacgattactctgtcacagtttgccgtgtaaatggtgtttcctacttccaggtacttaacgacggacgcaagtagaggctanggtcacgaccgacagatcatcgtcccttgcccagctctggattaacggaaagcgtcgctgcaaagcaacctagtatcctttaaaattcccagtaattattactatggtgtctttaaagaaatattagatgcctaatctaccctgagggggttcgagtaagctaacgcctacacatggaaagccttacttatttcttccctaaacaaaaagtacaggttagctcgcctgtgcgagcatcctctatacgagatgggttaaaagagggggaggggaacattttcttcacccataact

SEQ ID NO: 120070 - DNA, 432 bp, Glycine max
  unsure (1)..(432): unsure at all n locations
gctgacttggtaacagatgatctgattggactgtatgatttgattggcaagattggatgaggggaagtgtggttttcgaaatctgcactttgtgcagattttngctgtgaaattgtgcagcagatgttcgcacaagtgcagaaaaatgctatgcatttgctggttgtggaaagagcagtgcagaatgagttctgggtgttttctagtagatcccaacggtcaaaatgtaggcttatgtactagagatttccagtaaaattttcgagtcgatccaacggttaacgaactggaacgaaggaaatgtntctggngtattggtatgtganaagctcgtgatttggttggtgttctgggcagagntttctgcctttgccctgttntgcttggctgtgatagcttgtgctgcttgaattntgtattactttgatgttg

SEQ ID NO: 120071 - DNA, 259 bp, Glycine max
  unsure (1)..(259): unsure at all n locations
agcnttaagagaaacgtacgggagcatgtcttatgcctanggttcctagtgaaggtagagcatgtctacacacacccatctcgaaactaagctcacgtccgtgagagagttccttgacacgagactggtataatctcgacctaatcgccacggacctgcctaacaacggagcgcacatctctgagatgagaagctagagcttaacttctcacgcactgtgtgtgcatatctggcctccctgacccttgccatgagaatg

SEQ ID NO: 120072 - DNA, 361 bp, Glycine max
  unsure (1)..(361): unsure at all n locations
ntgctggagtgaatgagagatcgcatgtcgtgtcatcatctgtatcgtgttgattgagagcgtctgctatctatgacattatgatgccaatgtctgatgtatgacggctgtcactattgactctcgattgcgtctagaagttctcgagatgctaatgctagcatacttgattgtagattctctatgcaccagacatgctcataacacaacgtgccttatacacatgcagagcactggcattcgttcatcctagtagtgtatgtcgcttacaccgacgactcggttgatgaagatctgcgtctaatatgactggaagctgtatntattacatgtaagactttgacatatgctgggagactat

SEQ ID NO: 120073 - DNA, 436 bp, Glycine max
  unsure (1)..(436): unsure at all n locations
agcttgtatgagcttcaaacaaagaaagggattcatatgctcaaagggctatcanagggattaattcaaggtaaatccatttggctagaggcttataagaacacaattgtctaaatcatttccaaatatgcatgtgaattangaagcatcagcaagaatcaagccaaggctattgtgcaagcaatcattgtggcataacacaccaaatgattatgatgatggctcaaattctcacaaaggtaaacttatcactctcaaattgagctctcaaaactatcataagcgacttttattttcaaaacaattactcattacttgaacatatcctataattcaaagaataatatgcacagttgcacacgccaacagaattgacctataatattaaactagaaacccaacacaactaacaacattaacaaatgtaacacagcta

SEQ ID NO: 120074 - DNA, 380 bp, Glycine max
  unsure (1)..(380): unsure at all n locations
tgtagaatggctagacatgatacatgtcagtggttggtttggttcatagataaaagggatgcccacattattccatgacacanatgcaaaatgagattggaacttatgcaaactggtcttgcatgcacctatgcgaacactcaagngttataatattatggccatgtgatgctacggctcacgattcgttttctctattttaatcaacccaatgtttccaaatattgattttttatcaatgtgtgcattcatccgagtccatatcgggcgttcggggaaatatcacagctattacccttcatgtgtagacacattttccaataattgtgtttgatcaatgaactttctcaaacaatagctggaaatcgttctttttaaag

SEQ ID NO: 120075 - DNA, 469 bp, Glycine max
  unsure (1)..(469): unsure at all n locations
nngctattatccagggctcatcttggtggttattttccttcttccaaggcttattccctagtggatggcgccttctctcacatattcacctttgtcttccattgcatttccatggcggaaaatcatcattaaaggacctaattgaagcttaaagatcctaccttcatagacaccctgctagcgacctttatcaaacgaagagcaatgtcacagtggctagggtctaatgtaaacacaaggacaagccttcgtgtatactggaataacatggaataggctatggcttgaatgcgagaaatcactaacatgctgcacgctttggctcttttctctttctaaactactacgggttttagtaaaaacccggtggatagtttattacatataacattcttaggcggttctcaataaccatcttatatcgtgtgttgtaacatgcatatgtctatatatatattacaacaatgcc

SEQ ID NO: 120076 - DNA, 481 bp, Glycine max
  unsure (1)..(481): unsure at all n locations
ntccatgaagaagtttgcggtatcggaatttgtaatctccactgattcaacctatccatgttaagaaagcagggttggaatttgattaataacccacatactacaatttataatattctctaaaataaatattatccaaatgttggattctatgatgcacaactatggcataaaccaagctatacgtcgcatagtatttttgcttcacatatattggtcgacgaaagcatttagtgcaaaaaaagtgatggtagctctataaacgtttggactcaaccttgggttcgagcatcaacaagcccatatatcacttcatcaaccctgctcgatcttgatgatctcaaagtcagttcactcatcgacaaccaacaacgatgttggcgtcaagatgtgctacaacaaaatctcaatgacaacgaccaatgaaatgttgcttccttccctatggacaacgaagtcatgattaatcttaggagatact

SEQ ID NO: 120077 - DNA, 215 bp, Glycine max
ttatttattactacgtacttccttgagaagccttcttgagataacttccttgagaagcctctttggagaaaacttccctgagaagctagacccttagctacacacacccctctaataactaaactcactctcttgagaagattccttgagaagattctcaagaatctagagcctatctacacacacctctataatagctaagctcacctccttaa

SEQ ID NO: 120078 - DNA, 158 bp, Glycine max
tctgaaccacacagggacaacccattcctttgttcagatgctttacaacaagagactcacagtctcttaaccaatctcattgaataagaagaatggaagatgaattctctcttgaagagaagataatacaatgaagatcatgtgagaatcctatagat

SEQ ID NO: 120079 - DNA, 368 bp, Glycine max
aaaaccaaccggctatgttggtttttgaaaaactctcattccttcctggagagctcctgattattctcttgcatcttcgactaatcctctcttgaattttgagataaacttctcttgattcttgacgcttcttggattcttctcatgacactcgaactctatcttgatcttgaacttcgtgactgaatcttgaaatcattctttggtcttttcgtcatcatcttggtcatcatcagaactacttgaatcaatcttgattcatcatcatgaagcttgcttctacaatcttccccttattgatgttgaaccctgatatcaagatacacatatacattctttgtctagtcgtcactcacattaatctcata

SEQ ID NO: 120080 - DNA, 355 bp, Glycine max
gaccttaatgactgagctgcgctttacaaaggcatctatttcttttttactcaccccaagacgggaaaaaaaggcttctttggagaaacacacaagctttgttttttaaaaagctcacaaggcctgtgagcttttctgacttttaacattgagctaaatggatgcttaaaggcgattgagcacatcggacatggggccctatgctatttaggaaaaattatgggccccctaacacccactatgaaagccttacgcctatagagcctcaactggacatacctgatcaagaatggcatctaggacctgaccactagcctttaagtaaccagtaaaaaggctcaaagggaagaccact

SEQ ID NO: 120081 - DNA, 454 bp, Glycine max
  unsure (1)..(454): unsure at all n locations
tctttgagaaaacttccttgagaagctagagcttatctacacacatccctctaataactaagctcacctncttgagaagcttgcttgaaaagattcctaaagaagctagagcttagctacacacacctctctaatagctaagctcacctccttgagatgagaagctagaacttagctacacaccccctataatacctaagctcacccncatgacanaatacatganaataanaaaaagtccctactacaaagactactcataatacaaggctaaaaccctatactactagaatggccaaaatacgaggcctaaacgaaggaagaaacctattctaatatatacaaagataagcgggctcatacttagcccatgggctcaaaatctaccctaaggctcatgagaacnctaagggccttccttggatctctggcccaatctacttggagtcttcta

SEQ ID NO: 120082 - DNA, 450 bp, Glycine max
  unsure (1)..(450): unsure at all n locations
cggatccttaagcaccgcggctgcagcttatgttaacaagttattgcanatttctgtgtctcatggagtgagccctgtaagatgattgcaccatattattgcggagtgtccgagaaatacccatctatcatgctcttattagtcgatgaggatgaactatgctgtagtagcatagctattactatcattatttatttagagctgtatgaaaacatatcattcagtactgcccttaatgcgacgtgcactgggaaacagatatctttattgtgcaatccatagtcaaatgaaagtttcctggatgaccatgtattctctcactgtgggatgctatggggactgaatcaatagcctaaatgacatcatgaactggttttgatgttgagacttagcactttaggtacataagccacccaacttctttttcttaagattaaaaaggtgacaact

SEQ ID NO: 120083 - DNA, 473 bp, Glycine max
  unsure (1)..(473): unsure at all n locations
tcttatggatcaagntgatctgcaagtgacttatggatcatctttatccataagaagcttgcggatcaacttgatccgtanagggagaaagaagacaacattaatttgaccatttttaaagaatactggatgcaccaccaataatgctgggtgcacctagcaacacacaagtgtattccacttctattctcaatgtgaatttggacctcccaatctcgaatttacagtcttttttcttttactgtttggggatcctatttataatatggactaaacgggttttttttgtaaatgttttaattaattagtaatacatttaattatgtaaattcaatagtataattttaatatatacatgaactaattaattaattgtgagaataattatttatgggtgactttagcattttcttaatattcatgatgattatggttcaaaaatagtgaggcgatggttctatgatataatctat

SEQ ID NO: 120084 - DNA, 493 bp, Glycine max
  unsure (1)..(493): unsure at all n locations
agctntgcgaantnggtctatgccggcgaaaggatctaattgtgtctggaaagaggcaaacttgatcatcctgctttgataaatgcaaaaactgctgcaaatgaagaggatgaaaatgatggaaaaacccttgttgtgacatgctttcctacacgaccatatttcccatcaacccaacaatatcattactcagccaagtacagaccctctcacccaatcatccacagaggccatccctatatcaaccacaaagcctgtctaccacacgtccaatcacaaacaccacctttagcacgaaccaaaacaccaacgaatgaagaaattttgcagaaaaaaaaaggcctatnaaattcacccaaattccggtgcatattgctaacttgctccatatctattcgacaatacaatggttgcaataacctcagccaagggtcctcaacctccattattgtgaagataggactcgaacgcaacgtgtgcttatcatggacga

SEQ ID NO: 120085 - DNA, 343 bp, Glycine max
  unsure (1)..(343): unsure at all n locations
ctatgatactcagcttagagttgcccgagtcattcatgcctatgagacgtggtagatgtattggcgatcacaatngccattccttggaatatagggttggaccaagctcatgctgttacaaaaaggctcatccagtcaagttgaaatatggtagtngccggctcgcanaattggggcagaagatgaatcgagtcacatcactgcttcgactactgccaagcatatttatgagtattgatgtgcttgatacttccagcttcacctttgcaaagatgtcatagaccatgtggaaaatctatattgattcaaccccattctgtacatcattcgcatacatccatgc

SEQ ID NO: 120086 - DNA, 507 bp, Glycine max
  unsure (1)..(507): unsure at all n locations
cggatcttaagcacctgggctgcagcttagctttaatgctctagatgctgttataagggaaatggctcgtatggtggtcaccanatgagcataaaccacagagtcttgcgacaggtactaaattttgattcatggctagttaggataccaggttaaccaaggcgtctagtttaacttcaagcttcttagtttcagatgatgcagatgagtttgtggctacctcatgcactcctctaatgactatagcctcatttatggcgctaaactgttgggagtcggaagccatcttctcaattaaattcctggcttcagaggngtcatgtctccaagggctccaccactggcagcatctatcatacttctctccatgttactgagtccttgataaaaatatcggagaagaagctgctcacagatctggtggtgagggccactggcacatagtttttaaatctcttccagtattatatacgctctcttcactgagattcctgatgcctanaatat

SEQ ID NO: 120087 - DNA, 436 bp, Glycine max
gtttgggtgagttagatatacccattcttgtttatggtttttgtgatgaatgttgtgatgtttatatgctgaaattgctgatggaaatctgtagagacgaaggtaaactacccacgttaaaagtgagaagtgatgtttagtgaaaaaagaggagattgaagtggacgctagtctgaatctgtgggaatggatgttagagtgaagtaatactagcttgaaatgtcatttagaacatgtgagacaggttacgctgagctagagagaaaaacatatgaccaaagtgaacaaagagccattgctagggcaaatatgggtgttgaagagtcaaattttgatttggtggaattatatgtgtaaatccagttcgggcaagtttagattgatgttatggacttgtgtgaggtgagaatttgcttcaaatttacctattctaaat

SEQ ID NO: 120088 - DNA, 224 bp, Glycine max
agcttgtatcggagtatgactacacaactcattttgtcttctataattcactggctgataacctaagagagcatacagcctcgacttatacccttggacttggagtatacacaaacgcttactgactatattttccttccaagatggattagaccttattggaacaacacggtctattcttcatgttaacaaacacacttatttgctgtgtgagctcatgctca

SEQ ID NO: 120089 - DNA, 319 bp, Glycine max
tctgtccaggaggcgctcagactagattagtacaggagatatggagaatactcgctcgatagagacgtgtgacctcactatgagaatgatcattgcctatcgtggatcgtgagacgacataagaggtatccgtggaggtctttggaccagaccacatttgatcacttacagagtcttgaccagcctttatctatatagaatggagaccactacctaaagtggtgccatgcctttgagtgcacccagtatgccgctcgtccgagacttgttggtcttgagcgtcccataaactgacaagagagctgccatacacactctg

SEQ ID NO: 120090 - DNA, 441 bp, Glycine max
agctaggagggattgatggcgaccctctgtttatattatctaggataacggctacatgggagtacgtgagctcaatagatagtgggcaactgcggatggtggatatatgtgtgatttgtggatgtggagagtcgacttgtcccatcgctcgatcgccacctagtaccacatatgacgggtaccccataatcctacaagctcgatgtgagaaagtgtggaagagtcacccattctactattattgtcgaccatagagtggttcctggagatttgtcgcggcggtcacgagaccttgctgacgctaggtgggatgctatttccctaatcatgcttgaccaatcccgacccaacccgggcatagttagtcagtgagaacctgtgacgtactctaataggctatgctcctggccttcaacctattataagaacaaataccaccaa

SEQ ID NO: 120091 - DNA, 420 bp, Glycine max
  unsure (1)..(420): unsure at all n locations
caccttctcgctaagccaatctgttgtcttagcgagcgtccgctaagcgcaacactcatggactaagtgcgaggaagactctggtagaagatgagctgtacgggttcgctaagcgcaccgcttcatctcactaagctcactgcttcagttcacccgctaagcgagataagcacgcgctaagccaatattcaccaatgtgcactaagcgcacgagcacgaacaaggctacctatttaagcctgagatcagatcttagagggtgagtttcgactgcgattcagagctttgtatgtctagagtttctagagagagaaaggtccacgctctagagagttttgaaagattttgctatgtgaagatctgcagagaccagagctcgaagcaagagccagnttgagagctcgagacgagtttgtgagt

SEQ ID NO: 120092 - DNA, 477 bp, Glycine max
agctagttctaattcgattaaatgatttatttatacttgcagtggagcgatgcacaatcctgtgatatatacttcctgctaatggcgcatcattgagatagatattgattacttcatcatgactggtggtgaaaaatactaggcttgcttaaaaaccaattgcgcgtaacttttctcactgatgccttggcatatggttttgtggttccgaacctcgttcgcactaattattagtgagaagggtttaatgttctgaagctttgccgcgcttaagatttcattctttcatggttacatatgcttgagagctcgttatattatgattgcaatcaggtacctcctctgttcagtaggatcagtatacagtcaaatccaacgaagctcctgcaaaggatgatcataaggatcttgaggagatgtgccgtggcattcatcaccctgtacgccgactctttctcagaagtttactttctcaag

SEQ ID NO: 120093 - DNA, 490 bp, Glycine max
  unsure (1)..(490): unsure at all n locations
ctaagcttacaagtatcatataatataatggtatttatttttttaattatcacatttaaaataagttaagcattaacagtgggaaataaaactctaaaacctcattcgtgtacacgtgatatatattccacttttcagatgacttttaacccaattaatgtggaccgcattataactaagaatgaattaaaacaattaattatgttccaatctagatcagctacttaattaattgccaacaacaaacaaaagagaaacaagaacatggttttatatatgttgaatcgaacaacagtcacaaatactgctttagatgatagtcgaagaagaagtttgattatggtcaagcactntaacagtgttattgcatggtgtattatacctgcaaatcatcatatagctagctaggtcatggtttcattatctaactaactaaatagatgtgttaggtacttctgtctcaatcattatgcacacattntcaaattaa

SEQ ID NO: 120094 - DNA, 416 bp, Glycine max
agcttcaagaaagagatggcctcaactaatttcttattccataaaggaagtctatcaatagacctccaatcttgaatggagagggttaccactactggaaaacccagacgcacatttttatcgacgcaatagatctaaatatctgggacaccatagatatagggccttatatacccaccacagatgaaagagtctcaatagatggtagttcatccagtgaaagcataaccatagaataacctagagatagatggtccgaagaggatggacaaccagtacaatacaacttaatagccataaacataatagcatctgccctacgaatggatgaatatttcagggtttcaaattgtaagagtgctaaggaaatgtgtgacactcttctattaacacatgaacgaactacggatgttgaa

SEQ ID NO: 120095 - DNA, 357 bp, Glycine max
gacatgatcgctcatgtgggtaaagctcgggctgctgtggaagaactgagaaaagttcttgtggctgattcattagaagaagtgaacagaatactggaaaagttttacatggtcctcatcttgagaagcttacattcagactttgatcatgtgcgcgatcaagtacttgctggggaccagattccatcaatggattccctcatcactagacttctccgcatgcctcgtgtatttaaagatgaaaatcctgctgatggtgtggagacgtcagtcatgggtgcatcttgtggtaaaagacgcggccgcaacaatacaggaagtcgctagggaagaagtgaatgtcctcattacacctac

SEQ ID NO: 120096 - DNA, 392 bp, Glycine max
  unsure (1)..(392): unsure at all n locations
attagtacctgacatctcaaacaaacaaatcaaatgttacaagacaattatagttgttgtttgaatacctcacccactcaagtgtatcacacaattatggcttttctctaatgaaacactcttgccttttaccactctaattccncttgagttcttaggcaacttaagagattatggccacaacaaagaacaattcaccaatatgtgtaaaggtaggctagaaagacaaggaaaagggttaccaagaaaaaggatacaatgcttttttgcacaaatgaagagaataaattcagaattatgaattcagtatcattctcatgcaccaatatttaccttaagagattttttttaagttttcatcatgaacattcacccaattttttttaatttgc

SEQ ID NO: 120097 - DNA, 423 bp, Glycine max
  unsure (1)..(423): unsure at all n locations
cagctttgcgaatatggtcttcgccggcgaattgatctatatgggtctggaaagaggcaaaattgatcatcctgctttgataaatgcaacaactggggccaatgaagaagatgagaatgagggaaaaacccttgttgtgactgcctttcctacacgaccaaatttaccatcaacccaacaatatcattactcaaacaataacagtccctctcacccaatcatccacaaaggccatccctaaatcaaccacaaagcctgtctaccacacgtccaatcacaaacaccacctttagcacgaaccaaaacaccaacgagggaagaaattntgctgaaaaaaaaacgcctataaaantcacccacattgcggggtcatatgctaactttgctccatatatattcgacaattcaatggttgcaataacc

SEQ ID NO: 120098 - DNA, 127 bp, Glycine max
aatcaaaagagtgcggcgaaatacacctgaagaaacccggaccgcgacaaagaaaacaggccgcaaatctacggccgtttatataccatggaggagcaagaacgtggtgacaaagggatgcaaggcg

SEQ ID NO: 120099 - DNA, 268 bp, Glycine max
attactactcaccgatcacctattagcctatacggatcaactaccaacagtcgctaaggaagagaaaacactggttacctccacaatgccaactcacggaaggagaacaccacccttaatttttctgggctactcaacaccaacggatgcactgtcgcagaatatggacttccggtgcgaatgaagaagacgacgatcaacgaataacaaactcgacactgaggatgacgatgctgggtcaagcttttttgagacgatggtgacatga

SEQ ID NO: 120100 - DNA, 123 bp, Glycine max
cgcgcgcagcacaaaaacaagaacgcttttaaccgacacccggaacgtggacccataagggccgacccaagacgttcagacgcccgggactgaaaatgcggaggcaaacacctcccaacacct

SEQ ID NO: 120101 - DNA, 457 bp, Glycine max
  unsure (1)..(457): unsure at all n locations
taagtcaactgcggcatgcagctgaattgacaacgaagctgcgataattgtattttcataactcttctcacggatgtccaatttcgtgacataactgatgtagacgctccgaattgaacaacggaagctctctacaaaatcaaatggtcataactattcaaactgatgttcgattctgggacataacacatctagacgctcgaaatgaacaacggaagctctagagaaattcgaatggtcataacattttacacaaatatccgatttgggaaaataatatatcgagatgctcaaaaataaacaacggaatctctatagaaattcaaatggccataacttntcacacagatgtccgattcggagacaaaatttgttgagacgctctaaattgacaacggaagctgctagaaattcgaatggcacaactttccacaggtgccgattcgggacatacaca

SEQ ID NO: 120102 - DNA, 367 bp, Glycine max
cggatcttaagtcaccgcagctgcagctatgctgaaagtgacacttattttcttacctcagcagcagaatcaaccacggcttaacaatatgaccttttcacaacagatacaatccctgatggaggaatcaccctaatctcagatggtctagccctcaacaacaacaacattagtctgctccttccttacaaaatgatgctggcctaatctatgccatacattcctactccaatctaacaacagcaacagccccagaaacaacaaacagttgaggcttctcctgaaccttccttcaaagaacttgtgaggcaaatgactatgctaaacatgtggttttaacaatagaacatagctctctattctagct

SEQ ID NO: 120103 - DNA, 223 bp, Glycine max
tatctgtgtgcttttcatacatttactacggaacaccaatagttgtgttacttaggtggttgatcttatttctgaagtgtttcgctcaatgaatgattttaattctttgtgttcatgaaactgcttattcttcagttccaacacatgggacagatttgtacttattgtgcaccacagagtgatagacctctacaatataggtttaccatactgtcctgcaact

SEQ ID NO: 120104 - DNA, 146 bp, Glycine max
ttccatgacacaaacgcaaaattgaagatctggaaactttatgcataactggtcatgcatgcacctatgtggacactcaagtgtcaaattattatggtcatgtgatgctagggctcaagaatcaattcctctatttcaaatcaacc

SEQ ID NO: 120105 - DNA, 259 bp, Glycine max
tccacatgggcttcatggggcctatgcaagttgaaagccttggaggaaagaggtatgcctatgttgtcgtggatgaattctacagatgtacctggcgcaactttctcagagagatatcagaaacctttgaagcatttaaagaactgagtctaacacttcaaggacaaaatgactgtatcatcaagagaatcaagagcgaccttgcccataatctgaatacaggggttcactgaattgtgcccatctgaaggcgtcactc

SEQ ID NO: 120106 - DNA, 260 bp, Glycine max
aaacactgccatgaccatacgatgatcttcaacataaaaccagctcgcttgcacgcaagaagaaagggcgacttgaacctacctttgaaaaacactacgtacacccatttgcttgacgacacaggattcattacccctgacatatgagagagactcaaatgaccatatcaagcaccaaatatctgaatgacttaagtagccagcatgcgtaagggatctattgcacacaaaaaggtaccctgacataacggacccacatt

SEQ ID NO: 120107 - DNA, 418 bp, Glycine max
ctgcgctgcagctggccctatgtgcctaatttcttatacttgcttggcaggtactccttcggccttctggttctcgaccaaggcttcagctgtggccatattgaccgcccttagatcatcatactcctttcagaccttgatggctatggacttgaacttctctttgactacccgggctctttcaagctttgcctttagggcttgtacctcatcactttcttccgaagctttaacctcattggctctcacaatctttagatttgggagccaatccaatccttgtgtccggactcttagccacttatgatagccgccgatgatcccattactgcttcccctaagctctctgttccttcttcacgccgcatcccatgccttgcgaactcctggaggaccctcgcgtgtgtcactgaaaccc

SEQ ID NO: 120108 - DNA, 267 bp, Glycine max
accatgtttagcttggatcccatggtgagggggtgggtatgtaacttatgttgcattcccatgggaagttagtttctaacctaactattaaattccattttcattcttacttctttttattaattttggacatattctcaggaatattaaaatctaaccaaacatattccttgagatgccatatccacaaatgtaataatacatgttgaaacaaatgctacctagtaattaattgtgactggccactgggttgggtttggagaaaaa

SEQ ID NO: 120109 - DNA, 408 bp, Glycine max
tgtgactctcttctttttatattgaattccaacgttcaaacacactggtatatcgattaccaaattatcgtaatcgactactacaattatgaaatcaatttggaactggtgtaaattcatttgaaagctcttttacaaacattatgctactggtaattgattacaataatctggtaatcgattaccagagagtaaaaactctttggtaaaatattctttatacaaattcatgtgctactcagttatttgatgaaactttttaatacttatcttgatagagatatcttttgatacttgaatctctagtctagacatctgatcttgattcttggaacttgaatcttgaaacttgattcttgattcttgaagtgttcttgatccatcttgaactcatcatttgattcttga

SEQ ID NO: 120110 - DNA, 371 bp, Glycine max
agctgagctcactggtgctgcctcacatattttcacgaaatatgtctcggccatgctcttctttgcgagccctcttggtttcttgttcaagggcttttgcggtagctgcatattcttctcgtaacccgacacacttttttcggacgtctgtagcgaccaacttgaatttttctgtggcaagtctcgcttttcctagttctgtttttagagctcggacttcttcatcctcttccggagcttcgaagttctcctcattgataactctcaatttggagagccaatctaacccccgtgtacgaactttcaaccattcatgataaccaccgatgatgccattacggatgcccctaagatctttatctttccttaac

SEQ ID NO: 120111 - DNA, 386 bp, Glycine max
  unsure (1)..(386): unsure at all n locations
agcttatatatataagagtcaggccttttattctcttaaactngggcacaaatcaccgaaaacaagtctatagataacataggaaagagcaccttgttatatgaacaaattatataagggagaaaactaagcagaatgacgagcaataaaatgaatgatgtgatatattgaaaaagtcatcggatcaattgaaaaaattaagaaaaaaaagtttaaaattaaagtttggagttgaaattatggatgagaaaaaattttatactggtttattccataacacgttgttgttcgaaatcatttaaaataattaattaaaagcataactaaacttattattactggattgcgatcatatgactatattaattacacatttaatatataac

SEQ ID NO: 120112 - DNA, 388 bp, Glycine max
  unsure (1)..(388): unsure at all n locations
tgtataggcttagagaatattgaatggaacatatagaggtttagaatactagggtgtgaattatcctagttaaaaatattaagtagaaccagcaaaagtttagaatactaagtgtaagagcttatgaaggctntagaagaaagaataccgtaggtgtggtgaaaatctataggtataagtattaaatttttgtgtgttggattcttctttattggttgtggnttgcttatacttgctgcacattcattttaagttttgaaaaactggtttagataagtataaatattttgttcaatgattttaaaaatagtttaaggttataataagccgcatactctgaccaacaaacaaaaaaatatattcatgaaaacaaaactttgattttaac

SEQ ID NO: 120113 - DNA, 378 bp, Glycine max
  unsure (1)..(378): unsure at all n locations
agcttcttgaccttgagcaatgggtctggttactatgctagtgggcatttacaggcttcgggaatgttattggaagatttctgtatatggatatatttggggcactaatctgactaacgccaaatattctatctttgttgcaagttttcaaagcagaaaangcatctccacatagatctcggttggctgcaccttggaatcctacccttaatctctgcaatgcttcattttcattttaaagcatcaattagtacgcgtccaaatgcacaataacaggcgaattttgttgcaataaaatacggacagaggcataccagaaggaatagtttctgaaagatgattggtttgaatatctacaacttccaagtttgcaacatc

SEQ ID NO: 120114 - DNA, 274 bp, Glycine max
  unsure (1)..(274): unsure at all n locations
acaccccccccccaggaggnttagacctgacacgganaaaaaaacgagcgcacaaggggaagggagtttatgtggggagaagaaccgagcaagaccgaagcccacggaaacaacaggagggcacaagacaaaacaccacgaggcaacgcatcgaaaaaggagaccacagccccaaacgaaacaggcaaaaagtaccccaccgggcgaaacagaagcagaaggacccaaaaaacgcccacccaccgaaaacagccgacaaacagcgccaccacga

SEQ ID NO: 120115 - DNA, 354 bp, Glycine max
aagctggagttgctgcacacgatgtccaacgttatgtcaaggaataagatcgggctgcactatgcacaaggcaagataaaacgtcatatgagaaattgaagctgccggatccacgatgtcggatacaatgtccaggacatcctgcccgagaatactggagttgctgtacaacgcacgatacaagtcaagtagtgaagctgcatgatccacaatgtcagatacgatgtcctgacatccggcccgataatactggacatacaattctgatacacctctaacaaattatggtgcaggtagcaagagattatatgatctatctttaggaacgaataaaagataatgaaagtttgaata

SEQ ID NO: 120116 - DNA, 428 bp, Glycine max
  unsure (1)..(428): unsure at all n locations
agcttgtnagattatggagtacccctcatatgttgtactaagtggcgaccgggtgatgtaacaagtcgactctccacatccactaatcacacataaacgcaccattttcagttgcccacctctaactgagctcacgtactcccacgtagcccatattctcgttcctcttaagactgggtccccatcaatctctcgcagcttgcacaacatccaagcaatgtaacatacagacatcataaactatccataaccaanaaaacagggcagaggcagaaaactctgcccagaacacaaccaataccacggctgttctaactcaaataccccaggtacaatcttcttcggtcaattcgtttaccgttggatctactcagaaatttactggatgtccctagacataagtctccattttgacgatgggatctgct

SEQ ID NO: 120117 - DNA, 291 bp, Glycine max
  unsure (1)..(291): unsure at all n locations
tgaagcgactaacaaactccctcagatatatagggttatgtgtcctcaagcaaagaaagaacacgtctcttatcctcaagtgacaaagacagtggccaatccaaagaagatggtgttngattcatcaaggacatcaaccatatgaactgaatatcatggaatgctcatatcaatcacttctcacaagcatgcaactcntccaagataggagcaccaagatcagagtcatagctgaaataatgctagtagcatgacagaaatcaaggaaggagcatcaaccagaacgtcaca

SEQ ID NO: 120118 - DNA, 191 bp, Glycine max
aatcgcaaaaacaccacactggacatacgcctaccaatgctcagcaacacaaggtatgggaagtgcaaacgttacaccctaagaatgctagataaatggggataaggaacgaagcaacacaccaggcaaaaggcacaaaaaaaaacccaaaacacatacgacacaccatgacaacaaaaaaaccccccccc

SEQ ID NO: 120119 - DNA, 395 bp, Glycine max
  unsure (1)..(395): unsure at all n locations
cttgccccttcatatatttgagggtctatggtcactatgaatgacaaactccttgggataacggtagtgttgccatgttttcaaagcccgtaccaaggaatacaactccttatcataagttgaatagttaagggtaggaccacttaacttttcactaaaataagcaattggatggccttcttgcatcaacacagccccaatcccaacatttgaagcatcacactcaatttcaaaagattattgaaagtttggcaacacaagtatgggggcattagttagcttttgcttaaaaacattgaaaccaacatttttcttgagcacttcattgagaggtgctgcccatgtgctanaatccttcacaaatcgtctataanaacttgctaagccatgaaaac

SEQ ID NO: 120120 - DNA, 326 bp, Glycine max
agcttaaagatggaatactgacttgttgttttatataaaagcgcgtaacggacacgataagagcgaaaagtagagaccctatggctgcaaacttggtaataccctgggtatggatattgaaaggggggaaaagaagtttttgaatgcaaaaacgtccgcctttagtcatttttattattcggagcaatggttgctagcccaagtgaactcatcttgcccaagcgagctaacctgcactctatttttttttcttttttgaggggaataataaccatgtcccctcctcccttacgggtaaacgttctgtcgaacatgtacctacttaa

SEQ ID NO: 120121 - DNA, 376 bp, Glycine max
  unsure (1)..(376): unsure at all n locations
ttcttctggcttcaatccatcagtgggcttttcttctgtgtccagcatcttgggatgttcccagcctttgatgacagctttccaggttctgctatccagtgatttgaggaaggccaccatccttgctttccagtattcatacgtggttccatccagaaatggtggtctgttcactggtcctccttctttctccatgttcatcagaatttatctccctacgtctcactcagtgatttcgagtgcccgctctgataccaatngtaattctgataccaatgccagatgtcgtacaggatgtcccgacatcactcttcagaacatgcatattatctctgagtgtatgaacagattaaacaagtaataacacaagagaatt

SEQ ID NO: 120122 - DNA, 394 bp, Glycine max
  unsure (1)..(394): unsure at all n locations
agcttacggggcagaacgtgtgatataggctactatatattggatgacgccacttccagtgaaggaagataagtcagggtagacgccacaaggattaccttgataagtctgagattggttcaacaaggaacccagagagaagctctcaccaaattttatcaaaatgccaaaagtttttattgaaaacaaaaaccaatacttatagtgtatctgaacaaaaagatagaaatagacatgggccttctaaacagttngngccaaaattacaataaataaaaattataactaanaaacatttaacttgggccttcaaattagtttgggccttcaacaataattaatagtcttggtagtgcctttgtctctgggccttcatctttctccactcgggggc

SEQ ID NO: 120123 - DNA, 305 bp, Glycine max
ggggggttgaataccgagttaatcaaagataatgactttataaatgtttatcacagattcagacatgttggccgtgtgtgtgtttatatgtatgtgtgtgcgcgtgtgacgagacatcctctaaagagaaatgagtgttgataaagctaagtttaatcatctagttactaagtaaaatattgtttcaagcaaacacttggtattaaaagagagataattcgcacttagagaatacttaataataccaatatgaagagacgtataaatactgtgatctatattggctcactcaaacagagctacgt

SEQ ID NO: 120124 - DNA, 398 bp, Glycine max
agcttctccatagctaaaatcagcttatgcatatgtttatctatagaagctctcacaaaatagcttatctaaaagatgactcttaacctatgcataagctaattttagcttatggagaagctcatatcatttttcttcttctcctacaagtgtttgtgaagaagttcttcttaagattttaggataggatttggcccggcagctttaatggtatctactattgttggttgaaacatcaaagaggaggaagtcatcaatattatggagttattctgtgtcttatcataagcattcttgtgcaattaccctacctgacttaacccctttactccccatattgtttatctggattattctcctgcttcactctccctaatggccagaacatttccatgata

SEQ ID NO: 120125 - DNA, 446 bp, Glycine max
agctttcatcaaacacgtagtgtgcaattatattaaaatcaaacaacacaccagaaagtctcaaccatagtcataacttaccagttatagtagtactctctcctctcgcatccacgacgactctaatcttcatcacaacctcttctctcgggatcactttcctcccatgtgtgccctcatgctttaagtgcaatctaatcaatcccaattaattgatcaatttagtttaatccaccgaacaacattgtggaaaaagaagcaggcttagtttctattgttggtcgtcgaggcccaaggtgcatagggagatggttcatatgaaatggtgtgctttggcggcggtggtgagaaaggagaataacagaagacggaaaggaatattattttaaaaatagggagcgaaatagaggggtctcgccgacaataagctttacaacaatgttgat

SEQ ID NO: 120126 - DNA, 388 bp, Glycine max
  unsure (1)..(388): unsure at all n locations
tagcttannttaagttagtctaaacctatgtttactgtcttaattgggcctagtccaacaagagggatttgaggatgaagctaggattgattcatcctgactagggatcgaggtttattaatttagactacagtatataacacataagcatgattgattagagaaacatctttacatacatcagctggttcgttagaaagacccaacatatttacctactactgttaattttacttactagcatttatattgtttctagcctagactgagtttaattctattttaaaccatcaattatcaatgtcttttttaaaatgccttattactgaatttactctgctaagactattctctggttcgaactcggattcatcgtttaattttaaac

SEQ ID NO: 120127 - DNA, 303 bp, Glycine max
  unsure (1)..(303): unsure at all n locations
ttttttctaaaacacttgcggaagaaaaaaaacaatatgcattaaggtgttctcatatgtataaatcaaagccaacttgctcacgctagaacagtnagaagtgatgcaaaacagatatagttcaactattatttaaccagactttaatcctaaccattgaatttttatcaatatattacgatgaattttgatggtaggtactacccccagatccacgataaagaagcatccaacctagaacattgtcttaacagaagcaagacacctcttccactactcttttaaagtgccgccttcaatcaa

SEQ ID NO: 120128 - DNA, 358 bp, Glycine max
  unsure (1)..(358): unsure at all n locations
gcagcagcatccgactnatgaagaccgagttctttgatcaacaccccacaatccgagatacgataaagatatcaaagagaaataatacagaagcgaactagactccgaaacttcaaactggtcaaggaaacatacacgaactcattcctctgatgtcaaaaaacaaccccgcaaacaatttggcaccatagatcatctcagaccacacacacctatttcgtgagagaaggcaatatcggtacagggggttgaggacacagagatctcggctgcaaatcaaaatgctcaattggagcattccctggagaagtcagtcagagcacaataaactcattcacttcgccgaccaggaacaata

SEQ ID NO: 120129 - DNA, 332 bp, Glycine max
tcaagaagactcacccgcttctgtgggacataacctgtgaacaagacttcttagtcttcaagaagaccattgctacactatcagtcttgagttgaccctggccaggattacccctactcctatatcttttagtagtcgacgaagccgatagctcagtccttgtgtaaggggaagggaagcataagctctctatctacttcaccaaccacatactccacgacgtcgagtagcgctaccaaatgataaagaaggtggcactattcactcattacctcagcctgaagactcagaccctactttcagagtcatcaaggggtagtcaagacgaacta

SEQ ID NO: 120130 - DNA, 482 bp, Glycine max
  unsure (1)..(482): unsure at all n locations
cgcgaccttaagtcacctgcacgcatgcaagcttanggatagaatacttacttgttggttatgtacaaaggcgcacaacgtgatcaaataatgcgaaaaatgaggaccctatggctgcaaactcgtcaatcccgtgggtatggcttttgaaaggggggaaaagaagtntttgaatgcaaaaacgtcccccctttcgacattcttataatatggtgcaggggtggctcgccctagcgatccttctcattattttattttttatgatgatactataccatgttcacccccttcttatggaataacgtcttgcttcacttgaactccttaatgtatattctcgcctgaatactttttctcaacactctaattttctctcacatttaatttatggatttgtcgtttcttctacattataataagcttttatctcatctactgacttctatcatcatacttacttctctctctacttctctttaact

SEQ ID NO: 120131 - DNA, 353 bp, Glycine max
agcttgtctcagtgtttatgcgatacttgtttctacctgcttgctatcatcggcaaggaccaataatagttaggtctagccacggcccacgagcatataatcgcggacgagtatgctcaattatacgcggaaaaacaggctagaggaagggtgatcgactctttacaccaagaggcaaccatgtggatggatcggtatgctcttaccttgaacgggagtcaagaacttcctcgctggttagccaaggtcatggcgatcgcaaacacctactccgcccccgaaaagattcatgggcttctcggctattggcagcatatgatagacttaatggtccacattattagaaatcggta

SEQ ID NO: 120132 - DNA, 281 bp, Glycine max
  unsure (1)..(281): unsure at all n locations
tggaaaacctttggctaatggttaggttgatgaacaacgtttggtggaggtttacgtgcangattatgaaattttgacttcaactcaacaaccattatggttaggatgttaaaatacatcacagttgtttgttgttgttcatatgttgagcaaaaaatttacacataacatgtcacaggcctgcgtcaatgatgtgatgatttttttttagagtccaccccatttgaatgtcttccttctttttcaagaaagcaaaaaacttgtagtgggctaggttatcg

SEQ ID NO: 120133 - DNA, 293 bp, Glycine max
cccgtgtaggcgaagacaagatcaagtccataagcatcacagtctgaacagagtatgatgaactaatggacgtcaaatggccacccgtgatggcctggaaccagaaaccaagacggtcctaaaggaagatcacgtgccaacaaagcttggaggggcttaatagggcagcaatagatagcttaagctccgaaaaggtgaaaggaaccatcacgggtaaaagcctgatcttgaaggacgagctaaaggttaccttaagtcgagaagatatttgtcccaacagttgagcgagactg

SEQ ID NO: 120134 - DNA, 396 bp, Glycine max
ggcagacatgacttttgtgtatcttcatcatccgggtggagaaacactacctatgatgggctattgtttccctatatatgtacaacattgactatgttatgggtaagggagagatattgttgaatggggaatgcacaagttgtgtttcaaatctgggttggttttggataggtccattgcgtttaagttgtttgacttgtatgggaagtgttcaatgagatgggaactcggttgttgaacctgtaataacaaaccataataagctttgaccaatagcagagaatgacactcaacccaatatttgctcattgcctgctgacaacaatctttattggtaaaatgcttacatcagctgtgaaaatatcaatttttgatggccaacctaacatacaaaca

SEQ ID NO: 120135 - DNA, 266 bp, Glycine max
cgccatttgctctgaactatccatcggggcagcgccgaagaccgtcgtggggacgctatagtgttgtcgcttctggctgggcttaggcatcgacggagacaacccgctctccgacaccatcttgtctgagaaccccgacaagatgacacgtggcgcgttcataacggtcgagtaccacatgcagggcgtaggacatcatttcgcgagtatggtcaccatgaccctctcatcagtcttatggcactactaccctgcttcagcgtaca

SEQ ID NO: 120136 - DNA, 386 bp, Glycine max
gatgaccatgagcctcaagaatgatttctagattaagtcaacaagttcaagatcaagttccagagagatttgatctttagagtcaagaacagatgaattcaagtttcaatagaagaattcaagaagacttcacaaagggaagtgtcgaaaagattttcataaaacaaacatagcacaggtttgtttttcaaaagagttctcacaatattttctaagttaccagagtttttactctctggtaatcgattatcagtttcctgtattcgattaccagtggcagacgttgatttcataagctttcaactgaagttgacacgtccattgatatcaaatggtgaatcgattcatgctttgtaatcgattccagggattcgacgggaaatcaa

SEQ ID NO: 120137 - DNA, 422 bp, Glycine max
  unsure (1)..(422): unsure at all n locations
agctngttttggcagctcgatctttcttttttgaaactcaattttntaatgcgttgaagaaggatgatcacgagatagttgttattgacatggaacctaaggctttcaaggtgtcacattcattaaaagttcctctttatctctatacctttgtagctgtattttgttccacacaagatatatgctatctaattcagttacaatctggcctatcgtttggttggctatctaattttaatcgcgttctatgttgagcaggctttacttcattctgtttatagagacactcctttggaagatgaagagctctctatgccggatctcgcaatcttttcttcgtgtctgaataattatagcaaacttgttcctgccggagaaaatattgcttcccagactaattgtgatgtttgatctatcctttg

SEQ ID NO: 120138 - DNA, 226 bp, Glycine max
  unsure (1)..(226): unsure at all n locations
ttagcgcgcgctgcgctgtcagactgctattttttttanacaatctcagttttcttagaaatgcacgcacacactgtcgttgactcagaatttttggagcaacgtaccacatcttgtgatacctctacttaaagtgagacccctgttgttatactgacgttcatgaaagtcggttaaagagggggccactcctttgactgtttaaagcactgcatgtcctggtaag

SEQ ID NO: 120139 - DNA, 451 bp, Glycine max
  unsure (1)..(451): unsure at all n locations
agctntgaatgatgcctacatagtggtgtgttgttttgagatggtatttttcttctgttggaattgcgtgttgatgatattgggttttgacttgtgagagttgttgttttgtgcctgatgagtcttgaacttatggaaacgtggagattgtgttgctgaattttttactttatgttgtcttttgtggtgacaggaatcaacaataggggcagcgttcttttcgtaggcactggcaataaatgacgcgacggtaaagtttgagacttgggacacaacaggacaagagaggtaccatagcttggctcccatgtattacagaggtgttgctgctgctatcattgtctatgacatcactagctcggtatgatatctttgcatttggatattgctgaatacctcattaaatggacactatttggtgtcaaatgaccatagtagtcaatagttcgct

SEQ ID NO: 120140 - DNA, 296 bp, Glycine max
aacaagagggttcctttaaagaaaatatcaccctagaaaagtccagctcacctactcatgaagaggcatgatgcacaaaaagatgcgaacggggactatagacgctataaagaggggaggaagtgaacatgaaagggggccaaccacttacgcactactgtcgcggtccaatctggccagaaaaaaaggtaccggaagaaaatccaagccgaggcgctgccggaacgtggccgcagcacaccgcgagagatcacgcgaggactctcgaccgtgcctaagaatcatcgcccgggcgc

SEQ ID NO: 120141 - DNA, 311 bp, Glycine max
  unsure (1)..(311): unsure at all n locations
agctttgtccagttagctgattntatttatatttattacataataactgataaatcaccgggtgcagagtggatagcattttgcaaagacaataatatccagctggtgtggtaatttaagcacacgttgtcaatattatttgttcctgcgccttgaaataaaatgatgataaagatgcggcaagtgaatttgccgcaattgctacctttttagcaaatccgaggcacctaatggaacaatatgatcaaattggcgcaagactggaccgcttgcctttggcccggtttcattatcgtatatttggtattata

SEQ ID NO: 120142 - DNA, 381 bp, Glycine max
gcttcagctctttgggccgactattatatttattttccgtccaagggttggctacacttaaaagttccttgatctttccgaagaatctattatgcggggatcgaacccatgtcgtttcacacaaatttagtgtgtgctgtcaactgagttgcattcattggtgatttttttggtaagatactaactcataacaattttgttttgtttcaaaaataccaatatatttcaggatgacttttttcaatggtatctcactataaagattggtaaccttaccaccctcttgtattttcaggctaatgaaccttaactcactcccctttcatcacaatatgaaatttatatactactcttaagggaattcatctaaggatgatccaa

SEQ ID NO: 120143 - DNA, 194 bp, Glycine max
  unsure (1)..(194): unsure at all n locations
aagcgcaaacggaatcaaaaatctaanaagatgaccctaggctgcaattctcaatctcggggttggctttgaaaagggggaaagaagtgttgatgaaaaccccccccccttttccatttttatattggtgcaagggggctcgccaacagctacctgacgttgttaactgttggtccttttgaggggaacattac

SEQ ID NO: 120144 - DNA, 428 bp, Glycine max
  unsure (1)..(428): unsure at all n locations
atccttgagtcacctgcggctgcagcttatggctgcgaccacttcctatttatttttaaaagttgaaatctacttaaaatcattgcttatcaggatatttatacttcattgcctcttatgaaaatttaagtatgatatttcaaatacaagaaaattcagcatgtctttctcatatttaatggagtatatatatcaaaagagaaaagttgcatgcatgcctcattgggcatttgtttacatgcatagaaaacaacaacaacatttggtttattcatatttagttttaattgaatttgtcacatataaacaatgaaatataactnntaatttaatattatatatttaggtaaataaataactttattaaatattngatgatccccattagaataatntattaataattttaagttttatattggatgtgt

SEQ ID NO: 120145 - DNA, 419 bp, Glycine max
  unsure (1)..(419): unsure at all n locations
cctctcacggggtggaggttgtgccatgttctcaaaatgtgcaaaatcagaatgctcagaatcagaatcctcagaatcagaatgctcaaaattataatgctccaaatcaggatgttcaaaatcaccaataacataatgcacagattcaccagtaatggaatgctcaggatgatcaaaaggtataaaatgatgcctaactaatctatgaaatgtcctatctatctcagggtcaaagggttgtaagtcagatggattgcctcgagtcatacactacattcagcatgcacaactagttgccttgtcatgtaaataaaggtgcaagtttgaactacagctaccctcatatgatatccaaatgacttgaaatnttgtgaggaccttatacaatgatgagacgatagcacacaaactttcataca

SEQ ID NO: 120146 - DNA, 335 bp, Glycine max
  unsure (1)..(335): unsure at all n locations
aaaactttgattattacctagtttttgacttaagtctatcatgtaaacattattgactctaaaccctatatgctttatatttgtatcatggccatgttgaatgacacatttttgagaatcaaatgataccagataacctttatcacacaattgactaacactaagcaggttgtgcttaagaccttcaactagtagaacattttcaatggaggttgaagaatttgtacctattattccaactccaagaatttctacctttgtgtgtcaccataggttacatgcccgcttntcttgatagagatatgtgtgaactttgatgcatctcccgtcatatg

SEQ ID NO: 120147 - DNA, 335 bp, Glycine max
  unsure (1)..(335): unsure at all n locations
gacgcagcagcaagcnanaaaaggagcgacgtttttttctatatgagtctctaggactgctagtttttagaattggtagtctctagctataacatttcatatccattttttcgtccttgaatatttattagaactcccttaacattcatataagtaagcatctaatcttatactacgaaaaaaaaattgattgtccgatacatgaatcatttagtattattaagcattaattgtgtagtgtgatgtaaaataaatattttaaaatgatagcttctaattctatctgtgttttcctttttatcctcaaaatattcatgaatatcctattgtcattt

SEQ ID NO: 120148 - DNA, 405 bp, Glycine max
gatcttaagtcacctgcggctgcagcttataaggcggggtcatagattttttctatcttcgcgacatgcccagatgacgttccgactactttggagacggatcgaccatgccctcctgatttcctgctgtgaaattgacgaatggaggaacgccccgatttttacgcagacaccataatgtgaacctttacggcactaaaagctctatcgttgggcctacgctttagacttctttcttctgtcactgctttgcggcttctgttattgaagatataagacaaggatcttacgtgatctgattctggtctcttcccatactcattcatttgcatgaatacttgtttctctgacacggctgatccgatgactactccccctacgtactaaggcctaggacccgactat

SEQ ID NO: 120149 - DNA, 215 bp, Glycine max
ctgcagctctatgtatgcgaggaagatttttgttaaccggaacagactatgcgcacctcgcacccgatcccttccacatgaaaacaggaatattcatatttgcatctgatgagacatgtctctttcgggatgaattatcaggagcctgctctctaagaagaccctatcttggggcaactcctatagactttaccctactcatctcattcactaag

SEQ ID NO: 120150 - DNA, 457 bp, Glycine max
  unsure (1)..(457): unsure at all n locations
ctgcagctttcaacttaagaactacgaggtctgtatctctatcgcacctgaggatatgtaggagcaagggcagtccccttgtcgatcccttgtgacgagcgtgtagggtgctaattccttccccgtacgtaaacaacccccgaacccttattttcaaaatccgaaaacctctttttggtttttgaacgttctccttgaataaacgttggtggcgactccgctcgttttctcccttggagaggaacgctttggcttatttattttgcctttgccatcccatcgtgaggtangttgcgatagtcttcatttacatttcaaagacttcaatgtcttattcatttacgctgtcaaaagactactatgtcttcatttacatttcaaagacttcaatgtcttcagtcgtttacactttcaaaagactacaatgtctccattacattgcaaagacttcaatgct

SEQ ID NO: 120151 - DNA, 405 bp, Glycine max
  unsure (1)..(405): unsure at all n locations
attatgccctctcccctcggcggtgatttcttcttcggcgaaggcgagatagttgttggcagtgatattgttgaccagccctccgaaaccttctaccgagatatcttgggccacatgggcctcgttcagaacttttactaacagagcccgatgaggctcggagctcataagtaactccaacagcgagaccctggccggggttttgttgagctgttcgataaccttgaattcgctctgctgaattatatggaggaactcgctggcttcctctagcgacacctcctttntaccatcctttttctccgggaggccttttgccggaatatctttattcgaagcgtggggtgcttcgccatcttgttcctccaccacttttccttttcccttgacgttcgcgggttggac

SEQ ID NO: 120152 - DNA, 332 bp, Glycine max
  unsure (1)..(332): unsure at all n locations
atttatagaataatcaagggaagaaattaagtgactactattaatctacaagatatcttcattcaagtggtattgcggtcaggaattttagtgctttctttaattataaatgaaacacataagtattgaaccattaaatataaatctaccaattcagttcaaatgacttgacggtgaagtataatcttcagatacggagggtaaaacagagaaatggcttacatcaatcttgacagcttaattgctattattgattgattactaanatcaacttgattacatttgtgtgaaatatcatatgataattgtgttttaaaccacccttttgccca

SEQ ID NO: 120153 - DNA, 432 bp, Glycine max
  unsure (1)..(432): unsure at all n locations
agctttgtccgcaaatacctcatgttatacttatgtctaaactaaacagcattattgtaacagcataattaaaaccaaaacttaactcgcagatccctcatgtaaggctaagtttcaatcctgcttcaatcaagttctaaggcaacagtacatttctcgatgctaaagtcacctaactgtgcacacanatgggtgatcagaccaaaaacatacaaatattaagcattgaaggaagcattgaacataaaaacataatcaattagatattaggtatttacatcagttgtcattagaaatccccaactagggtgtttagccagccactacaaagaaaccctaacaataaatgataataaagcagagaatgattgttccttccacaagaaggaggagttcctctccttttctcagcatctcacactcactctctac

SEQ ID NO: 120154 - DNA, 287 bp, Glycine max
  unsure (1)..(287): unsure at all n locations
atgaaaacgaatgaagaacgtcgaagaacggttgaaagctttgcgagattcctcacggaaaacgttacggaaacgtttcgaaagcgcctcggcttagattttcttcacggaaacaatntttccaagcaaattcgaaagagagagaagtgcctaaggggctggacacttccttcttgctttcctcccctatntatagcaaaataggggaggtggttgccgcccagctcgcccaggcgagcagggttgcttcctccagaagcaaccgccttctggaggaatcttctgga

SEQ ID NO: 120155 - DNA, 313 bp, Glycine max
ctcgggaaagataccttgaatcagactcgggtcattcagctttactatatcgctgatcgactcgtggaagtatgcattgattgtcaagttcatgttatgcgacgattttatataactgatcgagatctgggaaagttgacattgatttcagactcgtgtaattcaccttaatattgcgcgatcgcatcgggaagtagacattgatttctagattcatgttaatcacgtcaatatatactgataaccacggaagttacattattagaactcggttattacttgacattcccatcgatcgggatgttacttattc

SEQ ID NO: 120156 - DNA, 224 bp, Glycine max
aatattcagcgccatgtcagactatcactcataaagatgcgtgattgtaaccaatattagcttgtttacgactcatcgactcagaaagtatgcgttgatacgttacgcataatcattcacgttcataatacgactatcagactcgacaaaaatttgcggtgattactaacctcaaataatttcactctgattatacggctatcaactcgagaaaagtttgcttt

SEQ ID NO: 120157 - DNA, 293 bp, Glycine max
cagcttggctatcacacatatgttgctgatgctgttgagtccgatcatttgacgctcgaatgaatctgagctctagctattcaacgacatataactttgctcggatgtctgattgagtccgtaatctatgagatgtcgaaatgaatttgacctctagctattccaacaacataacttttactcgatgctgatgagaccctatttatcagacgatcgaaatgaattctggaactctgagctaattctaacgacaataatgattcgctcagatgtctgattgagtccccttaata

SEQ ID NO: 120158 - DNA, 72 bp, Glycine max
tcagatgtttaattttcaacatggaccttgggttcaatcttcaagggtccttagaacgtcctattagatcgt

SEQ ID NO: 120159 - DNA, 409 bp, Glycine max
tgtctgcctactctaggttatcataattgaggcctgttcctcaagagcttgtagcccgtctatgtatccttgggaggggaattgagctgaatgcaaaccggctgcgttttgaaatcttgatgaagaatttgacaactctagcccaaagcttgagtgttctatctttttctaacttaatcccgacatctcacacttcagaatttactttggatagggcttaaataatctacgggcttgtaatgcagattgatatgaacttgggatccctcatcttacgtcagatttctcttatcgcacaacatgaactcctcaagctagggtttccatccttgattactgccatgtgcaaggctcgaggagtaacatttgattctttgccctttgaatttttaaccccaccataattttg

SEQ ID NO: 120160 - DNA, 309 bp, Glycine max
tgtatgcgttgcttgtaatgccttttcatgagcgggttacgggtgtgaagtagcatctccattgtgttaaaaaaagaattattatcctacattttagaaatggagttagtgaattaaataatattaccttacaaacgccaatggtatctttagtggatattatatacctggataaagtgatttccatttacaaatccaatggaaatgagacagggcttttctggcacgaaacccctcagtggaaagaaggtcacctctatttctagataattggaccatcaacatataccactagcatgactaaccctg

SEQ ID NO: 120161 - DNA, 381 bp, Glycine max
ctgagttttgagaaagtgataaagatcttttggagggattttacgtttgggtgattaatgaatatagcaaagcatggaatttgttagagttgtttctatgttaattttgtgcttatttggctttgcttaaactcattctagtgcaactattaactttgttgacaactccattacaatacagttttgtatgtcaccatattctcttccctggattattaattttctttctgcatattagtgctttgctccaaaacttgttgcagctagaataactctacttaatcactgcaattttattgaatatccattggtttttgtaacttgaaataacaagttctctaatactgatggtgtttttggaaagccagaccttttacagat

SEQ ID NO: 120162 - DNA, 116 bp, Glycine max
gtgggagttagcagattaaatttctcaccacactttgtagatgaaaactcaatgttgtgtgtcatttacaaaatacctacctcccgctcgcaagaggatatttttaaatcacccat

SEQ ID NO: 120163 - DNA, 433 bp, Glycine max
tttactagttccactactataatgcttgatcaggcacgaattggtgaagtacaacacaagctctggatatatatcattttggtctttaattggtttagagaaaatggtttcatttagatgcttaagcacttaccttaaccctaagcattaagaatagtgacacaaagatttgcatgatgggttagtcacttagttgatatgattaaaagaaagctatgaacttaaattaggaagggtagattttcttgtgtttttttgggcaatttggatgacaattttatttccaccaatcactgcagatgaaaaaactatacgatcaaattatcatttgtatcaagatatcactgcaaaattccctatttaaaaaaataatttgaaaatggaagtattttgaggtcctaatctaaatcctgattggactttctaatcctga

SEQ ID NO: 120164 - DNA, 242 bp, Glycine max
atccaaatatggcgtgcgtaaatgcagcacccttccctcctttctatagataaattacttattagttttaacagttaaggatagctctctttttctattcaatgcaaaataagtttgatacaggctagcttcatataaccgtctagaacttaacgggttggctacgagttatactccttttgtccgctattatctcgtcactcacctggtttctctgttaacaaaaacatattttctttttt

SEQ ID NO: 120165 - DNA, 96 bp, Glycine max
gtctctatattttcgaccaaacaaacatcataagaactatggtagtaaaaaaagtatcaacttcgaaaacttactattattttcttattccctgct

SEQ ID NO: 120166 - DNA, 282 bp, Glycine max
tagcattaatgatgctttgttgaaaatacttatacttgctactcgaggccccctttgtttattcgaaatctcctacactagccgcccataccaaagctaatgccaaatgagggtgagctcatgccaaagatctttatgtttactattcaaaaggctaacataaattggagcgaaataccatttgtgcccatccttagaattaataatgagatgcgaaaactgaaaccacttactaccacatgataagtaacacgatctttaatccccgccattatgatccct

SEQ ID NO: 120167 - DNA, 342 bp, Glycine max
  unsure (1)..(342): unsure at all n locations
ggaccatcttttcaatgactttcttatagtctactcagtatacctttcaatcatcaccacttgtgtcgaaacccgcggtcatgacatgaggtctaggagggcagctaatgtgtggtgaattgagagatcggtgaatcctgcatgacagaatgcnccatgtgcatttgaagtgtgtaatgttctatgactacaaatttcacttcacggagtggggaccttgctgtgctaacaaccgcctctagggctcaaacgcatcaatattttgcgggtgggcgaacacaccagtaacatagtaaaaaaaaaagcttatgtggttaaaaaatactcttactattgttttaa

SEQ ID NO: 120168 - DNA, 394 bp, Glycine max
  unsure (1)..(394): unsure at all n locations
tatgctgatcccatatggntggagcattctcgcaaaacatcgtgaccctgactggtcttcctatgatcttacttagtgagagtgacctgacaaacccatggtgtggtgtgtcttgttatgtactcctaagcgccccaaggtggtttttcactgacatggtaccacattgcatataggaattgagtcttaaagcataactggttgcatatgcattgctaaatcgatgtgttattatatcttgatcgaagtgtgggattcttgtgtaatgtgattgatgattgaaaagtgaattttgaatgacaaagtgatgaaataatgtgagatatgctaagtaaaatgtatttggctactatatggttgtttggttctctctagtagacaggaatgtgataac

SEQ ID NO: 120169 - DNA, 355 bp, Glycine max
tgccttgccccttgatatatttgaggaactcatggtcactatgaatgacaaattccttgggataaaggtagtgttgccatgttttcaaagcccgtactaaggcatacaactccttatcataagttgaatagttaagggtaggaccacttaacttttcactaaaataagcaattggatggccttcttgcaacaacataaacccaatcccaacatttgaagcatcacactcaatttcaaaagatttttgaatgtttggcaatgcaagtatgggggcattagttagcttttgcttaaaaatattgaaagcttcttcttgtttctctccccatttaaaaccaacatttttcttgagcac

SEQ ID NO: 120170 - DNA, 77 bp, Glycine max
ttcacttccatcacaatacacataccccatttaatgccacctcactgagctacgtctccacgtgccttatctcgtcc

SEQ ID NO: 120171 - DNA, 51 bp, Glycine max
tgttgttgcttagggagaagagagagttttaattacctactctttttaagg

SEQ ID NO: 120172 - DNA, 297 bp, Glycine max
  unsure (1)..(297): unsure at all n locations
tcgtggaatgctgtgtagaanaaataactcgctctaaaataatctactattggtagatgttatctattattagtacatagcctacttatttctattctacctacttatttaacatatattgtgatcacctatcaatttataaaaaaatattcttggatgccttaattgctctaatatatgtcctacaaataaataaaattgctcaattacttaaatataattataaatttgggttttccgatgaaatgtgaatattattacaaaccttgggccatataattataggggtaatttatg

SEQ ID NO: 120173 - DNA, 260 bp, Glycine max
aaaagattttttgggaaaaattaaatgtatggatcaactcaattattaaataattaatttatttttccccacgttattaattattagtggacgggattatggaaaatatttattatttcctttttacgcgcctggtattggaaatattaatttgggtggccatttagtattatttaaacccttagaacttaattagttctaattttctatttaaaatattaaatatttattatggatacattttattctcttttccaaag

SEQ ID NO: 120174 - DNA, 240 bp, Glycine max
gggggggtggatttagaaatttaaacttaattcccccattaaaaatctttttcactttctattcacagtataaattcccttaataatgaaattcttaaatattggttcaaaataaacaatttggatatgaatattagacaattatgaataaatgggtttaagagaagaaaaaacggccactcagaattattctggttcgggcacacccctgtggctatgtcccagccttaagccacccgg

SEQ ID NO: 120175 - DNA, 125 bp, Glycine max
cggatttctcttaccactgtcggatttacacgatatggcatctaacaattgctctgagcgatattaccagccgaaccccacccgttacgacccttgggcaatattactagtaggttctcaatata

SEQ ID NO: 120176 - DNA, 241 bp, Glycine max
ctttgtgcaagagacgtaattacgcgggttaggggtaccacagaatctttttatttaaggttgaagtccacaacgcaactactggcttctcgtgaacaaccccccctaatattaactaattacggcgtcaacggattaattatggagataattgtatgcgaaatgtatattcctatataaaataatctttttctaggctcataaaatacaacttttctttgactctatttaattaaaaaat

SEQ ID NO: 120177 - DNA, 313 bp, Glycine max
taccctttggacctcaaatcagatgattgactggtgccgcaccgatcttgtttaaacgctgaaagtttccgtggagaatgtgcgtattattttcccgtatattggcggagggtttggcggcaaactgttcctgaaaaacgatgcgctgctggcgggccttgccgcccgagcggtgaaacgttcgggtaaagtgatgcttccccgcccctctattcccaataacaccacgcaccggcccgacaccctttaacacttgcgtattggggccgaccagagccggaaaaataccgctttctcacatgaaaactggtct

SEQ ID NO: 120178 - DNA, 252 bp, Glycine max
ggtcagaagtcacaaatcctatataacagacggttgtaccatagggactggtcttactagatagacggttatggtagcaaatgacacagtcctgaataccaattataatactctaaggatctggaaaagggtcattttcatttttaattttttttttattaaggagaaagctgtcagtgactgctaataaaaaatgctacctgttctatctttaaatatcttggtgaaaaaactattataactatagaggtt

SEQ ID NO: 120179 - DNA, 196 bp, Glycine max
ctcgcgtgtagcgctcatcacagtgaagcgcagaggctgtgctcccggcggcttgcgatctcggcgggggtcaggcgtttccatggtaagggtggtttggccggccgaagtaacaatggtggggtaagtgaaggtaaaagaagtggtggtgtgggacgtaatgtaagaaacgaaaattgtgttgggggtgtggggc

SEQ ID NO: 120180 - DNA, 330 bp, Glycine max
aaacttcaacaatgggaaaaataaaataagaagccctatgcaaagaaacctatctcaggggagccaatcatctgtaggggaagatttcctaaaatccttaaattgttattcttttttattcatcctttctccatgtaatatgcttttaatgaataatattaaaattttcttattaaaggactttatctcaaagtcttatgatgcattatgttcttacatttcataatatttctctgattagactaaccttgcacttaactatcattatatatatcatatatatgtcttccaaatttacattttgtatttgttgacatcatccaaaaggga

SEQ ID NO: 120181 - DNA, 308 bp, Glycine max
gcgaaaggtgtaccttcggggtctttttgttgacttgtggcaccatcgatggccttgttccttgtggttgctcggaacaccttcgcactatgcgataccacaagcctgccgtctacgcggtcctcggggaaattcagtggtctaccttaattaacctctctgtccgctacactgctgcccaccagtacttggcgtgttatacgctgcccaatctatcgatgaacgacggtcctgcttagaccacaccggctgcattgctaacgcgcgcatgtatagtcatatctggcaattccgcgcctgtgacattg

SEQ ID NO: 120182 - DNA, 288 bp, Glycine max
  unsure (1)..(288): unsure at all n locations
tggtcctcanatccctcttgttggactagacttagaccaaacagcattattgtaacagcatatctaaaaccaatacttaatccgcagatccctcttgtaagactaagtttcaattctgcttcattcaagttctaagggaacaatacatttcccaacgctaaagtcacctaactatgcacacaaatggatgatcagaccaagagcctacggaatttaagcattgaaagaagcattggacaccagaaacacaatcaattagatattaaagtaattacatcagttggtctt

SEQ ID NO: 120183 - DNA, 332 bp, Glycine max
actctactacacaattatcccgacatatacttcacacaatcatccgatgagacacctattcaaggctagctaacacacaacaggctgtcttctttcaatgagtgctagcagcctcttctcaccatcacacacacgccaaacacaacgtgagctctcgaccttctcaaaactggagcaatacatcaaactgtgttaacaagacaagctcatcaacttactgccgatgacatggctccataatcacacagccagatttgaagtcgctttattgctgaccaaatggatcattatgagcgaagcggaagactactgacactctatccatggtgcac

SEQ ID NO: 120184 - DNA, 322 bp, Glycine max
atgcattggttaacttggtaaacccaactggccttgaatcaaaaatctgtttctgtccaaggtttggggtttgtgctcctctgctgaacaccatacagaactttgcccttccattcagcaaccttgagcaattgaacaacctgaagcttatgcttcaaatatttaaataaaactcttaaacttacaacaaatcaacacagcgagcatatgactttcacacgatacactaatgagatacctactaatgtcacctaacacacgactgtctctcaagtgtgcacaactctctcctcaacaaaccaaacaatggctcactctaatg

SEQ ID NO: 120185 - DNA, 142 bp, Glycine max
gcagttatactattttgtaaaaagtctggatcgaagacgataataacactagatcagatctatcccctcagaaagctaatgaaagtggaagtagaattctaataaagtgacccttactcaataaagcacccctagattcttt

SEQ ID NO: 120186 - DNA, 286 bp, Glycine max
  unsure (1)..(286): unsure at all n locations
gtgacacctagaatctcagctatataccaatatacatatgaaaccggcacaaggccagcggtccaatcttgcgccaattttatcatattgtttcattangagccctcgatttgcttaaaaggtaacaatttcggcaaaatcacttgccgcatctttattcatattttaatttaacgcgcacgaacaaataatatttacaacctgtgcctaaattaccacaccaactggaaattattgtcttttgcaaatgctatacactctgcacccggtgaattatcagttatta

SEQ ID NO: 120187 - DNA, 274 bp, Glycine max
gacttctcaaggcagtgagcttaattattacaaggatgtgtgtagctaagctctagctctccaaggaagcttttccagaagcttctcaagaagcctcctaggcataaataaagctgtgtaaaactgtgaacttgataatagagctgaaaaccctcaatcaatcctcctttccctcatcgccccccttctttttttctcagactctttactcttccagcctttggaacctctctgtatcaggaacctccacttcctactcctatctgggaaacct

SEQ ID NO: 120188 - DNA, 295 bp, Glycine max
tgacactctacatactcagcttttatatgatcggtcttgttcaacaaaaggtggcgtttctatacaactagaatacctgccttgtaaccttgtgtatgaagaaacgcatcctcggaacactaaaaaactcgcgttaataggcctgtccctctccctggtgcggaaaaaactcttctttgttttaatgaagccatactttaatagaaaatcatgtgttgttcggtttgaggaatctttcaagcatgcccatccgtatactcaacgcgtctttagatgggtaactcttgacgtggag

SEQ ID NO: 120189 - DNA, 164 bp, Glycine max
gtatgggtcttaaacaaccctggatcgacgaaatgcctaccggtggaaggaaaaaccttgacggaacgctgtctggttaactgaacgcactaacccgttaaagctgcactattaccgcaacgactcctggccaagtgcccgaaacaccgacgtgttgattctgc

SEQ ID NO: 120190 - DNA, 184 bp, Glycine max
tagcctgtcacttttgttggtgggtttttttaaatggtatatccactgtggtgtgtgctacctgaataaaagaaggaagtatgcgcctttttgtttgttcgaaagaaaccagatctgctggcaacttaaacaatgatcacttgatacaaaagatgcaaccattcatgagagcttgacttgcaat

SEQ ID NO: 120191 - DNA, 307 bp, Glycine max
tgacactatgaatctcagcttgagagtttatcgaagctcggatatagtgaacctgtgacgatcatcaaatttgggacttatgtttgacgagtcttatttgcaacgcatgtgttgtgctctttcctacctatcactcatcatgggtggcatgtactggagacatcctgccgtgaatcaataagacttaccaaaggccgaccctgggttttgcaaacccttttgaggaatgactaaggaaatgtctaaactgggttttgggcgccatgctggtgcatacattgtactcaccatgggtggcacatactgc

SEQ ID NO: 120192 - DNA, 375 bp, Glycine max
cttattctacttacaaattcgtatgtcaattcttgagaaaggttatagaccacctctctgatattaccaatttgataattgagaaccaaggcttaagaatcttcaatgttctctaagaattttatgcttagttaaccaaaattagattaacttccaaagctttctagttaactgtttaaaaaaaaaaaaccttcttttaaccttgcattgtgtaatggaagaaaacaaattaaatatgccatgataagaaaaagtgcggacattatataaagaaacggagatctcatggatttaaagtgctatgcgactctcacaaattataggctatgtgaacagtctacatcttgtattggtttaaattttttagattaagtt

SEQ ID NO: 120193 - DNA, 146 bp, Glycine max
tgacatatgtatatgttatcggactggaagaagccttaatatctgcccttagctgtctcctgcatgagccccacactgaacatcatttacacccaaggatttataacaaaattagttttgcgccaaacttcacttgagctgaattc

SEQ ID NO: 120194 - DNA, 330 bp, Glycine max
ggacactccgactctcagcttgaagataggttcatgtgtgaatgtaagagcctgattttggttttgggtattggcattatccttacctggttaaagtcttggggtattttatggatatattaatggtaatgagccgcttcttgtttcaagcaccaacacatgggacagaattgaactgcgtgtgcacaaaaaaattattgatctctacagtttccctgatgtggttaaacaaattactttcatcacaattgaacccggtgttgatggtcaaggcaccattgcagatgcttgatttttgccccattttttccccgcatgctagtatctttt

SEQ ID NO: 120195 - DNA, 288 bp, Glycine max
ccttccataaacagttttaattctctgtaaagtttttgataaaacagcctgactagaaacttttgggatctctactacctctcttctttctagaggaaagactcttacactaagctaccccatacatgttttatggctgaagcaagactcccaaacattacctatggctgctgctgaccacttggggatatttgctccttttctatgaagccccaatctgctgctctggtagaaccaatgaaatcttatgtccctttcatgatacccagcttgaggactgctctctta

SEQ ID NO: 120196 - DNA, 282 bp, Glycine max
gcttatggaagtcaagccgcatgattaaaactaggagtttacaagactggggcgaagctcttgcaacagagaggcacccccaccccaacttttttaaaaatatgcctatatgttctgaaagttttatatcttggtaacattaaaatcttgttataatataatcaatattccttaaaatgatttctattattccactaccaataattgtatttatttaaagaggttaagaaatttaattactatggttagttactaaagagtttaaccggtaaacttgctgat

SEQ ID NO: 120197 - DNA, 319 bp, Glycine max
gtctacctcaacccaaattatgtgtggcctgatattctaattcttacatattgtactctacttacagaaaaaacgtcgtggccgatattagttttaacatttttggggtcgaaacaatttaaattactcagtttaatgcgtcttttctaaaatatgattcttggataataacacgctattaatttatttatcccttaccccttggctttaaataatgtatcacttcctcaatcctgggggcaatttattctgttttcacataatttatattacatagcaaacaatagctctacgatatctattactgcaaattcgtcta

SEQ ID NO: 120198 - DNA, 295 bp, Glycine max
aatttttttggcttaacttctcttccttggtgttcttaattttcttcatgtataactcacatgtttgtgctaaagttggtaacataatctttaaattttcacccgataaacttgcttttgaagcctagatttattttctatgggtcaaaatttatggtctttgttcttgaaccatgaattgggatgagtctaggatcccttgagttatgtcttgtaataatttggggctggaaacctaaccataaaattgttccaaaatatttaagtataaaaaacctctaaaatcttagggact

SEQ ID NO: 120199 - DNA, 325 bp, Glycine max
tggcttagcgcgaggataagaccgcttagtgaggtttgcaaatccggaaagctataactctcactaagccaagctctggctggcttagctaaaatgatgcatattaagtacagaggagcatgcgctaagctgataaggacttacttagcgctcacattggcgcaaggaattcagcttaacttccatgactggcgcttagcttcatggacctcaattttgggcgtaccgaatttatcttggtgacaataggtcatgcttagcccaggataagctatcacttatcgatcaggctaaagcttagctgaattcagaacgaattgaagtt

SEQ ID NO: 120200 - DNA, 233 bp, Glycine max
  unsure (1)..(233): unsure at all n locations
ntgcttgcggtcacactgcagatgaatggatgagtgaagaaacttgtcccacagaaaccttaactatgagcaagaataaaaaaagaaatgaaatttagatttcagaaaaacaatattatcagaaaaatccacccgttatctaacattcatttggtattggcttaactttaagcatattcgaaccatgtcctttggctttttccagaaatttggttactcttttttttggaaca

SEQ ID NO: 120201 - DNA, 311 bp, Glycine max
  unsure (1)..(311): unsure at all n locations
gacctctacaaactcagctgtgctattcttcttttatctctttccctttgcaaaaagaatcgccaagaccaaccgtctgaatctttttgngctcacttctccctttttcaaagaaccaagactaatccatgaatcttttgtgcttccttctccttgtcaaaaattcaaacgaacagtctaaaatctttgatctccctttcctatacaaggttcaagacaccgttgaaattttgttccatccaagatcaagttcagctaacttgctccatgagtctcttagcataagtcttctggtgatgacaaagactttg

SEQ ID NO: 120202 - DNA, 170 bp, Glycine max
  unsure (1)..(170): unsure at all n locations
ggccctgccttgtttactaaacttcttcacacccaactggggtatcgacatacatgttttaccacngtctaatgggggttgtacctggtcaactgtggcgaagttgctcaattatccccgcgactggcaagcccgcaattgggtttatttcccattacccaccgctttct

SEQ ID NO: 120203 - DNA, 217 bp, Glycine max
ttttgtaaaataaatttgaaccttgtaattcaatatgtaaaacctttttcaaaacacatttgccactgggtaattccattacccgaaagttaaaacctttttggtaaactggtttgaaaaaaaacactgcctcctcaatttatgaaaaacttatctacttacctgaataaacttctctgattttgaaactgagatttaaactgatctgaatctgaac

SEQ ID NO: 120204 - DNA, 430 bp, Glycine max
  unsure (1)..(430): unsure at all n locations
aaaaatgngtaatatttcaaaatgatgtgaataagacgcattaacaataattaagacaaagttattttgttattatataatggggcaaaaaacaacaaaggatattatgaatgatgggttaaattcttacaaagggtaaaatatgaattttaaaattgagctttcgtaaaactatattgacatgtagaggaagaatcaacgattttaaggtacaaaaaggtaaaaaattgtatttttaaaacaattaactattttgtggagatattctattaaataaagaaaacatgcaaagttttccttgcacacaaattgacccaaatattaaattaaaatcggcgcaaattacacacttacaattaacacactaaaaatttaaaaaccaaaataattgcaaaccaaaaaaattccccccgctaccatataataaaaa

SEQ ID NO: 120205 - DNA, 174 bp, Glycine max
tgacggtatgcaagtggtctatataggagcctacatggcgaagtctgtgtggcctatagtgtatgagcatacaccatacaggccggcgacatacgccgatttttaatgtcaagaccctggggttacccagcttaatcgccgcgtctaacatacccctttcttcataggcgtcct

SEQ ID NO: 120206 - DNA, 333 bp, Glycine max
tgtcactattgaatgggattttgtgtgtcataccattaaagaaagagtctcgggcttatgtctattgttcttatcaataatgcggcctcccttaaactttgctaaaattttgtccatgcccatgaagaatggacccattttctgcaggccaattttctcaaaaacacaaaccatctatccttttacaagaaaatctcgctttggccttccctcaataagcactttgaggaggtatggtccaatattggttgggtacttactgcaagagctttaactaacttttggaacaattattggagctcgctctctcctttgtttgcagctttttaacct

SEQ ID NO: 120207 - DNA, 331 bp, Glycine max
tatgccaagacggagaccaacatgctagctatcaacggcaagttccaagaatagttatgtctaaccgccgcccacgaacatatgaatgcggacgaaatatcccaagtattcgcgggataaagagctagaggaaggtgatccactttttacaccacagagcaaccatgtggatggatcggttgctcttaccttgaacgggagtcaagaacctccccggatggtagccaaagccaacgcgatggcagacacctactccgcccccgaagagattcatgggcttctcggctattgtcagcatatgatagacttaatggcccacataaatagaaat

SEQ ID NO: 120208 - DNA, 350 bp, Glycine max
accctagaaactaagctgttgagactgaaaatttattaactaaaatattttgcgcctatttatttttatttgttatttttcgtccctacaaaaaaaattatttttaatccctataaatttatattggtatattttggctcggatttaattgaatgactctaaatctatgtgtctaatgttgtgcacagaagttgatctattagtgaattagacttctacacgtgttcaaactatatcttctctctcttcaacttgcgactctttctaaatcttctttcaataatcctgcacccgacaccctttttctaaatcaccacgccctcgtctttgaccaccatatctagttgctt

SEQ ID NO: 120209 - DNA, 136 bp, Glycine max
gtgtgtgtaacgatcgttgtgatcgtttatatgctgaaattgcctatggaaaactgttatagatgaatggtagagttaacctacggttagaaagtgagaatattgtgttgtgagtgcttaatatcctctccttttc

SEQ ID NO: 120210 - DNA, 516 bp, Glycine max
  unsure (1)..(516): unsure at all n locations
cttagagtcacctgaggctgcagctatgctgaaacattataatagaccccatcgttattanaacanacaacagtagaataattatgacctttcaagcaacagatacaatccaggttggggaaatcatccaaatctgagatgggcaagtcctccacaacaacaacagcctgtccctcctttccagaatgctactagtccaagcaagccatatgtttctcctccaatgcagcaacagaagcagtagcagcaacaacaaagacaacaagaaactaaggcccctcctcaaccttccttagaagatggctactcagttgaatcaagctcagtcccaagattctaacaaattaccttcacaaactatgcaaaatccaaataatgtgagggcgatcaccttgaggtctgcaagcaaattgaagtgctccaccagtagcagcacctacacctaactaaatggatgagatagttgcacaaaagagaaatcttctgatcatgagcgagctatcataatatatcatg

SEQ ID NO: 120211 - DNA, 274 bp, Glycine max
  unsure (1)..(274): unsure at all n locations
cagccgaagaaaggngaagggaacgccgccgccaacgttaccacanagggacacggagaatgctgcggtgatcaaaagacctcggggacgtccagcggggagctactgcccaagaacaagcttaccaatcccgacccaacaccggcatcagcagacatagagaaccagggatgtacctaagcaggcaaactcctgacagccaacagatgaaaggaacaagaaccacaaagcaaggaggctcgcgcggaggctggccacatgtaatcctcagtga

SEQ ID NO: 120212 - DNA, 438 bp, Glycine max
tgtacaacgatgtgatatctaatgtagaggaacctgaatatcctctaactatgtgtaatcaatactacctgtctatataacaatcatctgttgtgtactctgatacacagtatacacacaaatatccctccatatttttctcttattttacagtatgcttcctgctatacagaactattacctacagtttgttaccaaaaccctatgatctagtatttgtttctatactataagcctaaatttcctaaatccaaataactcatttcattagtgccacttgcaatcacaatgttgagttctctctagccctgagagactcacgtagaaatagcagttagtcttttgaaaattgcatattactaccatcatttatcttatagtagtatcaagaacaatgattttaaaataactagaatcatgacactgagtttaatatac

SEQ ID NO: 120213 - DNA, 226 bp, Glycine max
gtcaatgagagcatgcctctatatcttgtgcacttaaagaaccactttgtgtgaaccgtccaacctttattgcatgccacaactatcagcgcacaatgctatcctttcgaatgcattgccttcaatcagaatccccttatttgctagaccgattgattacaaaagagtgacgattgatactgtgagcgctgtactcatattcccgagacatggtacccggacactc

SEQ ID NO: 120214 - DNA, 446 bp, Glycine max
agctttctcatgaaggatggccacatggaagtattactattgtgctgacgatgaagaagtctgtggaactggtatgaagataaggaacttaaggtcatctccgtatctcccttgagctcaacgaattgacccgcatgtaagaacttcatgcacaaagaattgtaatccgtaagcaccgggcccaatgatattaaccactgaacaccgagaacgatgttggcccccgcgatgggaagaacatgtaagtccaccacgaactgagtatcttggatggtaatgacaaggccttcacataagcaattgcactcaagctgctgcccatatcccaccatggcccgcaatggggtcgtgctacgagtcgagaggcccaattgagacaccaactgatgttggaaaaattatgtgtgctgccaccgttcaccaccaagacaacaatgtggtcgtcg

SEQ ID NO: 120215 - DNA, 410 bp, Glycine max
  unsure (1)..(410): unsure at all n locations
atagacgngatcaaactggctcttaggaactggcttcgtgaacttatcaacaggattgtgcagagagctgatcttgtgaaccttgattctccttttcgaccgaatgaagtgatatccaacatctatatgcttgccctatcatgataaacctagatccttgggccaagcatatgaagacctaaggcgtatcatactagcatgtctagcatactcattgattaatttcgagaacacttatcagacctctcaccaaatcttccttgcgctcacgggaccatatattacctcgagttgaaggcacaaagtgaggtgctcactacagcgcccagggtacacctgagaactttgcaacacgaaacactaaacctggcaacgtgacaaacacacaactcctaaacgaatttcactca

SEQ ID NO: 120216 - DNA, 408 bp, Glycine max
  unsure (1)..(408): unsure at all n locations
agctntgtcatttgagtgatcaccattccttatttgtctttctttatttccagcttggtctcctatttctgatgtacaatctttctggcttgtttccttccactctgatcccctacatgtttgatgcccttcatatcttgaatattggtttcacctttctcaacttttcatccttgctatttcgtttctctagtggctcctaccttgagggctataatatttgcacccacaaagattctcttatcataattgtatttgggtttagtaagcccacatatattatcattattcttcagtgattactatttgccccaacgatactgctcttgccctcacggccaagagacattactcaactatccttcccacctaccctattgacattctcctcgttctcattcccatctt

SEQ ID NO: 120217 - DNA, 428 bp, Glycine max
  unsure (1)..(428): unsure at all n locations
ggactanttccgctcctgagtatgacagtcaccgctttaggagcgttgtacaccagcagcgctttaaggtcatcaagggatggtcatttctccgggagcgactcgtccagctcatggacgacgagtatgctgatttccaggaggagatagggcgccggcggaggacatcactggttacccccatggccaagttcgatccagaaatagtccttgagttttatgccaatgcttggccaacagatgagggcgtgcgtgacatgaggtcctgngtaaggtgtcagtggatcccgtttgatgctgatgctatcggccagctcctgcgatatccgttagtgctggaagagggccatgagtgcgagtatggtcagaggatgaaccggtctgatgggtacgatgatgaggccatcgcccagttgctatgtataccg

SEQ ID NO: 120218 - DNA, 391 bp, Glycine max
  unsure (1)..(391): unsure at all n locations
tggttcccaacactctggtcaagctctcccaaaacctagaggttatttatgatctctatcanatactatgctagatggcacaccatgtaacctgataacctcacttatatacaaggtggtcaacttctccaaggaaattcgatattaatgggaatgaagtgagtagacttagtccatctgcaacaataacccaatataatcaaacctctagggtctaagtagccaccacaaatcatggaatctgcccacttcctgggattctaaggtgaactcctgatgctatagtttctacctatgaaactagagaaccaactactactctttcatgagcacaaatatttaaactgtcttggaccagaggtctaatactcagtctcttaacattctagta

SEQ ID NO: 120219 - DNA, 357 bp, Glycine max
  unsure (1)..(357): unsure at all n locations
gcagcatgcagctaaaggcataacatatggcataacattgtatttgtttgtatntacatcagtcaagcaccctcagacgaatggtctagtaaaggcaaccaactaagtggcattaaacagactgaagaaaaggatngaaaagtccggtttcaattgtgtagacaagctatcacaggtaatatggtcataccacacaataccacaatcttcgactcatgagaccccttttatcttggtacatagagnacgcgctatgatattgatatacatctattagcccacgttcataagaactacttttgtttaaacaccctaaacattgatccttcatcccaactctgtcatgattcacctgac

SEQ ID NO: 120220 - DNA, 174 bp, Glycine max
tctaagctcctagaactatacttaatctgccatgggataatatgttttggtcaacgttcataattatatatgcataggtgataagacaaccattgattaaataaagattgttcgtctagtaaatatctcaacacaactttataaaagggttttaagtatacacttgatgtgaaa

SEQ ID NO: 120221 - DNA, 473 bp, Glycine max
  unsure (1)..(473): unsure at all n locations
agcttgtagaatggctagacatgatacatgtcatgtgttggtttggttcaaggataaaagggatgccccacattatttccatgacacaaatgcaaaaatgatgatttggaaactntatgcaaaactggtcatgcatgcacctatgtggacactcaagtgtcaaatttttatggtcatgtgatgctagggctcaggattcatttcctctattttaaatcaacccaatatttccaaaatatgttcttttatcaatttgtgcattcatccgagtccatttcgggcgtccggngaaatttcacagcattcacccttcaggtgtatacacattttttcaaaaactagttatgatcagtgaatttttttcaaagaagagttggaagtcatctctttttcaaagcatgttggtttttcagctcgacaacttattatcatttggctatttctttttcttggttggttttcttttccccttt

SEQ ID NO: 120222 - DNA, 295 bp, Glycine max
  unsure (1)..(295): unsure at all n locations
cttaagtatgcccgagtcattcatccctatgagaagtngttgtagtattggcaatcagaatcgccattcccgggattatatggttgaaccaagctcatgctnttacacaaaggttcatcaattcaagctgaaatatgaagtaaccgtcttgcaaaattgggcacaagatgaatcgagtcacatcactgcttcgtctactgccaaacatatttaggagtaatgatgccttgtacttcaggttaccttgacaaatgtctggcctgttgaatcaaatgtcacccaatcttggaaatcc

SEQ ID NO: 120223 - DNA, 392 bp, Glycine max
gcaagcttgaatacatcgatggctcattatatcttattgtttcttgtattctagaacaaccaacttcctttgtagtcatgtcacaatataagccttgatcgagttctcgtgattatcatgtgtgtgcatgctctttattgcttatgagaaggaaaataaagttgaattgcgtgacgcatgattgtgagttgatatcacctaaagtaattggcggttgagtgacacacatgtacaatgtgataccctctacccctcacatatatactaataaggaagtatagaatttaaatattcattagaagtatttttaatacaagtctttccaagggaaaataggctcacattcattttctttacatcatattcaatttgcccaatcataataagtatct

SEQ ID NO: 120224 - DNA, 294 bp, Glycine max
  unsure (1)..(294): unsure at all n locations
taaatactaagctcgacanagtagtactagcagagccggaatgaaatcttgtgtatcttatcggataacagatgggagtggtagtctcaatggaagagaaacctcatagaccactaagtggatatggcagcagccattgaaggcgacatatgctgagtgtcaaatataacctgcaagcagggaccatctgctttggggcctgatctggtggaccaccccaccacgcagcatatacttctgaggacgggacagtcagtactgagaagtgcctcaacatcggagccaaaccaccaa

SEQ ID NO: 120225 - DNA, 465 bp, Glycine max
  unsure (1)..(465): unsure at all n locations
tgcttggtaatcgatacaagtgtattgttttctatttcactcagttaacatgatataatactgttaaacacatgttataactcttgatatctgaaatcttaacgtgttaaaacactggtaatcgattactatcttctggtaatcgattactagatagtaaaactctatggtaatgatattgcgaacacttcttgtgctactcaatgttatggaaaactcttttagtacttatcctgattgagtcttctcttgattcatgaatcgtgagtcttgaatcttgatcttgattatccttganatcgattcttgaatcttgaatcttgaatcttgattcttgaatgtggaatttccttaactattgattcttctgcatcaatacaataaccgttgaaggcattgctaccacatggccaatacgcttcgttgcacaatctccaacaatcctctatatacgtggaacatttc

SEQ ID NO: 120226 - DNA, 419 bp, Glycine max
agctcttgctagctagaatacttatcctattttctatttccaatgggcgagtctccgtcacgtagttctgaataagaccggcttcacagcgattaagaatgagatagaggagctgatctctactcgggtgcagaatagttggagagtctgcattaactataggaggttgaaccaggccaccaaagaagaccattttcccctgccattcattgaccatatgcttgaacgcctggcaagtaaatcttactactgtctccttgatggattatctggatatatgcaaattactattgctcctgatgatcaggaaaagaccacattcacctgccactacgacacttttgccatatgaagatgcctttcggtctgagcattgcccctggatcctctcaacattgcatgactattattttcactga

SEQ ID NO: 120227 - DNA, 402 bp, Glycine max
  unsure (1)..(402): unsure at all n locations
agctttgagcaaatcaaacgacaattcttttttactctgaagtcggattgagtcccgttatatatacagacgctccaaattgaatgttgaagctctgagcagatntaaacgacaattacctgcttactcatatgtaggatagagtcccgtaatatattgagacgctcgaaatggaataccgaagctctgagcaaattcaaacgacaataactttatactcggatgtgtgattgagccccgtaatatatcgaatcgctcgaaattgaatgttgaagctctgagcanattcaaacgaccattaattcttactctgatgtccgattgagtctcgtattatattcagaagctcggaatggaaaaccatagctctgtacaaattcaaacgacaataacttttactcg

SEQ ID NO: 120228 - DNA, 96 bp, Glycine max
caaaagcccacaaagacacagcccaagaaacccacagggaagaacaaccacacccgcaaaaaacacacaaagataggaacaaaaggaggccacgga

SEQ ID NO: 120229 - DNA, 177 bp, Glycine max
agaagccactgtaggaactcctaaatgagactagtcccaatataaagaggatttttatgaatctaaagatggattatacctaagcaaatgcctttagtttgactcagcaacaaatgcaagtctcaaaattaatcaaaatttcaggcactggaccactaagctgctaggacaatctaa

SEQ ID NO: 120230 - DNA, 321 bp, Glycine max
  unsure (1)..(321): unsure at all n locations
actcatgactgctttanatagctactttatttgttattcctatgaccaagaacatcatgacaattgggatacataatttggcctgtctgttgaatgttgggcatgccatacgtcctcggaccaaattttgatgactatctttactggtctggtgaaagaggctataatttttgcaacatgcaatctacgctagtgcatatggttgaaggctacacatatttaatgtcgtctgggctcaacagctgactaggaatatcaataggtgatgaacttctgttcggcgcaaaacccgctggaattgtcttccttgctcacaaactt

SEQ ID NO: 120231 - DNA, 389 bp, Glycine max
aagaggtatagaagtggaactttgaagtatgtctcacaagactctcattcatcagagttacaacagtgttacacatgcttctatttatagactatgtagctttcttgagaagctttcttgagaaaacttccttgagaagcttctttgagaaaacttccttgagaagctagagcttagctacacacacccctctcataactaagctcacctccttgagaagcttccttaagaagattcaagctagagcttagctacacaccctctataatagctaagctcacccccatgacaaaaaacatgataataattaaatagaaagtccttatacaaagacaactctcatgccccgaaatacaggctaaaccctatactctagatgtgcaaataca

SEQ ID NO: 120232 - DNA, 473 bp, Glycine max
  unsure (1)..(473): unsure at all n locations
agcttgccacccatctcgcccaggcgagctaggttgttttctccagtaggcaccgccttctggagaacttcctggaaggcccaagtgggcttgtgttgctattgcaacccctgtttactaaatacaccccttggctcttttttttttttgctgattctttnttcgtaacgttacagaaacttacggattacgtaacgatacttgtnttctttccgtaatgttacggaaccttacggattatgtaatcatcccttttttgccttccagaatttacggattgcgcactaacacttccttttaacttccggcatgtcacggaacttcacgaattgtgctccaatgccttcttttgacttccgacatgtcttggaacttcacgaattgcctaacgatgggtgccaggtacctcgaagtggtcaaacgagggtcgcatcccaacaacgaatggtccncggacgaaaatagggtatgac

SEQ ID NO: 120233 - DNA, 402 bp, Glycine max
  unsure (1)..(402): unsure at all n locations
tgtgatttttcatattctaccataaaacactgtctcaggtgggttacgctggttcaagtgtccagatccaagttgtctgagaattgcccagnttagcacctatcatagtgcaagacagctggtatgcacttgcgtgagaccatgatagtcccaaagaatccaggtcccaaatcaaacaacacgatgtctctattatctccatgcttggcatgaggagctgtnggatggccataacaaataacagtgctgaagaggttgtcagatatgggaatagcgacatgaacgtgaccgagagcgggaagatgtggaatcgacatgggaagtgaaaccagttaacaagagcataatgtagatgtgatgatgcaaaaggtatttttgatgattcatcggggtatcaaaaat

SEQ ID NO: 120234 - DNA, 505 bp, Glycine max
  unsure (1)..(505): unsure at all n locations
agcttatgcgcatatntccctacgaacgttcacttgtacaagacatcctattaactaagaaaaatgcacccatatacaatcaaggtagcttcattacctagattatttacacgtacttccaaggtgtatttgttatttacatcacacacgcctccttggctaaatntacatacatgcatactcaaagcattntggggtaccaaaaattgcacatgcgctcatcttggtatttctaatacctatacatatacaaacttcatgatgaatcttgactacctacgcaataaggtgctacatttcatgctttttttttcaagtttttgctacctaaagccacatgcaaattcaagcatatnttcctttgctgactaaaattgtattcaaattagaagggtatatatttntttgaatatgntttcttcacataacatgcaacatatntatatatantttttgtgagacatnttgactaccaaannatatatatacatacatccaagtattt

SEQ ID NO: 120235 - DNA, 419 bp, Glycine max
  unsure (1)..(419): unsure at all n locations
ggaatgtgtgctcaatgaaagcaccaagctgntatggatagagcttttccttataattcgaggactaaggatcctcagaaaataagataanagaagggaatttttttctacttgcatattcattacaatgattggctatttataagctctgaatgcaaattatttgttccttctataggtctatgatcatgcaagcaataacagaattgccaaatatcctaacagaaagatctaaaatcccgacagaatattctaaggcccaatcctgtgatgccagctcagcagccttgtccctagttggttacgaaatcctttatgtgttgaggacgagtgctctacctattgctcctcangtgagtgttcattccctcttggttaggctggtctggtagctgattcataaccataacccatgtctt

SEQ ID NO: 120236 - DNA, 435 bp, Glycine max
  unsure (1)..(435): unsure at all n locations
atagatatgtatcagacacagatgcaatatgacatggntatcatctagaaatgtctttccctcatagcagtttattatctatgatttgcaaaaactgaagtgagctacaacatacaagggtaataaataaaacacttaccttcaaataaacttgcttcaccagctcatcatatgtaccattaaaggcaaaataatcatattccagacggtatgcgcaattttttactatttcatcaaaaagacatatggaaaatcccttgaagttgaaggaaggaacattgtgagaaagatcttgaataacttctgcatacttgttgacgtttgacatggaagggacaccaattctcattcgtatggcacatgtatggataacatcttctcctaattacttaaacgagaactataaaaacctttcattaaatatttgaaaaccta

SEQ ID NO: 120237 - DNA, 408 bp, Glycine max
  unsure (1)..(408): unsure at all n locations
tgagagagataagatagcaatgttggagaagctcaagtgcaatttattgtaatttgcttatgggaaatattggagttcttttatggaattgtgtgtgcatagtatctgcatttgattctctaatagcgaaagcgtaagagatcttagaaaaactatatgtaggtcctgatttgactaaactagtttaaactttcgtgtgattctcattctctctcaactcttagccttgaattcatcttggtattgagattgatctcagaaggccatanaaaatgtttttcatatgttatactcatcgaaagttttcttgattgtgctgatcatattatgtgatcctttgaggaaaactttgattattgaatggacattatattttgttaaagaacaattgttaatatttgaaagatc

SEQ ID NO: 120238 - DNA, 256 bp, Glycine max
  unsure (1)..(256): unsure at all n locations
gatcaatggagaatagagatcatagtggagaagaaaggatgagaagagggaatgatggtgttcctatacaaaaccgaatgatggtattaaactcaacattccttcctttaaaggaaagaattatccgaaagcctactttgagtgtgagatgaanatagagcatgttttctcatgcaataactatgaggaggaccacaaggtgaatgttgccgccacggatgtttccgactatgctctcgtgtggtggaacacgata

SEQ ID NO: 120239 - DNA, 322 bp, Glycine max
agctttccaagtggcttcggatacattttatctcatccattgctgataagcacctatgcgacaacatggtccatacactttaccgatacatgaagaggcttgttgtgtcctctcccctctacaggaatctcttcttccgaaacgcgatataattgttggtggttatatgattaacgatgccttcaaaaccctccattgagatatcgtgggctacatgggcatcattgaggacgtttatcaacagcatacgatgatgctcggagtttatgaacagcttaagcaacgagatccttgctggagttttactcaggtgctcgactac

SEQ ID NO: 120240 - DNA, 335 bp, Glycine max
agctaggttcaggtacttacccgctgaatttctaatattcatgagtaacgactgatgaacgtctaagaacggaggaaacctttgctatattcctcacggacaacgttacggaatcgttacggaagcgcgctcggcttatattgtctgcacggaaacaatttgtccaagctcatacgatagagagagaagtgccaaaggggctgaaccctcatcttcttcacttcctcccctatttatagcaaaatatgggaggtggttgccgcccagctcgcccaggcgagctcagctcgcccatgcgagctcagctcgctcaggcgagccatgttgcttccttc

SEQ ID NO: 120241 - DNA, 277 bp, Glycine max
gacagagactattactgtgcttcttccataccaatatgccctcctcactcagaatcaaattacttacttgcatgccataacctttttgtagctacgcaaattacaatagcgatcactcctaatgatatagagactactcctttcccatctccacattcaatctccctcccttcggccacctagagctgacaccctggcctttatggctactacaagggtgcataaatccacatgcttactaaagcgtaaaatacttcgctgccacccaaaggtcttg

SEQ ID NO: 120242 - DNA, 391 bp, Glycine max
  unsure (1)..(391): unsure at all n locations
tactcagcttagaccaagcaattagaatctggtatctaaaacccctctttatattggattctcaaggattgataagtgaatacgataatggtgtatatttggagtaaactcttatctcanacaagtctataacattaattaaactagctcaaactgggtttacgatgaaaactccgccgattcataaattgacccgtcaacacccaatctaccctagaaatggctcttgctttcactatgatcactcattttcctcatttgctctggccaagctttctcactagtcctaaatgacattataaactacgattaactcactgtacactccaatttacactagccccaaatctagctcctctaaccctcataatctcactttgttacctacaac

SEQ ID NO: 120243 - DNA, 474 bp, Glycine max
  unsure (1)..(474): unsure at all n locations
agcttgtnttgttnttggtctctaagtggtgattattttatagagtttagctgggatttgaaccccactactctttctctatgttccaactcttgtctacttgacaaaacattaggaaanataataaaccagtgcaagcatttgaatattaattgccaatacccttattagtcaggctacgccaccaaatgcctaagtaaagagctatacgctatatctgactggctaaatgatatattgcggtactctattgtttatcattttaattatttatcttttttttagttgagtcttttatatttttaaaaaaaaattatttggtctatcatcttatctttttgatcaatttgattctttattttaatctggttaatttgatccttaattaatatatagttgacgtcattaatcatttaggaatattctttttgttcaatgttctctgttttccttcactcattttaacacaaaaag

SEQ ID NO: 120244 - DNA, 231 bp, Glycine max
gcaaaacctgctttactgcaatgaatctcccttcttacgactgtcttaaagaacatattaagtgtgactactgcatccagagactctccttacatgggaaagcagacaacagctcattttctatgatgaggggaaactacttcttaatgacaatgctgctggctagatcataagtggtcacagcaaagatggcaagattagtgaactttcacaagttctactcactattca

SEQ ID NO: 120245 - DNA, 368 bp, Glycine max
  unsure (1)..(368): unsure at all n locations
agcttggcgtaatcaccttgctgattttatattattantgaattaaggcttcccgatatggattgaagaggccttatcagttaagctccacaccatttaagtgtgaacatgtgactgaaattcctgcagccatagattggaggacagaaggaactgttacttatatcaaagaccacggacacatgtggcaatacaatagaagtcatataagtacttagctatgctccatgagcatcatcatttactccttagggctcattctatgttcctattgaaatatttctatctcagaaatcatgtattaattactctatcacaatagtgctccagttgaatcaatcaacctaaaatcatttgcattctaagat

SEQ ID NO: 120246 - DNA, 379 bp, Glycine max
  unsure (1)..(379): unsure at all n locations
gtaccctactccggattcaatatgaatcanggataaatatcaaaagccaagaaaatgcatgcagttggaacgactctatataattatacaacataaagagggaaaggggtatggttattaaagaagggactagggcttaattgccagaaaacataaaaaatacacacacgaggaattgtcatttatcagtaatgagtgcaaatgatatatctagactcccaacctcctatgtcttgggaagctcatatgcacacaagcggaattgtgtgtagtttttaattgttgggcaagtaaatagatatacatggtaaaatatatttgatccccatataccagagactaatcttccttgatatacaatgacaatgttagcttcata

SEQ ID NO: 120247 - DNA, 433 bp, Glycine max
  unsure (1)..(433): unsure at all n locations
agctntacatggngctacatcatgtggtatcatattatgttcatctaggngaagntctttcgcttcctctatcttttgttcgttccattcactttaattccttgttcttcattgncttctccattgncttgtggtttgatgttgtttagagtagattaaaaaaaaatcgatctacacttgttcttgcatttcaatggttcaaattntatagatatactcttgaatcatgttnttgtgttgattttaggttctatcatntttcattcataatcttaatgtgttgaacctttagatcttaattctctngacaaatattgattagaaatgacaatacaaaaatataagggtaaatcacttcattcaagttgtcttagagtcatgcttagtcatagtaatcgtcacattatgttctatgtctgtgccgaatctcgat

SEQ ID NO: 120248 - DNA, 414 bp, Glycine max
  unsure (1)..(414): unsure at all n locations
acatccacaatgcgcgcataaacccaccatccnctgttgcccacctncaactgagctacgtactcccacgtagcccatatcctcgtttctctcaacaccgggtccccatcaatcctcccaagcttccacaacatccaagcaaaacaacattcacacagcacaagctatcacagccaagcaaaacaaagcaaaggcagaaaactctgccaaaacaccaaccaaaaatcacagcttttcccactcaaagaccccagtaacaattccttcgatcccaattgttaaccgttggatcgactccaaaatttttctggaagtctatagtgcataagcctacattatgaccgttgggatctactagaanacatncagaactcnatctgcactagactttccataggcaaccacacacaagca

SEQ ID NO: 120249 - DNA, 91 bp, Glycine max
  unsure (1)..(91): unsure at all n locations
aaaagggananngaaagagggggggaatttttttaggggtgagaaaggggtgggagaagaaataaaagaaaaaaaaggggggaagaggaga

SEQ ID NO: 120250 - DNA, 346 bp, Glycine max
  unsure (1)..(346): unsure at all n locations
cctgtcaacgagctagcaacagaggaatgtggcatctactngtggtgaaaaacaagagcaatctctctgtcttctcaagaaaaagcttactaacgcacctgacctagcggtgcctgacttatctaagacattggagctcgaacgcgatgcctgtggagggacactaggatctggtgtgttactacgtgggcacgcatgtgctcatattagtgacaaacattatggtgccgcccatatctaccccacctatgaggaggagattcatgccttaattagagcacgccgaactgtggaacatatacatgtggacggtgttaattgctctcactgtgatcattattgacta

SEQ ID NO: 120251 - DNA, 472 bp, Glycine max
  unsure (1)..(472): unsure at all n locations
agcttgaagaccataagcatactgngcaacatttgtattgtttattcagtcaatgcangtggtacggagaactccactctgaaaatgtggtgcatcactaccaaaattatcttttttattctgatggttcatgtcagtctctgtgtcttgattaaccacagaatttagcatttcattactgttcccaatcctcacaagatccccagaactagctctcagatctctcactgaagtatccctataaaaatacacaatgagtngaaaataaaaatagaacttcctttctctagatcttgcacttttacaattataaaatagaactgcgataatattaagcaaaaacaagaatcacccggaaataacactggcatcaatgattntatattagatctccaacattgtccattgttcgctagagcctctactgatatagccacaagtgttgtaccttaccaccatcaaaataaataat

SEQ ID NO: 120252 - DNA, 211 bp, Glycine max
attctaatcttgaactacatcctgaacagatgcgctgttgcattgcaacaccaaaccagatcgtctttatcttgccactctataacacgctctcgtggttctggatcctcttctacttctaacaccatagtactccaagtttgagcatataagattctgtgaagcattgcggttgctcgacaataaatgagccatttatgcataacccaaa

SEQ ID NO: 120253 - DNA, 459 bp, Glycine max
  unsure (1)..(459): unsure at all n locations
agcttagattaaattagtctaaactttcatatgttatttaagctgagtctagtccaacaagagggatctgaggatgaagcttagtntaagttattctaaacctatgagggctgtctaaattaagcctagtccaacaagagggatctgaggaggaagcttggattgattcagcctaattagggatcgaggtttagtaatttaggctacaacatagaacacaaaagcacgattgattagagaaacatctttatatacatcagcttgtttgttagaaagacccaacaacacttttacctactgctgtcaatcttaattacctatatttctactggttttagcctagacttagtntatatttgttctatattaccaatgtttctttcaacaatgccttatttctaaattaaccctgtctaaactatccctgagtcgatactggatcattgtttaatttaaata

SEQ ID NO: 120254 - DNA, 411 bp, Glycine max
gcctatatatatgtgtgtcagactctcaatagtaagagagaaatattctaagagaacttcattgtcaaatgctctctcaacaactctgagcaatgacttgcaaatctattgagagttcatctaggaacatcatattgtattatccactctaaaagagagaaatctttttgttcatctcttgaaggtgtaatcaagagactggttgtctcttgaattgtgattttgttgagcacaagggaaagggattccttgggtgttcagaagttgtaaaaagggtttttaccaaggtagtgaaaatcttaagtgggttgctcgaggactatacatatgcataggaagtggccacaccagtataaaactgagcttgcattgttctcttcccttaggtattatatcgcagtttacttcgtc

SEQ ID NO: 120255 - DNA, 388 bp, Glycine max
  unsure (1)..(388): unsure at all n locations
aatgatntctatacaaaagttagtcttataaagtgactaacaaactcccccaaatttatatgtttgctggtcctcaagcaaagaaagaacaattcactngtcctcaagtgacaaagatagtggccaatcaaaacaaaatggtgtttgattcatcaaggacattgtcgcaacctacccttcagcgggagggcgacgcagggctcatgggtgtgtcttccaagggaggaaggcgcgcgaagtcgccaccaacgtttatttgaggcaaacatcggaaaaatcggaaaggtgtggtctacaaactttaatcgtgaaaggttcgagagttgtttttacacatggngaaggtattagcacctcacgcgtccatcacattggatgacagccttta

SEQ ID NO: 120256 - DNA, 324 bp, Glycine max
  unsure (1)..(324): unsure at all n locations
tctaaactttgtacaagaatgaagctctgataccacttgttatacaagtggcctcagatatcttaagaagggggggttgaattaagatattccaaactgtttcccctaattaaaaatctatttcactttntactaagttatgaattcccttaatgaaaatcttcttaaatttaatttaatgaaacatttgatatgaatataagcatataataaagaattaggaaaaagcactattatctgtcgccacctgctctctccacacctaatctttgatttcattaccagatctctggtaactcaaatattactaaaaaaaacattaaa

SEQ ID NO: 120257 - DNA, 430 bp, Glycine max
  unsure (1)..(430): unsure at all n locations
agcttatacaggcggcgtaaacgccggatgtgtaggtattcgcgccccattgtccaccagaacccgcagaaaccgggaaactggaatcgccgatgtgaaccgcaacctgctccagcggtacgccaagcantttcgctgccgtctgggccagaatggtgtagctgccggtgccaatgtcggtcatgtccgcttctacggtaacggtgccgttttgatcgatgtgaacccgagcacccgtattttccagcagattattgcgaaagcccgccgcaacaccgtggccgactagccactccccgtcgcgcacctgtccgggtgtggcgttgcgctgcttccagccaaatatatccgctccggcgcgcaagcactcgataagctgacggcgagagaagcagcgcgtctggtcggcggggtcaacctgagtgtcttc

SEQ ID NO: 120258 - DNA, 399 bp, Glycine max
  unsure (1)..(399): unsure at all n locations
ctacctctgacctaatcaatgatgctgggccgtcttattggcaanacgctgaaagttcccgtggagaatgtgcgtattatctccccgtatatcggcggagggtttggcggcaagctgttcctagaagcgatgcgctgctggcggccctcgccgcccgagcggtgaaacgtccggttaaagtgatgctcccccgcccctctattcccaataacaccacgcaccagcccgacacccttcagcacttgcgtatcggtgccgaccagagcgggaaaatcaccgctatctcacatgaaagctggtctggaaacctgcccggcggcacgccggaaactgcggtacagcaaagcgaattactctacgccggtgcgaatcgtcataccggccttgggctcgccacgc

SEQ ID NO: 120259 - DNA, 407 bp, Glycine max
  unsure (1)..(407): unsure at all n locations
agcntgatccagaataaaaaataggattatgttcttatccttatttggcttacttattctatgaaaatttatatatactacactggtttactatattacaaactacaccaatattgatatgaaaattattttttttacttttcattagcgcattatttgccatatttatttcttgagaaaatgtgaacccaattcttatggacaaagattattcttttgcaatattttggtatgcattaaccaacaatgtattttgataggagggtatgtaatggttaaaatgggcctatttntaataacggttaaatgaacaattgttgtgctgcttttgaaaggtttctacctgattagtttgttcttaaaattaatctttgccaataaacaaagtttgtataatggttcaactc

SEQ ID NO: 120260 - DNA, 357 bp, Glycine max
  unsure (1)..(357): unsure at all n locations
agctntgactttgcagaataaacatatgactatatttttctgtgaacatgatagccacttgatttaatgcatgtatatgtctacactacatcgacatcatgtgttcgatgaaaggctctatcaaaaatacctcatgataaacgagactggatctgttacctagtagtgtgactggacactttatctgaagataggagctgcgctatatggtgctagtcaaatttgaccacctgttctctgctatacaccaaaacctaagactatacgctctcataaagggatagctacgggataatccgtgtgcactatatatatacgactatctctcagagatatatatagatatcccttacatag

SEQ ID NO: 120261 - DNA, 241 bp, Glycine max
tagacatcggatgacctaactcctataagtaactcagtatctgttatggtgaccgctggattcacttagaccgcgtgataataagaacatgctgttgagaaaccctacgattctggaactttattcccgaatggacatgagtatgaagctcacaccatggcgaactctgtgcaccttgccaccatgcatgcctcgctaataaatcacgagccctgtctgatagacgtattcgagctcctta

SEQ ID NO: 120262 - DNA, 494 bp, Glycine max
  unsure (1)..(494): unsure at all n locations
agcttgtactctccataaataganatgtctatttttttngataatgaacagcaattngagtcatttcagaanaacagtcactctctctccctcacttnttctctctatttcattcacttgccattactttctcaagaatctctggatattaataaagaataacaggaataataataaactattctatgacactaatctttgcaatgatacattaactcccacaacntccaatgacatactaattgctattaccatttccaacactattatatgagttgaattggttagattataaatgaccatctactagtagtngcaaattctttaacacctttttgtttattatcttctctggtagcttaatatgtttgatgactatataaaaggataaactaactatagatgtaatgtatatcacaagctcttagaacattctgctctaagcttctaattgttactcttaaaatgcaggcactatcttcatatgtattcat

SEQ ID NO: 120263 - DNA, 178 bp, Glycine max
cgtttccgcgatgagtagaaagaaccgcgaggctcattgatccctcgcgtgtagcgctcatcacagatgaagcgcatatgctgtgctcccggctgcttgcgatctctgcggaggtcacgcgttccatggtaaaggtggcttggcctgcgaacgtaacaatggtggggtatgtgagggt

SEQ ID NO: 120264 - DNA, 136 bp, Glycine max
gctggcttctacaatctcccgcttatgatgatgatcttctttgaaatcaagatacacacacacacacacactctttcctagtcgatcactcacataaatttccattctcacgctttgttattgaattatgtcacta

SEQ ID NO: 120265 - DNA, 465 bp, Glycine max
  unsure (1)..(465): unsure at all n locations
ngcttgttgaantngccatgtttggatgagctgtacttactcattctgtnttaggcgttttgtgatgatgtttgtgatgtttatatgctgaaattacttatggaaaactgttacagatgaaaggtagagttaacctatggttagaaagtgagaatgtgatgttatgagtggaataagagcgaggctttgagagttggaaggttaagtctgaattctgtggtcaatggaggttaaagtgagttaattctagctcgaaatgtcatttaggacttataagaaagcttggactatgctagagagataaacaaatgaccaaagtgaacaaagagccatttctagggcaaatttgggtgttgaatagtcaaatcttgattcggcgagaattatgtgtgatccagttgaacaagctaatatatgtatggactgggtgagggatatttgctcaaattcacttatctaattcac

SEQ ID NO: 120266 - DNA, 475 bp, Glycine max
  unsure (1)..(475): unsure at all n locations
agcntagcanatggacctgggtgtacccagctttatctatatctttcgcaatactcaccacctctatcatatctaataagagtcatatttgtgtctaatatgcctgttacttcattctagtaaatttctaaggcatccattgcctgagaaatctcacgcagtaagtagacataactggaacgtgaataatcattaataatagtgataaagtatccttcctttcctaaagaactaanatcaaaaggtccacaaatatcagtatgcacaatttcaagaagctaagtgcttcttggagcttctttctgtggatgatgtgcttgtttccctttaatacaacccacacatatatgtagatccatagaatctagataaggaagagttcattctttataatcttttcatcctttctctagaaatgtgacctaaacgtctatgccacaagaaagcagatctgtcattcactaaactacgttta

SEQ ID NO: 120267 - DNA, 390 bp, Glycine max
tgcactgatatatctagaacgaggaaagaaccttgctatgaatgtatcctccatgggttaccaagtgtgaggcttatatttggatgtgatacgagccatgcttttgccttacctgctaatgaaaatggaaaaactctgaggtagacagcttcagcagtcttcatcataagctcccatagtactgcatagttccatgaatgtagacaaatgtgtgtatggatcctcgggatccattccagcacagggatgtgagccaattagactaagtagtgttggctttaattccacaaccctattgctgataggaggaatgactatgctattgtaatgtttttgccttgttgatatcatagtcacaagaggcctccttggtgtccactccttcttctc

SEQ ID NO: 120268 - DNA, 462 bp, Glycine max
  unsure (1)..(462): unsure at all n locations
caagcttgcataccgcaaggatccatcatataatttcttgtgaaagagagccatgagggtgggctcatgggccactatgggatagacaagacctgtgtcttactcaaaacaagttttattggccccatatgaagaaagatgtccacactaggtgtgtggcttgtttacaagccaagtctagggtgatgcctcatgggctatacacacccttacccatcccatttgcaccttgggtagacattagtatggactgtgtccttgggctttcgagaacccaaagaggtgtagactctatctttgtggatggtgatatgtttagcaagatgacacactntataccatgccacaaggtggatgatgcttactacatctcacaactctttttcaaggaagttgtgagactccatgcgttgtctaggaccattgtgtcagatagagatgctaagttccttagccacttat

SEQ ID NO: 120269 - DNA, 443 bp, Glycine max
ctgactattactgcttggggagcatactggactcacatcatgtcccaactcggggacaaataagtggctggacaatgcacataaatccatcaggtcagtcatggcatcaccagtaattccttcggttttaattataaaactccttgtagaaattgatttatttccttttatatttgtttttaatttttaaatatattatttatttattttcactatatatctttacttaattattttttttcgaaacattaataagaaacaatttagtggacagagagataagataaaaatgtaattttggcatgatagtatatataattgaccgatttaatataattaactaactacttttcttaagagacatgaatcaattaagagatcttattattgggacaaaggagtaataattatacacagacctaagtgcccttctagtgggtcaa

SEQ ID NO: 120270 - DNA, 479 bp, Glycine max
ttaagtcacctgcggcatgcaagcttgcgatggaagacattgtatatatgtagatgtttttttcattcactaacacacaattgtttaatttgtacgctcatatctattagcagatgtgtctaatttgaaataagaaaattctattttacatctattatttggcataatataacctcgttcagcacataacaattgtttgtttgattactctctcccatagatcagacctattttatatatgtctactttgctggagctagaatcagaataaagttgcgttagccataatgaaatcaaaattgcactgaagtttcgacacatgaatttagcaagcagtgatcctacaaaatggagtgtaacttcaagcaatccattccaataggaatacatgtcagaaaaactttgatattaaaagccctcgttggaggaaatgaactaaaattacacacctcgatgtatttttttatcgctttttctga

SEQ ID NO: 120271 - DNA, 263 bp, Glycine max
tgtgacagtaggacaaataagatattctccagactggcgactattctttgtatgcagctcaaatctgacttgaccaggaaatgggcacttacagccgacatggacggtgtatacaacactgtttgtgaaaaataccgcttagccaggacaaatggcccattttgtcaacccgagagaccctcggggaggaagatctgtatttattgttgcctaagaaaacatgctttaatcataagaacattcatatgccattcggagggaaa

SEQ ID NO: 120272 - DNA, 472 bp, Glycine max
  unsure (1)..(472): unsure at all n locations
agctngatntgtgagttgatattagctttagttttatctttggttattagacaattcattcaaggaaactctccacagaaaatgtccaattgatttttttgattattctattcaaagatatgttgattattttattattgctcttcaatatatttcgcttattatattattattttgccttttttttggtttaactgtggttacggcgtgaaagatcggtcggattttattctaacagagattaaaagatattacaactcaaatgttcgatggaaatttattttattnttgatataggcgagaaaacgacttaaataaatggttaaagcacgtccaaagggggtacggaaagcaaaccaaataaaaataaaagcacgcgaaataagtggggaccactaatggcacatagaatgaattgaagggttgatttcgaaacttatcagttgaagaccgagaaatgacgaagacgatg

SEQ ID NO: 120273 - DNA, 479 bp, Glycine max
  unsure (1)..(479): unsure at all n locations
gctgctcaattgctccatgttgctgcatggaagggcttttgtctgtatggnggtcancagacgagcgggaaccacaaacccttgcgacatgtacagatttgtgattcatggccagctgggttaccaagttaccaatgcatccagtttgccttcaagcttcttagtttcagatgatgcagatgggtttgtagctacctcatgcactcctctaattactatggcatcatttctggcactaaattgctgggagttggaagccatcttctcaattaaatttctggcttcagcaggagtcatgtctcctaaggctccaccactggcagcatctatcatacttctctccatattactgagtccttcataaaaatattggagaagaagctgctctgatatctgatggtggtggcaactgacacatagtctcttaaatctctctcagaacttatacaggctctcttctctgagttgtctaatacctg

SEQ ID NO: 120274 - DNA, 401 bp, Glycine max
catgcagctatgctcaatatcctacatcgatctcttgttccatacattctattaaccgaaaaaaatgtctccatattcaatcaacgctgctttcgtacctacattatttacacgtacttacaatgtgtatttgttacttacttcacacacatctccttgtctaaattcacatacatgcatactcctagcattctggggttccaaaaattgcacatgtgcacatctgtggttttctaatacctatacgtacacaaacttcatgatgaatcttgactatctacacaataaggtgctacatatcatgcctcttcttaagattatgctacctaaatccgaatgtcaattcacgcatatcttcctttgctgaccataactgcattccataatatatatatctctat

SEQ ID NO: 120275 - DNA, 318 bp, Glycine max
gcagcatcaatctagcccttactggattacatgggagcttgagttatcggcaaaatatgtctcattatgcaagacgacaccatatcatcattagtttcgacagaacgcttggggaatggccgagaggacggacatattctaccataaacataaccaaaaataaagtggagacaacttttctattactcaattaaaacacggcggcgataaacctatctaacatactagctcaactataatcggtaagttattcgtatattaataactctcgtgtacacaggaagcagtcttcagaagactcatacaccgagagactct

SEQ ID NO: 120276 - DNA, 493 bp, Glycine max
  unsure (1)..(493): unsure at all n locations
ccggatcttaagcaccgcggctgcagctgaacatttactgaatntagatctcttttgacttaccaaaatatctgctggctgatcattagaactaatgaactcagcgacaatctccttggacagaagcttctcctagatgaaatgacaatcaacctctatgtgcttagtcctttcatgaaagactatgtttgaggcaatatgaagaacaacctaattatcacagtacaacttcatttgcaactcttcacagaacctcaattcttgcagaaattgtttaatccagatgagttcacaagtaaccatagccatagatcgatattcaacttctgcattggactgagcaacaacaatctgcttcttgcttttccaagagataagatttcctccaatgaagacacaataactggatgcagatctcctattcatgggacagtctgcccaatcaacatcacaatatctcgatatgtgcgtattacccttgtcttcatacaac

SEQ ID NO: 120277 - DNA, 189 bp, Glycine max
ccttatgactgacgggcgtgaccgtttgtccaccactatatatacctgtgtgtgtttattaaaatcaaactgtgatatgcaagcccatgttcacaatcttatttacttggctgaaactatactagaaacaacaattaaatgcatctgatccgataacgtgcatgaattctctcgtaaggatttttactc

SEQ ID NO: 120278 - DNA, 178 bp, Glycine max
agttttttgcccttatgttctaggggtgcgccccctgctttacctagcatggattggtattgcgctatgtacgggagcgacctgagactgtacgggcgctaggaaccttatcgctacggttttagtatgctgctctgcgcttagcctctgcttgttccgcatagcgaatgcttgctca

SEQ ID NO: 120279 - DNA, 355 bp, Glycine max
ccgtaatccaaggtttttattttctgatcgccaatacttcaacatcatcttatagggatgaatgactcgtgcatactattagcttatgcacggaaaatgtaattatgaaattgagatgcccgaagaaacaccatcttctagttaaccatgcattatgtaccatgttcaattattttgtttttaagagaaacgggtttatgatcccaacatggttggctcctaacacattgaaactaataatgtagtgtgaagtctcacgcttcccccttctttgattttgtctcgcagaggaaatctcaaggatgagcaaacatgaatacaaatggtatgcaatcttgcatatcataactcttgt

SEQ ID NO: 120280 - DNA, 490 bp, Glycine max
  unsure (1)..(490): unsure at all n locations
agctaggatcanaattcacgcaacaatatcattgtattatgttctctttgaggcagcttatacttctttgcaacaaggaacacctcttggtcctctcatttctatttgtttgccgggaactgaaatcccagactggttcagctaccaatcaacaaattcttcactggacatggaaattcctcaacagtggttcaaagattcaaagttcttaggttttgccctgtgccttgtaattggtggcttcctgcaaaacagttatgaagggtatgatccagatgtcaagtgttatcactttgtgaagtctgcctttaactctgacaccagtgttccctttcttggccattgcacaactgtaatgcaggtgccacaagggtttaattcagaccatatgtttatatgctactatcccacttctaatgcctccattctacaagattncaaggatttaggcatgtactatgatgcccacagcttaaggctccgagtcatc

SEQ ID NO: 120281 - DNA, 331 bp, Glycine max
tactctttggtgggatgctactgttcagtgttagctaggacctgtaacatttcgcgaatcattaatagaaggaaaaaaaactgatgtatggaaatgggacatatatggtgcggtgtgttgtggtgattaagtttttttcttttggaccataatctaaaactgatttaaagatttacaataactcaagtgtggtgttcattaccgaggaagaaaaacaattgcatgtttatgcgtagctgtatccttcgttacgtatattttgtaagggcaagtaaaccggcagtgcttaatcaatgatcaactgcaactttttttattataaaatgacgca

SEQ ID NO: 120282 - DNA, 458 bp, Glycine max
  unsure (1)..(458): unsure at all n locations
agcttcaacatcagaccacttccgggtgctggttcttcttacatggacttgatggggcctatgcaagttgaaagccttggagggaagaggtatgcctatgtggttgtggatgatttctccagatttacctgtgtcaactttatcagagagaaatcagacacctttgaagtatttaaggagttgagtctaagacttcaaagagaaaaagactgtgtgatcaagagaatcaggagtgaccatggcagagatgttgaanacagcacgtttactgaatactgcacatctgaaggcatcactcatgagttctctgcagccattacaccacaacaaaatggcatagttgaaaggaaaaacaggactntgcaagaggctgctagggtcatgcttcatgccaaagatctaccctataatctctgtgctgacgccattgacacagcctgctacatccacaacagagt

SEQ ID NO: 120283 - DNA, 494 bp, Glycine max
  unsure (1)..(494): unsure at all n locations
anngcttaaattgaattacaacgttcagattctgctggtaatcgaataccatatatgtgtaatcgattacacaaggcaaattatgaattcaaattntaatagctcgtgcaaatcagttttggccactggtaatcgattacatcctctggtaatcgattaccagagagtaaatgtcttgtaaaagactttctaatttaattttcttggccaaacctcttgatacttcaattggaactcccttcctatttaatataccctttctaagactctatagactgtcttgatcatctatcttgaatatctttaattgctctgtcttgaataaagctttgagacgcatgtgatcttatggcatcatcaaaacatctggctcgatcctctgtctacaaaacatctcctaacatgtaatcaatatcatattcagattcactctcagcatcaaatccagacatatgatcaagtgcatattcagattcatgcatgaagagtgacgg

SEQ ID NO: 120284 - DNA, 397 bp, Glycine max
acttgtcttgtgcagaattaaggtacagctttaacaagagcctctttgctctatattccacagcacaccacagtgcctattgttggaaaagagctctggaggcaacaagaggatcaagtattgcagagatacctatgttcggaagcttattattgatagggttacatctctgatggttggctaaacacacttgctggggatctctaatgaatagctgatgtaattattttcataccgaattgatttagcatattgtgatcaatgcttcatcactccgtaaatattgcatgctcttggtctaatcaaccatcagtgtgcctagttacgtgatactaacatcgcaaaatgtattgtcgccttacaacctgaacgaaccacaattgaaacttattcttat

SEQ ID NO: 120285 - DNA, 385 bp, Glycine max
  unsure (1)..(385): unsure at all n locations
agcttcacacnaagtcactgctataaanaggctgtgttgtgcataagagttctaccacggatacgaagcattagctcggagaaacaatgagcaaacagagtataagtcaccatgagatcaagacatgcatggcactcatgcagtaactacgggtggaggctctcctatgcatggggctaacctcttaggatatgctaacggcataaccagaggaatggcaccggggaaaggatagcgcctacatagtgagatgggctggcggccacttcaactctgatattgcgtcagctattgataaagctgcggctgatggagtgaatgttcttaacacctctctgagcggcggagtctcttctattacagagatagttatcaatgaccgcaa

SEQ ID NO: 120286 - DNA, 415 bp, Glycine max
agacttgatatgcttttgcactatatactgtcttatattactgtttgtaagtcacctacatggtattttattatagactgtgtgagacggctatctttgggtatatatatttgtgattgtggcatcataatcttgggaaaaatgtcaattatattatacccgatatgatacaacagtaaacggtgcattccctacagctagagaaaatcaaaagcctccctaatacaaaaagtcctatattatgatgctaaaacaaatgcaacaggtgtggttgtctatacataagaaacttaatcttgctataacctctatacagaacattgatattttcaaaaatatcttgttctagacgccaatagcgtaaactgtattcgtatattcagacaacgtaatttccttgacacctgatgggatc

SEQ ID NO: 120287 - DNA, 254 bp, Glycine max
gccatgttctcataatgttccaaatcatactggtcacattataatgctaaaattcctataacataatgctcaaatgtacaagatgatgcctaactaaattatgaaatgtcctatctatctcaagatcaataggttgttagataaatggattgcctttagtgatacactacattcaagatgcacaactacgtgtcttcttatgccagtaattatagacgtttaactacagcttccatacaatgatattcaaataa

SEQ ID NO: 120288 - DNA, 105 bp, Glycine max
  unsure (1)..(105): unsure at all n locations
acatataaaactcagcctgcagcctgcagtcgcactagagagcccggttctgtctctaaatcgacccacnagcgaggcgggaaacaatacacgggccagcgaacc

SEQ ID NO: 120289 - DNA, 376 bp, Glycine max
  unsure (1)..(376): unsure at all n locations
agcttngtacgggcttaaccaggcccctcttctattgtttgatagactgcaatctactatctgcagattgattttggcacacgaaagagttatccctctcttttcatttacaagactgcttttcaaactactaatctcttaatctatgtagatgatatcatcattaattgtagctcttcttagttgattcaacaccttaccactcgtctcaactcaaaattttctcttaaacaacttggtcaactagattacttacttggcattgaggttaaatctctttctaactagttcttacttctcactcataacatgtatacaatggatttactaccgaaaactaatatgatagaagcttaattaatccctcttctcctat

SEQ ID NO: 120290 - DNA, 499 bp, Glycine max
ttaagcaccgcagctgcagcttattctcgcctgaagaagggacatgattcttgttcttctgagacagcttgctaagcagagtccatacaggaggacgctcattatactcaatctgacttaccgcagctgtctattcctattgcattcccacctagagcaattctagacgacgtagtggaagacgcgtaacaggatatcctggagaccttcaggagagtagaggagaacatacctctgctatatgccaacacgcagattccatgatatgccgcgtatctaacggagctgcgcacccacaaaaggaagctgaaatgaaatgaaaggattaacacgtgcagaattgtgtcagcattgataggtaaatctgatcctcgcattcttgagacatgcaggaccctgtactttttgcaacctagcattataggaatagtactttgagaatgcatgctaaatcagaaacatagttatcgcatgcctatgccattatcaatcgttatct

SEQ ID NO: 120291 - DNA, 237 bp, Glycine max
ttgattatgcgcgctgccctagagcatctcaatgcgtctcccataggaagatcggacacactttatacctataatgacgtgtgattgataacattacctatttaaagagtaagtccgaggaagatatcgtacttttgaaaacagtgctaaacataatggtataaaacaggaataaaacgcgctcaggatgcgaaaccaccctttaaaaaagtgagtattatagtacaactgaaaaca

SEQ ID NO: 120292 - DNA, 82 bp, Glycine max
  unsure (1)..(82): unsure at all n locations
ctctgatactaagcttccaactntgtctataatgagactctgtatcgacttaccaattatgtggtctcgcatatcctaacaa

SEQ ID NO: 120293 - DNA, 487 bp, Glycine max
  unsure (1)..(487): unsure at all n locations
agcttgcaccatatatgtcttcagtttctagatcaagcattatatttgaaacacaacagatgtcagatgaatgaatgccacacagctttaggaggaaactataatntacaggtcgacatacactagtcaaggagaaggttgatcaataatgcttattattgcttcatcgtgacctgtgatcagaaagctcttttaaattatcctgctcctctttgatgcatggttcatccactgccattgagtccacccccaacacctgaaaacatgcaattataacaccaccagagtgatcttataaacgagaatattaagtttatgcagcccaaaacattcaaccttggagcatgaaatctccttgaaaggcatgagaaaatctcttccacaatctagaggtttatcataactttcctgaaattaaaatatttcttaatttgtcacctaaaaggaattagttatcttaaaattggaaactagacaacaaatcact

SEQ ID NO: 120294 - DNA, 460 bp, Glycine max
  unsure (1)..(460): unsure at all n locations
taagctttgaagagtaggttcatgtgtgaatgtaagagctggagtttggttttgggtattgtcattatccttacctgtttaaagtcttggtgtattntatggatatattaatgttaatgagctgcttcttgtttcacgcaccacacatgggacagatttgagctgcgtgtgcacaagagaattattgatctctacagttccnctgatgtggttaagcagattacttcaatcacaattgaaccgggtgttgaggtcgaggtcaccattgcagatgcttgatttttgccccattttttccccgcatgctagtttcttttgtaattcatcctttttgctatgtatgttgagtcccatatgttagggataatgcatatccttttgccgtgtaaatttttgatgttgattattgtggaagagaattattgacctgatcgaatatctttgatatatgttatcgaca

SEQ ID NO: 120295 - DNA, 436 bp, Glycine max
  unsure (1)..(436): unsure at all n locations
agctcatgatgatgaatcatggtgattcattatgttttgatagtgacaaagatgctgagaataagcccatagaatgatntcaagattacatcatgaacaaattcatgaatccagagaagtttgcattcctgattcgagaacagatgaattcaagtttcatgagaagatatcatgaggactcctcatgggaagtattgataagatcattttaatacaacaacatagcacagttttgtttttcacaacagtttttctcacaattgtctaagttaccagagtctttactctctggtaatcgattacctagttcctgtaatcgattaccaggggcgaagtttgagttcaaaagcctttagctgaatctacaatgttccaattgatttcaaaatggtgtaattgcataccagatatcggtgatgcgttactagtgcatctg

SEQ ID NO: 120296 - DNA, 292 bp, Glycine max
  unsure (1)..(292): unsure at all n locations
caggagacgatgttagtctctgcgtgctatcaggcttttcgtcttacagatagcataaaggtttatacggatgaccactcgggtatctacgcccgtcagcgtgactcataagtctgtatgacagatcttgcgagcgcgaaagatgacgtaaatctccgcgtgtcaacgggcttgtcggccgcgatagacgaacggcgcangagacgacggtagtctctgcatgctatcagggctttcgtcttacagatagcacacacgaatgtatacggattaccactcggtatctccgccc

SEQ ID NO: 120297 - DNA, 484 bp, Glycine max
  unsure (1)..(484): unsure at all n locations
agcttatagtagatcttatcagacattatttatgtcttataataagttctttcagtaactgctagtatattttaattggtagtatttagcttttaaagctttatatttattttttcgtccttgaatatattctagatttcctttaacattcattctagctggctcctaatcttttactagataacaaataattgattgtttgatacatgaatcattttagtattctttaagcatttttattgtagtgttatgtaaaatacattttttaaaattgtagcttctagttgttatattggatttccttgttatccttanaatatttattgaatattcttattcgtattctaataaaacaaggctgtattattatgttggaagtctttattcactcctcttaacacacgtntttgtaactgatataatagttaacttattatgtcaacattatacttgacaacattgaccatgatangtgctatattta

SEQ ID NO: 120298 - DNA, 412 bp, Glycine max
tgcaagcttgtatcaattaaacttatacaagagtcttctctgcaagctactaacacttaagtaatcgattatgatcagcctgtaatcaattaaaacaaagaattttaaacatagaagacattttctaactgtagaacctttcttcttactcctacatgatgatgcatgatgcacatatgaaatgatatagactagatgcaacacacaacacaacaatcaatacagatttcactcaaagagttgggcatgtaaaagacaaaactttgtcaagctataaggctaagtcttgatgttgctccccctatctctaacaaattagatattaactaagggcttaagtcattaagagtagttagtgtgaagaagaagggaatagcctacgggacccacatatgaagcctctctataacct

SEQ ID NO: 120299 - DNA, 318 bp, Glycine max
aggcttagcgcgaggataataccgcttagtgaggtttgcttattcggaaagctataactctcactaagccaggctctggctggcttaactaaaatgatgcatattaagtacagaggagcatgcgctaagctgataagactcacttagcgctcacattgccgcaaggaattcatcttagcttccatgactggcgcttagcttcatggacctcagtattgtgcgtacggaatatatctcggaacaatatgtcatgcttagccaaggataagctatcacttagcgatcaggctaaagcttagctgaattcagatcgaattg

SEQ ID NO: 120300 - DNA, 381 bp, Glycine max
  unsure (1)..(381): unsure at all n locations
tgtctcagcgtntatgcgagacggagaccaatatgctagctattatcgccaagtaccaagaagagttaggtctagccgcggcccacgagcatatgattgctgacgaatatgcccaagtatacgcggtaaaaaggctagaggaagggtgatcgactctttacaccaagaggcaaccatgtggatggatcggttgctcttaccttgacgggagtaaaacttcccgatgtaccaagccagcgaggaaccctctcgcccaaagatatgctttggtatgcacttatactatgcacaataaacgtagaactgtgcttaactgctatcactctttaaaaagatgtcatgttccaaactgcatagactccttatttctatgtgtgtgct

SEQ ID NO: 120301 - DNA, 387 bp, Glycine max
agctttgcatgtttagtgattctagatatagatatgtacaaatcccacaaagatctgagagattctgatgtgtgaagatctacagagaccagagcttgatgaggaatctgttatgagagcttaagataagattgagagtggttgtgagatcctagaggaggaggagacatgctcaccacttgcatatttgcgatctctcatcatcgcctcctctttagcgtaattgaggcttacctattgtggaaagctcatgatctctgttggatcttccctgctggcacttgagaggaatcattttctatctattaaatgatattaatgcgcgaccactgcgctatctcgcttgtcactctattatgcctctaccatgatcatgtaaatgcatgc

SEQ ID NO: 120302 - DNA, 319 bp, Glycine max
tatacaaccaccgattatgagcgctgatcaccagctgcgcttccatgccatcaagggatggtcatatctcgagagcgacgtgtacatctcacggacgatgagtataccgacttccatgatgagataatgcggctgcggtgggcattactggttactcccatggtcaaattcgacccagacatgagcctcgagtttgatgccagtgcttggcctacagaggagggcgtgcgagatatgcgatcctgggtgacgggacaatggatcccgttcgccggtggtgggcatcactggttacccgagcgtttattgataagattat

SEQ ID NO: 120303 - DNA, 79 bp, Glycine max
  unsure (1)..(79): unsure at all n locations
aatgctttttatatttgtaactgaacggctacaatgacctttcattgaattggtgggtgcaccancaacattgctggga

SEQ ID NO: 120304 - DNA, 341 bp, Glycine max
gtctcacttgtccctttgcccaaagaacaaaggactgatcacatgaattctttgtgtctcccttctcccttgtctaagaattcaaagcgacacactctaagaagtgatttgattgttccctttgcctaatacagaagtgttcaaaagactaaccggttgagaattcttttgtatccgcattcacaaagtatcagagggttaacagcctgagatctttgacttaacacattggagggtacatcctctgaggtacaagtatacggtacatctacttgggtctgactgagaacaacagatggtacatctcttgtagatcaagtgtagtggagagtacatccact

SEQ ID NO: 120305 - DNA, 275 bp, Glycine max
  unsure (1)..(275): unsure at all n locations
gcttgcaacttaaagatctacgtaggtctgatatttctatcgtacctgacgatatgtangagcaagggcagtccccttgtcgatcccttgagacgagcgtgtagggtgctaattccttccccagacgtaaacaacccccgaacccttattgtcaaaatccgaagacctctttttggtttctgaacgttttccttgaataaacggtggtggcgactccgttcgttttctcccttgtagaggaacgctttggcttatttatctttgccttagccatc

SEQ ID NO: 120306 - DNA, 436 bp, Glycine max
  unsure (1)..(436): unsure at all n locations
agctatctgcatngctctctagacaacatatatgttcttttatcagcgtcgaccctcatactgaaactacgtatatgatatgttcctaccagtgcataattcaaatcatactgataatatccgttagagttgtgcatgatgactccaagtcgagagacaatgtgttggtgtatgttcatcaattcttatgatgttgagatttctctaagctctcgataagaaaacccatattcatgattatctgtgaagctcattgtcctgatttagataatgaatatgtagatggtcttgtgacggcctactctgacatgtccagtattccttatctggatatgattcaactctgcagggaggtcctggtggacggcctgattctggacgggatccggtggtttggttcacctgcattcggctgcgttgagttaatgcatactct

SEQ ID NO: 120307 - DNA, 248 bp, Glycine max
  unsure (1)..(248): unsure at all n locations
cttaaaataaatgcggaataagttgatgacgcgaangacatggaaaaaatactccaaacttcaatccaagttgaacttcattgcaccacactagaaaaaacaacgatctaaagaccacgacaattgagcaactcatgggttccttacaagcatacgaagaaaaacacgagagacaacataaacacatggaggctacggagcaactactacaactcaacgtaaaggaagcacactatgcatattacaag

SEQ ID NO: 120308 - DNA, 407 bp, Glycine max
  unsure (1)..(407): unsure at all n locations
tgcagcttatatgcctctccatggcgggattcttcttttttaatgcgagagatatagtggcagtgatattgttgaccaaccctacgaaaccttctaccgagatatctagggccacatgggcctctgtcagaacttttactatcagagcccgatgaggctcggagctcataagtaactccaacagcgagaccctggccggcgttttgttgagctgatcgataaccttgaattcgctctgctgaattatatggaggaactcgctggctgtctctagcgacacctcctttgtaccatcctttttctccgggaggccttgtgccggaatatctttattcgaagcgagnggtgcgttcccatcttgctcctccaccactgtatcctttcccttgacagacgaggattggact

SEQ ID NO: 120309 - DNA, 442 bp, Glycine max
ttgatttttttctattgcctggaatcgattacagctttctgaaattaattggaacgttgtatattcaatatgaaaactttgtcacaacaagtttgctctggtaatcgattaccatagagtaaaaactctttggtaaacatgtgttgagaaaaatcatgtgctactcaatttttatgaaaaacttttcatacttatctcgattaagccttctcttgattcttgaatcttgagtcttgaatcttgatcttgattctagagatcttgaaccttgaatcttgattcttgactctaagctctcttcttgagtcttgaattcttcttgagtcttatcatgaactctggaattgctctcgattcactcgagttgttctttgactgatctttgagtcactagatgtgttcttagagtgacctctgagctgtttgtcatcacctttggcat

SEQ ID NO: 120310 - DNA, 130 bp, Glycine max
gattgactaactgatactacctgtggaaagcgtggtcagatccagcacgggagacctcactgtatgtactccaaaggaccatcgactatatacttgttacggtatacttggatacatgcaaatcccaaat

SEQ ID NO: 120311 - DNA, 333 bp, Glycine max
gatcctctaagtcacctgccgcatgcaagcttctcaatctgcgtgctccagtgctttcttcttactcttgcaaacccataccagtccctcgccacttcatacttgttcctgaacgaatccatttcaccccattatttgatgaggaccctgtcagtgccctgttcaaactcacttagacggattctgtggtatcatacctgaaggaggttgaagacttggctaatagaattatcggcttgtcgcgccacttcctgttgccttggttcatctcatggttgacgccggagatcctcccggcagtccaagcccattatcctatgactgtggaccatg

SEQ ID NO: 120312 - DNA, 328 bp, Glycine max
  unsure (1)..(328): unsure at all n locations
tcacacaagtctgtatcgctctgaaacaagcaccgaagtctttgtttatgaagnttaatgagtttatgagcaactcacgattcaaaatatgtgacatggaccattgctgctatgttgaaaaatatactaattgtatgctatgcttgttggtatgttatgaatgttgatgcacgatctaatatgcaaaattaacatgttagctcattgtaaaacttaaataagacttgtcactacaatctgttaaatcttacatcaagattgacggcaaatttccatcttcgttctgattaaaatctggtttattcaaattcacaaaattataaacttc

SEQ ID NO: 120313 - DNA, 63 bp, Glycine max
  unsure (1)..(63): unsure at all n locations
ggatccttaagcaccgctgctgcagctagaggggtcaggcagaggatttttatgntgctgaaa

SEQ ID NO: 120314 - DNA, 460 bp, Glycine max
  unsure (1)..(460): unsure at all n locations
agcttcctctgcaccaaatggccttttcctatatttattcatgcangggaagggtttaaggatttgaatactgaagacagagaggaaaaacgcagaacagagaaagagaagatgataagagaaaagccaaggcgctgccgaatcgaaccgtggatcgtttccttcattatttctcttgctagccttgtaccctgtgcaacagtcgattatttctcttaagatnttgatgtaatctatgtacccttataggtcctttgagatattatgtttgcatctatcttctccacttatcattggtaatttcattttattcgtaaggcttagttctaatgagtcactagtgtcatgaaatcgggttctttgttactaagattgganagtaataaacaaaaccaaatggaaaaaaaaatcagttcacaaccaaactttgtttcgcaaatatcacttgagatcgttcaag

SEQ ID NO: 120315 - DNA, 413 bp, Glycine max
tcagctgtgctctggctgatgttgaggatgagtagggtttattatcctgatatatagactcgagcgcgactgttggcccttgctttatgagctgcgtagccttcgtgaacattcccaacttgtacatcatcgccagaagcttatagatcatgctagagataaatatgtgtttatagattaaaagtagaacataatcataccttgtatataaagtctgaccgttatatataaatatcatcacctctcctaatataagtcatcagtacttcaaactacattgtgacatatataataatgcctatagatcatcggtttgttgtggagcccggctgctgaaggctgagcgtccaccctcatgcactatggcttatttggaggattgacacttgtctttagtagccagtaagacgcca

SEQ ID NO: 120316 - DNA, 498 bp, Glycine max
  unsure (1)..(498): unsure at all n locations
agcttcttgagatgcctntcggtaatctgaccttacgctttggtaaaatccacaatctcattagatacattgaagtagtcaatgaatcttgaggcaagtacaacataagagaattcgtaatctaccaaacgatgactctttagcttaatgtcttcaatcaacagtacccaattcatcttaatacctgatgttagaccataaacaatatgcagatcaacatccattacctgagcgtgattactggacctcagagtgagaatgtatgtaatgaggtagactagcattctgtcctctacagtcaggacacctactccttggcaatttctcaagtttcttgcggngtcaagaagcactcccctagaggcctgcatcttgctgtacccattagttgtttcatcgaacttgcagactccacccatgtccagaccgactacttccttccacacttcagcgtcaatgaccatttctacttcattaacagaagagaagagatacctt

SEQ ID NO: 120317 - DNA, 357 bp, Glycine max
  unsure (1)..(357): unsure at all n locations
aatgtctcttntgccccaaagtaaagtccacatccctacaccgctagacccctcccctgttcttgtgattcccacattataatataatctccaatagcaatagaccatctatcctttctcttttcaaggctaacgaatatgtttttatctctacgaatatgcctggagcaaccactgtccaagaagcacaactctttcttcttgctgtggagcaaacattcctgcaccagaaagtaatacgatcttatgtatccataatttctcggatcattggttgttaatgaccttcctaaaaggaatgtttctctctttgtaacattctgaggtatggtgtacccatttgttatagttggaaca

SEQ ID NO: 120318 - DNA, 358 bp, Glycine max
agctatataagcgcgggtctgagggacgaatgttttgtttcactatatacgtgacgcaaccttcccttccgggggagggcgactcgagactcgcgggatgcgtgctccaccaatggaatacgcgcggagtcgtcaccaacggttatttgaggaagacgtcagaacaaccggaaaagacgagatctacgaactttttatagaaaggttccggagtcgcatctacacactgcgaaggtattagcacctcacacgttcgtctcaaggactgtggcctttcatcaaatgtgcatacatgacattgattattatgttctctattatgatgattcaatcctctacaccctcttaatactctttt

SEQ ID NO: 120319 - DNA, 276 bp, Glycine max
ctgatgaaagcctacatgtcggctgtgaaagaacacatggcctacatgatggctgccatgttaggtatgaagcaactcattgagaataactcgggctccgccgccgctgtcaggtcggctggcgaagcagacccgactctcttggcagctacgcaccatccttccttcgacatagtatgaccgcgataggacacactggggcacgaaggcatacctcactgggatccatcgagcggttacctttggattgccggccaactatttaccactccgttt

SEQ ID NO: 120320 - DNA, 216 bp, Glycine max
ctcctagaatggatctcttttttttaacaaagagctccacatgcgtacagatcggcttaaccgagagaacctacactgttccgaaagtacacgtagggctctataaaaagttcctagtttatgtttgccaattactttatttggagggaaagatctgaactttgatcaccatggttgaagagcacattattattagcctgaagatgaatgaattcc

SEQ ID NO: 120321 - DNA, 489 bp, Glycine max
agcttctagagaaaactacattaagctgtttctgtttaaacgctgcccagccttcggtaaccgctggatcttctctaaatgcggtttgcaacttcgcaagacaatttaccatgatttaaccgtcgggatctttgagataatatctggagtgtgctagaagcttccgatcccgagagcatctcttatttaagcatttcagcctttgctttcttgtagcttaggaaaaatgtcatttcttcttctgtctttcttccacatccatatctaaagtatcaagtactgtctccatcacccacatccaccattagccaccacaaaccatcatttttctccattgaaaacccacaccgagaggaacccttcaaccgaagcagaatttccaacttgtgcttgcggtttcggtagagaacgacatccctaatctgatctttattttcttcgaggaaccatggcctatgcctggttctgtagtccatcttgctatgatct

SEQ ID NO: 120322 - DNA, 416 bp, Glycine max
  unsure (1)..(416): unsure at all n locations
aatctcagctgctnganagcttcttggaggctggatctttgagcttcactattgtccttcaatggtgattttcaaccatggagttactacggaagacaaacgagaagatgggagaggaggcaccatccactacagataagccttggaagaagaagcttaaccaccacgagagtgtcttggataagaagtttagagaggaaacttcaatggaggaagagaatgacggatagagggagagatagacagacagactgagaaagaaagttgcatggaatgttgaagtaagaaagagagagaagttgaactttgaagtgtgtctcacaagactctcatttcatcaaagttaccacaagtgttacacatgcttctatatatagccttgagatgcttctagagaaactcctttgaaaacttct

SEQ ID NO: 120323 - DNA, 400 bp, Glycine max
  unsure (1)..(400): unsure at all n locations
ggacctctaagcacctgcggatgcagctgctattgactnttcatacatgaattatattggaggaggaatcgtccctttgattgagtatggtgtacattgatttgcttcttcgaattaaatgagacaattcaatctttaaaaaaataaaataatgaataatacgcttatgtcattatttctttcgtatagctataacatatctattttgttgtagaatcttntattgttttcatatttaatcattttttattgtaaatcatttttgtggtattatcttttatatggcatgatntgataatggagcgagataagatagaatattctatntattttacctattttcgatctacaaaaactttttaaaaattaaaaaccagaataaactaatacttcaaaatca

SEQ ID NO: 120324 - DNA, 145 bp, Glycine max
actctctagagctcacccgtaggcgagagtgctcgattacactgagtcaccaaccatcccatgtggtagcaattacgcggaacggtcgctcgtgtctctagatgtaacggcatactgaggatggacatctgccacactggaatct

SEQ ID NO: 120325 - DNA, 211 bp, Glycine max
ttatgggtgttggctgacatcagctttgtattgaaaatgctatgattactttctattctcactgcatagtcattagaatgtaaattaactcaatgtaactgttcatcgatctactgtggttatatggtggttaggaactacaatgaagagcttgttgcttgcatgctgcacaaggacatggttctgtcttcatctatctacaggctaacca

SEQ ID NO: 120326 - DNA, 278 bp, Glycine max
tagcggttgccgatatgagcctacaaggaaattgttaggattaaagcagatgagagacgagcctctgaccttgtgaaggagcttacaaagtactctcgtgggaatgcaacataagatgaagcccaccctctcatagatcctatgatgggaagagactctctgaatatcgagaatctagtgtgccaagaagaggaaaatacgcacgatgaaattgctggtggatctggccgagacgtccgaagtccttgaaatgcatcactacctgttctcaacatata

SEQ ID NO: 120327 - DNA, 136 bp, Glycine max
  unsure (1)..(136): unsure at all n locations
atgaacgagagatgggggagatccaaactatctgaaaaaagaggaagagaagcttaactctcaagcntgtcatacaagactctcattcatcaaacgtacaacaagtgttacacatgcttctatttatagactatga

SEQ ID NO: 120328 - DNA, 82 bp, Glycine max
  unsure (1)..(82): unsure at all n locations
aactagctggctgcactgtgctgggatcttctgctcccttcgggaccacacangcgacctggagatatgttgacctgatcag

SEQ ID NO: 120329 - DNA, 446 bp, Glycine max
  unsure (1)..(446): unsure at all n locations
tganatgaagaagtgtagaagggtgaaacttcctgctgttattctgtgaccacagagtggtacctggagatatgttgcggggatcagaagaccttggggacgtcacgtggggtgctattgcccaaaaacaagcttgaccaatcccgacccaacccgggcatagtcagtcagtgagaaccagtgatgtacctaagcaggcaagctcctgacagtcaacagataaaaggaacaaagaccacaaagcaaggaggcttgtgtggtggctggccagctgtgaatcttgagtgatatctgcgatatgtgttagtgcttancactactgagtttaaaaaggttggctaagaattctgtaaaacataagcacttatacaatgaatgatagctggagtngctgcacatgatgtccaacgttatgtcaatgaataagatcgggctgcataatgcac

SEQ ID NO: 120330 - DNA, 99 bp, Glycine max
tgtacatctgcgtcgtatgtgcaatggcatgaaccctagtaaccagcttgcatctgttttgtgtgctaggagtgtccttcgacaatcatactgtgtgta

SEQ ID NO: 120331 - DNA, 503 bp, Glycine max
  unsure (1)..(503): unsure at all n locations
tctagctctatccaggcactctcttggtggcgaagctccttcttccatgggcttattcctaggggatggcaccttctctcacctcttctnctttgtcttccactgcatctccatggtggaaaatcaccattgaaggacctcattgaagctcaaagatccagcctncatagaagctccacaagcaagcttccatcaagtggtaatcagagcacaagagcttcaagtaggtgctccttaaacctccattaattntcagctttaccttctcctccattattgtttcttcatttttctccatgcatctcctcacatgtcttgtgctaaatggttgtaacatgattctttagaatttccaccgattaatcttgctatagaagctagatntgattntctatggttcanatntcttgttcatcccgaactttaaaaatactaagaaatagtcactgcgaatnntgagctgaaattttactgaatttctaacatctgtaaaaagttaaaaa

SEQ ID NO: 120332 - DNA, 295 bp, Glycine max
gacttatggagatatattcttcgaaattagtcactggtaatacgataccattctcggtgtaatcgattacacatcaacagatgcagctcttcattatgaattgtgaagatcacacatgttacaatctctggttatcgaatactaatgtaatgttatcgatcacacgtgcacagagtactataacaactgctataacataacgtatggctcttgaaagttgaaatatcacccgtttcagacactggtaatcgactactgacttgtcggaatcgattaccagagagtataactcttt

SEQ ID NO: 120333 - DNA, 379 bp, Glycine max
tgtacacactgaggcgtacaggtctgccaatggaataggatgcttctggaatgtattgttatgccgcgcaccattggagtgagtttgtgaatgtatcaaaccttatacatatgagagatctgacgcaacatgctctggtgcagagacatgcttgtgaatggtgctcatgggtgattggatatcatcatgagacacattacgaccattgtctaatgctctgtcaatgatgatgaactctgcatctatcaccactgtgatcgtcctcgagctggtggtatgaacacatgatgttagtcaggatgctcatatcactcatggatacattgttcgaccctcatcccatatatgacaattgttgcgaaacttggtcaccgcgacg

SEQ ID NO: 120334 - DNA, 425 bp, Glycine max
  unsure (1)..(425): unsure at all n locations
gaatgatattgcggttatcatgtacacaagtggtttacaggtctgccaaaggtttgtttcttcgtcaagttttgttaaaggtgtccctttctgtgtgtctgtgaatgtataatctcttattcatatttgtgatttgatgcanagtgcttttgtccagagtcatgcttgtgaataatgattttgggtgataaaatatcaacaagaaccatatcaagacattgtattaatataatgaaaattttcttgtctgcaacattgagaaccaataggatctccctcagctcagntctatgattccctttgatttgacagggtgttatgattactcatggaaacattgtagcaacaacagcagcagntatgacaattattccaaatcttggtagcaaggatgtgtacatggcctacttgccccttgctcatgt

SEQ ID NO: 120335 - DNA, 312 bp, Glycine max
ccctagtttcatggttttaaatattgactattttattacatatgtttcaaacaatccaaaccttcactatgcatcaagcagacaaaagtaagaaaatagccactgaccctgttgcagccaagtcaacaatgtagcaccggttggtcacaatgaacttgttgattaccagcatcttccctgcaacgaccattatcatacatcagcactaaaccaagcttaaatcgtactcgtgacatgtcttcaacactacaccaagcttaacctaagtaagtaagtaagtgaccaacgtaccgtggacaaagccctgatctt

SEQ ID NO: 120336 - DNA, 333 bp, Glycine max
  unsure (1)..(333): unsure at all n locations
tatattatatcaagtgtgaatgtgtactcctatgtaacaccatacacctgtattcgctagtatcaacatcagatgcggtgctattccgaccgtccaaagcatacgtatacgctctggacgaggctggacatgagaggaatgtctcttagaatgctctgagttctaaaactatagaaacgattggtcttgaaagtgtgtctacgcccagggatgacctaactagagagtttgtgaagcttctgacgtgagtggggagaaactatggaggttgccattatgggaaagttactgngaaacaatgaaatcaggagttgctgacatgagaacactggt

SEQ ID NO: 120337 - DNA, 255 bp, Glycine max
atattatatcaagtgtgaatctgttcttttttttaagaccatataccaatagttgcttgtaataaacacaaaagggcctaatattttagtcggcaccaaaagcatttgtatatgctctggtagaggctggacctgaaaggtatatctcttaaaatgcttctgagtcctaattactattgcaaactattggttttgaaggtgtgttacacccagtgatgacctagcaaaggaagtttttgagcttctgatgtgagt

SEQ ID NO: 120338 - DNA, 369 bp, Glycine max
  unsure (1)..(369): unsure at all n locations
atgctaactgatgcagatgtacagtgttactgcccgtcatacgacacaaactatgttcagaactgtggagcttatgcatacttatgtgtcacgcatgggatgtggcgccatccatgtatgtcctatacacacatcttccctaaataatatcccagccttagaatcccatccttataaccctcatgaatctngcagctataatcacgagccatatctaagcacttgatcatttgagcaacaatgacattgtgacacttcatgactatgagataagtattcaacttatctgttagatacacgttatatctaacctatagtgattgagaaagtataacatgaaccactgcttaagcttgcattgacacctac

SEQ ID NO: 120339 - DNA, 311 bp, Glycine max
  unsure (1)..(311): unsure at all n locations
taagctataatgttggatagatatgctagctgatgctgaggtactgttcaatgcaagttatntgacattaactatgttcagaactatgtattctatccatacttaatntgttntgcatgggtngtgttgccatcaatgtatgtcttattcagacatctttcaaaatcaatatcccagcctttgattccaatcattctacccaacatgaatctgtgagntttgatcatgaccctcatnttttaatatgatctttcttgcaactcttccattttgacacttcatgactttcaacttagtattcaacttattca

SEQ ID NO: 120340 - DNA, 373 bp, Glycine max
tgcatgatcaaatttgttggttctcatgatcatcatgcatgcaaacacatgccattgctcatggggaatgtgtcagtgccgccaccactaccaccaccaccacatgagaatagatggtaccatccatggaaaataataaggtcacttgtgaggaagcgactacaagggagtgatgaactttaggaagaaaaaaaagagaagcctttccttgtgcttcttatatagaagcaaacctatcacttcatgactttggattggtggagaagcttatgagaaatggtcacagcaggcttgattatctgaccactgaggacaagcatgaaaatgttataaaatggataacattgacccttatgctggcattgatcaaatt

SEQ ID NO: 120341 - DNA, 496 bp, Glycine max
  unsure (1)..(496): unsure at all n locations
actatgatactaagctgggtgcacgcggagatntacgtcatcttccgcgctcacaagatctgtcatactgacttttgagtcacgctgacgggcggaaatacccgagtggttatccgtataaacattcttttttgctatctgtaagatgaaaagcctgatagcatgcagagactaacgtcgtcttctgcgctcttcgtcaatcgcggccgacaagcccgttgacacgcggagatttacgtcatcttccgcgctcacaagatctgtcatactgactttngagtcacgctgacgggcggaaatacctgagtgggtatccgtataaacgttcctttttgctatctgtaagacgaaaagcctgatagcatgcagagactgacatcgtcttctgcaccctttggttccccggggacaacaagtcatttgcatgcgaagatttatggtcacccgcgactctcatcaaccgagaggaacgaaantagtggcttatctttacttt

SEQ ID NO: 120342 - DNA, 402 bp, Glycine max
  unsure (1)..(402): unsure at all n locations
ctgcaatcatatcacgtggatcttgttggataacagatcgcagtggctgttaagtggagtgacaatccttttcgccacgagttgatgtgagancatgcgtgatgcgcgacattgctgcttatcagaatgacctgcaagcgggaccttcagctcttgaggccagattatggtggcacctactacacggaggcagcgtatagcatcttgcagagggtaccccctacctctgatattgcgctcaggacatctggttctcatattttccctagagctgtgctcatcttgggaatggcaaaaccgcaccctaccttgttacttatgtgagattgtgcactgcttttattatgccgctgggagaggggagaacacntgactgtatgactttgtttaagtagaatttgg

SEQ ID NO: 120343 - DNA, 424 bp, Glycine max
  unsure (1)..(424): unsure at all n locations
tactaagctcgtcaaagttagtactcagcagaaccatttaatcaattcaatgtgtatcttagtggataacagatgggagtgtgaagttcaatggaggagaaacctctctgaccacgatagtgatatggcagcagcctttatggcagacattgctgagtttcaaattcaacctgcaagcagggaccttctgctatgggggcctgattctggtggaacctactccacaaaggcagcatatagcttcttgaaagatggtgacagccaggttactgaagatagtgacttcaagacaatctggaatctcaaaattccacctagagcaagtgctttttcttggagaatnttcaagaaccgaatccctaccaagggtaacttaatgaggagacatgtggagctgcctttctataattgcccgctgtgtgat

SEQ ID NO: 120344 - DNA, 313 bp, Glycine max
actcttcaacaaatactcctatctcgtgaagcactcgctagggcctgaaaacgcaactatgtaaccatacataaccctatcccttatcacatacaacttcttatagttagctctgcctggaatatgagctactctgtcgcagtacagtgttgttctacgagaagagacatcagctaccgcatacgtgaaccccttagatgatagaatggcgtatggaaagacgttctagatactctacccattatgcgagcctggagttttactttgatcagccctctagagaactatagagaatgtaccatactatgaatga

SEQ ID NO: 120345 - DNA, 375 bp, Glycine max
  unsure (1)..(375): unsure at all n locations
caaaactcctcanatnttaccttgatcttgtgaagcacttgcttaatggatgaaaatgtcaactatgtaaccatacatcaccctagccctaatcagttccaacttcttttactttgatctgaaaggttaaaaagaaaatctatcttagtaaagtgttatagaaggagaagagacaagagtcaaagttaacaagaacaaaaaagaanaaagaaaggtgtataaaaagacattaaagaanaaaaataaaacaaatgaagctgngagtttattttgatcatcttgcaagaagataataaataatataccatattaagaaagttattntctaacggtttaatacaccacntatatgctatggcattgtaggtttctttc

SEQ ID NO: 120346 - DNA, 344 bp, Glycine max
cggctgcttgccatacagaccctgataggatgatcttatgttcttagacaggactgcaaatactctttacgatgactatggacatgcttgcgatgacaactacctactgttttcagaacttatactagtctagaatcccacgacatcgctgtatgtgcaataggaacactataatactgatggcgtagacctgtattatccatgcattggtacatgactggcggtaatacatgcctccaatgtgcatgagaatctcagatgacctcttcatggatgacataggaatgacgttggctggctcaggacacctacatccagatggaattcatgggattgacaacact

SEQ ID NO: 120347 - DNA, 497 bp, Glycine max
  unsure (1)..(497): unsure at all n locations
ttacgatatgttatgctatgagagcctaatatttgttaagatcttatatcggctagatatatgcccaaaatactccttatgttgactatggaaatacttccatttcgaactagctttggtattcagcacttataccagtttaaattccagcaacatggatgtctttgcaatagaaatataaaatactaatgcttgacaactgtatgatccatcattcagtagatgcgaaaggaaaatctatgccacatatttgtgagagaataccagattttaacttcatggatgacaaacgaatgacgtggttcttcagaataaaacttaagaaccatatggaacttcatgtgattgaaataaactgaaataactgacataaatgtacccgtagggattatactcatattggtaanggtgtgagaagttatgacgaacatattacctcacaatgttatgctcagtctacaacaaatatcactctgcatggctggcatcacttactg

SEQ ID NO: 120348 - DNA, 306 bp, Glycine max
cctgaggacgaccgaagcttgcatgccaacctggagactctatagagccacctataccgagctcgaaatcacctatatagaggtgtctgagaacactggactgcgtcaacaacgccagacagtgaaaccctgacgtaaccgactagactgcgtgcctaaagaccgatctactcactgggttgagcgaacacgctccacctatcaccttcaaaccttcctcacacttgattgaaaagcgccgagcgagattttccttaccattgtgggatttacacgatatgggcctctagacaattgtctgagcga

SEQ ID NO: 120349 - DNA, 95 bp, Glycine max
  unsure (1)..(95): unsure at all n locations
tctcaagcaagcttcaatcagtccttggtcttatcactaatctaacttagtttattggtagnttagtttactttttcttgaggacaaccaaagct

SEQ ID NO: 120350 - DNA, 353 bp, Glycine max
  unsure (1)..(353): unsure at all n locations
acttgatctaagcttggtattaatntcgagcgtctcgacatattacgggactcattcatacattcgagaaaaagtatggttgtttgaatatgctcagagcttcggtattcaatatcgagcctctcgatataatacaggactccatgagacacccgagtaaaaaagttattgccgctttaatttgcttagagcgtcaacattcatcttcgagcgttccgatattatacaggactcaatcggatagccgagcaaaaagatattgtcgttttaatatgctcagagcctcagcgttcaatttcgagcgtaccgatatatttctggactgaatcagacattccgagtaaaagttattg

SEQ ID NO: 120351 - DNA, 496 bp, Glycine max
  unsure (1)..(496): unsure at all n locations
ctcagcttcttagaaggttcgttcctaatttctctacaattgcatcacctctcaatgagctagtgaagaagaatgtggcatttacctgtggtgaataacaagagcaagcctttgctttgctcaaagaaaagcttactaaggcacctgttctagctcttcctgacttttctaaaactttngagctagaatgtgacgcctctggagtgggagttggagctgtattgttacaaggtgggcaccctattgcttattctagtgaaaaacttcatagtgccaccctcaactaccccacctatgataaagagctttatgccttaataagagccctccaaacttgggaacattaccttgtttccaatgaatttgtcattcacagtgatcatcaatcacttaagtacattagagggcaagcaagtaaacacaggcatgcagatgggagagacctagagcaattcatatgtatcaatacaaaagggacaaaaatgtgtagtatgcc

SEQ ID NO: 120352 - DNA, 414 bp, Glycine max
  unsure (1)..(414): unsure at all n locations
tctagcttctctaatcttaatgagcggatgtgtgngcttctcttgggcctactgctgcatcttcttcctatcattccctagcccatcaaaaacaccttgtnctcaatgtgttggggcttcaacgcatggcttccaaaagtgataccaagatcccaaggtttgtccctgagaattgcaccagttttatcacctattcatagtgcaaagacagctggtatgcacttgcgtgagaccatgatagtcccaaagaatccaggtcccaaatcanacaacacgatgtctctattttctccatgcttggcatgangagctgttggatggccataacaaagaacagtgctgatgaggttgcagaaatgggaatagcgacatgaacgtgaccgagagccggaagatgtggaatcgacatgggaa

SEQ ID NO: 120353 - DNA, 378 bp, Glycine max
  unsure (1)..(378): unsure at all n locations
aaagaaaggaattttttctacttgcatattcattacaatgataggctatntataagctctgaatgcaanatatnntgtccttctataggtctatgatcatgcaagcaataacagaattgccaaatatcctaacagaaagatctaanatcccgacagaatattctaaggcccattcctgtgatgccagctcagcagccttgtccctagttggttacgaaatcctttanngtgtgangacgagtgctctacctttngctcctcacgtgagtgttcattccctccttgttnggctggtctggtagctgattcataacattaaccactgtcttattattacaaganggagatcnactttgttagatttaaatttcaatattc

SEQ ID NO: 120354 - DNA, 289 bp, Glycine max
ttcaggaatcgtggcatgctttgctctacactatacgaagtggcaaactgaaaactcacgtacgtgtgtttgctaaaccgtacctaccttggcgagtccacctcctcttcactgtaccttgaatgcatctggtatgaactgaccgctggggcctaacactgttcacatatagaatctgcgaaccgcttgttgagaggcaggactttatgaatcatctgggaaacttggttactgaagggtcagcatggctggcaccaacatctgcgatagacggtgaattacccccctc

SEQ ID NO: 120355 - DNA, 348 bp, Glycine max
  unsure (1)..(348): unsure at all n locations
ctaagctgagacaatagaaagcatgttggagaaagctcatagtgcaatttgagtgttattcgctcttgggaaatattggaattcttttatggaatcgcgcgtgcatagtatatgtatntgattctctaatattgaaagttgtaagagatcttacaaaaactagatgtaggtcctgatttgactaaactaatataaactcttgtgtgattatcattctctctcaactcttatccttgaattcatcttggtattgaaattgatctcatagggccataaaacatgcttgtcatatgttatactcatagaaagtctccttgattgtgctgatcattctatgtgatcttttga

SEQ ID NO: 120356 - DNA, 366 bp, Glycine max
tgaaacaatgagatgatgtgctccatgagaggttggatcaaatggagaatagagatcatagtggagaagaaaggaggagaagagggaatgatggtgttcctagacaaaaccgaattgatggtattaaactcaacattcctccctttaaaggaaagaatgatccgaacgcctacttggagtgggagatgaatatagagcatgttttctcatgcaataactatgaggaggaccaaaaggtgaagtttgccgccacggagttttccgactatgctcttgtgtggtggaacaagatacaaaaggagaaagcaagaaatgaagagccaatggttgatacatgggcggagatgaaaaggatcatgatgaagc

SEQ ID NO: 120357 - DNA, 366 bp, Glycine max
agagggtaatgaaacaatgagatgatgtgctccatgagaggttggatcaaatggagaatagagatcatagtggagaagaaaggaggagaagagggaatgatggtgttcctagacaaaaccgaattgatggtattaaactcaacattcctccctttaaaggaaagaatgatccgaacgcctacttggagtgggagatgaaaatagagcatgttttctcatgcaataactatgaggaggaccaataggtgaagtttgccgccaccgagttttcccactatgctcttgtgtggtggaacaagatacaaaacgagataagcagaaatgaagagccaatggttgatacatgggcggagatgaaaacgatca

SEQ ID NO: 120358 - DNA, 433 bp, Glycine max
  unsure (1)..(433): unsure at all n locations
gctggtttggcaatagcaccccacctgacgtgcgcaatgtctcttgacccncgcgacatatctncaggtaccactctgtggtcaacaataanagcaggaagcttcacccttcaacactttctcatctcaagcttgtaggattatggtgtacccatcacatgtggtactatgtggcggtcgggcgatggtgcacaacaagttnttcacatccacaaagcgcgcattaacccaccatcccctgttgcccacctncatctgagctcacgtactcccacgtagcccatattctcgtttctctcaacaccgggtccccatcaatcctctcaagcttccacaacatccaagcaatacaacattcaaacagcacaagctatcacagccaatcaaaacagagcaaaggcagaatactctgctcacacatcaaccataatca

SEQ ID NO: 120359 - DNA, 407 bp, Glycine max
aagacacgatgtcgacctaaatgaagactattctttcattgtttatgtaatcggagtcatcatgcgatataatttgttgtaagccatcaataaccaagtaatattattaagtactcgtttcgctaaagcaaagaaataagttggtccaacaaaaatcatttacgcgtgtacgatacatcattgtcataattgacaacacataatgacatgcatgcgtattaaagtttgagcgcgacaccacattgactgacttgactacatattctgaagaaaacataaacacgacacatgttcacgcgtgtctattcttatatatacacagtgaagtaatctgtttgtgagaaccatgtatatatgtatatatatgagacaccgctaatataatacatattatcttgctgtcacat

SEQ ID NO: 120360 - DNA, 288 bp, Glycine max
ttcagaatcactagcgacgaacatgttcgcttgcctcacaggatcatgatgctcactgtacctatctaatctatgctatgatctatatatctcaagatcccagagatgacatcagctggttacccgtaatacgcgctctatccgccgatcacgagctctgcacatataccagcggagggttaaaactacgactggagtaagtgatgtgcatatgagcttagcatgtgtgaggctcatccatagatcatgatcagattctcgagaagatcaaggtccaattcctagtct

SEQ ID NO: 120361 - DNA, 431 bp, Glycine max
  unsure (1)..(431): unsure at all n locations
gaggttgagccacgttcttagtatgaaaattagtaattgaatgctcaaaatcaaaatattcagaatcactagcaacaaaatactcaaaatgctcaaaatgatcaggatgcacactatacctaactaatctatgaaagggtctatctatttcacgatcaaagggttgtaaatcacctggattacccctagtcatgcactatatgcagcaaataatgtgttctcaaacaagcaccaggggagggttaaaactacaactgtagtcaaatgatatccaaatgagcttatnatttgtgagccaacaccctaaatcatgaanagatagcacanaaaatttaaacaaacattcaagtctaactatgagaactacttaagcaaagnttagataaataggacaataatacttgaaaaataanaaacttagtaaacaactg

SEQ ID NO: 120362 - DNA, 106 bp, Glycine max
ctagagaacctaagtgttgagagagctgtgcactcagacatatggagaccctctggaggaacaactgctcggagaagcttatactttgtctaacacagagacgatt

SEQ ID NO: 120363 - DNA, 443 bp, Glycine max
  unsure (1)..(443): unsure at all n locations
tcttaattagagatcacttatttcttttaagctctttactcaaacatataaatattctttggatgatcaatcgctctgacagctatattctttgtttaacacagattctattgtatttgctctaattcttttatctctttgtgagagttggtttactcgtcaatcctccaaacttttagtttgagagagccaaacatgatgtagtagtgatcaaagaactatttgttttttagtctcaaggtgagattgagagtattccatatatgacccatcacatgcctgtgtaagcaaggaatgactatganaaatacttattgatgaaatcattcttcattagtgaaaccctcattcttcattagtggaaccttttaacattgaaagtgtatgaatgtggtcaagatatttgagtattctttttttctattctggtctttacttgattc

SEQ ID NO: 120364 - DNA, 368 bp, Glycine max
  unsure (1)..(368): unsure at all n locations
gctctgattggactggaattgtcaacatgacatcttatatgtnaactatttgtcaatgtagcacgaattccaatataaacatatattaatngtatcattgaaactgcttggggctgattatatattgatttatagattgggtttattgtaaaaacaaaagaaaacctttattcaaaagaggacatgttacatatgaatttcaagattgattctcgataaagtgatcttgaatactactttctatatcagttagattgctaaaaccgatgttaaatatgaaaanaatgcaacttccatgtatgaaacattgatcttagatattgacattaaaatgatacacggattagtttaaagttgtgtgaatgcct

SEQ ID NO: 120365 - DNA, 244 bp, Glycine max
  unsure (1)..(244): unsure at all n locations
tgtttttgacaatgagaaacagatggacgatctatgggcaaatgtcgcgcctactatctattacattagtactgcaaagacactactgaatgccagcggagatgaacgatcaaaaaacgattaagataatcatggagaattaatctattgccattcgtggatggtagaactatgttgatgcanataaaccatgctagaaaagcatgagcagattgctctgacctaagcgactgtgctatattag

SEQ ID NO: 120366 - DNA, 455 bp, Glycine max
  unsure (1)..(455): unsure at all n locations
gctaagctaacgtgcctgcaaacgtaagtacagagcatatgatagtgtttagtgacaatgagaaactgatggacgatctgtgggcaaatgtcacgccggctatctattacatgagtaaggaaaatacgctacaacaggccgtggggttgcccgatcagaaaacgcttaatatcattatggggaataaataaaaggtaattcatggatggttgaactatatccctgcttttcaaccatcctaaaaaagcatgaattgctcgctctgccctaagtggctgtgctattttagaanaacttaatcctgagttaagcaaaaaaacataatcaataaaaatatatacgcaacanacattgattaagtgaatatatcatggaagaaaaatataaccggagtagtgtatggccaatctctacgaacttgaaaagttcgacttaaatcttcntgtcatatttga

SEQ ID NO: 120367 - DNA, 194 bp, Glycine max
tgtctgatgaacttgctttgctcatgcgactgccgtgaggaatgtcattcaacttcatgcctctgattatctctgttggatgcagagggagaattcgatttgaggacaaatccttctcatgacggagagaatgatgaggacattatcaagagcatcggcaaagattcacttcgaagacttggtggacctatgac

SEQ ID NO: 120368 - DNA, 408 bp, Glycine max
tactaagcttaaccaggggagatggaccatctcaagtgctagaaagaatcaatgactatgcttacaacagtgagctgaccgatgagtataatgttagttccaccttcaatggctctgaattatctcttcttgatgccgatggagaattcgatttgaggacaaatccttctcaagagggagagaatgatgaggacatgaccaagagcaagggcaacgatccacttgaaggacttggacgacctatgatcatggctagagcaaggaaagccaaagaagcctcttaacaagtgttgtccatactatatgaatacaagcgcaagtttcaaggagaaaagttcaaggctgtgaagtgtatcatggccccaatggaggaggactaaatgacaccactttatttcacatttagag

SEQ ID NO: 120369 - DNA, 492 bp, Glycine max
  unsure (1)..(492): unsure at all n locations
ctaagctcggctgactgagatgcctcttatctatctgcgtttcaaatagtcttcttactttccacccatattcacaaaccaaatattcaaactgctgcttaagctntccgctgctaccattctcaatctgcaacctcacatactgatcaagtgtgctgctgcattgcnacaccaaaccacatcgtctttttcttcccactctataacacgcactcgtggttctggatcctcttctacttctaacaccatagtactccaagtgtgagcatataagcttctgtgaagcatcgtggttgctcgccaataaatgagccattcatgcataaaccaaaccaaggctaggcttcctcactttacattatgtattcngggtgggaccgattggacttatttgtgtggccttctggcttctgtattgtggctgcatttatattttgaccatatgcacgtgcaatatgtgagcaagaaactattanntttttcattcatact

SEQ ID NO: 120370 - DNA, 191 bp, Glycine max
tctgtacgtgtgaaattgatatttacatgcggaacacatgccattacgtaccctccatagaaacaccaatgaaacagtggtaaaattgctgttattccctcttaaccgaatcagaggcaccagggttttctaaatcagactcccggagatatgtacacctcatatatatatacagccacaaagagaaagat

SEQ ID NO: 120371 - DNA, 402 bp, Glycine max
  unsure (1)..(402): unsure at all n locations
atatgcatgtgaattatgacgcatcaacaagaatcaagccaaggctattgtgcaagcaatcaatggggcaaaacacaccaaatgattataatgatggatggctcaaattctcacaaaggtaaaatcatcactttcaaattgagcttttaaaactatcatgacatgtagagaagaatcaaggatttcaagtcacaaaatgtcaagaacttctattgtcaaaacaattacccatttcttgaacatatcctataattcaaagaanaacatgcacagtcgtacgtgcacacaaaattgacccaaaatattaaactgaaaatccgacgaaactaacaacattaacaaattaacacaactaacanattaacaaaaccaacataactagcagaaccaaagaacactctt

SEQ ID NO: 120372 - DNA, 288 bp, Glycine max
atcgtcacctatggcctctgtatatgtgccaacaacatggatctgtaggagagacatattctaagagaacttcatcgtatgatgctctctcaacaactctcgagcaacagacttgcggatctgttgagagttcatctatgagcatcacactagtttatgcactctgaaagagagaaatcgcttctgtcatctcttcgaaggcgcatcagaagactgagtcgctcttgaatcgtgattctgtgagcacaaaggacacgcgatccttgggcgtacagatgtcgaaaaagg

SEQ ID NO: 120373 - DNA, 506 bp, Glycine max
gctttgaaagacacatcttttcaaaaaaattgtgaaaagacactaatggcctatatatatgtgtgtcagacttcacaaagtaagagagaaatattctaagagaacttcattgtcaaatgctctctcaacaactcttgagcaatgacttgcaaatctattgagagttcatctatgaacatcaaattgtattatccactctaaaagagagaaatacttttgttcatctcttgaagttgtaatcaagagactggttgtctcttgaattgtgattttgttgagcacaagggaaagggattccttgtgtgttcagaagttgtaaaaagggtttttaccaagttagtgaaaatcttaagtgggttgcttgatgactagacatacgcatatgaagtggccaaccagtataaactgacgttgcatttctcttccttagtattttaagcagttactcgtctgccattaaagaaacatgtaatgatgctcttgtcttttcacatttagctatatta

SEQ ID NO: 120374 - DNA, 375 bp, Glycine max
  unsure (1)..(375): unsure at all n locations
aacatcatttcttcttctttctttcttccaaaggcatttctaacgtcccaagcactttttccatcacccacaaccaccattagccaccacaaactgccggtgttctctgttgaaaccccacatcgagaggaacccttcaaccgaaacggaatcttccaacttgccttgcggtttcggtagagaacgaaaccctaatctaacctcttcattttcctttgaggaaccatgaatccatgtntgttccttgttagttttagcttggcttcgcatcttttctaactatggaaccaccattgcatgttgtacgcgttctcttaataacctagagcatagagaacttgtaaacgntattctttcatggaatgcatgttatct

SEQ ID NO: 120375 - DNA, 202 bp, Glycine max
tgcactctggacctcaaatcagacgatagactggcgccgcgcctatctaggcaatacactgacagttcccgcggagaatgtacgtattatattaccctatatcggcggacggttatgcggcaaactgttactgagaagcgatgcactgctggcgtgcctcgccggccgagctgcgtaaccttcggtggatgcgatgctcccc

SEQ ID NO: 120376 - DNA, 224 bp, Glycine max
atggtcattcctccacgagagacgcgttcagctcaatgacgacaacgttacccactatcatgaacacatatttcacctgctgtggacactggaggttaccctcattggcaaaaacaacccagacatagtcctcgaaccatataccgatgctaggtctacatacgagggtgtgcgagatatgagatcttgtgtgaggggccattgcattcctttctatgcggatg

SEQ ID NO: 120377 - DNA, 346 bp, Glycine max
  unsure (1)..(346): unsure at all n locations
ngcctcanagagatccacgaaggacaaagtggctgaaggaaccatttcctctcccgaatatgacagccatcattttatgagcgctgagcaccagcagtgcttcgaagccatcaaaggatggtcattcctccaggagagacgcgtccagctcacggacgacgagtataccgacttccaggaagagatagttcgccggcggtgggcatcgttggttacccccatggccaagttcaacccagacatagtcctcaagttttatgccaatgcttggcctacagaggagggtgtgcgagatatgtgatcttgggtgaggggtcagtggatccctttcgatgcggatgccctc

SEQ ID NO: 120378 - DNA, 193 bp, Glycine max
gttgcatctccatgtgggagagataccgctccaggacctcattgaagctcagagatgcaacctgcatataagcgccacacgcgagcgtccatcagggatggccggcagagggcaacagacgcaccagcgacgccttcatagcccctcatctcatccacaagaacagttagtgcattgcctacgatacatggtc

SEQ ID NO: 120379 - DNA, 387 bp, Glycine max
  unsure (1)..(387): unsure at all n locations
taagcttgtgcaacattggagaggttaatgaaacaacgagatgatgcgctccatgaganggtggatcaaatggagaatagagatcataatgaagaagaaaggaggagaagagggaatgatggtgttcctagacaaaaccgaattgatggtattaaactcaacattcctccatttaaaggaaagaatgatccggaggcctacttggagtgggagatgaatatagagcatgtattctcatgcaacaactatgaggaggacaaaaaggtgaagcttgccgccacggaattttccgactatgcccttgtgtggtggaacaagctacaaaaggagagagcaagaaatgaagagccaatggttgatacatggaccgagatgaanaagatcatg

SEQ ID NO: 120380 - DNA, 326 bp, Glycine max
  unsure (1)..(326): unsure at all n locations
cgtggacagggatgctagactactattcagcatctggacttnctcgatgttagtaggactatgcatctncaatatagatgtgcatttgtctggaatgtgtgagcataaagcctacgaacttgcctacaccgaccccataaatacatctatccaggttaacgcgcatgccgtatttgcaaatctctccgaagacctcatccagaactatcatgtgntgggctatgctatgagacttgacaaccatgtcgncgatgtagacctcgatgaatcattcgatctgctgttngataattcgatccatcaatctctataatgtagcgcctaca

SEQ ID NO: 120381 - DNA, 452 bp, Glycine max
  unsure (1)..(452): unsure at all n locations
tagaagcatgtgtaacccttgttgtaactnttatgaaatgaaagtttgtgaggcacaactcaatggtcaacttttcttcctcctttacttcttcaatttcgtgctcccccctctctctttctctctttctttcttttcctccaatgaagcatcctctccaagcttcttatccaaggcacattcttggtggtgaagctctttctttcagggctattccctcatggttggcgcctcttttcaccttttctcctttgtcttccgcttgcacctcatggtgganaatcaccattgatggacctcattgaagctcaaagatccagcctncatagaagccccacaagcaggcttncatcatcaaggataggcctagggccatccattgcagcccctaatcaagcatcaagtcatggatccacaaacaatttatctcataaacattgcaaagacataac

SEQ ID NO: 120382 - DNA, 243 bp, Glycine max
catggaacttcatcctatgtcttagagaaaatctagaagttgatattgaactctgaattctacgctgaataaacttggaacgcatgatctcctattagacgcggaagacatgacacatgcatctcgcacatagatattgttgtacatacacaaccacctcttctttttaaagcataataataaagatcttatttggcaaggagatatcatcacaacctagtgcctatattgtgcaccctgtat

SEQ ID NO: 120383 - DNA, 440 bp, Glycine max
  unsure (1)..(440): unsure at all n locations
caatgcagtcctctattggagaaatcccaccatggagatgctgcagaggaccaaagagaagatgtgacaagatgcaccgtctactgcggaataagccatgggagaatgagctccaccgccgagatgagccttggctaagaatcttggagacgatgcgggggtgcgggaatatactcagggatctaccgagagatgggggagcaccaaactgacggaagacacaaggacagaagctgaactttgagcattgtctcacaagactctcattcatcacagttacaacaagtgctacacatgcttctatctatagactaggtagcttgctcgagaagctntcttaagagaacttccttaagaagcttctttgagaaaacttccttgagaagatagagcttatctacacacaccgatctaaaaactaagctcacctccttgagaag

SEQ ID NO: 120384 - DNA, 377 bp, Glycine max
  unsure (1)..(377): unsure at all n locations
tctactaaggctgtatctntgagcttcaatgatgtcctttaatggtgattntccaccatggagatgcagcggaagacaaaggagaagaggtgagaggaggcgccatccactaaggaataagccatgggagaaggagcttcaccaccaagatgagccttggataagaagcttggagaggatgctgcaatggaggaaaataaagagggatagaaagagagaggtgggagcacgaaattgaaggaagaaaaagggagagaagttgaactctgagttttctctcacaagactctcattcatcanagttacaacaagtgttacacatgcttctatntatagactangtagcttccttgagaagctntcttaagaaaaacttc

SEQ ID NO: 120385 - DNA, 350 bp, Glycine max
tactcgacactgcattttcattctctttatgtcgatctagcacaagattctatttcacctcactgtgcaaacgacaattcatccgacaatgtctttccttgaaaaagctttatcattttattatggataccctcttgaacactagcgaatctacagagtgactagcataagagggtacttcctatttcaaccgacttctttatatggactctctatggatacattgacgctgaaccaggatctctatatatgggaaacggcgtgaccgattagccccattccaacctggcgcaactctaccaatatgataccgggagcgcattctgcggatcgaaatatacccgacgcct

SEQ ID NO: 120386 - DNA, 371 bp, Glycine max
  unsure (1)..(371): unsure at all n locations
tagctagaaccattgatagcaataaaattacctgatttcttctaatttcgactaaccanattaatcaattaacgtggaaaagaagaattatttgagaatctttctaggtaaaaaaactttatatttntaataaaaatattctcaaaaacactcgtgattctacaatccaatagaataggaaattactttctatttcaaccgaagtctntntaaatttctctttcgatanattgacgcttaaccaggttgtctatatatcgaanatgggggacgcgcgtatccccatttccaccccncttntcttttttaatatgataccnnggagcctttgtgcggatcgaaattacccgacaatgaatttcactatcttt

SEQ ID NO: 120387 - DNA, 267 bp, Glycine max
ctactagtatgaaattcacatccctgtgagaggccagattgtgctgaattcgttcactgtcatctatccgcgtctgaagtgttatgtctcaggcgatggagataagtttggggaggatctacacgatgctgatgctactcgtgtgtgctgacattgattgatcacacacttactaatgacgcgagatactgctgagacatgatgcacagctctcgctgtgcgcttgccatattatatatgccatgaggtatatctagggataccaca

SEQ ID NO: 120388 - DNA, 392 bp, Glycine max
  unsure (1)..(392): unsure at all n locations
atatggggaaccttgcctcacggtgctactatcatctcattgtatgagaatcattctcctgtgagactatggattgtgctcgattcgttcacatctctctcgcggctagagaagtgttcttgctaagacgatggagatcaagcctgagatgatctatccgatatggaagcttctcctgtgctctgaaatctcaagtatacacacacatacttttgacgctatgatactgcgcaagacatgatgcactagcctcgctgatgcgcttgttgcattatacagctcttcaggtatatctaggcgatccacagcactcaacttgctctttgagtctgtgagccacgtatggatcttnttcttcctgattaggtgctcccgctcactggatctatgac

SEQ ID NO: 120389 - DNA, 218 bp, Glycine max
ttacccatgcatctatgatatcctcaagcttcttattatcagtatatgaagatgaatgcgaggacacctcatggactcctctgaggactatagcattatcttttacactgaattagtgggagttggaggtcatcttctcaatcgaattcctaacctctacaagggtcatatcacctagagctccaccactggcagcatcatttatactactcttcatg

SEQ ID NO: 120390 - DNA, 268 bp, Glycine max
  unsure (1)..(268): unsure at all n locations
ctcatacatctacgtgatcaatgtaaaggcatggttgattgaagttctgataacataccgaacactcgaagtatcattaaatagataaaaagatatttacatcacgtacctagaaggaagatccaacagaggatttatctttccataactgggaagctntatttgcgcatataagagagagagatgaatgactgctgacatacacatggtggcgatgtaactccacctgcacgacctctcagatacttatatactcaactcacgctct

SEQ ID NO: 120391 - DNA, 233 bp, Glycine max
tgagcctctatgcatcaggggtgttatatccgtgtattctatgcactgacgggaattcattgaccccttcatcctgccttgaatgttaaggagcgatctgatcacactgatacagacattgttatccatatgcataaaatcaatacaatgtgtaacgtcaagaatgcatatttgccggagatcaaagattatggagctggagttgcatatgctggtctgagtactttcattct

SEQ ID NO: 120392 - DNA, 365 bp, Glycine max
gcttaactcaccctacgctcatctcgttgcttctttgggtcaaccatgaggtaagggaggagtatttgatctcttagtatccatgcttcgatgttatgaagataaacttcatctatgttgtgatcttgtatgttattgtgtgaaattaatattctgtacctgtgccactatgtatcatgtgtgttatatttgtgtattctatgcacaaaaatgagtatcttgaccctcccacccccctcaaacctagaaaagcatagtatgatatgtcacattgggagttgcatagcatttgaaattaagatttaaagttaggtctagctatatatgcgtattgctctgtttcaaatttttgaagtggagtcgaa

SEQ ID NO: 120393 - DNA, 447 bp, Glycine max
  unsure (1)..(447): unsure at all n locations
tctccttcttttccctatatataggggaaggagggaagaacataaatgttcaaccctcctggtatctgagaatcacttaaaattagtgagaaaaattgttttcgtgaagaaaatccaagccgaggcacttctgtaacgcttncaagacgtttccgtgagtgatttcgcgaagatnttcaactgttcttcgtcgttcttcggtcttcaaccggtaagttcccgaaaatcgaacttttcaattgattctatgtacccttagtggtcctcatttgtttcgcgtgctcttatttttatttcatttactttccgtacccnctcttgacgtgctttagtcatttatttaagtcattatctcgcctaatcaaaaataacataaatttgcaccgatcattcatatggtaacatcttttaattcttgtcgaatgaaatccgaccgtcggcatgccg

SEQ ID NO: 120394 - DNA, 245 bp, Glycine max
tggaccccatttctaccacctacgaaaccatgtgagactatgctctctacactaaagagtcactcctctatatatgcctatacggcgaatatgcatccgactgaaagaacttgtctgagatgctctaatggatgatataagctactgctatacactgagatgtggtcgcactaaactgctacaagactaccggtgagatcccttactacatgatgcgtctacctcatctatgtgcttggtgcatt

SEQ ID NO: 120395 - DNA, 517 bp, Glycine max
  unsure (1)..(517): unsure at all n locations
agctgctacncatggaagctcctaatanntctccacactttttggggtgggccattcttggatggcnccttgatttctcagggtccacttggaccccatttctaccaactacaaaacctaagaaaactatattatctacacaaaaggtacacttctctatatttgcatagagggtgtttntcctaaggactgaaagaacttgtctgagatgtcctaagtgatcatctangctcctactatacactaaaatatcatcaaaataaacaactacaaatctacctatganatcccttaagacatgatgcataagcctcataaaggtgcttggtgcattagtgagccccaaaggcatcactagccattcatacaaaccaaacttggtcttgaaagcagttttccacttcatcacccttttcatnctgatntggtgataaaccactttaagaatcaattttgaaagatattggcccatgcactcataagcagacatcagtctngaatgggtgctatacttaca

SEQ ID NO: 120396 - DNA, 401 bp, Glycine max
  unsure (1)..(401): unsure at all n locations
taagctttacatgtgtangaagttctagagagagaaaggtccaagttccaaagagttttgagagattcttctatgtgaagatctgcagagatgagagctcgaagcggaagccattctgagagcttgagatgagtttgtgaatgattgtgagatcctagacgtggaggagacatcctcaccacttgtatttttgcaatctttcatcttgatcttctctgtgttgggaaggaggctttcggactatggaaagttaaatcctctgttggattttcccttgaggtacctgatgtaaatatatttctatatatgtaatgatgtttggggtttctctgngtatctgttttcattcagtatgcctttaccttatcacgtnatacatgctttgtagggtcatcaacaat

SEQ ID NO: 120397 - DNA, 386 bp, Glycine max
attatgtattatctgaactctctatgcagttatatgaagggtgtatctctaggaagggaattccgacttttgttgctaactgttatgccctgaaaagtactgtaatatgtcttttcactgagaaattctctctggtgatcgattaccagatgatgtaatctatttccagtggcgcgtagtgatttacaacacctattataattggactctcaatttgcatgtgaatcgatacacatatatgggatctattccatactttctgacgtttaattccatttatagcttgcactcataccatatctggcttgttacaagtaattttaaaattttctcaacgtccatctttttgggttttgatgacttcaaggctattatattgattgaac

SEQ ID NO: 120398 - DNA, 261 bp, Glycine max
  unsure (1)..(261): unsure at all n locations
atactaagcttgagcaagttcaacaaccaataactttgacacggatgtgcgattgagttctgtangatatcgagacgctcataattgaagactgaagctctgagagacatcaaacgacaattatgtttaactcggatgtcctatngagccctgttatatatcgagacgctcgagattcgatacgtatgctcttagaanagtcacacgacaataacctttaactcagatgtcgattgagacccgcaatatatgtggactctc

SEQ ID NO: 120399 - DNA, 341 bp, Glycine max
catgccccattaatctagctatccatctaatctatccgcccttgctctaccattcacatgttccctgggttactcttgagtgagctccataagcgcgtctattgtatgaaacacaaccctcagacagtgctctggctatatcacagtctacccaagaacactgttcacgactcgcatcttgactatcgtcaaatacaagacaagatgtgtacgttatgacacctctatagatataggatccaacttgccacacatatattatggcgcaatgtgacttatcacgtctgataatatatgctaccactgctgattaatgtgattttatgatacacaacacatta

SEQ ID NO: 120400 - DNA, 495 bp, Glycine max
  unsure (1)..(495): unsure at all n locations
ttagttntgatgagacatagattatcgagtcatgttaaattatntccttaaacaatctatataagacaagtcatgtcccattcttctaactatttatataatctatcaccacctccaaactaccataaacataaaaactacggttaccttctgtgagtagagaggagtgtctatcgtataaaacaatttaattcatacagttcagagttattatcacagtcaaccaatgaaaatgttctatgactcttatctaaactatcatcatatacaagaaaagatgtttacgttatgacatttctcataattaaaagattacaagttgtcaccacatatatatagtgacgaactatggattgatcacttatcatcactaatatgcaagtcactgttgtattagcgatgatatctttagatgtcataaaaatatatatagcgatggaaatgttgtcactcatatttctatatagtattgacaaatcatgtaatcacaatatt

SEQ ID NO: 120401 - DNA, 262 bp, Glycine max
cggaagctatgagacaatgctaacgactataacttgtcacttggatgatacgattgcgtgctctatgatacgaaacactcgtaagcaattgcagattcgtctttctaagggcgaccactatcaattacgagccggatgtctgattagagcacgcaatatgtcaccacgctcataactgaatagttgagcaatcatcaaagaccatcgaggataacattcgaatcgtatgatcgattgtgcgcacataatatatcagacgctc

SEQ ID NO: 120402 - DNA, 323 bp, Glycine max
  unsure (1)..(323): unsure at all n locations
ctatgagaacattctaacgaccataacttttcactctgatgtgcgattgtgtgccgtaagatatccaaacgcttcgaatngaaaacagatgctcttagtcaattcagacgaacataacattatattcggatgtctgattgaatccgtaatatatcagacgcctcggatgaaaatgaagctttgacaattcaacgacataactttgaattgatgtccacgtgtgcataagaatcagacctcgaattgaactgagctttaaaaatcaacgacatactttaaccgatgccgatggcctgaatatatcagacgctccaatgaacgga

SEQ ID NO: 120403 - DNA, 339 bp, Glycine max
ctagctgaacatatggacatgaggccaagaacccataccactactcagatgctgtgctgaacaaattatctggcctctccaaactgtaaaggcacaaaataggatgcttcccacatagcacttattagcaccagatgtaaatcctggatagcgaaggagtctgacgggagcataactacagagtccaaactatactgtctccattctgcattatagatggatactgtcgacgaatggtgtctataatatgactgctggatgagccatacgcgacatggatcatccatcattatgtggataggattgtttctgcatatgagaaatgtcatgctaatatac

SEQ ID NO: 120404 - DNA, 448 bp, Glycine max
  unsure (1)..(448): unsure at all n locations
agcactggacttgctgaacatatttcctgtggccatgagcccatcccactacttagatgctgtcctgttcaataattctgggaacttagaactttaaaggcacaagttagtatccttcctagatagcactattcaatccagtatgtaaaatttggatagcttcatcgntggatggaaattagaactacggtgtagaaattatagtggtttttctcttaattataatattagacatttgaggaatgggttctatattttgatttctggataaaccagaggctacatcttttcttcatttnnttgtggtttgaattaatttttttaaagttaatgtcttcttaatttttgggtttggaagggagtctgcaagaggtttgactggtattgcagaatanggattagaactgacctttgtaacatatcaatgttacatttttgaaaaacttac

SEQ ID NO: 120405 - DNA, 301 bp, Glycine max
acttatggattcatggaatgaacaaatatattttattatgttcataggtgattccgatttatctaaattatgagaagttttggcctctaaacatttaatctttcaaagctgaagttgaaattcaactacaaaagaaaattaatgttatcaaatttgaccgtggggaatactatggtagatatgacataaggtgcaatttttggagtcccccatgtggtgtcttcaataattatgaaattaatttacaacatataatggtaagcacacctagcatgaacaaagtcgcataatgatgaaaata

SEQ ID NO: 120406 - DNA, 245 bp, Glycine max
atgcgtacgcatctttactgtaatgtacaccgcatataacgcaccttcatgccaatcttgtctgatgacgtatcattaggacagacacatcgcccggcgactcaccgtgacggtaacaacattgaagtacaattataaatattggttctcataaatgatattaaacagttaccactttgatatcatataaaatgtctacacacctattattcataatcatacatatttctatgtttacactgttt

SEQ ID NO: 120407 - DNA, 280 bp, Glycine max
gcgatgcttcatttcatgtccgcctgagtgggcttatagtctataccatactatccacgagatccctgagtgtaatcatgcatgtatgccagcgtcgttttcgcctagacccataccgggttcataacgcgtttcacaacataactctggccatcattaccactgcttcggacagacaatatgtgaccacatagggagtccactgaggagatgctgaccacctctgaagactgtgaagcagattctaacgattcttctgcggttatcacatcatgcatgg

SEQ ID NO: 120408 - DNA, 259 bp, Glycine max
cccacagcagcttctcaccaggtataatagaacatgtgtacacctatcataacttgatgatgaagtctgtagaccattcaagttaacttctctcctcttttctcttaattcatgcccttctcttcttcttctatctttctcatgaactctgctagctctttcaggaacttttgtgtgaactctcttcatgctatcctatggatggcctctctactctttcttatttcgtcattcatggtgaatacatgagactatgact

SEQ ID NO: 120409 - DNA, 337 bp, Glycine max
  unsure (1)..(337): unsure at all n locations
cgtaatgtagagctgtatanaggatgtcgggattgtcattacccacacatgtctaaagacttggtgccatacatggatatgaagatgctattgagctgctgtttgattcacgcaccaacgcaagggcagatcttagctgcttgtgctccataaaagtgtcgtgctatacaaatgctctgatgtggtataccgcatctctttgatgcctggtgcactccctgtcgttgactacgccaccatcgcctatgctcgtgctttgatcactctcctacacggatgctataaactataagaatatatccttgctgctcagtatgttcagccctgtatgatgagg

SEQ ID NO: 120410 - DNA, 459 bp, Glycine max
gacctatgatactaagcttgagatagggtatgtggaatgtagagctgtatttcgggttttgtgtattgtcattatcccttacctgttaagtcttggtgtatttatggatatataatgtaatgagctgctttttgttcacgcaccacacatggacagattgagctggtgtgcacaaaaaatattgatcctacagttccctgatgtggtaagcagatactctatcacaattgaccgggtgttaggtcgaggcaccattgagatcttgattttgcccatttttcccccatgtagttctttgtattatcttttgctagatgtgagcccattgtatggtaatgcattctttgcgttaaatttgatgtgattatgggacgggaatatgcttgacgatatctctgttatgttatcacttgaaatacatgagaatgctctaatcgtctaatccgtattttagctaat

SEQ ID NO: 120411 - DNA, 335 bp, Glycine max
cgacacttagatactaagctgagtattgtacaacacggatgaagttttcatccttctctttcattatctcaagaatgtgccacttgataccacacgtacaaggcttgccattaagaaacaccatattcatcaactaccaccatcttaattgggtctcttgagtgctacaacagctaataataagtcttaatggctcaaagaaaaggccgttaaaaatctaatcctatatatcagctcacatgaattatagttgaataaaaagataaacaaatcaattgatgagacactctaatgcacacccatatgcctcacacccatacacatacactcatggt

SEQ ID NO: 120412 - DNA, 85 bp, Glycine max
gaggcgattgcgtctattgatattctcagcttggggtgattcatgggttaagatgtctggttttcttctcgtacccccatattta

SEQ ID NO: 120413 - DNA, 293 bp, Glycine max
  unsure (1)..(293): unsure at all n locations
gaccgacatcgtgactaanaagtcagtatgatatatcttgagagcgccgagaacaacgtcaatattcgcgagacgtctggcttgtcgatcgcgatagacaaaggcgcatgatacgataataatctctgagtactatccagcgtgttgtcttacagaattcttttaggtttactccgttgaccactcttgtttctccacccgtcagtgtgactcataagtaagtatgacaaatcttgagtgtgcgagagatgacgtccatcttcctgtgttaactgtcttgtcggccaggattg

SEQ ID NO: 120414 - DNA, 489 bp, Glycine max
  unsure (1)..(489): unsure at all n locations
cttcgtcttacagatagcananaggtttatacggatgaccactctggtatctccgcccgtcagcgtgactcanaagtcagtatgatagatcttgtgagcgcggaagataacgtaaatctccgcgtgtcaacgggcttgtcggccgcgattgacgaatggcgcangagacgatgttagtctctgcgtgctatcaggcttttcgtcttacagatagcaaaaaggtttatacggatgaccactcgggtatctccgcccgtcagcgtgactcataagtcagtatgacagatcttgtgagcgcgaaagatgacgtanatctccgcgtgtcaacgggcttgtcggccgcgatggacgaagggcgcaggagacgacgttagtctctgcatgctatcaggcttttcgtcttacagatagcanaaacgaatntataccgataaccactcgggtatctccgcccgtcagcgtgactcanaagtcagtatgacagatctt

SEQ ID NO: 120415 - DNA, 203 bp, Glycine max
actactgacatgactgtggcgaatgcagaggatgagatagacggagatcctcatgctgtgacagccatacctaatcggcccagcataccacccctcgcttcaatattatttctcaatcaatcattgactcactacgtaccgaccacccagttatccggcacagtgattccattatcaatacctgagactgactaccgcacttt

SEQ ID NO: 120416 - DNA, 414 bp, Glycine max
  unsure (1)..(414): unsure at all n locations
tcttcgccagtgaaaagatcgatgtgggttcttataaatgcanatttgatcatcctactatgacgactgagaaaactggngcaaatgaagagggtgagaaagaaggagaaacccatgctgtgactgccattcctatacggccaagttttccaccaaacccaacaatgtcattactcagtcaataacaaactttctccttacccaccacccagttatccacagaggtcatccctaaatcaaccacaaagcctgtctaccgcactttcaatgacgaagaccacctttagcacaaaccacatatacaccaacaaaaaggaattttgcagcgaatagcctgtaaggttctccccatatatcgttgtcatatgctanacttgatcccatatccactcaataattcaatggtagccataa

SEQ ID NO: 120417 - DNA, 251 bp, Glycine max
tgctgcagaaacataacaggtatgtcgctcattaacaatcagcagcttccgacaaagtgagtactcagcgtctctttaaagataactagtgtatgacttacaacgttattgattactagatgtgcttattgagcatcttatcgtgcgccatatctgacgatttaaggacttgtctaaccaaacattttcgatgcctataactgcctctgaggtcaacgcttcctctatggcacgaatactttataacataa

SEQ ID NO: 120418 - DNA, 339 bp, Glycine max
atcagcatcctcccacagagtgagaaataagcattcttagaaaattaatagtgtatgacttacaaaagtaatcgataactagctatacttattgcgaatcacatggagcaagagagccaacaacttatggactaatctaatcaaatattatggatgcctaaaactccctctaagtcaaagcttctgatgggcagaattactaatagttaaaagaattgttggatacaatgaaatctacactactcttcctggacggtgtatgaacacccagctctatacagtgaatatattttcactggaagcgatattccttagataccttacgacattctttcttaa

SEQ ID NO: 120419 - DNA, 222 bp, Glycine max
gctactcatacccctccaatatctacgcttgactcataacgaacacaagcggctactagggaaactaacttgagaagcattgaacgcagctaccttgcggaacacggacaaaagcttctttgagtagcatgaggggggtgtcataccctattctcactcagggactatggattgatggtgtgcaagctgtggatgacctcttccttgtactcggcccccttt

SEQ ID NO: 120420 - DNA, 402 bp, Glycine max
  unsure (1)..(402): unsure at all n locations
tccttgagaagctggagggggctactcatacccctcaatagctaatctcaccccattccaaaatacatgaaaatacaatgggaagcttccttgagaagcaaggaaggtagcttccttgggaagcaaggaagaaagcttccttgagaagcatgaggggggtgtcataccctaatttcgtccggggactattgcttgatggcatgcaacctttgattgacctcttcgaggtacttggcaccctttgttgcacaatatgtgaagtcccgagacgtgccgaaaatcaaaaggaagcgttgttacgcaatccgtcgaaatttgaacgtgccggatatcaaaggaaatattgtacgcaatccgtgagntccgtaactcttcaaagctaaaaaggagtaatatatatct

SEQ ID NO: 120421 - DNA, 172 bp, Glycine max
  unsure (1)..(172): unsure at all n locations
gtacggcgaacgcccatgcacattatgattctcaggctgaaggcttactcgcagaccgtgcataanacgcgctcacgcaacatgctatggtgatcctgcaacctgttgtccagaccgcttgcgggaagggccagctgttttattatttgacataacgtgctatctgcgttga

SEQ ID NO: 120422 - DNA, 327 bp, Glycine max
cactcttaactcagctggctgcactcgctatgaaatcttaagaccagtcctcccaatatgactccaccgtttagagcgccgacccacaacctacctgacaagaggatggtctatctctagatcacgtgtcagctctcggacgatcatcatgccgacttccattacgacatacttcgcctgtagtgggcattactggttgcctccattgtcaagttcaacccgcacatagtcctcgggatgctgccaacgctgtcctactaggatggcgtgcagatatcaatctctgctacgtgtaaagattccagcgcacggctggcatactggtcc

SEQ ID NO: 120423 - DNA, 311 bp, Glycine max
cattgctagtgtgcgagctatcaatggggccaaccacaccttcagattatgatgatggatggcttcaaatatcacagtggtgaactgatcacgctgaaaacgagctctcttaactatgatgacatgtttaggaagctcatggctatcaactaacctactgtcatgagacttgagatgtcataacaataacgcgttactggatcatctgctatggctcagagatagaatgcgaagttgtacatgctcacagacttgggctacaagtttaaacgacatatctcacctggctgtcaatactaacctactgcaca

SEQ ID NO: 120424 - DNA, 400 bp, Glycine max
  unsure (1)..(400): unsure at all n locations
tgcatgtgtattacgaagcatcaacaagaatcaagccgctgctattgtgctagctctcaatggggcaaaacacaccataagattatgatgatggatggctctaattctcacaatggtgaacttatcactttcaaattgaactctcacaactatcatgacatgttcaggatatacaaagatttctaataacaaaatgtcaagagacttttattttcataacaagtacccattacttgaacatatgctataattcaaagaaaaatatgcaaagttgtacatgcatacagaattgaccttaaatagttaactagaaacccaacanaactaacaatattaacatacttaacataactagcgaaactctaatccaagaacacttgccccatacttaaacaacaca

SEQ ID NO: 120425 - DNA, 216 bp, Glycine max
ggcatgacgcaagaatgcttacctatttgaaagcacattgataatattgatgcacgcatatgcgaaatatcaaaataccctgatagcaaactgtcaaataccaccgatgaatgagctatgtcacaacctacctgatgtgatgacataaggagtttgatccgaccaacatttacagacagagcacctatatatatgtgttactaataaaattattta

SEQ ID NO: 120426 - DNA, 400 bp, Glycine max
  unsure (1)..(400): unsure at all n locations
tactaagcttctnctttcatttaaagatatatctggatctataactcgtcttatctctataagtaaactcgccctttcttctatttgtgttttggtttcttgcatattcggtggataacgcagaatgctacgttatgaaagacattgatatattgagcatgttttgtgaatatctaatacctcgaagccaattttaaaaatccatatgaataattatgttcaacttacttgctggatgagataaatattagatccaccaacaattacagtttgtgcattatatatatgtgttactaaaaattattacctttaaaaagtgctcttacaattaactcacatatataatatatttatacttaacctaataccgtgcttatatttgatcttgttttaataaaat

SEQ ID NO: 120427 - DNA, 179 bp, Glycine max
tagccacctctcttcgaacgatacgggtcacaaggatcccataacactctacaaggcttgcttgaatgatgtgacaatgacgtcttgtgcctcacatctcatagagactgcacttccatgtgtttgtccccgtcttacccgtgccttcctacaacctttattggtcttgtgacgacccc

SEQ ID NO: 120428 - DNA, 413 bp, Glycine max
  unsure (1)..(413): unsure at all n locations
cctanacctattccgggctcatattcgttcctcaacataacccgagccaccatcaaagcgacaccagataagcgtggctacaccagaggagattccacataagcactactcacaatttccagtgcttggaatgatgtttccaatgactcctctgcagcctcaacatacgacatagaagacaaacaacttaccaatatgtctttctcccccgatactataaccagttgcccttccactacaaactttaatntctggtgcagcgttgacaggaccaccccaaccgagtggatccaatgccggcctaacaagcaacttgatgcagggcttatgtgcattatttggaaggttatttgacacacgtggggcttatggttgtgaataagtgtgtgggtaacacttgatatgacaattac

SEQ ID NO: 120429 - DNA, 421 bp, Glycine max
gtatatgaggcggaatatacgtaacctcaaattgtagggatgctttgagcaattctacgaataacttttacatgatgtcagtagcggacgattatatctgccagctctaattgatagcggaatgcttgtatcaaatacatactgcaataaactttaactccgatgtgctactgaggtacgtaatatatcaacacacttcgaattgattgtggtagctcgtagctaatatgaaccggaataactttttactctgatgttctaatgaggtccgtactatatcgtgacgctcgaaatttatagccgatgctattagctaatacatatgacaataactttttactcggatgacctattgaggccgtaataatcagacgctcaaattgaaacagatcgtcttgaattgacccacgatacttttatc

SEQ ID NO: 120430 - DNA, 199 bp, Glycine max
agcttgtagccaaatcaaacgaacatactttaactcgatgtgcgatgagtacgtataatcagacctcgaatgaaatgtagctcgtactattcaacacaaaacttttactcgatgccgatgagtccgactattttgacctcgaattaaacagtgcttgagcattcaagacatactttctcggtgccatgggccgttttta

SEQ ID NO: 120431 - DNA, 368 bp, Glycine max
tatactatgcacggctcattatattctatgatataatgactgacctcaggcgatgacaagtggcgggtattgaactgttgacaagaaacttactgatgataatacgcaagcgtggacatgaggaacattcatgtatctgaaagcccgcactgcacgttgccgcacaatactaatcgcgagacatctcgtggtgcatatatctgcccgcacatattctaggatgtgtcgatgacctttgaactgcacttgacactgcagacagatgttgtgagccatgtataaaatcggatactatcataggccaattatggcttgctaacctacacaaatttgtctgatcctaattcagctgcagtctatgcatgcat

SEQ ID NO: 120432 - DNA, 273 bp, Glycine max
  unsure (1)..(273): unsure at all n locations
ttaatgactggcctcacgtactgtctcgtggtgggtatgaactgcttgacnagaaacttattgaggagaagagcaagcgtggacatgaggaacattcgtgttctgaaagccccacactcaacgtcgacccaccattcctatttgccagacacttgaagtggaagatcgcccgcactaagcggcatggccaaatgacgtctgaagtggcacaagaaattgcagacaaaattgtcagttcatatatttttttggttactatcattggcacataat

SEQ ID NO: 120433 - DNA, 357 bp, Glycine max
tcttgtgatatattattacttctactccgatgcgatacgtaccataacttacacttacaatggacgacagcgtatgtgcttgctttactacgctgtgcttgtatccgaccgtatgataactgtcacaaacccgtttttatgaacaacggattgagccctccgccttacagactctgggtactcagacacgtacagaacaatccagatggttaaagatgtctaccagtgttcataatatcacatctgtgacagacgttgacatcatacactgaagagtatctaacgcatccaaacactctgcatgtgggccatgtcctccacatgcttcttcgttatgattatgcatattcgatgatt

SEQ ID NO: 120434 - DNA, 363 bp, Glycine max
  unsure (1)..(363): unsure at all n locations
tacacctatactatactcaccattctctttacagccaattaacacaaacatattggcttctctactacctgtgtttgtatccgaccttaaaatcactgccacaaacccgttttcatgagcaacggatngagcccaccgcaaaacatcctctcggcacttcaacacctacaaaacaatccacataattaatagtttctaccagtattcattttattaaatctgtgacaaacattaacattataacctgaaaagtattgaacgcatccgaacaatcaacatgtngntcattcgcaccacatgcttcttcatttcataatccatatncgcttattcagacattatttcatacatccactcatcttc

SEQ ID NO: 120435 - DNA, 481 bp, Glycine max
  unsure (1)..(481): unsure at all n locations
gctggtatcgatacacccncttggtaatcgattaccagaagccctcatggcttcctgacctcgttntcaagcctggtaatcgattacaccccgtggtaatcgattaccagagaccatcttagcctcctgtcttcacttttaagccttgtaatcgattacccacccttggtaatcgattaccagaggccataatccacatatcacacaaaattcacagctggccagccaccacaagcctccttgctttgtggtctttgttccttntagctgttgactgccaggagctcgcctgtntatgtacatcacaggttctcactgaccgactatgcccgggttgggtcgggattggtcaagcttggtttgggcaatagcaccccacctgacgtcctcaatgtcttcctgaccccgcgacatatctacaggtaccactctgtggtcaacgaataaaagcacgaagatcacccttctacacttcctcatc

SEQ ID NO: 120436 - DNA, 439 bp, Glycine max
  unsure (1)..(439): unsure at all n locations
tcactcctacatttcatctctagcatgcattttctttctttacccnctcctcacgtttggttgtttagggaaaaacaccataactaaacgcgccgcaaggtatccctatcgcaccagatccaaatctagaacgatgggtgatcaagaggagacgcatgaacagatgaaagccgacatgtcggctctgaaagaacaaatggcctccatgatggacgccatgttaagtatgaagcaactcatagagaagaacgcggccaccgccgccgctgtcagttcggctgccgaagcagacccgactctcttggcaactacgcaccatcctccctcanacatagtatgacggtgaagggacacactgtggcacgatggcagccctcacctgggatacaaccgagcggcttacccttatggatggccgnccaactattcaccacccgtc

SEQ ID NO: 120437 - DNA, 231 bp, Glycine max
gaacatggacagaagactcatccatcgcatattgataccgacagccatgatgtctgagactcatacgtaggagagatcaatacccccgatgaatgagctatcgctcgagttgctgagcacgaccctgtcgagagagatgatggatgcatgcttccgtctggtatattatacattatgactatgatcctaattatggatatggactgtactgtatgagcttcatatacgaat

SEQ ID NO: 120438 - DNA, 223 bp, Glycine max
agttacaataacaacaacaatagcatcatcaaaaagaaggccatgtcttcttgacctcatctggaggagagatcaagacccaaaatgaaaaaattagcggtggtgttaaataacacaacactatatagagagggtgatggatgcatgcatacgcattatatattataagttatgactatgatcctcattatggatatctcctctactctagagcttaattaat

SEQ ID NO: 120439 - DNA, 384 bp, Glycine max
atatatattagaacctctaacgatgcggctgcgagcactgaaatagtgagataaaaagagaaaagaggctttaactcaagatataatatgaagcatctacacaccttgttaacaagctacaatgtaccttacgttccgcatgcttgcatatttctaactgatatgcgcgaggtattatggatttgacgatcgattgcataaaaaccctgtggaatagtgctaagaatgccttatatgcacataaccttgtggagacctaaccagcactgagggagagatacttatggatgtttttctggcttacatacgaatgaccttgacttgtgtgagctgcacacgacaatcctgaatagataccacacatgattctcacttgcggagtaa

SEQ ID NO: 120440 - DNA, 453 bp, Glycine max
  unsure (1)..(453): unsure at all n locations
cttgatactaagcttgtaancattaaacaatttatcctcaactgactactttatatagactaaaacccttaaagatgcaacttgcaagcagtaaaaattgtgactttcaaagagaaaattgtatattaactcaggatataatctgaagcatttacaccccttgttaccaaagtacaagtttccttcccttccccctcattgcatttttgcaaggtaaggcacgtcatattttggttttgacccttgttttcataaaaaccctgtagtatattgagaagaaaatctaatanaaacataactcttaagagacctaatctaaactgagtgagagatccttatgggtgcttntctggcttccataagaatatcattgccattgtgtccttgaaaatgttcaaacctaaattctaccatatatgagtctctcttgcggagttatggtcgtaatggata

SEQ ID NO: 120441 - DNA, 194 bp, Glycine max
tgaacaatcttatgttccttcatagttgatgttcagtgaggcctacatcactctagctgtcttaagtctagagctctcgactgactcattcttatatagagcgcatgacacagtatagcgagctttcgtgtcttactgcattatatcaacgcctaccgtgttaaattctgctcctacatgatgaatgcgcatat

SEQ ID NO: 120442 - DNA, 375 bp, Glycine max
tgctgattggatctgtagcatgcattgtttctttctctacccactactcacatatgtgttcctgtggaaaggcaccgtggctagacgcgctctgatgcctccctatcgcaccttagccctttctagaacgacggtggatcaataggacacactggagcttatgatggccgacttgacaagttatgctagaacagatggcctgcatgatggacgccatgtatcgaatgtggcctttcatggaaaagaatgccgcctgcgttgacgatgccacctaagctgacatggcacacccatctctattggcaactgcacactgttctttctttcacatatgctgatggcgaaggcacacactgcgtcactacggcaatcctc

SEQ ID NO: 120443 - DNA, 322 bp, Glycine max
cctaggacctatacaatctcaagctctcggatggaatacctacttggttttgatgaacaaaagcgcggaacggaatctaaaaatgcgaaaagtgaagaccctaagactggcaactcctaaatcccgcgggtatggtttttgaaaaggggaaaagaagtttttgaatgaaaaaaacgcccacccctttcgccacttctatattctggtgcaaaggcggctcgcccaagcgaacccagttcgcccaagcgagctaacctgcactattttttcataccacatgtaatatctatttttgaggggaacatttaaacatgcccctccc

SEQ ID NO: 120444 - DNA, 251 bp, Glycine max
tatgccgacaagtaaactgttatgactaacactgatgagagacaagcctatgtcctggtgaaagaacttacaaaatgctctcgagggaatgcatcataggatgatgcccaccctctatagatctatgatggaacaactcctgatatcggacctaggtcataatgaggaatgatcacgataaaatcgctggtgcgtttggcagagtcgttccaattccttcaaatgcataactacctgttctcaacagatac

SEQ ID NO: 120445 - DNA, 308 bp, Glycine max
tgaaacaggccttgataaagtgcgattggttttgcaatatgaaaagccagatatgcaaggcaatttctttaactccacaaagctatttctgaaatatgctgaagatgaaattgtaaggattaaagcagatgagagaaaagccttgtaccttgtaaaagaagttacagagtactttcatgggaatgcaacaaaggaagaagcccaccctctcagaattttcatgattgtaagagactttctgaatatcttggatctagtgtgcaaagaagtggaaaagatgcacgatagaatcgttggtggttctggca

SEQ ID NO: 120446 - DNA, 369 bp, Glycine max
  unsure (1)..(369): unsure at all n locations
gacgatgtaacgacgtgtgttacactatgacgcacgctgtgatttgtggttagaggagaaggctgcgagaagctataacgcgctagtatattaacgtttgtcgatcctagcgcaccttgattatactgcttgattacattgagggctagagagactcatctgtntttatctgacactctgacgatcgatcgatgaactatagaggattcttttacgtcatgaacatatgatggagtgacaccttctaggtgaataagtcttgactattactctatagcattggggttgtaactagcaaggtgacagacaaaatttctttcaaaagaattaaaagattaatattgacaatttttttatagaagactacac

SEQ ID NO: 120447 - DNA, 304 bp, Glycine max
  unsure (1)..(304): unsure at all n locations
aaaaaaaggngantntaantttatngattatttttannannnaaaacgatntagggacgtgtgtaacactatgaaattgtgtnatttgaggtttgtggagaagtatanagaagcttttagtagcttctatattaacctatatcgatccaagcacacataaattatactgcttgattacatagaagtagaacgagtctttctgtttttatctaagactcagctaattattttttattttttacttgttttttttttgtcttttatatatttttaatttactccttctatgtaaattaatcagaac

SEQ ID NO: 120448 - DNA, 308 bp, Glycine max
  unsure (1)..(308): unsure at all n locations
tgtttctacagtatcttgtagaaagtttcattatttcaagattcatggcctcctcaagttctctgtttcctgaaggaaattccatccataggccaccatctttaatggttagggttaccactattggaaaacccgaatgcaaatctttattgaagccatagatttaaacatttgggaagcaatagaaataggaccctacatacccgccatagtagatgtaagcactagcaccacaacacaaaaacctanagataagtggactgatgaggatagaggaagaatccaatataatcttaaagccaaaaaca

SEQ ID NO: 120449 - DNA, 236 bp, Glycine max
  unsure (1)..(236): unsure at all n locations
ctacccgcggctgcgcctagagacgtcatacaacgatgataccgactggacacttataggattataagtgtggaagcgtctagccacaacagaagacatcaaagctgaggagtaatatnggacgtgacatcaaccatctgtgcattggaagagctatatgtctacaagagtaaagtgaccactgatgttgtcaaacgctcattgcccacctacacactaatgagagagaggacgac

SEQ ID NO: 120450 - DNA, 299 bp, Glycine max
  unsure (1)..(299): unsure at all n locations
agcccgggcgtgggcgtgagtgagagaatatgtaattttttatagaggctggaaacttctaaaatcaaatgtatgtctgtgtcaggctacaacaaagggcacaaagctttgctctcatttttctgtgtcatcattcatctgtacattgtaatgtatatatgtaaaattgagtagaatgaaaactttttttttcaaactcttctggcatacgtacacacaaagggagagaggacaacattcctttgtttttgacccgaatgtttattttctgaaacgttaattgnncttatatcctggga

SEQ ID NO: 120451 - DNA, 299 bp, Glycine max
tatggatggaatacctacttgttggtgatgaacaaaagcgcggaacggaatcaaaaaatgcgaaaagtgatgaccctaagactgcaaactcgtaaatcccgtgggtatggcttttgaaagggggaaaagaagtttttgaatgaaaaaaacgccccccctttcgtcacttttatattttggtgcagaggtggctcgcccaggcgagcccagctcgcccaggcgagctaacctgcactttttttttttattttttgtttttttatttttgagggaacatttaaacatgcccctcccttctt

SEQ ID NO: 120452 - DNA, 408 bp, Glycine max
gaccacggcatgagttcttatatcaattatcagcataaccaagcggatatccttcactctatgcatcatctgtcaacatccttcaatcaataattgaatatctgtttactaaatttttagacgcatttctctgcatggttcgaatagatgacgatgagcacattctctcccccgatacgacttttgcacacacactggtgctatacctcattatcaccctccgctctctaactctagagaatgaaggactaatcgcctaaagatctagtgcgcaactctccttacaaaaattctttgacaaccgctaagagtctttaaggttacttcgcttaacaaagactaatcactaccgcttgattgcttgttccttacaaatcttagacaacactggattctgaccacacctga

SEQ ID NO: 120453 - DNA, 322 bp, Glycine max
cactatacaagcctcaagcttggacctgagacaccaagtagagattgtatatgagaccatggcatgagtgccaagattaattatcagcataaccaatcatttatctttcaatctttacatcatctctcaacagctttcaatcaatcgttcaatatctttcgactaaattttttgattcatctctcttcatctttctaaaagtttttgataaacacattctctcccaagaaaagttctttgttcaaaaacttgtgctattcatctttgtcattctcttctctcttttccaaaaaatgaaggactaatcgcctaaattattttg

SEQ ID NO: 120454 - DNA, 223 bp, Glycine max
taactagctggcgagcagtgagatctgggttgagggcatcaggagggcgataactctcccagacggaaaagacatgatggcccatcctcagttgctcaccgtccacggagcgcacgtgctctcgccgtgcccttatgctcgagactctcaacaccgggttcccataaccactccacgcttgtactatatctcggcaatacaatcttctaacatcatggactac

SEQ ID NO: 120455 - DNA, 296 bp, Glycine max
agtaggattatggggaacttcttattgtttgtgacaaaggggcgattgggcgatggtgcaaataaactctgacacatcctcaaatgaaacatgagcccaccattcccagttgcccaccttcaactgaatttacgtacccccatgttaaacttatcctatttactcttaactccgggtccacattaaacactccaagcttccacaatatccaagcacttcaatattcaaacatcatgaactacccttaaccaacagaacagggcagaagcttaaactctgcccaatacacattccaa

SEQ ID NO: 120456 - DNA, 307 bp, Glycine max
ctgaagcttgcctttcaagaatgatattgcggttattatgtgcacaaggggttgttcaggtctgccaaaagtttgtttcttcgtcaagttttgttaaaggtgtccctttctgtgtgtctgtgaatgtataatctcttattcatatttgtgatttgatgcaaagtgcttttgtccacagtcatgcttgtgaataatgattttgggtgataaaatatcaacaagaaccatatcaagacattgtattaatataatgaaaattttcttgtctgcaacattgaaaccaataggatctccctcagctcagatc

SEQ ID NO: 120457 - DNA, 261 bp, Glycine max
ctcaaccgaaaccttgaggctagtttttaagaatctgcttccgttgaaaggctcctctcggtgaggggtttcaacggagaacaacggcgatttgtggtggctactggtggctgtgggtgatggaaaaagatcttggaacattggaaatggttttggaataaagaaagagaagaaatggcgttttttcaaagctacttggactccaaggcttaaaacgcacaagtgactaatgctttcgaaaacggaagcattttgcacact

SEQ ID NO: 120458 - DNA, 284 bp, Glycine max
tcaacagccacggtcacatatattgcactttggtaacacttgactcggggcactgcttctgttgctcctagcgaccccaaattgctggacaaatattaaacaaaaatcatattatattcaagtgtcaaaaatgttctgattcataacaccttataccaatatcaggcttgtgataaacacaaacgggccctaaaaaagtaacttggtccaaaacctctcgtatatacccttttcattgctttctctgtatggcaaatcaatgaaagtgctatcgactaatatat

SEQ ID NO: 120459 - DNA, 250 bp, Glycine max
gtacgagattattaaaagtttgagaattttgaaatttatgagagggggttggtataagtgtatttgatgaatgtgttattgtttgattgatatgatgttgatttgatacaaaatgtatttgattgaaatattgcttttgagctatgatcttgggtgataaagtataacctagaaccctgattttatgataactttggattatgaaaaattttttgtctgtagcatttgaaactctaagatattttgatag

SEQ ID NO: 120460 - DNA, 187 bp, Glycine max
tgggcctcgagcagtgctagctctcatacctgtctgtttactaatatatatcataacaagctgaatgtgtcctctctattaacaccatatacctgtgttagcgtgtagtgaacaacaatagggctaacagcccgacgcgaccctatcatccgtatcagcactggacaaggctggacatgacaggaat

SEQ ID NO: 120461 - DNA, 306 bp, Glycine max
taataattgttttcagaatggtgcttatgggttggtcaactgatcttcaaattattgacttggcaaccttgactggggcctgcattgttgcccttggaccctcaattgctggtaattataaactaaaataatattatatcaggtgtgaatctgttcattggctaaagaccatataccaatacttgcttgtaataaacacaaaacggcctaatattttactccgaaccaaaagcattcgaatatgctctggaagaggctggacctgaaaagtctatctcttaaaatgcttctgagtcctaatcacta

SEQ ID NO: 120462 - DNA, 306 bp, Glycine max
tcccgcttgaccccgtaaccgtcattccaactactctcaaccataccgctggagtatccagtgacaatcatccgcgggccgccctctttaaccggaacttcctcactaaccataaagctcatactcgcctccttttttccagtgaaacttgttcaccttagttgaagatggcgaattttgcataatagccagcgcgagtattaatgtgcctgaccgcgcattttctctacgggtttcactcccagcaccacgatgccgccgatgataaaaccaagatcagatttaaaacagtcggtaatatcatcg

SEQ ID NO: 120463 - DNA, 307 bp, Glycine max
taataaagtccttaatgatccatattgtgtgtgtttgtgtgtaattgcattgaatgagatgatgtgcaaagttgggaatcctaaattttgttgttttgattgaaatacacataaccaaaacacttgtgtgcttgagagaaacaatatacttgtgagaagtgaagcatgattgatgattgtcatacttgctaacctactttatctccaagtgagttcttgcttgcttctatcatgaaaactatgaaaaatgtgaacttgagaattggaaattgaagtgtttgaaaggtatgcaattgtctcagttatt

SEQ ID NO: 120464 - DNA, 298 bp, Glycine max
taagaaactcatcactagagttttgccactggtgaaataaaggcttttgtcaaaggttcataattatatatgtattggtgataagacaacgattgattaaattaagtttgttcgtctagttaatatatgaaatagaattttataataggtttttaagtaaacacttgatgtcaaaaaggcgacatacaatgctaacacaatacttaataaaatcattaaacagagatgttgaaacacttggtttatattggttcactcaaacaaagctacatccatttctccattacacaacagtaaa

SEQ ID NO: 120465 - DNA, 277 bp, Glycine max
  unsure (1)..(277): unsure at all n locations
aacaaagctgcgaanggggtaatctttttcaataccttatgtacaacataaaaaaggaaaaggaatattgtatctgatgctctttctcgcgtatgcattactttctatgcttgaaacaaaatgattggtctcgaatgtttgaaaagcatgttgaaaatgatgaaactttggagaaanttcaaaaaattgtgaaatttttcagaaaatggttctttaacatgaggctttttttaaagaaaaaaatgtgtgtgtttaaagtttacaacaattttttttt

SEQ ID NO: 120466 - DNA, 313 bp, Glycine max
gaaaaacctccagcttgtatcacgaaatagttcttgccccttaatgttatacataccgctggagatataaatgtaaacacatatgctgtctatagctatatatacgtatatatatatataaccatgaaaggggatactcacttacggttttcgagtgaaacaagtgcaccttaatcgaagatggcgatctaggcctgctaggcttcgagagaattaatggtcctgacagaacattctgggtgccgctttcattaatagccgcgtgaggcagccaatgatgatttcacaataagtttacaaaagtattagtgcg

SEQ ID NO: 120467 - DNA, 269 bp, Glycine max
aaattgccagggtatatattacaggcttacaaagataagaatagcttggtatcatactgagctataagcctaaaattaaacgatcttcgctgttcctggaagccatcttcaataaaaaaaacccatcattttattaaaccataatttttcaaaattgacacagaaaataaaaactgaaattggcaacgtgcgcttaacgagacacaactagcttaacgtgccttagtgaaaacaacacattggcttaacgcaacagggcacacatatcc

SEQ ID NO: 120468 - DNA, 298 bp, Glycine max
tgtacacatgcagatacccctccatcctaacacaactccgttattcaaactacaaagcatttgtccatattaggtgtacttgattagcacacacatcagtgatgataaggcatcctcatataaggttaaaccttcattaatatataccaaaagcgttaggcttgtccttgacgtgcatgacatcaaaattccaaccagttgacacacatccttaatgtgtccaaactctcagaatttcatggaaaatgagaaaaactattcatgtcaatacgtgtacggtaaacatggcagggctcgg

SEQ ID NO: 120469 - DNA, 279 bp, Glycine max
cctacatggagatgcgcacgaggacctagtgcaagaggtgatgggaggcgctcttctgtaggtaaccatccatggaagagtgatcctttccaccaatatgaaccttgtgtgcgacccttggactgtggctccaatggaggataataaacacggtgagaacaaaaacgggggagcacgatattgaatgacttaagagggagagaacaatacctgtgagagggattctccagactcgtaatggtgaatgcttccacaagagctacacatgcatctatatat

SEQ ID NO: 120470 - DNA, 306 bp, Glycine max
tgcttgtggggctgctatggaggctggatctttgatctttaatgaggtcctttaatggtgattttcctccatggagatgcagcggaagacaaagtagaagaggtgagaggaggcgccatccactatggaataagccatggaagaaggagctttaccaccaagatgagccttggataagaagcttggaaggatgcttcaatggaggaaaagaaagagggagagaaagaaagaggggggagcacgaaattgaaggaataaaagagggagagaagtaaactttgaagtatgtctcacaagactctcatt

SEQ ID NO: 120471 - DNA, 131 bp, Glycine max
  unsure (1)..(131): unsure at all n locations
tatggaagcgtgngtgacgcatgatggaacatctgtgaactatatatggactatacatgcactgaagtcccacttctatacctggagtataactgctatttgcggctctcgactattgataactctccata

SEQ ID NO: 120472 - DNA, 293 bp, Glycine max
aaactaagcccgcacatcactatataagattgacttatttaaataaaacatttaagtttgggggttatggaagtgtcggtgctgcatgattgaaaatctgcaactttatatggactattatggtactgatttcaagcttcgattcaggagttaatttgtttcttggtatttcgatgatgaaaactttctaaatcttactgtagggtatgtgaccaaactttcattttcaatgcttataacatgtatctgggcttttttctgcttatttccaagcacattgctgctattgtatt

SEQ ID NO: 120473 - DNA, 132 bp, Glycine max
gacacataggcgttctgtcatggatatgtgtgtgcatagtctttccctctgacactctaatagtcgaaggttggcagagatctgtagagaacctcgacgtacgacgtgatttgactaaactcgtacctactc

SEQ ID NO: 120474 - DNA, 314 bp, Glycine max
actcagcttgagaaagataagaaagcaatgttggagaaagtttttagtgcaattagagtgtaatttgcttttgggaaatattggagttcttttagggaattgtgtgtgcatagtatttgtatttgattctctaatagtgaaagttgtaagagatcttagaaaaactacatgtaggtcctgatttgactaaactagtataaactcttgtgtgattctcattctctctcaactcttagccttgaattcatcttggtattgaaattgatctcaaagggccataaaaatgttattcatatgttatactcattgaaagt

SEQ ID NO: 120475 - DNA, 370 bp, Glycine max
  unsure (1)..(370): unsure at all n locations
tgaaacaatgagatgatgttctccatgagatgttggatcanatggagaatanagatcatagtggagaagaaaggacgagaagagggaatgatggtgttcctagacaaaaccgaattgatggtattaaactcaacattcctccctttaaaggatagaatgatccgaacgcctacttggagtgggagatgaatatatagcatgctttctcatgcaataactatgaggaggaccaacaggtgaagtttgccgccacgcgagtttccgactatgctcttgtgtggtggaacaagatacaaacggagaaagcaagaaatgaagagccaatgtgtgatacatgggcggagatgaaaaagatcatgatgaaacggta

SEQ ID NO: 120476 - DNA, 306 bp, Glycine max
  unsure (1)..(306): unsure at all n locations
gaanactcaagctttgatgcaacatttggagagggaatgaacttttttatgatgtgctccatgagaggttggatcaaatggagaatagagatcatagtggagaagaaaggaggagaagagggaatgatggtgttcctagacaaaaccgaattgatgggattaaactcaacattcctccctttaaaggaaagaatgatccgaaggcctacttggagtgggagatgaaaatagagcatgttttctcatgcaataactatgaggaggaccaaaaggggtagtttgccgccttggagttttcgactatgc

SEQ ID NO: 120477 - DNA, 321 bp, Glycine max
  unsure (1)..(321): unsure at all n locations
acacnatcaaaaactgaagctatctagtgtcaaaaggggttctacctttattttgaatgaagaaagaaattaaaaaaagaatgaaaacatgcagaaagaagaactaaggctactataagggacaaacaaagaaacacactccatagggaaaaaaaaaaaggcaaggtcacaaaacccgtaatatggaggaaaagatagaatacgcctaacctctgacaaggaatacacggaatgaccgaataccgggccggggataaaccaaacattccaaacgggattggagtcagggccagaaaagagctggcactatgaagatcatac

SEQ ID NO: 120478 - DNA, 165 bp, Glycine max
acagaaatcactcacgcgtgttcgatacatcgttgtgataattgacacctcgtaatgaggtgcgagcgattttaatgttgcgcgcgacaccacattgactgacttgacttgatctcctgtagaaatcattaacacaacccatgtactcgcgggattatcttgatg

SEQ ID NO: 120479 - DNA, 303 bp, Glycine max
tcagcttgggtcattaaaagacaccagtcttttatagaaaactaaacatgcattgtttatggaattgtattcattatgcgatataatttggcgtgaagccattaataaccaattaagattattaagtactcgtttcgctaagcaaaaaaatagttggtccaacaaaaatcatttacgcgtgtacgatacatcattgtcataattgacaacacataatgacatgcatgcgtattaaagattgagcgcgacaccacattgactgacttgactacatattctgaagaaaacataaacacgaaacat

SEQ ID NO: 120480 - DNA, 303 bp, Glycine max
taacccatattttgcaaataatgagtcttaagccaaatttaatgatagaacatcagtgttaggaacatgaacaagaccgggaaaacactctataacttgccctttcttattcacataatgcaaaaccacaaccatttgctccttaacaaatatctcgagcttcatcaatcaaaatagcaaacaacttatctcctagaccatcaagtatgactttagtggtttcattggtagtcactctaacaatatctttttgtattgaaggagctattaacttaagatttccacatgtattcttcaaaactt

SEQ ID NO: 120481 - DNA, 307 bp, Glycine max
aacccgaaactagtgccatcaatatgcttatgaagggtacttatatggcccaagactggactgatacattggctgcccacacatcttggactggattgtgaataccctcattatcattttagaggaggtccatattgtatgttccaccatgaagccccctagacgtccaggaagaccatatctttctaaacgcgttttcctcactctctagatggagaggcaaaagatcggctatactaccttgcccccatggccatgatcatttgggatgaccataatagggcgtcttccaaaaaatcttacctgc

SEQ ID NO: 120482 - DNA, 268 bp, Glycine max
  unsure (1)..(268): unsure at all n locations
ccttgaagagaagaaattttaatcttatttttaaacacaaagtgctgacaagctctttactcgaacatttaaatattcttgggatgatcaattgctctgatagctttattctttggttaacaaaagcactattgaattagcgtctaattcttttatctctttgtgagagttggtttactcgtaaaacctccaaacttttagtttgagagagccaaaaatgatttattagtgatcaaagaatattttggtttttantcttaaggtgaga

SEQ ID NO: 120483 - DNA, 105 bp, Glycine max
ttgtatcataggcactgctcggagctgattatatattgattcacagaatgtgtttattgtctacacatataaaaaccttctctctcattaggacattacacatat

SEQ ID NO: 120484 - DNA, 258 bp, Glycine max
gaaaactgcgacgtatgtgaagaagtaccaccacatacactatagatcaaccgtatcattgaaactgcgtggggctcgactaatgacgagtcactgatggggaaacctgtaaaaacacaacaacacctattaacataaaaggacaatggtacatatgatatacaacatcgaactttgacaaacttgatcttgaataactactccctataccagattagatcgcctaagaccccgtcgaaatacgacaaaaaatgcaac

SEQ ID NO: 120485 - DNA, 310 bp, Glycine max
gactcaagcttgagaatatcaagctttgccttttttttttcgtcaatactgatctgccaagaagctagaactctacctttcaccttctcaagaagtaatcaaagccatgcattttcagggagtgccacaaaattggttaacgagcttttgctaaggaagcaattgcttggtacggaaaattatgagcctaatcgactcagtccaggtggaccagaccctcttcatcactaatgaatgtgcaattaatgcatgaaaacttgagaatcatagattcatgcacaggaaaaggaaagattgttattgtcactgc

SEQ ID NO: 120486 - DNA, 310 bp, Glycine max
tcaataataaccgtctcattcactcttgttcaccatgtcatacagtatatgtcctgtactctcaatggagatactcttatgacatagcctattatattggattatcgaagataaactctgtatgaataggcaagaccaatagacagactctcctacgaccttatgagtgctattatgtgaggccactgagcatcagcagtactccattgatccccctctttaaccaagcacatattaagaacggtatgtgagacctgggtcagaggtgatatcattatcacagaccatgatatgtaatattgttgaccga

SEQ ID NO: 120487 - DNA, 306 bp, Glycine max
ttagaaccacaaacaaaaaattatttgttattagctttttgtaaaacaaaaaatatgacatatgttaataaaaaccatttcatacactctgcaaaaccatttcatacagtatttgtagtgtactctcaatggaaatacacttatgagataacctctaatatttttttatcagtgaaaaactctataaaaaaaggtaaaaccaaaagacagaaactccaaggaccttataagtccaatcagctgagcccactgagcatcaacagtactccattgaccccctcaataaccaaaaaaatatgaaatacg

SEQ ID NO: 120488 - DNA, 236 bp, Glycine max
gccgaaccacaggggaaaagaaacgaagaagtttttttaacacaaaaccagggagaggggctaagaaaaccccaccaccgaaaaaaacgaaaactgcgcgcacgaaatcccacaacaaaccaacataaatggaaggaaacaaaccaacaggcagacgaatccaaagcagaaagggaaaaggcgaggaacacggaactaaaagcgagagaaaagatccaaaaaaaggggaagaaaga

SEQ ID NO: 120489 - DNA, 283 bp, Glycine max
tcactctgatggataactaggtttgataacagactttgcctataggagaatacacacgcgacacttctctatcacgggtcttaaccatctcatgcacacttgcttacaaacgtatgacctacattccactctcctatgtataattaaactgtccgacgggcagggaacgacgaataatggcgctatgggactaatggcgatggcaacctctatatgtgacatgcctggcggttctatgaaccctactatggattgcaagtttagatgacgaacatactcctcc

SEQ ID NO: 120490 - DNA, 315 bp, Glycine max
ctcaagcttggatttcctttttgtagggaatctatccttccttttatggacccaaacccagtcaccctgattaagaactagcttttttcttcatcctttgcctttagttgaatacacctttgtttagttctctatttggttcttaaccctctcatgcaacttctttacaaactttgacctagattccccttctttatgtataaaagaagtgtccgatgggaggggaatgaggtctaatggtgttaggggattaaacccataggcaacctcaaaaggggactgtttggggttctatgaacccccctattgtaggca

SEQ ID NO: 120491 - DNA, 295 bp, Glycine max
aacggaacctttcaagtttttattgtggactggacctacttatccctgcctgccttaggaagatagccaggactgattggactctaaattacttcacgagggactattgataaaaccgccctcatcataaatacttcgatagtatggactgcgcttaaagcttcagttccattcatcatcttacaactctgtccctattgtgggcttccgccattgtgtcaattgtcccgaccttagagagatacacagtgaccatgcgtaatcgtccaggtagctaataaaaagtattaaaaaa

SEQ ID NO: 120492 - DNA, 305 bp, Glycine max
ccatcacgcaaacaatcttaacccttgttagattataaataaatttttaagatatagacggtaagttgtcaatctttgttgataaaagacattaaagaaaattcttctaattacgaatgatttagcttcttcctcatgtaacaacacactttgaagtatcatcctctaatccatatatagtccacttcaacataagtgagcttacccaaccttgatccatcgatatttttgcttcttatagaattaatggcagcttgaattgtttttaatgttactttattatacttttaataattatgtgtttt

SEQ ID NO: 120493 - DNA, 229 bp, Glycine max
atggtcattcctccaccacacacgccgtgagctcaaggacgacgacgttactctctatcttgaacacatattacacctgctgtggacactagaggttactccccattggcaaatacaacccagacatagtcctcaaccatatgccgatgctaggcctacatacgatggtgtgcgacatatgttatcttgtgtgaggggccataggcttcctttctatgcggatgccctc

SEQ ID NO: 120494 - DNA, 305 bp, Glycine max
tgcctcaaagagatccaggaaggattatttggctgaaggaaccagttccgctcccgaatatgacagccatcattttaggagcgctgagcaccagcagtgcttcgaagccatcaaaggatggtcattcctccaggagagacgcgtccagctcagggacgacgagtataccgacttccaggaagagatagttcgccggcggtgggcatcgttggttacccccatggccaagttcaacccagacatagtcctcaagttttatgccaatgcttggccacagaggagggtgtgcgagatatgtgatcttg

SEQ ID NO: 120495 - DNA, 299 bp, Glycine max
tgacgatgccacagaagattattctaggctgcgtccaccgataaaccattgcttcaagagaaagctcatgagagcttcatcaatcacagccacggttcaagattcttattcgaccaagcctatgacttacaacatagtgctatcaacacatgctaggctctggttatctaccaccacgaagagatatcgtttaccttatgacacggatgagaaataactgtagaaacatgctctgaatatgcatacacaacatgtgaacgattaccatatgtctgtaaagcgataccaacttctaaact

SEQ ID NO: 120496 - DNA, 290 bp, Glycine max
  unsure (1)..(290): unsure at all n locations
ttgatgatgtcgagaagaaatcacatgnttgtcatcatcaaaaagggggagaatgtgaatgtatgtatacatgattttgatgatgccaaagaagaatcaaacaaggctgcttcaaatgataagcatttgcttcaagaataattcaagagtgcttcaacaagcaaagccatgtttcaagattcattaaagaccaagccttgccttaaaacaaagtgctttcaagacattcaaggctctggtaatcgattaccaggaagtgtaatngattactagaaaaattgttgagaaat

SEQ ID NO: 120497 - DNA, 317 bp, Glycine max
  unsure (1)..(317): unsure at all n locations
tgaactatacaaactcagcttcgaagggaagagagagacctanctgatcacatagcatggtcttaaaagaagagttagccgcttgctcaaagtccaaaaggaacttgactcagcgtttgtgcgagacagagaccaacatgttagctatcatcaccaagtatcaagaagaactaagcctagccacagcccacgagcatagggtggcggacgagtatgccctagtgtacgcagaaaagaaggctagaggaagggtgatcgactcgttacaccaagaggcaaccatgtggatggacctatttgctcttaccttgaacggg

SEQ ID NO: 120498 - DNA, 302 bp, Glycine max
tgtgcaaatcagatcactcctacattttatctctagcatgcattttctttctttacccactcctcacgtttggttttttagggaaaaacaccataactaaacgcgccgcaagggatccctatcgcaccagatccaaatctagaacgatgggtgatcaagaggagacgcccgaacagatgaaagccgacatgtcggctctgaaggaacaaatggcctccatgatggaggccatgttaagtatgaagcagctcataaagaaaaacgcgggcacgccgccgatgtcagttcggctgccgaagcac

SEQ ID NO: 120499 - DNA, 173 bp, Glycine max
  unsure (1)..(173): unsure at all n locations
ccattaacgtgcttagctacataatctcagtggagaatagatcactcccgcaaaggatgatagatgttgaggggttgcagngagagaactatggggcacccgctggacttaccaaccgtgcctacaccaactcaactggtgatggtggagaaagctgctatcagaagtggatg

SEQ ID NO: 120500 - DNA, 316 bp, Glycine max
atactcaagctttcccattcatggaacgtgttagtctaagttcattttttcataaacctcagaaacaaacttgttaattgtctctctaaaataccattaactgcttagctcataactcagtttgaatattttcgtccgcaaatgatgaagttttttgttatttgcagtgtggttattatggggataacattggacttagaagccgtgcctacaccgtcgcagcttcaattggaagaaaatgctataatcaatagtggatggtggaatagatcagagtcagtagcttcgcgcaatatctgttcatggtatggtatgt

SEQ ID NO: 120501 - DNA, 455 bp, Glycine max
  unsure (1)..(455): unsure at all n locations
tatggatgtgtgaattgaagtggatctattgaatatgaacactggctatggctacaagaagtggagaggcttgagcctgcaacgatcctagcaccattgagaaagcaaaggtggcgacagaatgagcctatctaactcgagcaagattgccttgcacgcaatgatacagcgagaacgtctatcgagaggaaatagataatagtatattgtactgatccttatgtcacgaagtatacacaatgacaatcttactgaggcactaaatacactcacatcatccatacatgtatatctagatacatgtacacatacatacatacctatacatatggacttccctaccgacatgttatctctcacctcttattatatgaatagaccgaacatggacctcttggggatacggnattatgtgtacagcctcacattatctgtgaggacaaccatctactatc

SEQ ID NO: 120502 - DNA, 306 bp, Glycine max
tacccttaaaataaatattattcatgaaaatttttatttatgaaattatttagaactattttatatgatttctaataatttttttaaaaattgttgagtcttaagtatgcaattatattaacaccttgagaaacaaatttgtcgttcataatgatcctatctaactcgagcaagattgtctttcacaaatgatacatgtgaactctatcgtaaaaaataaaaatatttaatttatgatattattaatgaagtaatttaaaataattttatgtgaaaaaatacatttaataaatttatatatatata

SEQ ID NO: 120503 - DNA, 253 bp, Glycine max
ggaaaaaggcgcgatggcatattttgcaccgttgaagcctgagggaggaaaaaaccatgctatgaaaatcccctccatctcttcccaagtgttgaggcttttatttggatgtgatacgagccatggttacgccttacctgctaatgaaaatggaaaaactctgaggtggacagctccagcatcttcatcagaacctcccatcttactgcatagttccctgaaggttgacaaatgggggatggatcctcgggat

SEQ ID NO: 120504 - DNA, 362 bp, Glycine max
gagccttgtttccctttccttggttagaagctcactacaagccttaagtgaaaaaccatgatattaccatatgcttaaggaattgtggagctatggaattgatttgggaataagtgtggggaggttatgtttcattggacaactcagcatgctggctatgcttcatgatgtatactgggccatactagacgtacattgtatattggttaaatgttggacatgctgaatgaaatgttgtttctcaaaggcctcaaaaaaagatcgagaaattaaagcaatctatttgagtgaataacatcttatatggcacgagaatgatgaaactcttggctctactcttcatggtgaaaacctatctctac

SEQ ID NO: 120505 - DNA, 310 bp, Glycine max
gcttctagccaaatggacttaccttgaattaatttctttgatagcccttttgagccttgtttccctttccttgttttgaagctcactacaagccttaagtgaaaaaccatgatattaccatatccttaaggaattttggagctttggaattgttttgggaataagtgtgggggttttttgtttcattggacaacttgttttgttggctatgcttgatgatgtattttgggccatacttgatgtacattgtatattggttaaatgttggacatgctgaatgaatgatgttactcaaaggcctaagaaacaa

SEQ ID NO: 120506 - DNA, 295 bp, Glycine max
cttgtacatttaatattctggcgagggtgcaccataatttctcaagactggactaatacatttgctgcccaagtttcatgggcttgcacgggaagatcctcataaacatcttaaggagttccatattgtttgttccaccatgaagccccctgatgtccaagaagatcatatctttctaaagggtttacctcattctctggagagagtggcaaaagattggctatactaccttgctcccaggtccatttttagctgggatgacctttagagggtgttattggggaatttttccctg

SEQ ID NO: 120507 - DNA, 237 bp, Glycine max
  unsure (1)..(237): unsure at all n locations
cctgtttggatcagactggatgagggattgaacataagaggacaacatattcgtgagatccaagagagctattcatgacgcagaagcgatcgctgtaagtgatgaatgataactatgttgagcatagctagcacccaactcagaccaatgtagtattctgcgcgttagatgagacatccctacactactctgctntgatggcataggatcatacatcttatagacttttacagacat

SEQ ID NO: 120508 - DNA, 300 bp, Glycine max
  unsure (1)..(300): unsure at all n locations
agctttggaggctatacctttttggaatttattttgttgggganagngaacataagagccttaaatatttggtagatccaagagagcttaacatgatgcaaaggagatggttggagtttcttaaggattacgattttgagcttagctattacccaagttaagcccatgtagtaactgatgccttaagtaggaaatcccttcagatgtctgctttgatggttagagagttagacctcttagagaagtttagagacatgagtttgacatgtgaaatcacctctggtagaattaaattgggta

SEQ ID NO: 120509 - DNA, 305 bp, Glycine max
taacaatctcacattggtctttgtttctttgtaagtatttcccagggaaatccctcatatttggaaccttgcagtccattgatacgatcatatcattgtatgagaataattttcctgtgagatttgggattgtgctgtattcttcaaaatccatcacgcggctagagaatcattctgccaaagaggatggagataaatttgaggaggatatatccgatatggtaatattcacctatgttcagaaatcagaagtatacacaaacatatttttgagaaattttactggcaagtttatgatacactgt

SEQ ID NO: 120510 - DNA, 304 bp, Glycine max
tccctttctttggccaatgctggttttttttggcagcgatttccttggcaatttgatgctcaaaaatagcaatatccaccactccttcagttggtctgcccaggtacttgttgattacagcaggggagaatctaatacattttcctctgacaaacactttctgatactcatcactctttctgtttgttatgtcagagggaatgttgacaatgaattccctgactagactttcataacaatcacccaacttggagacagttttcagcagtccagagccttgatgaggtacatgatcttcttgcaa

SEQ ID NO: 120511 - DNA, 298 bp, Glycine max
ttaagaaaaatcaaacgacattaattttttactcagatgtcggataaaggcccgtaaaatatcgagacgctcaaaattgaaaacagaagcactcaacaaattcaaacgacaataacttttgactcggatgtccgattgtgtcccggaatatatcgagacgctcgaaattgaaaactgaagctctgagaaaaatcaaacgacaataactttttactcggatgtccgattgagtcccgtaatatatcgagacgctcataattgaacacagaagctctgagcaaattcaaacgacaataac

SEQ ID NO: 120512 - DNA, 302 bp, Glycine max
tctgattaaggattaatttatggttttgtattgatgaatttattaatctttcagttttatttatgtattttttttataaaacttttttcaagttgtcttttgcattaattattttttgagccaaatatccttttattacttacaataaatgttacatatttaaaagataaatatattatctctcttataagggttagataaaagtcgtcttacaatgatgggtagtgacatttttgtaataaagtcaaatacaatgatgacgtttgtctaaaccgcctttgatcagtgtgcgggatggcaaa

SEQ ID NO: 120513 - DNA, 310 bp, Glycine max
agcttgcctcaaagagatctaggaaggattaagcggttgtcttcaaccagctccgctcccgaatatgacagccaccgttttaggagcgctgagcactagcagcgcttcgaggccatcaagggatggtcatttctccgggagcgacgcgtaaagctcagggacgacgagtataccgacttccaggaagagatagttcgccggcggtgggcatcactggttacccccatgaccaagttcgacccaaacatagtcctcgaattttacgctaatgcttggcctcagacgaaggcgtgcgagatatgcgatcctg

SEQ ID NO: 120514 - DNA, 252 bp, Glycine max
tgaggtgatctgtccagatgggcggggggtatctttatgtgacagaaatccatcaccactcatgatttcggtgaattaattctaatacgtcaaagcgagagagactgggtcatcacaacatttgctagtggacccatcaaatagatgggtgacggacgatcacctccattctgcacttttaatagcatcactctttagatacctgcactcatgacgcctcctcgtacacctatctgtggtacgctaccctgg

SEQ ID NO: 120515 - DNA, 268 bp, Glycine max
  unsure (1)..(268): unsure at all n locations
caccatgtcaaagcgaacccaacacaggggcggaccaacgaaaaaaagagcacgcgcccaccagaccaggggaaagccnaacaacagcaacaagaggcaaccgcgaagaggggcggggggaaacacacgggggcacaagagcacaaggaccgacgacgagggcaaacaaaaccccagccgcaaaagcaaaggggaagagcgaagaaaaccacccgcagggggagccaagaacaggacgggggaacgaccacgcaaccaggcccaaaaa

SEQ ID NO: 120516 - DNA, 324 bp, Glycine max
atactcaagcttcttatctaaggcattctcttagtggtgaagctctttcttccatggcttattcctgaaaaaattgtatctcttttccttagtaatttaggcactactcatatgctccatttagagttttgtagcgccctataggtcttgcacaaggcaaataggtcaagtaagcacaaaaatttgaaaatatgcaacaattatcaattaagcccaattatttgcctaagacccaaactgagttaaggagagaaaataagactccaagagaggtcaaataagctaagatgaatagaaaaatactaaactaaaaacatttaatca

SEQ ID NO: 120517 - DNA, 311 bp, Glycine max
tttgatttcaatacaagaaaacataaaaattttgcattaaaatagggatttccctttataccagcagctgatttgttggtgctgcaccatgatgtttgcctagtttgtataaagatgttattcaccatgtgcatgtatatatagaacaggtagcaagagacaaatacccttcaaatgaaacgtgtacatgttgaataggtggtcaagcgctttatgaatgttggatgtggcacgaaaaggcttccccaaaatgaatatatgatgtggaattgcctttcagtatagatagatggcatgaaaattgcttttca

SEQ ID NO: 120518 - DNA, 254 bp, Glycine max
  unsure (1)..(254): unsure at all n locations
ttgagganatnaaaaaatatacattttagtttgttttgttggcaaaagtaactggggttattgatgacgaaaataacctatacttgatgcttacctactctagacagacggcaagtagtcattctaggattaccaattaatggcgctatgcttaccccatgctctatccccatgaacattaccttgtctttacttcttccactaacacactgtatgaatatggtggtgagttattttatacactttgtaaatca

SEQ ID NO: 120519 - DNA, 298 bp, Glycine max
tactaaggcacctgtgctatctctttctgactttcctaaaacttttgagctagaatgtgatgcctctggagtgagagttggagctgtattgttacaatgtgggcaccctattggttattttattgaaaaacttcatagtgccaccctgaactaccccacctatgattaagagctttatgccttaataagagccctccaatcttgggaacattaccttgttttcaaggaatttgtcattcatagtgatcatcaatcacttaagtgcattaagggcaaagcaagttaaacaagaggcatg

SEQ ID NO: 120520 - DNA, 303 bp, Glycine max
aactcagcttgaaggctatacccaccgcatttcttatttgaacactccctgggaatgagtctactatcatggtaatcatctccctctccatcatgggaggtgctacttgggctgccaaatcccttcccctctaggcattctccttgacagactcatgctccttcttgcacatggtctgcaatcgtgctctatccggagccatgccaaagttgtattgatactgcctgatgaaagcagccattaagtccttccaagaacggatctgggaagcttccacgttattatagctagcgattacaaccc

SEQ ID NO: 120521 - DNA, 276 bp, Glycine max
caacaaatttttttttttttctagcagaggatatttcttgggaccatgtagcgatttcccttatgatatactggcctgttcaactaatctgggaacacataactttaacgcgcacagttctattccttccaaatagcactattcaactccccttgcaaaaaaaggaaaactttctcaatgggaggacattctaactactgtggacaaattttggccgaatatgtcttcatcatactattaatgatggaggattgggttttaaatatagaatgttgg

SEQ ID NO: 120522 - DNA, 297 bp, Glycine max
  unsure (1)..(297): unsure at all n locations
attcctaacataggattttttttgcacggctcggctnacataaaagaggggctgggcccatgagcctatttaaaagcttgcttaaagacgtctttgattaattaattattttaaaacctagtgaaatactaattaaaaaaagaaacttataaaatttcgtataagctatgtacaaatccaaaaataattgataaacaaaatcatattgaattcaagtcgttaaaatacaaagtattttaaaagaaaatagaaagagcgtaatattaaaaatgtatggattngagatgatttacactt

SEQ ID NO: 120523 - DNA, 145 bp, Glycine max
actataggcactgcggcatgtattctatgctacggtgtccatgctcacgactgatagcaccttgtggatacgtgaccctggaccacttccgctctctctgtgctgtatattctcatgagcacatcctactaccttactccctatg

SEQ ID NO: 120524 - DNA, 306 bp, Glycine max
ataccccacttcagcggctgatcttgggggacaaccttttttttatctcactgctacgcaagaaggatggctccaccacacacgacctcgaagttgagctgtcgtagacatatcccgagagagaaaacaccatcactagatcgcgttgtatatacatatccttaccttctgatgatggcctcctttagacttatctctcttagacttaaagtctaaatctattcccccatccagcgcctgttaatgcctacttttcacagtgataactattgaaagcttcttaaggtgacttacgaagcagttctt

SEQ ID NO: 120525 - DNA, 298 bp, Glycine max
gtatcatatgggagacgcatttttgttttatttaactgaccaatacaagggccgatattacatatgcaatgcaacacttaagtcaatttgaagctcatccttgttcagctcatcaacaagcaccctataggattattatatacttaaaagcaacactaggttctggcgtatttgtctcttctttcaacatattctagctcaaagagtgtagtgactctgactggacagaatgtattcacaccatgcattctatcattggttactcaatataacttggtaggtggataaattgttggaa

SEQ ID NO: 120526 - DNA, 307 bp, Glycine max
tcttatctaaggctcatcttggtggtgaagctcttttttccatggcttattccctagaggatggcgcctcctctcaccttttctcctttgtcttccgctgcatctccatggtggaaaatcaccattaaaggacctcatcgaagctcaaagatccagcctccatagaagccccacaagcaagcttccatcacctaggctataaatagaaacatgtgtaacacttatcataactttgatgaatgagagtcttgtgagacacatttcaaagttcaacttctctccctctttttctccttcaattctatgc

SEQ ID NO: 120527 - DNA, 62 bp, Glycine max
tacttggatctctatgtggggcaggtgcctacactgtgctcaatcgcaacactactatgcgt

SEQ ID NO: 120528 - DNA, 305 bp, Glycine max
tgtagtatctaatagcatcattgtttgtatttttattaaactcaggatttttttttcgtgaattaataactaatcctttgaagtattgaaatgatttaaaagaccaacctttgcttatagttttttttttttactcctaatagatatcaagaatgacaaggcttaatcaaatttgtttgataaataaaaatgagagacacaagaacaactttaaataattggaaactaacaaagtctaactgcattaaaataataaaatgtatactaaaaataatagatataattttggccataaaatcatgaaa

SEQ ID NO: 120529 - DNA, 258 bp, Glycine max
gcgtaatgtatagctgtctataggtttcgggtattgtcattatcctcacatgtctaatgactgggtgccttacatgtatatgaagatgctattgagctgctgtctgatacacgcaccaaggagagggacagataataactcctagtgctccttagaattatcgagctatacaatagctctgatgtagtatagcgcatctctttgatgcctagtgcatccgctgtcgttgtctacgtcaccatcgcctatgctcgatct

SEQ ID NO: 120530 - DNA, 290 bp, Glycine max
aagataaggtgcatgtgtgaatgtaaaatttttattttggatatgggtattgacattatccttacctgtttaaagtcttggtgtattttatggatatattaatgttaatgagctgcttcttgttataggcaccatcccatgggacagatttgagctgcgtgtgcacaataaaattattgatctctacaattcccctgatgtggttaaacacattacttcaatcacaattgacccgagagttgaagactaagggaccattgtaaatgcatgatttttaggccatatattcc

SEQ ID NO: 120531 - DNA, 294 bp, Glycine max
ataggttaataatctctcgccatacttgtattttttgtacagaatacaaactacaattgcatttatcttttgctcatgtttctatatccagggttctgaaattatgcttatgtgatttgtcagagaagcggggaagaattgcctataatggagaaggctattttggaagataataaaaatccacttcccatgtatcaaaaagccaagatactcataagcttacaaagaattgacaaggctctggatgtcttagacgagctgaaagaggtgctattttaagaaagtagagtttat

SEQ ID NO: 120532 - DNA, 294 bp, Glycine max
tattatagtactcttgtcaatagcttcaatttttctttcaaccaagtgcttatgacatgaactctgatgggattagttttttttattgaatgagtgtctaattaagttacttacccagattgcattctgaatgaaacatggattaatgcttcttcattttcatgatttggtttctaaatagttaacaatggttcaaattcctctgttttggcaggtgctgtctgcatgctttaccgtatgcacccttggttatgcagcattaggtgttttgggctatttaatgttctgacagga

SEQ ID NO: 120533 - DNA, 311 bp, Glycine max
  unsure (1)..(311): unsure at all n locations
aacactgcaagcctaggaggcatcaccnagttggaacttaattagaggaggcaagtgaacataagaaccgtagatatttgcctgatccaagagagcttaacacgaagcacaagagatggggagaattccctatggaggaccactttgagcctaaacaacacacaaggcaaaccaaaggagcagccgaagccccaagtaagaaaccccttaaaaagactggattgacggttagaaagccagacctccaagaaaagattaaaaacatgacttcgacatgagacacacctctggtagaaaaaaaagggggaggc

SEQ ID NO: 120534 - DNA, 298 bp, Glycine max
ttgcggatttggtcttcgccagtgtatttatcgatgtgggttcgaaaagaggcaaatttgatcatcctactaggacgactgagaaaactggggcaaatgaagagggtgagaaagagggagaaacccatgctgtgactgccattcctatacggccaagtttcccaccaaacccaacaatgtcattactcagtcaataacaaacttcctccttacccaccacccagttatccacaaaggtcatccctaaatcaaccacaaagcctgtctacgcacttccaatgacgaagaccacctttag

SEQ ID NO: 120535 - DNA, 227 bp, Glycine max
  unsure (1)..(227): unsure at all n locations
tatttactggtgcagaaacagatgatttatcacacacaaaaataaacaccatcctcccacaaattgagaactaagcattcttagaaatattactagtgtatgacttaaaatgtaatctataactagttatacttattgtgaatcacatggagcaagagagcctacaatttaaggactaatctaataaaatattttggaagcctaaaactccctntaaggtcaaggct

SEQ ID NO: 120536 - DNA, 305 bp, Glycine max
  unsure (1)..(305): unsure at all n locations
tccttgagaagctggagggggctattctttctcctccaatagctaagctcaccccattccaaaatacatgaaaatacaatgggaagcttccttgagaagcaaggaaggtagcttccttgggaagcaaggaagaaagcttccttgagaagcatgaggggggtgtcataccctaatttcttccggggactattgcttgatggcatgcaacctttgattgacctcttcgaggtacttggcaccctttgttgcacaatatgtgaagacccgagacgtgccaaaatcaaaaggaatnttnttactcaatc

SEQ ID NO: 120537 - DNA, 298 bp, Glycine max
tcaacacttgaatcttcctcttttgctcgaaaccctaaccccaaaagtgcatggaccacaaccatgaagatgaagaccaaacgtcgcacccatacatcgtctaaacaagccctccatgatagcaagtctagagcaaattgttaaccctgatcgccttttatggagaacattaacggaaagtgtgacaacagaggatcacgtttgtgttctaaagcaatgtcgttatgccctttctctattacacaaacgacgtcataacatctcttatcttaatttttttaacctaaataatatcacg

SEQ ID NO: 120538 - DNA, 159 bp, Glycine max
  unsure (1)..(159): unsure at all n locations
tgcgagctatcaatggggccaaacccaccttcagataatgatgatgtatggcatcaattactccagagggtaactgaacacgttcaaaacgacctctcttaaatatgatgacatgtgttggangctcatggcatttaactaacctactgtcatgagact

SEQ ID NO: 120539 - DNA, 286 bp, Glycine max
  unsure (1)..(286): unsure at all n locations
gaatactcaagcgtaaaaaaacaagattggcnattttttttttataaatgcangagaagaaggaagcatcaacaagaatcaatccaacgctattgggcaagctaccaatggggcaaaacacaccaaaagaacatgatgatggatggattgaattctcacaatggtaaactcatcactttcaaaaagagctttcaaaactatcatgacatgtataggaaaaacaaggatttcatataacaaaatgtcaagagactattattttcagaagagaaaaccatttattgaa

SEQ ID NO: 120540 - DNA, 179 bp, Glycine max
tagcactcattgtattgtgttgagcgtcaactacgtgcttacaaatatactccacaccggatgagatgtctaactctgtgactacgcttcttgtaacttggaccaaaacaccacgctgaataatgaacctacaccgactcaacgagctcacaagcaacatgacgactatgagcgaagac

SEQ ID NO: 120541 - DNA, 311 bp, Glycine max
ctcaagctttacttgcttcttgttttgctctcttgtatctctttttagcaccttcaattgaactcattgctttttgttgagcttcagctctgtgcttagaaatctcctccaggctggattgtttttcttctcctgtttcttctcttctttttccttgttcctcaccaccaccctatatcataaaccaacaatgacaaaaaggtcaaacatgctccattacaactttaggtgaagacaccttttattacaacttcatattattttcaacatgctccattaaaaaatgaaaggttaatagtacaaaaactcat

SEQ ID NO: 120542 - DNA, 293 bp, Glycine max
gagcaggaacaagcaatcaacgctttttttataaccatgctatgtgcgcgggactggtccctttattcccttcgcaactagagttcattattgctaccccataaagctgcgcgaaatttgttccggccatactgttccttgcgagccctcttggtctcttgttcaaaggctcttgcggtaattgcattgtttgccaggaacccggcgcacttcttccaaacatgtgtagcaaccaacttgaacttctccttggcgaggaaagcctgcctaactcgcatgtgagagcttggact

SEQ ID NO: 120543 - DNA, 299 bp, Glycine max
  unsure (1)..(299): unsure at all n locations
tactttgtaatttgtgattcaatatgatgtattttagcttatatatatatagaggttgttatttatattaataatttatgtaaataatattgtagagtgttatagtatgattccaaaaaattttaactgttggagtttgagaatattatggttaaatttgatgaacatgtgtatgttgtaccttatgaatatcattaggaatgttatgagatggttgatgtgatgttatgagatgttaaagtgagggcatgatgtttgattgtgaataagtggatgtgttaacacttgatgttanntta

SEQ ID NO: 120544 - DNA, 294 bp, Glycine max
  unsure (1)..(294): unsure at all n locations
tgtcgtgccatccccgtttcaacctaaaccttttttgggctcatatccgtccctcaacataacccgagccaccatcaaagcgacaccagataagcgtggctacaccagaggagattccacataagcactactcacaatttccagtgcttggaatgatgtttccaatgactcctctgcagcctcaacatacgacatagaagacaaacaacttaccaatatgtcttcctcccccgatactataaccagttgcccttccactacaaactttaatttttggggcanngtgacgggacc

SEQ ID NO: 120545 - DNA, 261 bp, Glycine max
  unsure (1)..(261): unsure at all n locations
ctatagatagaggcctagtgcaacatatttcgacttgaacantgagaatacacttccatgctcatacctcttatgatgcacaagattttgtgaacctcctcttcctctcccttcactcatgttntactaccaataatctcttatgcaatgatctctatagaggtgaacaacaacacgactcatctgattcttgaagagcatctacaatcaacaaaaatacttctttatactgccgtcattagacatcatgcatcactagac

SEQ ID NO: 120546 - DNA, 297 bp, Glycine max
  unsure (1)..(297): unsure at all n locations
ttcatcacttaagctataaatattatttcatgtgtatgcattttttcaactttgatcatttgagaattacacttcaaagttcatacctcttttgaggcacaaaattttgtgccccttctctccctctccctccactcatcttctcctaccttcaagctcttatccaaggcttcctatggtggtgagcttcttcttgactcatcttttccttgaagtggcatctccaatcatctttcttccttctttattatgntggttttaaacttcttttttttaatttttcattgatgtattatt

SEQ ID NO: 120547 - DNA, 153 bp, Glycine max
gcgtggacatgatgaacattcattactgaaagcccgcactgaacgtcggcgcccatgcctagttgcgagacacttgtggtggtatactgccgcactattcaggatgtcgatgcctttgagtggcacttaccttgacacaatgtgtggccatgt

SEQ ID NO: 120548 - DNA, 300 bp, Glycine max
tgtctttttcagggtatattaaagttgcccaggaaattcaaaaatttaatgactgccctcacgtactgtctcgtggggggtatgaactgcttgacaagaaacttatggaggagaagagcaagcgtggacatgaggaacattcgtgtactgaaagcccaacactcaacgtcgacccaccatccctagttgcaagacacttgaagtggaagatcgcccgcactaagcggcatggccaaatgacgtctgaagtggcacaagaaattgcaaaaaaattgccagttcatatatttttctggttac

SEQ ID NO: 120549 - DNA, 234 bp, Glycine max
gacaccgcatgtggcttgctctacggccagtgttagtatgcgaccgtatgggactgtgagcaaccgtgtttcatgagcaacggattgagccccgcgcctcacgtgctctcgttactcagtcgcgtacaggacaattcacatgtttacagtggcgcgccagtgttcattaaatccgtctgtgaggacggtgacattatacccgtgcgagtatttaacgcatccctacgcttaaca

SEQ ID NO: 120550 - DNA, 287 bp, Glycine max
  unsure (1)..(287): unsure at all n locations
tggtaatcgattacacccccttggttattgattaccagaagccctcatggctttctgacctcgttttcaagcctggtaatcgattacaccccgtggtaatcgattaccagagaccatcttagcctcctgtcttcacttttaagccttgtaatcgattacccacccttggtaatcgattaccagaggccataatccacatatcacacaaaattcacagctggccagccaccacaagcctccttgctttgtggtctttgttccttttagctgntgatggcaagagctcg

SEQ ID NO: 120551 - DNA, 309 bp, Glycine max
  unsure (1)..(309): unsure at all n locations
ttaaacttgagattggatagtttattattctccatatagatctagaagtcatagataatcaacttcaaaaaaagaagaggaggatgagtatttagatgcaagaagtcatggaacaaggtgaagaggtgaaccaaaaagagataataaattggggagcattaagatgacaatacctatgtttcaaggtaaaaatgatcctaagttgtatttggagtgggagagaaaggttgaacatatgtttgattgccataattattttgaggaaaagaaaaaggttaactagttgttggttgaattatnnattatgct

SEQ ID NO: 120552 - DNA, 305 bp, Glycine max
  unsure (1)..(305): unsure at all n locations
acaaactaagcttngcggatttggacttaccttcatattttcaaagnaggcccgaaaagaggctaaagtaatcatcctacttggacaaatgagaaaactggggcaaatgaaaagggtgaaaatgaaggggaaacccatgctgcgactgtcattcctacatggacaaacttcgcaccaacccaacaatgtcattactcaaccaataacaaaccttctccttacccaccacttaattatccacaaaggcaatgcctaaatgaatctnatattctgtcttctgtatatttaatgaaaaaaacattttt

SEQ ID NO: 120553 - DNA, 221 bp, Glycine max
  unsure (1)..(221): unsure at all n locations
ttgngttgtctcctcctngctccctngcgatgataagatcaagaagttgagttgtatagacatatctttagcttctgatgatggtcttctttagactaaacactctaagacttaaagtcaaaatctattcagccatagagtgtttgtaaatacctactttagagaagtattactaatgaaagcttcttaacgtgtcttaggaacatgtccttaaacaaaaa

SEQ ID NO: 120554 - DNA, 278 bp, Glycine max
ctcaagctttgccggaactgtatatgatcttatttgttcctacaagcaacgggtgggggcattggactgttgttaatatatccagcaacaggaacatatttgcccgttgatgcatggagacgtgatggaacaaaactgccgactggagctgttaaaggccagaaatgattatgactatgctgggtttggtggcgcatgtcctcctaaaggagataaaccacatcattaccacggtaaaacatgggctttaaaaactgaaaagattcctgaaaataata

SEQ ID NO: 120555 - DNA, 191 bp, Glycine max
ctctggacatcacatgggaaatgtaacgcggcatcctacaccaattgaaccgtctctccgctccggtatactatctctgatgatcctgaacacagcgatccagagctgcaacatcggtaacgtctgactacaccccaatgcttgaaaaagcacgatgtccaagccatacctaagagaacgtaagattccct

SEQ ID NO: 120556 - DNA, 265 bp, Glycine max
catttctcggactgagtcggtgtctaaaattttgggttctgagatccctgagtcccgcaaaagaagaggaagagcctcctggatgctgaaagagttcacaaaagctgtaaactaaagacttataggaaaaaaaaggggggctaatagagaaaggaaatacttaggtgtaagattattcaatccaggtcctctttttacagactctgaatttgaactctgcactctgaaccttgactctgagtagtatcccccccatatctctctg

SEQ ID NO: 120557 - DNA, 413 bp, Glycine max
  unsure (1)..(413): unsure at all n locations
ctgattattctttgtatcctttgagcctgttcctttcttgtttgagctactacagcttagtgaaaactgattaccatatcttagaattttgagcttggaattggtttggaataagtgtgcgggggttttgtctcataggacaacttggtntgttggctatgcttcatgatgtattttggccatacttgatgtcattgatattggtaaatgtgnacatgctgaataaatgttgttctcaaggcttagagtaaaaaaaaaaaatcgaataaaaatcgaaaaagaaaagacagcaataagtgagtgatagatcttaatggccagaatgagaactctggtctactttatgttaaattactcactcttttatttctaatttattgtagatgcactatccctctgtctctatccttgga

SEQ ID NO: 120558 - DNA, 281 bp, Glycine max
acaggcgtacccttttttttagtctacctgggtttaacgactttactaggagaaatcattaatgcgctttttttattatgtcacaggttgaacttgtttggactgtgtcaacactttgttaactttacatgttattcaaaactaaattttaaaagcgcccttggaatgcttccactatttagatactgcttgcagctcaatgccttgatgtactccctaatgttctagaggacttcttaaagggatgcccaggctgcttaatcaactatttttttagtgtg

SEQ ID NO: 120559 - DNA, 257 bp, Glycine max
cttggggatctttatagcttatcatagtgacctaatataataaaaattgagtagaatgaaatggttgaatttacgcattacacatttattattatgagtaacatttactatcatatagtaaacaactatataaatacaaattttggctaaacattacacttgctgataatatgggtgaataagatttactataaatttaatttacctttaaaattagtttaattgaattataataaaaaaaatggttaatttattag

SEQ ID NO: 120560 - DNA, 257 bp, Glycine max
gatatgactcaagtattttatagcaattgtattaaaatattataccaaaataaatatttttaagattgatgactaaaaaattaagtaaaaactacttaataatctaacattgaatgaattttatataaatattaaattatatgaaatataaattccaagataatataagaagattatgtactatcataaagctttacaaagaaaagaaaatactagacattgtcatgtatcgctttatatttacatacaatattatt

SEQ ID NO: 120561 - DNA, 281 bp, Glycine max
gtacccacatcagtcttctattcggaaatctctgttcccctcgcccacattttcaaattttatgtcctggattcaaaacgcgattctcaacggggtttatttactttttcacaattttttttttggtagagagttgaacccagcaagtgtaccgaatacacttataaagaataaagcggcaagaatacacaaccctattttgctttaacaccatacaatctcacattgtgagcgtaatgcaaagaaacaagataacatattcagcacttcccatgatacac

SEQ ID NO: 120562 - DNA, 182 bp, Glycine max
agcaaattgagagactgatcactgagctgcaatggtgagtcccaccatggagatgacgcggaaggcaaaggagaaaaggagaggggaggccccatccacaagggaataagccatggaagaacgagctacaccaccaagaaagtgccacggataaaaagcttgaaaaaaacgcttaaaaggag

SEQ ID NO: 120563 - DNA, 185 bp, Glycine max
  unsure (1)..(185): unsure at all n locations
gctgtaactatgactgatgactgagagtttaagaaatgatatgaaagngtttaatcgacttatcgaattgtgtgaagtcacaatttgcaagaaaatctggttgtgtggaaggagacatggttgactttaaatccacgcaagaatattctaaacttcaaattagcacacgtacatgacaaaagtct

SEQ ID NO: 120564 - DNA, 189 bp, Glycine max
tagttttagttacagatttcaatatttgtgccaatgactatcatcatttctatcttacctattttgaattatggccttggtttgtgtgtctagattgacaccagactcctaaatacacaatatctttcattgcaagcttagcaactgtcccaaaacccaagtttattcgaaaccaagtgtcatgatttc

SEQ ID NO: 120565 - DNA, 281 bp, Glycine max
  unsure (1)..(281): unsure at all n locations
cctcatgtatgctgacgttggctccatctatgcacaggtgtgctggtcatgccctacacctatgaaatttgcaagcacactaggttatgaatttgggttcactataccaaatcccattctcgcttcagattgacaagacaagtgtccattcttatttccaaatacaaagattgatcagtctgatgccatcttacaatttcgatacacctcttgaaagggatctattagcaacacaatccattatatgtttggttgtacaatgtcatgaagcnattccgcta

SEQ ID NO: 120566 - DNA, 193 bp, Glycine max
tgggtttgggcgtgagttagtgaacatgtaacgtatgatagtggctggaaacttctaaaatcaaatgtatgtctgtgtcaggctacaacaaagggcacaaagctttgctctcatttttctgtgtcatcattcatctgtacattgtaaggtatatatgtaaaattgagtagaatgaaaactttttttttcaaac

SEQ ID NO: 120567 - DNA, 287 bp, Glycine max
gcacctgcgctccctagatagaaactactgcgtcaattctctctgggatgttatcaccacgagtcatctatacatgtgcatagattcactatggatccatgtacaaaaatgcttgccacgacatggtcttggcgacttacattaaggaagaaacactatcattaatgatgagaattgaattaaaaaaattttataatattttttattttcattaggactgtagtgataaacaccaactctcctgcgatctcttagacccgctacaaagcacgctcatactttttgat

SEQ ID NO: 120568 - DNA, 186 bp, Glycine max
tatatttagatagttaaacctttattttattaatgttaggtggtgttcatttcagacattaaattgttaatagtgatataaaaaaatgttattaacattgcagtgtctcacatgacattaataaatcaaaatttaaagaaaaaacttaggtaacactaaaagctctaatcaaaatgtcaaacggta

SEQ ID NO: 120569 - DNA, 99 bp, Glycine max
accacgggccacgagcagagaaccgcggaagaggaggcccaagcatacgcggaaaaagaggccagaggaagggtgagcgacacttaacaccaagaggca

SEQ ID NO: 120570 - DNA, 209 bp, Glycine max
ctggggctcgagagttctctattacggtaacatcaacattcaatttggctctctccctaatagttgcaatgataaaactactgtgaactatgactactgtatgctcattttgcaccatacgctttatattcttgcaacctataaccaaacctttctctctaatcgtctagtactaacaccttcaggctttgaaaccgtaagatatcttt

SEQ ID NO: 120571 - DNA, 180 bp, Glycine max
ttgattatatggtcttcactgacgaaaggatcaaagtaggtctaaaaagaggcaaatttaatcatcctgcttgggcgaatgagaaaacgggggcaaatgaagaaggtgaggatgtgggagaaacccatgttgtgactgccattcctatacggcaaagtttcccaccaatccaacaatgtc

SEQ ID NO: 120572 - DNA, 185 bp, Glycine max
taaatttcagaaatggagtttttgatattaactgactcaactgaaaagtagttacaactgtcagtatagctgttataactaacagtagtaactgtcaactaacctaaggttagttgagttgactaacataactaactctacttaatagagaaaaacagaaaaaggagtaattctactctaatact

SEQ ID NO: 120573 - DNA, 158 bp, Glycine max
cttgggggccgggagacaggaaaaataaggctgacattcattgagctccttattggggttgtggttattgtgggtgtagctcgctacatcattaaagggtattccgccactggtgtgttatttgtcggtggcctgttattgctgattatcagtgccat

SEQ ID NO: 120574 - DNA, 135 bp, Glycine max
gagatgcctatgaataatgtgacttaactacccttctatatgaaaggagggggccccaggtctgagaaactttgccccaactaataccctttgacttagaaatacaacgttgactattctcttttttcttacaat

SEQ ID NO: 120575 - DNA, 172 bp, Glycine max
tgtattttttcttattgcctttgcttgttattacctggtttttatagaattcctaatatggaataatcctaggaatattacaataaccgttttattgataagaattgctcagcaggatcacaattccaagcaaggcgatctgggaaaggatttgcagaagcttctgttttgg

SEQ ID NO: 120576 - DNA, 149 bp, Glycine max
gtaactgagcgactatcgatgagctatgagcggctactagagcgattgattaaaataaataaataaaaatgatctctagatacgatccgtgatcggagatgttcgaacgtgcaacacctttcttttactatcacttacagggtaataat

SEQ ID NO: 120577 - DNA, 200 bp, Glycine max
  unsure (1)..(200): unsure at all n locations
caagcttaatatttgttnntagataggtgcttatgggttggtcaactgttcttcagattattgacttggcaaccttgactggggcctgcgttgttgcccttggaccctcaattgctggtaattataaactaaaattatattatatcaagtgtgaatctgttcttttttttaagaccatataccaatatttgcttgtaata

SEQ ID NO: 120578 - DNA, 197 bp, Glycine max
  unsure (1)..(197): unsure at all n locations
agccgagtttttgaggggatttacccnntcaggnaggggagaggatcaataacaacgnctataggttggaactcccataagagtatggagtcagcaccacttttaacatttctgatttaattccttttgcaggtggagctgatattgaggaggaggaactaacagatttgaggtcaaatcctcttcaagggggaggg

SEQ ID NO: 120579 - DNA, 348 bp, Glycine max
cgcgttactgacacattcacgaatcacgtccacctctctagcacagcgaatgcgcgagaaatgatcgacatgcaagcacgcactgcggcttggagcgggctccacgaagtcgtcggatctctgggctgagactctatcaaacggccgcagtatgccatgactgctgcgcgctatgagactgcgtgagacgtggctctcttatacaatgcggatagggccgtagcgattccaacagagtatttctgttatccacccattctctcataagcatgttcgtactggccttcggacgcgttgcaccggttaccacgatcgtcgatatctcttgaactgtaactgcggggtagg

SEQ ID NO: 120580 - DNA, 187 bp, Glycine max
tacctttttcaatatatggcctgaatgtttcctgagtggcaattgttattcctccgccggcaagagccagcctcaacatcagacgcagatcattagtcgtaatctgcggttcaatcgcaaggtcgaaagttctcccgttttcttcaaatggccagcgataaggcgcaacctccggggactgacgcca

SEQ ID NO: 120581 - DNA, 270 bp, Glycine max
tttacaatttcaaactttctaacacaacatgtacgttgagagaattgtagaaacattatctatttcgcaagcaattcacaatgcttcgatctgaagacaacatgatttcaatacaaatcaattcacctagtcattaaaccaaaagaataacagatagacctggatatatgtcattaacctggactctattctgcaacataatctctactcactctatagttatgactccttagtcttactaactttacaactgtcatcatttttttttct

SEQ ID NO: 120582 - DNA, 189 bp, Glycine max
tgcatttggaattgcgttagccccactccatcattaggatttgttcctgccatctcaaacaaacaaatcaaacgtaacaagacaattatagttgctgtttgaatacctcactcactcaagtgtatcacacaattatggtttttctctaatgaaacactcttgccttttaccactctaattccccttgag

SEQ ID NO: 120583 - DNA, 383 bp, Glycine max
ctttgcgcctatcgaatgtgtgacaactgaataagaacttgggatgatacatctaaattgagtccactgctctagtctacccaatgttgtatctatctgcggcgacttcaatcaaccccaaaaatactaatctcacttaaatatatcatttaatatggcaaataaaagtataacacttattaaaatagggacaatatatactttattatataactctcttactaatgtggtatcaataaatgtatattgtttattatacgagatgataaattttaaagatattgtaaaataaaaacacaaattaatattaaagggcgtatgctaagctacatgctttgttttatcaaacactgaagcttggcttgggttgggctttgtatttt

SEQ ID NO: 120584 - DNA, 194 bp, Glycine max
tcctttttgaaatggttttgcaggcatactgaaaaccagttgaattctcagtgcagagataagtcaccccgaattggcctctccccaattccttcccaagtgtgtagtgctgtttaacatcctcaaatggcttcccagtgattgtgtcatgcttgtgaacatgttttgggcttggtggaggcctccaaggggca

SEQ ID NO: 120585 - DNA, 158 bp, Glycine max
  unsure (1)..(158): unsure at all n locations
aatagaaaggtttgatgnnttaaaattnttggttagttttggaggtnagatangtgatttatttttaaaagggtacattgatggnaagaatgaccggcgccttgacaattgctggaggtattgcattgttgcaggcaagagggcccttgatgatgcca

SEQ ID NO: 120586 - DNA, 186 bp, Glycine max
tgttgtattgcacatttacgtccgataacttgcatgggaatccagatttccacctctaactcagaggatacatacttcattttaaatactcggaagtaaaaagtttctataaaaaaaattgttaacatcccacctttatcataatttccattgaaagtttactactaaaactttatccaatattca

SEQ ID NO: 120587 - DNA, 187 bp, Glycine max
tttgcttgactttattggaggcacaaattttgaatattcaccaaacattcactaattcatcctagcaacggtgtctaatatgtgacttaaaaagagctcaattaagttgagccatatatgaaaaacggaaaccttgcagcaaaattcttattattttcaatacttaactgatggcaaattggcaatg

SEQ ID NO: 120588 - DNA, 224 bp, Glycine max
cacatccacatgataatgaagacatatgatccaggactgttatcaaacatatcatggaacatgataacagaaataaagactggcacgttaatactcaatactttatggaatataagataacatgactttcaaccatgtaataagtttcctttagtgttattcatccaacacactacaacccttggagactatatataatttcaattctcgactaccacgatgta

SEQ ID NO: 120589 - DNA, 180 bp, Glycine max
ttaactttataggattttacttccaggaagcatggttaaaggagtgaaccagctcctgaagaataatagcattgtccataaaggcccgaaaagacttacaagaatggggtcttaaaccggaactttggcctgatgaaaagggtagatacctgctgtatatacattgacaattacaaataa

SEQ ID NO: 120590 - DNA, 70 bp, Glycine max
accagggaatatttttgactaaggtaataccaagtgtacatattatacgtaaaaataggattcaaatttt

SEQ ID NO: 120591 - DNA, 186 bp, Glycine max
tgtatttatagacaagaccctcccccggtacacaaacgaaagaaaagctcaaacacaataatgacatagacaaaagtagagtatccaacaatattttgttatgccttatcgtttccttcaccactcccttttctactgattagggagaactaaatgcttaatgccacaaattgcaaagagtattac

SEQ ID NO: 120592 - DNA, 262 bp, Glycine max
cttataatctaatggctatgttttaatgcatgatatatagatattggtgatgacttatgtgctgagactgggatatgatccaactaattatatgttgttgggatggattgctggaatgatatgtgatgattgaataatgtgagatatgtgagagaatgagtgtgtgaatgaatgaatagatattaatttgtatatgtgaatgaagatgtgtttgtatgatttgaagagatatatgtgattaagatgtgtttctatttataga

SEQ ID NO: 120593 - DNA, 179 bp, Glycine max
tgatttcaactgaaattactttactccaatttcattgttgctagcaaatgctacagggcattttagggatttgcttaatggcaaaatgtccctaacaagtgtgtaattttggaggtggatggttatcattttttgggtggttttctgactgtaagatgcaaaatctggcctatttgttt

SEQ ID NO: 120594 - DNA, 180 bp, Glycine max
ttgcttgatggtgaatcaggaatgattcaaagatcttctgatgataacaatgatgataacataagatgatgacaaaggcgatgacctgaagctcaaagatcaatcaaagaacagctcaagcgaatgcaagaacaattcatgagttcacgataagaatcaagaagaattcacgagtcaaga

SEQ ID NO: 120595 - DNA, 79 bp, Glycine max
atactgagagctaccaaagctgtaactaaagactctggaaatgataaaaaaagagccaatagaaaaagaaagtacttaa

SEQ ID NO: 120596 - DNA, 183 bp, Glycine max
ccacatttcctactcccaatgtcttttctaacaaattctttcttcctacacttatactgaccactcctttcacaaccaattaacacaaatgaagttcttcctctactaccagtatgtgtgtcagacctcataatgattacaacaaatccgttttcatgggcaaccgttcgagcccatagcaaa

SEQ ID NO: 120597 - DNA, 81 bp, Glycine max
gttcgtacattcccactcaccgagctaatgaagctgggctatgagactactacatatggtgctactgcccttcgcggaact

SEQ ID NO: 120598 - DNA, 269 bp, Glycine max
  unsure (1)..(269): unsure at all n locations
cttcctctacagttatatcatgattgcaaaactgagtgagctcacatacannggtataataaacactacctcaataactgctcacagctatatatgtccataaggcaaatatatattcaacngatgcaatttttactattatcaaaactatgaatcctgagtgagaagacatttaaaacttatactcgctctgttgcgtgctgaagcacatctatcgtggcatgttgataactttctatcttacagatattgactttattattttaaac

SEQ ID NO: 120599 - DNA, 188 bp, Glycine max
tgagattgataagaatttaatgttggagaaagcttaaagtgcaattagagtgtaatttgcttttgggaaatattggagttcttttagggaattgtgtgtgcatagtatttgtatttgattctctaatagtgaaagttgtaagagatcttagaaaaactagatgtaggtcctgatttgactaaactagt

SEQ ID NO: 120600 - DNA, 177 bp, Glycine max
  unsure (1)..(177): unsure at all n locations
ctaatgaacaaggcgaacaactatactttttagtcaactgnggtgaagactgactttagctagggagaagaacaataaatgctgtctattttcttctttgtacaacaggttgaaacataatgtgactgtgttcaaaccatttgatcactttcacatcttattcaaaataaatttaaa

SEQ ID NO: 120601 - DNA, 194 bp, Glycine max
tgaaactcggcttggaggcaaacttggagatattacaagtaaataaacaacggctaagtcacaaccgaagtaaacaaagacacgccaacaaagaaacggggaaagaccgaaattaacagaatctgattagatcccaaaggggaaaacaaatgaggtgggaaaaaggatgggactacacatatatgatacaatca

SEQ ID NO: 120602 - DNA, 194 bp, Glycine max
tttagcttcatgtaagaatcaaaggtgattcaaaggtgttttgatgataacaatgatgataacaaaagatgatgacaaaggtgatgaccaaaacctcaaagatcagtcaaagaacaactcatgtgaatcaaagataaatcatggaacaactcaagtgaatcaataacaattcaagagttcaagataataatcag

SEQ ID NO: 120603 - DNA, 214 bp, Glycine max
tactgatgagctaagataaatagagactgggagtgacctgcccgataatttatcttaacctatttagaggacaaattcaaactttatagatattagacattaaagtgctacgctgaatatatgataaattatactagtgttgataaatatatatggttacatgaatcgattaagacaaaagtcacttactttggttggcgtcaattttgataac

SEQ ID NO: 120604 - DNA, 185 bp, Glycine max
tgtcatggatttgtttgtgcaaagtatcattgttttccttatcaattatcttcacagactcatatatttgtgcaatcatcaatttttttttcttaccaattatctgcataaactcatctgtttgtccttcagaggctcaacgtctccactcaacaggactctgatcccaacggggttaaagccat

SEQ ID NO: 120605 - DNA, 180 bp, Glycine max
tctctttgaagcttctcaaggaggtgaacttagttattagaggggtgtatgtagctaagctctagcttctcaaggaagattctcaaagaagcttctcaaggaagctacctaggctataaatagaagtatgtgtaacacttgtggtaactttgatgaatgaaagtcttgtgagacacaact

SEQ ID NO: 120606 - DNA, 108 bp, Glycine max
aaaaaggtaacaacccttgtcataatgccaaaaaaagtagggtcaaatatttactgttgaattatttgtgtaatttggggcacaaccctttggatggttaggaacatt

SEQ ID NO: 120607 - DNA, 194 bp, Glycine max
tttttgcttaagttaatgctatatataggccatcaaaatcttcttgtgatgaatttggtgacaggtggtgaatctaaataatttatcggggagtaacatgttaatcaatgtttttcattaacacccaatggtaaatttactatggtttgtagttgaaattttgtatgtattacttcgatcgaagagctacttat

SEQ ID NO: 120608 - DNA, 160 bp, Glycine max
tggactgagccagagaagaagaacaaatgaacaaagggaacaaagagccatgtaccgggcaaaatagggtgcagaggagtcaaattttgattcggcggaacattaggagggaatgcaactagagcaagctacgatcgagggcatggacttgagtgaggtg

SEQ ID NO: 120609 - DNA, 242 bp, Glycine max
  unsure (1)..(242): unsure at all n locations
gaaacttgatcgacctacaaagccacatcactgcgcattggagcggtctaccacggaatcgtcggatccctggggtgagacctctgatcaaactgccacagatggcatacatgctggccgactatgagctgcggatacgttgctttctatacaatggggataggcgtatcgattcaacagagattctgatatcaccttctccatagccaggngacggtgcgctaccgattcaccggtacccg

SEQ ID NO: 120610 - DNA, 188 bp, Glycine max
tacctttttcaatatatggcctgaaagtttcctgagtggcacttgttattcctccgccggcaagagccagcctcaacatcagacgcagatcattagtcgtaatctgcggttcaatcgcaaggtcgaaagttctcccgttttcttcaaatggccagcgataaggcgcaacctccggggactgacgccag

SEQ ID NO: 120611 - DNA, 191 bp, Glycine max
aagtggctgtctatacatgctttgagaaaaataatgcataattatggaaggaaacactatacacacccacttgtacacggaagacataacagggagtttttatcttaccagacttcttagtgatttaaacaccaccactgtattatttcggctgtgcttgtctaatttaatccaatttttaggcatatatc

SEQ ID NO: 120612 - DNA, 195 bp, Glycine max
tgtattcgattacacacatattggaatcgattactagaggagtttttcagaaaacattctcaacagtcacatctttttgtgtggttcttgaatggctatcataggcctatatatatgtgacttgagacacgaatttcataagagtttttcagaacaaaaagatcttatcctcttataaagcaaaatcgttttatc

SEQ ID NO: 120613 - DNA, 207 bp, Glycine max
aatactattttattaaatgggggtaaaaaaactactatatcgtttattttcaaaaatatatcttaacctctatttaacattttattcttttatatcgaaactatatttttcttccttatatagagaggaacatttcgagatccaacttttcttaatatagctatatactgtggtagccctctcccgagtgtaggaggtcgttgttac

SEQ ID NO: 120614 - DNA, 185 bp, Glycine max
tatttttatatgcaaaacacatggagcacgttcaatgctccatggaggggtatcactccaacccccaacaaaatctacacgaactggtaattctacttctacccttctaggatggaaaggcagatgagtgcagttatcatgttggttattctggaactcctgacaggaaaggctaccaggagact

SEQ ID NO: 120615 - DNA, 190 bp, Glycine max
tttgcttctattctttgtacaagaatgaggctctgataccacttgttggacaagtggcctcagatatcttaagaagggggagttgaattaagatattacaaactacttccctaattaaaattctattttaatttcaatgcaagttccaagttcccttaaaaatgaactcttaaataatgattcaaattaa

SEQ ID NO: 120616 - DNA, 245 bp, Glycine max
  unsure (1)..(245): unsure at all n locations
ttattgcttcagatttttgacggttgccaattagatggatttttggggttcttggctctcaaattttttaacccactatttaatttttaaaatttaattttttttataaaaatttaaatataaacacctaaacggctttatntgaacggaaaaattaaaaaaaaaaaaacaacccaagaaataaaattctttttgaaaaaataatacaaggaatttaaaaatgaaaaatttttggaaaaccataa

SEQ ID NO: 120617 - DNA, 249 bp, Glycine max
ccattcgtcttcattgggacacggcgcatctccttgcggcttgagacccctttgcagtcgaggctcataaactaaaatgctgacgctcaagacttgctcaaaggtcgagtcagttgacagcacaccaaaatttgagagttacatctacttggatcccttaacaaaatatgttgacaccctgctgaaaccctgatgagctgggtttacctctgtaagaattactctagccgctctaaacttctcgcacta

SEQ ID NO: 120618 - DNA, 180 bp, Glycine max
tgcttttgattccttctaagaactgcaacaagcttataacaataaacttggtcttctcttaattgactttgggcttggtgaccacgatcaacaaagcactttcggcacctactatatgttgacttcaccaacgctgttattggaatgctgcgacaatctttcaacaccttattcacacat

SEQ ID NO: 120619 - DNA, 173 bp, Glycine max
tcggtttttacaagagcaaattggaatgcttgaatcgcacactcatatcctgaattaaattaataagagggcggtccttatgcgcacagcatatagagatgattccagcctttgaagacaattttgcaggatctgcaatccattgaatagaggaaggccaccatacttgattt

SEQ ID NO: 120620 - DNA, 174 bp, Glycine max
tcttgtgtagccgctcttggtgctcagaaaatcccaaaaacaaatccctcttattactagctattttgaattctttagttcctgaatatacaaccttcaaattgttgctcgttcccctctttcttttctgcaaaaaagaaaatcaatatcaaagaaaacatggatgaaatccta

SEQ ID NO: 120621 - DNA, 207 bp, Glycine max
tatccaattctcaagcttgaattttaagaacggtttcccggtttaattacaaatggccataacttttcactccgaggtccgattcaggcgcataatatatcgagacgctcaaaattgaacaacggaagctctcgtgaaattcaaatattcatcacttttaactcggatgtcagattcaggcgcataatacatagagacgctcgaaat

SEQ ID NO: 120622 - DNA, 255 bp, Glycine max
  unsure (1)..(255): unsure at all n locations
acgtgcttgtcccaataacgngccatgtaaaaaatgaaggaaagggttgagaatgatggcggcttgaataatctttggtttatgccatnggtgcattatgatgctaatatgttaacgagggatnatgataagatattgtactatncagggtccacaaaatacacatgacatcttacgaggcagcttgagacacacatcaacccttcatgtcagccgtggcacatgagcacaaacatccagccgttagcagtcgga

SEQ ID NO: 120623 - DNA, 192 bp, Glycine max
tacctttaaaataaattttattcaagaaaatatttatttatgaaattatttagaactattttatatgatttctaataatttttttaaaaattgttgagtcttaagtatgcaattatattaacaccttgagaaacaaatttgtcgttcataatgatcctatctaactcgagcaagattgtctttcacaaatga

SEQ ID NO: 120624 - DNA, 210 bp, Glycine max
  unsure (1)..(210): unsure at all n locations
ctgataataaacaagatagtatatcaccactcaatatcaatactatcttcctattagccatacttcagaataggacatatcangtccagatctatcataatccctactactgggatgacgggaggtaccacataacagctctgctagcatagattcatatctaagatagtctactattttgctctatacatatgataagatacataactt

SEQ ID NO: 120625 - DNA, 189 bp, Glycine max
tgcctttttgaaggcttttgtttctgaagtcaagggcgttatgatggaaaacattgaaaaggcaagacttatatacaaaatggcattgcttaaagttctttaactgagttgatgtcaccattcatcaaatatgtagtactaatttggattaaatatttcattaacttttctcataggttcttgatcgtg

SEQ ID NO: 120626 - DNA, 194 bp, Glycine max
tggttttgggcaatattaccccacctgacgtccccaaggtctcctgacccccgcgacatatctccaggtaccactctgtggtcaacaataaaagcaggaagtttcacccttcaacacttcctcatcgcaagcttgtaggattatggggtacccatcacatgtggtactaggtggcggtcgggcgatggtgcaca

SEQ ID NO: 120627 - DNA, 183 bp, Glycine max
tgtataatggctagacatgatacatgtcagggcttggtttggttcaaggataaaagggatgccccacattatttccatgacacaaatgcaaaaatgatgatttggaaattttatgcaaaactggtcatgcatgcgcctatgcggacgctcaagtgtcaaatttttatggtcatgtgatgctag

SEQ ID NO: 120628 - DNA, 194 bp, Glycine max
  unsure (1)..(194): unsure at all n locations
aatacttaagcttgggtttttgnnttttggacccatggtgcttatgttggtcatacatgtagactttcgttgttaaataaggacaccatcggattgcgttcgaccactgtttacaggcattattgttagttgttcttctcgactgctatagtatgcaatgttctgcgaaagtcgtatttgaggagttgcaattt

SEQ ID NO: 120629 - DNA, 269 bp, Glycine max
  unsure (1)..(269): unsure at all n locations
ctgcactatataatacgtgtggttattactaaagatggactttggaatattaatggtcacagatttttataattattanatacttaaattgtgatatatcatagatgctgaacaaacgaccatgagatggcacatattatcatactctanagaaattattgaatttgatatttactttttatactttataatatgtggtagatttatataaagtattcggcttgtctatgactagaagtcaaaatgtcaagaaattaatttactatcta

SEQ ID NO: 120630 - DNA, 172 bp, Glycine max
tttagcgccttaatctttgctgattttctatttatcctttaaattgatttttatggtgtcacatagtttggtttatagatcagctgaaaaatgaaactatgaaactaaaaataagcaaattttataagaatattaagtcaaaaaatatttatgtcttaaacgaatcataact

SEQ ID NO: 120631 - DNA, 221 bp, Glycine max
  unsure (1)..(221): unsure at all n locations
tctaaagcttcaactttcanaccatctttccaggggtggctgtganaactacttcacatgtgattttgatgggggcctattgcaaagttgtaaaagccttggtcggaaagaaggtanttgcctatgttgtttgtgagatgaattntctccagaatnnttacctgggttaaaatttatcagaagagaaaatcagaaacccttttgaagttattcaaagagtt

SEQ ID NO: 120632 - DNA, 153 bp, Glycine max
cggcttctacctctgctcacttacttgacatgtttcttcgagctttatgtgcgatggtaagcaacctacttcacatactggattatagcagatgcgcgtgtttctaacctccgctaaacgtccactatggctatacgtgtgaaacagtgcaaa

SEQ ID NO: 120633 - DNA, 185 bp, Glycine max
ttgattcaaaagcttacttaccataaaccttgaaccagggtgagaatatcaatccttgccctcggaagaaaacacaaaaagaaggaaaatccccaatcaaagaaagggagaaagcaaaaagggaaagaaaattcccaattaaaagagggagagaaagcaaaaaaaaaaagaagaagaaagaaaat

SEQ ID NO: 120634 - DNA, 176 bp, Glycine max
taagttagttccaaggtttacgggcgaagcgtggaaaggcaacggggtgaatagcggtcaaaaaagaatcactaaccagcgcaccatggcatcgggatacagatctcggattaaaagggcatccgggttacgctgaaaaccaaggggtccagaccatccatcatcaaataagttat

SEQ ID NO: 120635 - DNA, 173 bp, Glycine max
ttgatatagccaagagcacatgggacgaattgtgcaggccaatcttggagggggaggacgcgatggctggtgctagcgatgagagggcaggactgagcgaagtacccacacgttattgacaaagtggactggaatactgtacactgaaaggacgaaggaccacgtgctagatg

SEQ ID NO: 120636 - DNA, 180 bp, Glycine max
cttcattggaggataagaaagaaggagaaaaagagagaggggggagcatgaaattgaaggaagaaaaagggagagaagttgaactttgagttgtgtctcacaagactctcattcatcaaagttataacaagtgttacacatgcttctatttatagactaggtagcttccttgagaagctt

SEQ ID NO: 120637 - DNA, 133 bp, Glycine max
tctatacaccactcaagcttttttttcaagtttcctttcaaaagaagttgcctacaaggaaaatgaaggcggagattgtaacttccccaacaactagagctcattctttaatggaaagccttttagtcacact

SEQ ID NO: 120638 - DNA, 287 bp, Glycine max
tctcaaagctatacgatgcgagtattcaacaagatggaactacaatcggaaagatgggaaattggtaaattgggactccttattgcggatggaaattaggggtggaaatgctagtttgagggttttcaacagtatcatgatagaataaaaattgggtggttttgtaagattggtggacaccagaaccttgtttgtgtacttatgttaactctgtgcaaagaactcctaacttctgaaattgtgctgctagtcatgtcccttgaaaaaacctctgagatatgtgagtg

SEQ ID NO: 120639 - DNA, 107 bp, Glycine max
gttggtgagcctaaggggtaacacttgtttctccgtaactcattttattttattatgaccacccatgggaccagaacaatttgtttatgtttttatgcagtgggcat

SEQ ID NO: 120640 - DNA, 194 bp, Glycine max
  unsure (1)..(194): unsure at all n locations
ctgccttgaattataagacatgacatgagagctatctgtttctttgtgatctatgtatcttcangacgattttaatgacttcaatcttaagaacctatcaggaatgacttaaaaagataggagcatgaaatctcagtatggaatgacaatatgaactttagagatgagagctcagagatcatcctcacaacata

SEQ ID NO: 120641 - DNA, 189 bp, Glycine max
tggccttaaatcgacatcttgacacccaaatttggttcgccccagatatcaagattgggttcccatgataaaagaccccattgaaacacaaccttagactttttgaaccttggcctataaaaaagaatcctcattccttccccgaagcaaaggacagcggaatcacctcaagggagagcgaatagaatg

SEQ ID NO: 120642 - DNA, 185 bp, Glycine max
  unsure (1)..(185): unsure at all n locations
tgnattattatggggtacccatcacatgtggtactaagtggcgggcggggcgatgagtgcacagacaagtattttcacatgcacaatgcgcgcataaagccaccatcccctgttgcccacctccaactgagctcacgtactcccacgtagcccatatcctcgtttctctcaacaccgggtcccca

SEQ ID NO: 120643 - DNA, 182 bp, Glycine max
tctattgaaggttttttcctaatttctctacaattgcatcacctctcaatgagctggtgaagaagaatgtggcatttacctggggtgaaaaacaagagcaagcctttgctttgctcaaagaaaagcttactaaggcacctgttctagctcttcctgacttttctaaaacttttgagctagaa

SEQ ID NO: 120644 - DNA, 150 bp, Glycine max
  unsure (1)..(150): unsure at all n locations
tatatgacattcgaacaatatagtatgtcttctactatcngcttagtatgactaatatattatgaactatggtatatgactatgtggctntatatatctgatctattcatgtctctcgcttcatgttcggttagatctttcatgaatgac

SEQ ID NO: 120645 - DNA, 181 bp, Glycine max
ttgcttatttggtcttcgccgacaaaaggatggaaacgggtctaaaaataggcaaatttgatcatcctgctttgatgaatgagaaaactagggcaaatgaaaaggatgagaatgaggaaggaacccgtgttgtggctgtcattcctacatggccaaacttcccaccagcccaacaatgtca

SEQ ID NO: 120646 - DNA, 209 bp, Glycine max
  unsure (1)..(209): unsure at all n locations
cgctactatagaatattttagcttgnttttggggcttttatggaggctggatctttgagcttcaatggggtcttttaatggtgattttccaccatggagatgcagcggaagacaaagaaaaagaggtgagaggaggcgccatccattaaggaataagccatggaagaaggagcttcaccaccaagatgagccttggataagaagcttgg

SEQ ID NO: 120647 - DNA, 174 bp, Glycine max
tcaacttatagcccacaactcggctgacaaaatcagatcaccagcacaaagccgaagcctagatagggctcgcgcccctaacgcaaatctgcaccgcataccgcacaagatcgaaaacaggcttaccacaggattctcacacacaaaggagggacagaaggggcgggcttagtg

SEQ ID NO: 120648 - DNA, 170 bp, Glycine max
tcattggagttttgatgatgacaaaggtgatgacaaaaagcttaaagatcaagaacaattcatgataacaaagatgatgatctcaagaatcaaagaatgagttcaagattgaatcaagaacacttcaaggttcaagaggaaatttgatttcaagaatcaagaatcaagtt

SEQ ID NO: 120649 - DNA, 191 bp, Glycine max
tgcagtctctaggagcttcctagtatgtaccacaaaaaacgcagggggcttttctcggaaggcactaactaatccttggaagaattgaaccgatttaatagacccaccttaccctatagaaaactattttacactcccaataggcaccctgaatgacaaggcttaatcaaatttgtttgataaagacagat

SEQ ID NO: 120650 - DNA, 88 bp, Glycine max
acaacggactagtttatgagttaattctgttaattagattaaataaggctggggatttactttgctatgaatctgatgccaattaagg

SEQ ID NO: 120651 - DNA, 207 bp, Glycine max
tatccaatactcaagcttagatttatatacttttccttcattttactgtctttgggttgggcggccacgatcaacaaagtacttttaacacctactatatgttgatttgaccaacactattatcggtatgttgcgacaatccttcaaaaccttatttatacaatctgaaaggttggttgccatgtggccatatcgacatccttctct

SEQ ID NO: 120652 - DNA, 258 bp, Glycine max
  unsure (1)..(258): unsure at all n locations
tcttctctctctctgcttctactcactctttcttcctcttatntttcaccttctttctcattattttctttctggtggtattcttctctcacatatggtttcactctctgactgcacattgtactctcttttttttatgcatcttataacatttttctcaagcacctatctatctcactacaatgctctgttttgtatacacatgcattctcttggatttttatgtgctgcccaactatgatactttcactattgttg

SEQ ID NO: 120653 - DNA, 190 bp, Glycine max
tggatttaccctatgcttcgagtagattagggatgttaaacccttgctaagtgaaccactccaagtccaaatacctgggtattctcacattcttcactgcgtatatcatcttgaagtcgttcttcttactctcatccgcgaaccatgtaccaagcctgttaagagaaacctgagaacacttttcttgctt

SEQ ID NO: 120654 - DNA, 215 bp, Glycine max
tctatacaacactcaagcttcacgttctgcatttcttacatcagattggcataacgatgaagtgaaggttagactatagtgtatatattatattcaaccaaagcctcaaaatttaccaatcaaacttgcaataacatgacatcagattttattcttaagaacaattcttcagaaaaaaaaaagaaatataggttgaatttcacaacaataatcac

SEQ ID NO: 120655 - DNA, 185 bp, Glycine max
ttgttattactaaaaaataataggtttatataggactaatttagtcatgagcaaaaagattgagatttgaaatacattggagacaacacactatggagcagtttcaggcaatttactatttctcgcattaggtaactgaaatgactacctgacataaactcttgtgtgagctagtatgggaactc

SEQ ID NO: 120656 - DNA, 182 bp, Glycine max
ttaattcttctttttggacttcctctttcatcattgggttgattctcctgtctggttgtgctattggtttgaagtcctcttcaaggttgatgttgtgcatccagatggatgggcttattcctttgaggtcatagatttgtcatcctaaggcttccttatgcttctttagtacctccactagt

SEQ ID NO: 120657 - DNA, 182 bp, Glycine max
tttctttcagcacctgaatttgtcttgtgattttggctatttctgatgttccttccggggcggagttgtttgaaataacggttgaggtatttccctgaattgtgacagacatagatttctccttttaaaaaagcactatcggcatgcacaaaaaaatctttaatcgtatttcttgtgtcatt

SEQ ID NO: 120658 - DNA, 61 bp, Glycine max
gctgcagcttgcatccgtactatcgcttgatcacggaacaacatactcgtgctatctgcgc

SEQ ID NO: 120659 - DNA, 182 bp, Glycine max
  unsure (1)..(182): unsure at all n locations
tgcgctgcncgcaccacatcccctgaagtcggtgcgagaataatcgccgccggggaggcacaaatggcagcagctgcgccacgactgataccaacgtttaccatcaccggaaatagggttgccatcagcaaaacacccagaccggttgcggaagagacggccagagacatcagacaggcgac

SEQ ID NO: 120660 - DNA, 283 bp, Glycine max
gctgagctgtacaaactccgtgtatgcaatgacaaactttatgacggctttacgacaagacgtagcggatgatacgaacgcacgagcgtacaaacgttggctgatttttctctttcttctctaattaggattgaggcaagtgtgaaccctattctcacccccaccctttacaaaaatggggaggtgcgccactcctagcactgggttcactaagaatgtgccgcagtgtggtctcaaaatcaatgggcaggtagacaccctaatgaccgcaccccttttgggt

SEQ ID NO: 120661 - DNA, 182 bp, Glycine max
tgcttttgaagctttagggggctacttatacccttacaatagctaagctcaccccattccaaaatacatgaaaatacaatgggaagcttccttgagaagcaaggaaggtaacttccttgggaagcaaggaagaaagctttcttgaaaatcatgaggggggagacataccctaattccgtccg

SEQ ID NO: 120662 - DNA, 106 bp, Glycine max
catggaccgactctcggaaacctaatggcccttaactaccttggaatttgtcaagaaaatcaacttccaaaaaacgcaagcctcagcaatctttcttgacaatata

SEQ ID NO: 120663 - DNA, 201 bp, Glycine max
aaactaaattgtcataaagtctaacattgttagtatttaaactacacatggaatttaatgttgacatttatacataataaatttaaattattagtttttatactacactgttcatcaaattgtcatgggatacagtaatattaaatatactgcattttttgttgatttaacacatgaatgtaaattttcttattttctcta

SEQ ID NO: 120664 - DNA, 173 bp, Glycine max
tgagtttatatatcttgagacatagagaagaaacaataacaacaaacacggatgctgcaacacaagtccaaatgaaaggtaccagagacatgattggtggaaagaaaaatgcgtgaaaaatatacatggagtgaatgcagttcaaatctgaaccgtaggtaaggtaatagcag

SEQ ID NO: 120665 - DNA, 214 bp, Glycine max
ctttacaatccacacacagtttatacaacacttctcccacattcaagctctataaccaaccctcccacatgaaccctttccaccacacacaaggattgacaaactagtacccatcggatagactgtcattaccaataggggctactacagtatacttttcaatcatcaccttgttgcgaaccaggcatactgagttacgaggagtatgcgtgta

SEQ ID NO: 120666 - DNA, 181 bp, Glycine max
ttgcttggtttgaggtacttacccgttgaagatcgaagaacgatgaagaacgaatgaagaacgtcgaagaacggttgaaacctttgcgagattcctcacggaaaacgttacggaaacgtttcggaagcgccttggcttagattttcttcacggaaacaatttttccaagcaaattcgaaag

SEQ ID NO: 120667 - DNA, 190 bp, Glycine max
ttgcctttagggcttgtacgtcatcactttcttccaaagctttaacctcattgtctctcacagtctttagatttgggagccaatccaatccttgtgtccggactctcagccacttatgatagccgccgatgatcccattactgcttcccctaagctctctgtcctttcttcacgccgcatcccatgcctt

SEQ ID NO: 120668 - DNA, 189 bp, Glycine max
tccttttatgccctgattcatgaatgttaaatttattttagatccatcgatctcactttatatcacttgcattcattttattcaactgtacttatttattcgcagctccaaattgcaatctcgagtgaacttcgtgagttctagggttccctaatgtcattgaccaagctgaattaaccatggaacaat

SEQ ID NO: 120669 - DNA, 210 bp, Glycine max
tctaatcaatactcaagcttactctgtaagccgggtttaactattttgaaggctaacctacctaaccccagacgccgccctttatattaaaaagttatggaaataatattgtagattgttaaactctgaaaccaaagaatcttaactgctggaaaatgaaaatagcttggataaaatggatgaacatgggtttcctgtgccccaagaaca

SEQ ID NO: 120670 - DNA, 191 bp, Glycine max
  unsure (1)..(191): unsure at all n locations
nctatttaagctgaactattttatcaataaacacaagttgagttttattcagaaaattagagtttatctcttttatcttagtgagagtgattctcctaaattcttgagtgattcaagaacaccctgactgtatcaaaggacattcacaaccgttgtgtgttgccctcgctggaaagagtgattctttcctt

SEQ ID NO: 120671 - DNA, 255 bp, Glycine max
taatgaatgtggtgacaaggttctctcgtacggaagggttactcaatggcttaattaaactgtactactaaaatggtggtgctaacagctctatgagtggagtgtcggacataaccttacagcatcgaaaaatgggtattaggggcttcacgtttgggacactttcttggatgtgagtgtctaaagaaggttacttataattgaacaggttgaatgacaggggattccataattgcaagttgttcttcccattgt

SEQ ID NO: 120672 - DNA, 180 bp, Glycine max
tgtgcattcaatatcctgatgagggtgttccatatgttctcaagactggactaatacatttgctgcccaagtttcatggtcttgcaggtgaagatcctcatatgcatcttaaggagttccatattttttgttccaccatgaagccccctgatgtccaggaagatcatatatttctaaagg

SEQ ID NO: 120673 - DNA, 181 bp, Glycine max
tggatttccttttagtagggaatctatccttcctaagatggagccaaacccagtcaccctcattaagaactagctcttttcttcctctattgcctctagttgaatacacctttgtttggttctctatttggttcttaaccctctcatgcatcttctttacaaattctgacctagattcccc

SEQ ID NO: 120674 - DNA, 83 bp, Glycine max
atactcgtgaacaaatggcataggtaagaggaactgcgatgctcatcgcattcacacccatgataccacataaactctctccc

SEQ ID NO: 120675 - DNA, 183 bp, Glycine max
tggggtttttacatcacgatttgtaagacggttgcacataaccgtcttagaatgctgaacgatggcatttttgcggttatcggaaactcaaacagagacgttattgctgaaggaccatctttgcttgagaaacccttatttataatgggatgtgatgctcaaggctatgtcattgaaagattt

SEQ ID NO: 120676 - DNA, 184 bp, Glycine max
tgggtttcttgattggatagaaaacgatctccatataattctctagatctattattgacgtgttaaaattggccagatgcagtatggtattgaaactgcggacaccttggatcaatgaaataacgagctcccaactaactaactaactagaggaccaaccatatgccatgacctatgttaactg

SEQ ID NO: 120677 - DNA, 180 bp, Glycine max
tcgcttgtacggtctgaacaggggagaggatccccgtgagaaagaatcggggaacagttacacagactcagacgacgacagagacaacagcggcaacagcaaaggcagaaacagaagcggaaaccacagcagcagcagcagcaaaaggaaggccaagcctcccgagccccaacgggagga

SEQ ID NO: 120678 - DNA, 175 bp, Glycine max
ttagttgaaaatcaaatgtaaaaacaagttaagcttcgtgtcgataagaactacatcaattaaaagtgaacatagtgcattaaacattgagtgaatgacaaatgctacatatcctaacttgttgaaggctacacataattggaaaggcttgatttcgtctacactttaattataa

SEQ ID NO: 120679 - DNA, 178 bp, Glycine max
taggtttccactgcatgtgacccagatgcaccgacacgcgctggtgggtggcaatgcactgttgggaatatgacagcaacagtcacgtatttgcccattgacgcagggaaacgtgagggaacaaaactgccgactggtgctggacacggcaccaaagagtatggctatgctgggcttg

SEQ ID NO: 120680 - DNA, 447 bp, Glycine max
  unsure (1)..(447): unsure at all n locations
agctganggcaactggatgcgttggtcaacttggtaacccagctggctttgaataataaatctgtacctgtcgcaagggttgtggtttgtgctcctctgctgaccaccatacagacctttgccctttcatgcagcaacctggagcaattgagcagcctgaagcttatgctgcaaatatttacaatagacctcctcaacctcagcagcaaaatcaaccacagcagagcaattatgacctttccagcaacagatacaaccctggatggaggaatcaccctaccctcagatggtccagccctcagcaacaacaacagcagcctgctccttccttcaaaatgctgctggccaagcagaccatacattcncaccaatcaacaacagcacaacccagaaacagcaacagtgagcccctcacaacttcctcaagaactgtgggcaatgactatg

SEQ ID NO: 120681 - DNA, 250 bp, Glycine max
ttgactgaactgacctccgcgagaatcggtgttgtgaagattccttatgaaactcgagccttacgtcacactttgctgtaatagctaggcccacctgcttgagacgagaacttagaactgctcttcgcgcgctgtctgttagcaaagctctccaccccgattccagagatgctttaaaatacaaaccaacagtccctacgtctgctactgctctaaaggccctcaaatacaatgctgagaccctatacta

SEQ ID NO: 120682 - DNA, 459 bp, Glycine max
  unsure (1)..(459): unsure at all n locations
acttccttgagaagctagagcttagctacacactaccctctaataactaagctcacctccttgagaagctttcttaagaagattcctaaagaagctagagcttatctacacacatctctgtaatagctaagctcacctccttgagatgagaagttagagcttagctacacacccnctataatagctaagctcaccacccccattccaaaaatacatgaaaatacaaaaaaaaagtccctactacaaagactactcaaaatgccctaaaatacaaggctaagaccctatactactagaatggccaaaatacaaggcccaaaagaaggagaaacttatgctaatatttacaaagaagagtggatccaaccttgacccatgggctcaaaaatctacccttaggttcatgagaacccagggccttctttagcagctctagcccaatcctctatgagtcttcta

SEQ ID NO: 120683 - DNA, 120 bp, Glycine max
ccaacatgtcggaaatcttctcgcatgaacgggaatagatcccatgatgtacatgccccttaatagccgcaacgagtccgttgtttcaggattccatctgctaagtctacccttctttgc

SEQ ID NO: 120684 - DNA, 405 bp, Glycine max
  unsure (1)..(405): unsure at all n locations
tgacaagacagtacacactgctgttttctcaacaagatanaatatggaaatctactctaaagatacatctaataatacccataattataacatgtcccttattaaccgccaagcgaataccgttatcttgctagggaatttaatcttccataattccttacaccattcctcttgccgacctcctgtaatagtttccaaaatcagattatatgcgctgcttgtcgaataatttcctgattgatcacctaaccactcccattgatctgatccttgctgctgaatgttcatgccttcgatctcccttatganattgatggctgactacgattcattatcaaacagcgatcttctccacataaaatgccactcccaccctgaatgtagatgatgtcccatctgtctaat

SEQ ID NO: 120685 - DNA, 211 bp, Glycine max
acacaaacataaatcctattgggaactatatgcatgcttggatgggttacatcccaaaacaacatggaaatgtctattcacatattcctttatacacaatcgattcgacttggtcgagtatatcgacttcgatcatcgtgaatgtttaatatactaacaatgaaatgccacgggagttaactgatatgttcatttgtacttgcacgacgat

SEQ ID NO: 120686 - DNA, 488 bp, Glycine max
cagacaattgttactcaaccactcaccactcaatctactattatgcaaccagtgattcttgaagttgctatgactcaaccacattatagtcaaataactgatggggcaagggtaactattggtgctttgtcttcaacacaaacataaatcctattgggaactttatgcatgcttggatgggttccatcccaaattaacatggaaatgtctttccagcatattccttttattcaacaatcgatacgatgtgttcaagtagatagactacgatcttcgtgaatatctaaattcgaacaattaaatcaaacgggagtcaatagagatgttcattggtacttgaacgatgatcagaatttggcaattccaactagaattctgaatctaacattgtctccatttcaacaacaaataaatcatagtaaccaaaaaatggtcaatatgttaaccaaccaattcacaactattttcaagtctatgattcataacac

SEQ ID NO: 120687 - DNA, 444 bp, Glycine max
  unsure (1)..(444): unsure at all n locations
ttccttataatattcttctcttactgtgttcacaattaaatttatcctaagttcttttttaaaacttcgtccaatgtataggctatcgtgattattaagcccttcaaataattcttttcgaactttcattttttgtagaatagaaaccatcattataagtcattcacagaaattcctataattcgtctaaattgttcaaataaatttaaaaaatcaaccaatttttttataataataaaaacttaaattatgttctactttgtaccactaactaccagaaataagaatctaaaatgatttgataattgctttgtatcaacaccaattcaccagagtttacatgttactntggagctatatgatgaaacacaggttaaacatggtacataacacaaggataacctgaccagaaacaatatcctaccaaacaatgttatcgacttc

SEQ ID NO: 120688 - DNA, 435 bp, Glycine max
  unsure (1)..(435): unsure at all n locations
tctatgtacccgtagtgggccacattgcgtntcttgcatcttgattctcgctntgtttactttntataccccctgttgacgtgcttaagccattntacttaagtcgtgtctcgcttaacttaaaaataaaataaatttccaccgaacgtttgaattgtattatccattagcttcggttaaaataaattccgaccgttcggtcatgccgtaatcacgttggaaatcaaaaagaggtaaaaaaataatataataatcaaaaagactttttttagtagaaataaagcggaaattaatcagacgttttctctttgggatttctcattcttaaccgaattgattaataactaatgtgaaactaatgctaaaaatcaactcgcctagtcaagctcgtccacanaaataggctgttgaagnttgtcatttcaatttctcact

SEQ ID NO: 120689 - DNA, 245 bp, Glycine max
  unsure (1)..(245): unsure at all n locations
ccttggaccatgttactaaagcggagagggacaacggctccccatgttctaatttcattgcctaagcctcttattcaatactacctcacatagcaggcgttataactaaccatgactgccccactaatataagcacattctcacaatttggagcgccttaagatgtaaataatataccantggggagctatacacatcaagggatgaatacttacttgatggagagtattgttactccaaaaatg

SEQ ID NO: 120690 - DNA, 336 bp, Glycine max
acgaaatgaggctcccatatgctactataagctcgacaaccatggattcttacctcattggctaatggactctgaattcttgtaagaagcatctaatagcgtgtctaccttacactcattttatcttaaagagaacttcatcgcatgaaatagatctatccttaaccaagttgatgaataagcggacccctaccatgcatatggactttcatgtgattatccttgacctaacattgaccgactcccacgccggtagcggctacgagcttccactccacaggatgcagtgggtgtttaatgtttgcataggcccggaataacatgtgatcctaatta

SEQ ID NO: 120691 - DNA, 478 bp, Glycine max
  unsure (1)..(478): unsure at all n locations
tataaaactaagcttctanggatgaattganaacctggttcgtaatgtcgacgtaaaatctcgaattatggatcagtatgctgactggaaaggcgtacgttatcgtctgggcggcagcactaaaaaaggtatcgattgttctggtttcgtacagcgtacattccgtgagcaatttggcttataacttccgcgttcgacttacgaacagcaggaaatgggtaaatctgtttcccgcagtaatttgcgtacgggtgatttagttctgttccgtgccggttcaacgggacgccatgtcggtatttatatcggcaacaatcagtttgtccatgcttccaccagcagtggtgttattatttccagcatgaatgaaccgtactggaagaagcgttacaacgaagcacgccgggttctcagccgcagctaataaaccgtttggatgcaatcccttggctatcctgacgagttaactgaaagcact

SEQ ID NO: 120692 - DNA, 354 bp, Glycine max
tttgatctttggtcttctaggtattgattagacgtataagctatcggacaactctcattccaaccgtttgacagcatcattctaaactttgatgtcatcatgagaagaattcatatttattttggctgttacattccaactgacctagccaaaatgataggtatccatctttgattttggactgttgcatatcagtctcataagcggtgtttatcacacacatcgagtggtatgcatggaacaaccagaacattcaattttacctgctgcttctatttttcaaaattattctttattggcttgatccctactgatgcttctgtctcttcctttatagggaacatgtggattcat

SEQ ID NO: 120693 - DNA, 326 bp, Glycine max
  unsure (1)..(326): unsure at all n locations
agtctccatgtatcgactgatgagtctagtagcatatagaatggttggtcttatgcacatcanatatcataaactagtcacccaactctcgaaaattgtagcatccaccttntttgcttcatcgaaattgataacttattttgcacaccatccgtgttcaattggtttcaactatcatcttgatttcttgagcactctttatatagtttgttgtgaaaggnaattcattttcctttgcttacttcatgcaagatagatgacatattcgatatggtatgtgaactcctgaaactacttcttgacttttaaatactggatacttccgg

SEQ ID NO: 120694 - DNA, 439 bp, Glycine max
  unsure (1)..(439): unsure at all n locations
tgcttctcatgttcatgaccctcattctttaatgttctatattacattctataaccattttcttttacattntatatatcattcaatttgaaaaagcaatctacatccaaaaagaaggcttaagatagttaccatcacttctatcatggttaagaaattcagaggttcgattactttcacacatttaaaatccttaacaaaatttatattctagactctatatatgttactactctatctcttatatatatatatatatatatatatatatatatatatatatatatatatatatatatatatatgtgtcagagagaactacataaatgagcgagtatattatactttatatttaccttacgcgagtgtatatgtcctctcctatgaaatagaaatacttctctacattacatttctctaagcctatatattatatata

SEQ ID NO: 120695 - DNA, 289 bp, Glycine max
gctgtcttctttccttaatggggaaggagggttgttctttttgttcaccctcctggcatctgaggatcacttaatattagtgagaatatctggtctcgtgaagaaaatcctagcccaagcgcttccgagacgtttctgttggtgatttctctacaattgtccaccgctcttcggtgatctctcgtcggtcgtccgtcttcaatccgtgagttcccaaaatccaactattcttttcattccactgtcccttagtggttcccatttgttcacatgctttatttcatttcat

SEQ ID NO: 120696 - DNA, 346 bp, Glycine max
  unsure (1)..(346): unsure at all n locations
ttacctaaataggattcacatatgtgtccaaagaaataggttgaacctgttcacaaattctatagattctaagacagtattttaggaaattgtcttataatatggagtttctaaaatgacgaaatattaacgttntaaacattttttaaacaataaacaaaactatctaagacggcttcttaaagaaccaatatagaaactgacatactaagacgatggaaaaatcgttggtgaagtgttcatnttctacaataatgacttcataaacgattttagaactgtcatganatgcgctaaagaaccaacttggaaaacatttnttctagtagtgttgactaggtctgac

SEQ ID NO: 120697 - DNA, 468 bp, Glycine max
  unsure (1)..(468): unsure at all n locations
ccttatctagctatgagagttcagtgtttgatgatgagaaaagccctttgtttgatgtcacgactgagtaagcatgttcaagatcaagattaaagaaaagacatcatgaagaatcaagattcaagagaagatgatttcaagattcaagagaagaaaccaaatagctacatgtcaagactttacaagggaagcatttaaaaagatntctcagaaacctaacatagcatagttttgttttacaagataagttgtctcagatttttctaagttaccagagtatttactctctggtaatcgattaccagtttcctgtaatcgattaccagtggtaaagtttgatttctaaagcttttaactgaattngcaacgttccaaatgttttttaaatggtgtcatctatcaccatatatttggnatcaattaccagggatctgaacgttgtaatcaaattcaattgtgaagagtaca

SEQ ID NO: 120698 - DNA, 513 bp, Glycine max
  unsure (1)..(513): unsure at all n locations
ctaagctggacgcanatgcnaacgggcaataaaatttactcggatgttcgattgagtctcgtaatacattgaaacactcgatatngaagacagaggctctgtgcaaattcaagcgacaataagtttgatgtgaatcttactaggcggatcattagatacaagctacaaaggtttggatgacgccacttccggtgaaagaagataagtcatggtagatgccacttccggtgaaagaagataactctgtgttgacgccacaaggattacctcgataagtctgagattggttcaacaaggagctcagagagaaactctcaccaaatcttatcaaatgccaaaagttttctttattgaagataaaacccaatacttatagtgtatgtgaacataaagataagaatagacatgggccttctaaacagtttgggccggatatacaatataaataaattataacttaaaacttatgtaacttgggccttcaaataatctgggcttcagcacattaatagc

SEQ ID NO: 120699 - DNA, 389 bp, Glycine max
  unsure (1)..(389): unsure at all n locations
ctaagcttgccgccacggagtnttccgactatgctcttgtgtggtggaacattctactttatgagagagcnagaaatgaagagcctatggttgatacatggacggagatgaaaaagatcatgaggaagcaatatgtgccggctatttactccagggacttgaaattcaagctccaaaaactaacccaaggcaacaaggggggtgaggagtatttcaaggaaatggatgtgctcatgattcaagcaaatattgaagaagatgatgaggttactatggcttgatttcttaatgggttgactaatgatattcgtgataattgtgagctgcaagaagttgttgaaatggatgatntgcttcacaaagcaatccaagtggagcaacaattaaaa

SEQ ID NO: 120700 - DNA, 103 bp, Glycine max
gcagtactacggttcaataatcactccctacctgacttatctgatgataccttatagaacttttccattccgtctgtgaacactattgtgttgctagaaatga

SEQ ID NO: 120701 - DNA, 293 bp, Glycine max
cttctgcaacataggctctatgctcacatctagagcacttcggtccttgaagctaacaaaatgtgtcaaggattattgtgcattcttcacaatgctgagagattcatgtgcttgaagttggagcggggtaactggacttctcggacaatcacaccactaaagctacttcttgtagttggagagtgcatggccgtctaatccccacgtagaatccatacttcccacaccttgcaattgaactctaacatcctaccaccacgctctgcaaccctggcactctgtgggatgactat

SEQ ID NO: 120702 - DNA, 173 bp, Glycine max
gagatcgtacatgcacgtggcccatatgctctgatgacgaaccagcggatgccgctcaattgatgcaaactggctcttcatgattcaaattcaagactatacttcacgatctctcgcaccacatcaagatgatcactagaatattacgatggtgatcacttatgcattatcac

SEQ ID NO: 120703 - DNA, 314 bp, Glycine max
ccgatgcacactttatctatatacaattgattgttgcttgcttgaatctcgatttcaagtattgtattgtcatcatcaaacagggggagattgtagatgcaattggctttgatgttttgatgatgatcatgatgatgtgttgcaattgatgcaaacgggcttttcaaattaaaattcaagacgatacttcaagattacaacgcacaacatcaagatgatcactacaatattaggaagggaattcctaatcgaattagctaaggtttggccaagtgatttaatataaaaagtgtttttcaaaggctttactctct

SEQ ID NO: 120704 - DNA, 291 bp, Glycine max
  unsure (1)..(291): unsure at all n locations
catctttcttattaaacaaactatctcacacaacttctcgttttctagtactcctcagcacaacattgtngttctaacgaaaaatacacaccttactagagatgggcagaacacttctcaaggattagcattgcgaaatatttttggacatatgctataaatacttcttgctacattttgacaatgcatcaatcgttagcattctgaacaacattccatatatgttgtgggaggggagagccgaacatctcttactttcatgtctttggatgtgaatgctgttttcttaac

SEQ ID NO: 120705 - DNA, 401 bp, Glycine max
ttatctatcgtgcctctcttttcatataaagattactgattgttggtaaaaatcatatgctgtgaccacaatatctaggcagatttgaatcaagccattgcaatgatatcatactatgcgctatcatcagagcctgctcaagtacgagggaaaactgcatacctaccatattcaaataggcaagaaatagtgaataacaaaactgctgcagatgttcctgggaatgtattgttggtaacgattgagggtgcagatgcacgtcttgtcagcattgatgacttgcactaggatagcaagtgcgtgtattacggttgtactaacactgtaatcaagaagatgctggtcatttaatttcgtgagtaagattttctttgtctcgctatggaagaaatggtgacatg

SEQ ID NO: 120706 - DNA, 483 bp, Glycine max
  unsure (1)..(483): unsure at all n locations
tatggagggagtaaataattttatcaataagagtgtgacaaaatacaatgaaatgaaagagtacttcgaaattggtcttctacacgtgtactgatggcccatccattattacgacagataaaaacaacaggggcctccatgactgctgcanaattcatagcagcatgaaaatctccctgcaatgtttgatgttgtcagataatagcaatcagcatggtggtgttccattatatactagttgatcgagagaagatagttatcaccactaacctcactggtggcaccatcctcacaaaaagtgactgcacatgcactnttcccatccattataacggaataagcagcctccacagctngaggaagttgtgttctgaatatattgtcaaacaacattaacttngtcagagagttagtcaccaattaacaatttaattattaattgtaatgattgacacatgttctagactatggtgaatatgtctt

SEQ ID NO: 120707 - DNA, 296 bp, Glycine max
  unsure (1)..(296): unsure at all n locations
tcaacaaaaaacatacttagaaggaaacgacggtaaaatttgacacgtttaacgaaacagtgacattacttgtgaattgtatagcgatagttatttattacggtaacaatggtgatgaaagtgataaaaaaatatcattatcaaatatgaaaaatatgtatttttttaaaactataaaccaaattcataagacantttttcatgcttctgaaaatgtgttaaagtattctgaanatgatttaaaaatcattaccattctatttttgccaaacacattttattttaaaaattacatt

SEQ ID NO: 120708 - DNA, 400 bp, Glycine max
  unsure (1)..(400): unsure at all n locations
atactaagctntccaagttntctggttttctaaaccttgaacacttgtgctattcatcttttccattctcttnctcctttgccaaaaagaattcgccaaggactaaccgcctgaattctctntgtgtctctcttctcccttttccaaaagaacaaaggactaaccgcttgaattcttttgtgtctcccttctcccttgtcaaagaattcaaaacgacaccgtctgagaattctnttgattcttccatttcccttatacaaaagtattcaaaggactaaccgcctgagaattcttttgtatccgcattcacaaagtatcaaaggtgtaaccgcctgagatctttctcttaacacattggaaggtacatgctttgtggtacaagtatacggtacatctactt

SEQ ID NO: 120709 - DNA, 410 bp, Glycine max
tctaaactaactagttgaagatcgacgagcaacacagtatgtctaataacggtcacggcactgatcatggaaacatcacagaaacgtttcagaagcgcctcggcgtggattttcttcttctttctacttcttttcactaattttaagtaaaatatgcttgcctatggtgcggaaccctttccttcagcctgccacgccccttttataacccaaagaagggaggaggatgccgccatctcgcctagaccagctgatgcttctacagaacctattgaagtcccagcgcttaaagacacccctaaattgatcactccacccttattctagttctttggtacatcttcagaaactgggaaacctttgatataccgtgatatcgttatcaatagattcccagaaaagcccatctt

SEQ ID NO: 120710 - DNA, 199 bp, Glycine max
cttgcctcttgatatgggctcagccatttttttggaactgtcatttcagcttcctttgggagcgatgaattgctgtattataaaagggccggggataacaaaatctactcatttgctgttcggcacgcctggcctttacaaggttgaaagattgtgtttgcataacgtattttttttatcggacttggctcgaatcgat

SEQ ID NO: 120711 - DNA, 368 bp, Glycine max
  unsure (1)..(368): unsure at all n locations
gatttctagagagagaaggtccaagtttattatatgtnntcagagcttntgttgtgcgaacaatgatatagaactgagcgataagacgaagccatcttgggagcatgagatgagtctgtgagtgattgtgaggatctagacgtggatgaaacatccccactacttgtatttcttcaatccttcatgttgctattctctttgtagaaaggaagcattccacatatggagagctaaatgctctaggggatcttctttgtaggtacttgatgtacatacctgtatatctatttaacgatgtcctatgagttctctgtgctatcaagatgtgtgttcaaggtgcttttgacttgatcacatatatgcatgct

SEQ ID NO: 120712 - DNA, 452 bp, Glycine max
tcagcacattccttatttccagattggtattctatcaatagacctccaatctttaatggagagggttaccactactggaaaacccgaatgcaaatttttatcgaggcaatagatctaaatatctgggaagccattgaaatagggccttatatacccaccacagtcgaaagagtttcaatagatggtagttcatcaagtgaaagcataaccatagaaaaacctatagatagatggtctgaagaggatagaaaacgagtacaatacaacctaatagccaaaaacataataacatctgccctaggaatggatgaatatttcagagtttcaaattgcaagagtgctaaggaaatgtgggacactcttcgattaacacatgaaggaactacagatgtaaaagatcttgataaatgcctaactctgagatgaatatttaaatgatacaatgaaatttc

SEQ ID NO: 120713 - DNA, 310 bp, Glycine max
  unsure (1)..(310): unsure at all n locations
accataaaactagctaacatcattcagcgttcaattacaacttttctacttcagtaaaattattgtcgattgaatatgctcataggtcgaacattcaatatcgagcgtctctatatattacgggactcattcagacatccgtcaaaaaactcatacgccctcgaattggcgtatatgttgaacattcaacaccgaggtctcgaatattacgggactcagtcagacgtcctactaaaaaggtatcgtcggttgaatttgatcanagacgtaacattcgggttcgagcgtctctatctattacgggactgaa

SEQ ID NO: 120714 - DNA, 200 bp, Glycine max
ctcatccttcttgacaaaatacatgaagatacaaaaaaaagtccctactacaaagactactcagaatgttctggaatacaacgcttaaatcctatactactagaatggccaaaatacaaggcccaaaagaaggaaaaaccctttcttatatattcacagaagagtggatccaacctttgcccatgggcttaaaaatctac

SEQ ID NO: 120715 - DNA, 509 bp, Glycine max
  unsure (1)..(509): unsure at all n locations
ctaagctcacgaaattcgaatgatactgattatccttccgcattgtttctaatccttacggattatgtantcactcatctttagctttcgaagaagttacgagaactcacggattacgcaagaacacctcttttcgatgtccgccacattacggaatttcacggatcgcgtaagcctgcttccttttgatttctgacacgtctcgggacttcattttttgtgcaacacaggacgccaagtaatctcaaagcggctaaccaaagggtgcatgtcatcaagtaataatccccacacgaaattatggtatgacagtgacattaggatatatgttttatattaatggtatgaagcttaaacggtcttgttngagccgagaaaaacttattatntatttggacacgttngaatatgatgtagaagagagtgaatgtgaaccttttatccctttgaacggctgtattaaaaatgtttagaaaactttaataatattgaagtttattccttattag

SEQ ID NO: 120716 - DNA, 435 bp, Glycine max
  unsure (1)..(435): unsure at all n locations
ntntcttctgcgaagcttcctactgtgcgtccatggcttccactccttccaattctggttctcattcatttcccaatntggttgcagagaaacttgatgactccaattatatgcattagcgtcaacacatagagccagtgatcaaatcgcacaagctacaacgatttgtggttattcctgtcattcctccacgttacctcatcgaagatgatcgcatcgctcatcgagttaatccagaacatgaaacctgngaggttcaagaccaaacacttctagtttggatacaatctacactttcaaagtcaatattgtcgagaggtcttggttccaatcactcatatcaattntgggacaaaatccatgagtactttagcctccacaccatatctcgtgtgcaacaacttcgatctttcatgcgccgctgtagtcttgatg

SEQ ID NO: 120717 - DNA, 454 bp, Glycine max
  unsure (1)..(454): unsure at all n locations
tatatcctgtaattaattcttctcttgatctgaatattacctcttcgccatcagagttgatagtgtcattaggatgagagtcctcattattcgaacttgtgtccagtgttggctctactttattggtggaagcatcaaccatcagacaaagagtggcttcttcttcactgtctagtggaatgatctccacgatgatccatcgaatctggaggagttcttattgttccatatttctctgatatctcttgagatcagactcaactcatcatgttcttcatcagattcattgtgttggatcaagtggcctcagaataattaagaaggggggttgaattaattattcctaaacctttactaactaanaatntactattctaaggcttttactatggtgttaagagaataaggagtagaagagagacttaactcaaagtacaagtggaatttaaatgct

SEQ ID NO: 120718 - DNA, 502 bp, Glycine max
  unsure (1)..(502): unsure at all n locations
gcctcaacttgtgtattacccgacgcctagacttatatagtctgtcacggtttctccctactgatacacgtccaacccagaggatatnttaacacgcaaactatatctatgaactatacaaaacacacaactcttcaattggtcccaatataattataactcgttgcacctcaaagtgattcaacacatcgcagtcccatagtggatcccatcataatactcatcgtgcattaacttgacgctgtaagaggtcttacattcgtgtgagtgcaccgttcatagctcataactcaatccacataacatctcaatacacgtgtgacctcacaatttaacacatactcaatgtgtcacttacacacnagttatcacaatttcataatcccaagacatcacaatatcatgtctcacacgtcatacacatatcacacaataataagtataatatgttattgtcatatgactaatcatctcattaaaacggacannttaaatcatatat

SEQ ID NO: 120719 - DNA, 469 bp, Glycine max
  unsure (1)..(469): unsure at all n locations
ctaagcttgggcattgattattgctctacttaagggcttgtatattatttatattgtatgaaccaactctgtcaaaatattaagctggtagcctggtacgtgaagacacacatggttttatgttatatatctaacaataggaatctattaatatagcttacacgttcattatgcatacaattttatgtccaagtcatcgcatatattttcatgaaagaaatcatgacctgcatattcattattagattcatatatgaagttttgtccagacttccatagtgtccattaacacatcttcagcatatgattctctattctatctctgtctccacaacaatgagcccaatgagcagagtattcttatgagcatcaatcaagaacgtacaattatttatattacatgatagaaaaactatatntactctattaatattgaacactttnttggataatagaaatattgtaatac

SEQ ID NO: 120720 - DNA, 472 bp, Glycine max
  unsure (1)..(472): unsure at all n locations
tctaagcttatggatggggtataatcttagttgtcactcgagataatggttttatggtttgttagaatcaaagatattgaatgatattgaacctctaaaaaaatttgatgataacaaaagtattaaattttgtataaattaatgaattacattgagtttcacataaatccaatcgttcaaatcaagtctggtaataaaatcttgactctatggtttattattattacatctctaagagtccaatgaactataacttggtttaacaaaggaacaaatcagtatccaatgcattgtatatgaataagtgtccaaactattgagaaaaccaacatccaatatgtagtgtttgataaccgtcccaatgaagctaactaacttgtgctatagttntatatatgaagttagtaacgtctaatgatgagatcatactcttgtgcacataacaaggttgatacatattctaggatatatg

SEQ ID NO: 120721 - DNA, 475 bp, Glycine max
  unsure (1)..(475): unsure at all n locations
tactcagctacattccttggtttgatggtcactatgaccattagaacatgccatggttatacttttccggtcaatagagtattggccaattgttgaatctagaattcaagtgccatcagtaggtgcagaagcgacaaatgctcaaaaagtagaatntgaagctagaaaaatcaaagacttgagaaaaaattatctcttccaggcaattaattgccccatattggaaacaatttgttgcaaagatacttccaaggatatatgagattaaatgaagaaaaaatatcaaggctcttctagagtgaagcttcacaccttgaggaagggatttgaaatgctgcaaatgaaagaaggggaatctgtcaccattctttctgggaggacaatggagactgctaacaaaatgcgatgccatggggagaaaaaataaagatcttccattgtgaaaaaaatccatttctgaccgagaattaacttg

SEQ ID NO: 120722 - DNA, 404 bp, Glycine max
  unsure (1)..(404): unsure at all n locations
tctattntttacaaaaatgaactatactatactaacttccactaatatatagagtgaatactcagaaggaagggatgggccttgattatgcccatcttatctacctaactaaactaattacacaaaacaaagtccaaactcgcaacccaattattcaagtgcacaagttctaaattccaagcccaatttgacccttgaaattgcagaattggccaacgcttatttctgaaaaaattgaagaaacttttcttagacttttanggactacttacacgcctctttaggaagtttgtagtgtcctctaggccctgcagaaggcagataggtcaagtaagcaaaaaaacaaanattagctataattctcaattaagcctaatcatgtgcataagaccagaactgagtta

SEQ ID NO: 120723 - DNA, 377 bp, Glycine max
  unsure (1)..(377): unsure at all n locations
attgaaagtgaacgagatgattatgatagcttacaaaacaagacatgaattgaaagtcttagattcgaacacttaccggttgaagaccgaagaacggatgaagaacggtgaagaacgacgaanaatattcacggatttgctcatggaaacgtctcagaagcgttacagaagcacctcggcttggattttcttcatggaaacacattgtttcacccaaaacagctaagatgcatagcataggggtcagggatccttgaaactcatcctccccctatttataggaggatagaggaggtgctcgccgtctagaggcttcttgaggaagatttttgagcgcaccccaattactaaattcacccccgtgtttgataagttca

SEQ ID NO: 120724 - DNA, 377 bp, Glycine max
gactaatctccctagttcagggattaagatgtaacctacctcaaactccttctttgattgtaataagatattttatgtattctagttaattgattctttttttttacctctactttttattttgaaacgactcttgttatacttaatcgattgtatagcagtgatcatatgcatataattggtagatccagaaagagaatgttttataccaaactacttggataatctccaataggttaattaagaaactacttaatcacccctgttcatcctttggtttaaattaatacgtccattgttagctgagtattctctaagacaaagagcattattaaaccactgtcaatggctaataaatgactttgggaaactgacaa

SEQ ID NO: 120725 - DNA, 451 bp, Glycine max
ttaatatcatatttattaaaagtaactttcagaagcctaagaatttaaactaatctactaaaaaaacttcaaaagaagaatattattaaaataatacaatgaaaatatgattatgtctaataatatacaaaaaaagtatgaattaattgtccatgtgtataacaaacacttactttcattgtaatgtaaggggtgaaaaaaatgcaaggtaagtatgatttcattttacacatgtataacaaaaacatacttctagtgcaatgtaaggagtgagaaagaaaaaatgcaacgaaagtatgattttgtgattctgttgacatgtgttaatagaatacacttatgttgatagatgttttcccccacgtatacattgcacaaagtatgtttattgtcgctatacacagatcatcttcattgaaagttatttaaaagtaaaatgtttgatctataa

SEQ ID NO: 120726 - DNA, 487 bp, Glycine max
  unsure (1)..(487): unsure at all n locations
tactaagctcggagaggtggtatggacctgttataggggattggttattttcatttaatttcaataccaatctagcaatagcattgagtccatgccaaatttcctcatgatatatgaatttttttaatccagggaacgtttcctggaggtcaagacatagctgtaaagaggctttcaagtgtttccacctcaggcttagaggaattcaagaatgaggttatcttgattgccaaacttcagcatcggaaccttgttagactcatgggctattgcattaaaggagatgaaaaaatcttactttatgaatacatgccaaacaagagcttggactcannttatattggtcagtatcacatattccatcatacnaacttcctgaagtgctcttcaaccattacaatcataatttcactaaccttgttcttaatttgaaatgtgagatgtatatcttgcaagaccgacacgaacttacnntctgatggcaata

SEQ ID NO: 120727 - DNA, 493 bp, Glycine max
  unsure (1)..(493): unsure at all n locations
ctaagcttgcttctacanatcccaccataagaagttaaagacttagacttgaatttttctcttntatccttcaaaaacttcctctttacctttatctttctgagccctttgtccttgaaccaatcatcataaagtcttttactatagaattgttttgagaccagaatcttagttgcctttagtgtagcctttagtgtgaagttgntgttatccacctatacttgggcagactggttcatacatctcaaacaaaatagtccacttttacttcttgataaaatggagaatgttaaagagatttgatctcaaggagatcaatgtatctcctataaaccatttnttcccagcccagcttctgtcanatttctccttcaactccttgtcaaagaatagagtaagaacctcatattccaacttcttccttttctgttctagcatctacaagtttatagaacatcttattcttggagagtcaatcactatgcccttatca

SEQ ID NO: 120728 - DNA, 52 bp, Glycine max
cccctagaatgatatctgcttatatgtctatctcactactgcctacatcagt

SEQ ID NO: 120729 - DNA, 504 bp, Glycine max
  unsure (1)..(504): unsure at all n locations
gagagagagatagagaagtgaagtgcacagtgtattatatgcaagaaacnncctttcactgtgtttcactaacaattgagttcagagttgagagagagaagagagagagagctttgcaacttgccaggcatattatcaaggatgatcacgtgagaggcacgtgatggattggatgccatgtggagagggtagttggttagttaatcccatgttacctgctgtctcagtatccacaaacaacttcaaccgtccgatgctagtaagaccaacaacgcaccattcgattcaagaaaccaaatccaaacccacattctaacaagtctttctattcaatgcaagtaatcataaataattaattaaagagtatattgtatattatagaacattatcaagtgtattcgtaatatgtccatgtctgctttntaatataaagatagattctaataaacatgtgattatattcttttcggtaaatagcgcaattatcgcataagatctagacac

SEQ ID NO: 120730 - DNA, 342 bp, Glycine max
ttggatgacggcatgcgtgatttctaaaatccgcgctatatgcacacatttgctgtcaaatatgtgcatgagaattctggctttgtgcagaacatgatgtgtatttgctggctgtcgaaagagtcccaccgatggtgttctggatgttttgtagcagattccatctgtcacaatgttcacttatgtgctacagacttccaaggagatattcgagtctaagcaacggttaacgaattgtaatgaggacgatgtcactggggtctctaagtgacataagctgcgatattggttcgtgttggcagagtttctgcctgtgcctgtttcctcggtctgatagttatg

SEQ ID NO: 120731 - DNA, 271 bp, Glycine max
  unsure (1)..(271): unsure at all n locations
tgatgaaaaaaatgaatgcgaaccattntacccatcgaaagactagattagaaaaggttgtaatgatactattaatgtatagatcaatcttgtttccttaataatatatatatcgggggatgagggggtcgcctaaaaaagtgtttacatttgacacctttgtagcgtaagacttcatataccgtattcctgtgaaacgtgaaacctatgactttgattcctacgactatacttaggaccttgagttctcataaatatgccaatgcatgac

SEQ ID NO: 120732 - DNA, 390 bp, Glycine max
  unsure (1)..(390): unsure at all n locations
tctaagcctcacgaccttgtttgagtcgagaatactctattatttatttgtacttgttttaatatgacgtagaagaaaatgaatgtgagccttcttccccattgaaagacttgtaaaanaaatgttttaaacatacttttaattaatatttgaattttttttccttattagtatatatgtggggggtagagggtgtcacataatagactgtatacattgaagtcctttgaaacataaagcataagatattgtagtctcttgaaacataatacacatgacattgagttctatgatataacaaatgacgttgagtcctatgaatcatgcaatcgcattctgtgaattcgcatataatgagaaatctatggactcatagcctgatgtgaaaca

SEQ ID NO: 120733 - DNA, 353 bp, Glycine max
  unsure (1)..(353): unsure at all n locations
aagctngctctacattacattgatgtttgtatttatgggaggaggttgttctcttttttttgtataagagtagttgcccactggttaaactaactatccaaatttttgccttcgcaagaaatggcccccaagaagcttgcctcaaagaagttcatgaatgacaatgcagccgaatgaactatttccgctcctgagtatgacactttccgctttatgagcactgtgcaccaacagcgcttctaggccattaatggatggtcgtttcttctggagcgacgcgttctacttatggaccacgagtattcttattttccttatgtaatagtgcgccggcggtgggcatactggtactc

SEQ ID NO: 120734 - DNA, 452 bp, Glycine max
  unsure (1)..(452): unsure at all n locations
ttgatctaccaccacctttgccaccatcatcttagngttctattatttttaatatgactagtactttgatatctagccgtgtatttggctatactattatgacacttgaacaatctagtatttcttttatttgcatggcatgatagaacaattatgaattatgctatatgactatgtacgttttatatatctgatttattcatgtttcttgcttcatgattggtttacatttctcaatgaacgtcttgagaataattnagaatatatatatgttttatatttgttacacactttgtatattttttttatgccaaatgtggagagaaatacggattatatcaagaactcacataagtaattaacttaatttcaagtgaagcataaactcgtaaacacatggggagaatatggatagttatatgagtgatcgactatgaaaaactgtgtgtatg

SEQ ID NO: 120735 - DNA, 157 bp, Glycine max
  unsure (1)..(157): unsure at all n locations
ctaatgcttagttaaatgaagatggatctttttttntgacaacaaacacccacaactgtgacatacaatgaagcgaccgacgtgacccagattgagggaactaccccacaacaaccagcttcccaggtttctaccaccgaagaacccaaggaagaaa

SEQ ID NO: 120736 - DNA, 403 bp, Glycine max
  unsure (1)..(403): unsure at all n locations
ctgagagtcagaatctaacattacttgctagaaagtctaagaagtttctaaacaatacgaatcccaaggaagatccttccggcacaagaaaaatttaagaagaatgacttaacctcccctaactttaagtgtttcaagtgtggcaagccgggccacataaaatctgaatgctccatctntcaacacttcaagtgactcaagcaatgaagaagacacaaatttctatcttatggtggatggtgaagttgaaagcattgtaaattcttccaaatccaaaactgaacttgatgaaaactatgacaagctttntgatggattcaatgagatgcatgaagaggcttacaaattatctcaagccaacatatgtggataatgtagtgagttgtcaaaaagagttatctag

SEQ ID NO: 120737 - DNA, 335 bp, Glycine max
  unsure (1)..(335): unsure at all n locations
ccgcttgtggagcttctatggaggctggatattngagcttcaatgtagtccttcaatggagattttccaccatggagatgcatcgaaaggcaaaggaggagaggagaggggaggcaccattcactatggaataagccatggaagaaggagcttcaccaccaaaaatgtgccttggataagaagcttgaagaggatgctctaatggaggaaaagaaagagagaagggggcgagcacgaaattgaaggaataatagagggagagaagtggaactttgaagtgtgtctcataagactttcattcatcaaagatacaacaaagtgtacacatgcttcta

SEQ ID NO: 120738 - DNA, 182 bp, Glycine max
  unsure (1)..(182): unsure at all n locations
actaagctnttcgntgtacagaatgcataaagttataccgataaccactcggatattattttccgtcagcgcgactcaaaagttcgcatgacacatcttgagagctcggaagatgacatacatcaccgcatgcaaacaggcttgtcagccgcgattgacgaatggcacagaagacgacgcta

SEQ ID NO: 120739 - DNA, 373 bp, Glycine max
  unsure (1)..(373): unsure at all n locations
taagctnncacatagtgtccacactaccgcagctccggccaagctattctgtatgaagtgtatcatcagcttttcatcgttagaatgggcgcccatcttactgcagtacatcttgagatggtttttgggacaacgtcgttcctttatacttgtggaagcccggcactttgaacttcgggggaataacaacatcgggtactaagcatagatccgtcatgtctgcaaacggatagtccccagattcttccacagccctcaatctatgctcaaggagatcgagcttactactttcttcaggtgccgggggctggccttacatacacataactattggcgacgctgctatgtcgggttgaggcaacgtgcctggtgc

SEQ ID NO: 120740 - DNA, 185 bp, Glycine max
ctgggttaccaaaatgaccaactcatccagtttgcttcaagcccttatgttcagatatgaagcacatgggtattgatctgcctcatgcactgctctaatgactatatgatcattgtggcagataactgatgggatttggaggacatcttctcaattgaatacctggtttttgcaagagtcatgtc

SEQ ID NO: 120741 - DNA, 460 bp, Glycine max
  unsure (1)..(460): unsure at all n locations
taagcttaggctgcttatgctccggatgtgatggaaggcattgtcttatgtgtgttncataagagcacacaccacataccctctctacaggttcagatttctgaatcaacgtctcctgggttaccaagttaaccaatgcattcagtctgccttcgagcttcttaattacagatgatgcctatgggtttgttgctacctcatgcactcctctaatgactatggcatcatttctggcgctaaactgctaggacttggaggcattttctcaataacattttggcttcagcaagagacatgtttccataggcttcaccacatggcagatctatcatacttctcttcatttactgaggacgtcataaaatattgtagaaaaaccgttctatatcatgatgtgtggcaaccgcacatacttttcaaattctccagtatcatcatggctctttactgagttgctata

SEQ ID NO: 120742 - DNA, 412 bp, Glycine max
tcaatcacaaccatattgatgaagccgctaatcaacatgaatgttgtctgtcttctctctatggacacggaggtacacgcaaaacatacatttggaaaacacttgcaagttcactgagagctgacaataaaattgtaataatgggagcccttaacggcatagcgtctctgctattgtcttgaggtagaactgcatattcaaaatttaacattccagtttcggttgttgaagactcaacttgcaatatccatcacggaactcaattagctgaactactaaatcagacaagtctgatcatttgggatgaagcacccatggctcacaaattcagttttgatgcacttgatcacagtcttagagatatcatcaaacacaactcataggacgatataatctttggaggtaaagtcat

SEQ ID NO: 120743 - DNA, 129 bp, Glycine max
atctcttgactctcggttgtggcttaccccttcatttgtcaatacgatcgacgcttgggtctaaaaggattgggcaatgctgagctgccctggatgaaacatcgtggtgcgactgggcatgttttaatg

SEQ ID NO: 120744 - DNA, 370 bp, Glycine max
  unsure (1)..(370): unsure at all n locations
gctgaactcgcggagcatttgcgcattcataccgtggggnntttttccctcctaaaacctatcgagggctcgcccaatccaanttcngtgnaaaccttccttccggggctatggataatcaacctatcaccacaccattagctattctgggtcaaaagacagttccgacagactatgggtccaaaaaaatggttctggtgcaacggcagggcctgcacctggatgaaacgtcgtgggaagactgggcatgtcttaaggagctgcatcaacttgaggacaaggtgttgttagaagaccgccggaatgttacgaacaacaaccctgaaccgcatgctataacgcccaatgaagaaggaagcccgagaatggc

SEQ ID NO: 120745 - DNA, 417 bp, Glycine max
cttaccaaacaagatcgtgtcgtccgcgtattgaataagctaatactgacttcacaactagcaataatgaagcctttgtacatgtttgctgccaacgctgacctcatcagaccattcaatgcctcaactactatattgaataaaaatggagctagagggtccccttgtctaaggcccctttgaggattgaactccgttgtggggctaccattgaccaagactgaaattgacgctgatttcatacacccttccatccagctgatccagttatggctaaatcttgttcttttcagcatatacaacaaaaaattccacgataccgagtcataagcctcttcataatcaactctgaatatgaggcagggtttatggctccttttagcttcaacaatgacttcattagctatgatgacactc

SEQ ID NO: 120746 - DNA, 243 bp, Glycine max
  unsure (1)..(243): unsure at all n locations
tgaatgccatatcccacgtcagaaatcatatgaatanaatgtgtgcgacgtatacgcggaaccaaaactctagtccatgaaatatagaaattctagtgcctttcacataatctataagagcagtaaatccacttggtctgctactgatcgatgtgcctagaaatgtttgtgacgaatatagaaacaagtatactctaatcagaatattgtctgactataatgtgatatctcgatggctggatg

SEQ ID NO: 120747 - DNA, 380 bp, Glycine max
  unsure (1)..(380): unsure at all n locations
tttccgactatgcccttgtgtggtggttcttgctacaaaatgagagagctagaaatgatagagccaatggttgatacatggacggagatgaanaagatcatgaggaagcgatatgtgccggctagttactcaagggacttgaaattcaagctccaaaaactaacccaaggcaacaagggggttgaggagtatttcaaggaaatggatgtgctcatgactcaagcaaatattgaagacaatgacgaggtaactatggctcgatttcttaatggtttgactaatgatatccgtgatattgttgagctgcaggagtttcgtgaaatggatgttgtgcttcacaaagcgatccaagtggagcaacaattaaaaaggaagggagt

SEQ ID NO: 120748 - DNA, 408 bp, Glycine max
ctgagcccaaatcctgactcaccatataccttgactcattgttttatttcaatccttaccctccgaagcatataatagggtgatggaaaattttctttctatcaggaagctccatgcgagagaatgaatattttcattcaaaggaaacaaatagaggaaaggaacattcctatcttatagtgggagaaagctcaaagaacagatccatatattcctatctcagaatgggagactgattatatagaacgcgatgaatgacagacagctcctgatctaggatctaacgattacacaatatatgtgcacagaggtctctggaccacgacatatatgaacaaatacttaattgtcacctaatgaataaaagaaagagaactataccgtctcctaaaagaagtcttcttcctt

SEQ ID NO: 120749 - DNA, 436 bp, Glycine max
  unsure (1)..(436): unsure at all n locations
atcactccacccaaatcttgccttcaagtttaccacagctaacactgatgacaaccgcgtgaaagatgtgcacccctgatacaatggcgtgttggaatcacgttctattgtatcatacagaggtgcatgcgcttgctcaaaagtctcttgtccaagatcacggatcatttcctctatacgctctccgctgtcttcgtgaaccgcctgatactgagaaacagttagaatgtctgacgattccccataccatatccattatgtgtaattcgaaatgatgccgtaacatatcagatgtgatcggatttcatcaactgactgtcgtctaccattaagacatttaacacatgggcataaataattgcccctcaaactgctagcattaagtagcataaactgtagaaattgntccaccccgctctcatactcatcactgatg

SEQ ID NO: 120750 - DNA, 263 bp, Glycine max
gatgtggaaaatgactctacttactggtgggactagagaataaagctctataaaccaacccaaagcgaccacgtgcttgacagatcataataaggagtgtgaaagctgaagcattcatcttaacaagataaagagaggatgcatctttggctctatgaacaactttgtgaactcaagaaggtcccggggagcattacctttatgactttatggcatatgatgaattgctccacgcaacgatcaaagattggctccttctataa

SEQ ID NO: 120751 - DNA, 253 bp, Glycine max
tgctacttcatcttacaaggagcatgaaatgtgaaatggatgtggaacaagacataccttaatggcgggcataaagaatatgtgtatatgacacaacctgacggaatgacatgctcgcctgatcattttgatagtctggaaggagccgcattgagtttaacaagatcattgaatggttcatcgtgcgaggtgtgaataacctcgtgagtactaataggtacgagcgagcgattcattatatgacatgacctac

SEQ ID NO: 120752 - DNA, 342 bp, Glycine max
aaaaaaatattctagtacttatggagcttacactgagccgaatccaaaagaagaatgcaaggctggtggtaatcattttatatgactaacttttgatttgaaatatttttccaaaacttgtatattttccccaattcatatatattctcgtagggagttggtaataaaatcttgttctcttgttatagccgcctctagaatactttccattggatctaatgatgaaatctgttcaatttcacggttaaagaggctaaaacttgagtgctcaaagtggtagttgcactcagctcaccatttgggctcagcgcacatccatcggttagcgtagcttcaatgtgc

SEQ ID NO: 120753 - DNA, 332 bp, Glycine max
ctaagctctatcagctctctgtggggaagctccgtcttccatggtttattctatagtggatggctcctcctctcagctcttctactttgtcttccactgcctcttcatggtggaagatcaccattagaggactctcattgttcctcaaagatccatcctacatataaggccctctcgcatctcttccttgagtgggcatcataacacaatagcgttatgcccgcgctccttatacctacattatttttttatgcattaacttgctttccattgctgctcattgatctatctcattgtatatactcacacgatatggttagaatctgcaacat

SEQ ID NO: 120754 - DNA, 401 bp, Glycine max
  unsure (1)..(401): unsure at all n locations
tactaagcttgagctaggaaagctgaaaagntgctttacagcccactaccttgagggctttgattggctgtaactnggtagttgcatcttagtagatttgatatttgtattgcatcatgtatcatcatggttagtgtgaagacaagtctctaacttataaaagtttcttcaaaggcaaaaactctattttaatcgattactgagttgttgcaatcgattacatcaagctgcctgaagcttaaagagttaaatctcgcatgggtttaatcgattacaattgtattttaatcaatcatactattgattgagacaatgactgatttattcaagagtctctgctttaatcgattacctactcttctcttattatagttgtcagaggtgaacaagaacactgtatt

SEQ ID NO: 120755 - DNA, 269 bp, Glycine max
acatccacaaataacacataaatgcaacatcctcagatgcccaccttctactgagctcacgtactcccacgtatcccttattctcattcctctgagaaacgggtccccatcaaccccttcaagcttccttaatattcaagcaatttaatttcaaacatcatgaactaccctataccaagataacagggtagagggcagaaactctggcctaaaacacattcctataacacaggttttcttactcaaataccccagtaacattctctttg

SEQ ID NO: 120756 - DNA, 294 bp, Glycine max
ctcacttacatgaggtcaatgaatataggacctcaaaatcttggctcacttaagcgaggacgagtagagtggacatcgtgggtctttattcctcctccgttacattgtgtgagctgcctactagttctccaaaagcacaccttaacacaattcttcttgactaaccaaaatgcatatttcatgaagaaaaagttacaaaactaaatttctaacttgtaaatgattgctctaaattcaactaagtgaatgtcgaacatatagccctaatgtgtattctgaaatactactaaaatg

SEQ ID NO: 120757 - DNA, 227 bp, Glycine max
ctaacagaccccatatctattaaagaatcatagccttgcttgagataacccgaacagacataagctacatttagcttctgtgcgctcacactctaaaactacttgtggcctgcacgtattatctttttatgaagcgaatacatattctgtgtaacgagtggcgacagactttctatcttaccttgatacagagtccatcactttcttggacctacctaaaatataag

SEQ ID NO: 120758 - DNA, 436 bp, Glycine max
  unsure (1)..(436): unsure at all n locations
tctatagttntaaaaaacactacttcaagtagtgtctcaataaatattagaagctactaaaaanaaccatatttattaaataatcaaataaatttttcagctagtatgaaaagttagaagctacttaaagtatcttgtcaaacacactctaaaattatttgtagcatgcacatattatctttttatttaatgaatacatatttagtgtaacaaaaaaagacatttattaaaacttaataaaaaaaagagtaaaatacatttttggtcctctaaaaattttaagtttagttntagtccttntacaataaaattgacaatttttcgtcactctaattntgaactagttacacaatgcaagctgcataattntcggtgagggatgaacttggtggtggtcgagtatcatggcgagacttgtgttctcacatcgatgatg

SEQ ID NO: 120759 - DNA, 467 bp, Glycine max
  unsure (1)..(467): unsure at all n locations
ntagttgaatagaataatctngaaatgtcaaagaactgggtgttgataaagcataacaagactgtctgtgattagtttaaagatacaatctttgcagatgagaatgcttcagaaacattaagaaagctagcaaatgggcctaaatgaaatgttataacctggcaaggatacgacataaacaagtattcattttacacaaaagcacaagatgacaaaagtacaatgcagaatatcggtgtcaccctaagggctaaatctcaacactttgcaagtgtcaatgacgccaatccctgtgtagcttccatcccatactntgggttcattgatgagaattgngagcttaattatgtgaaatatatagtatgtcgtttcaaatgtatatgggttgacagcaacaccggtgtgcgcactgatgatataggatatacgctggtagatctaaagagactnggttaccacaatgaccc

SEQ ID NO: 120760 - DNA, 387 bp, Glycine max
  unsure (1)..(387): unsure at all n locations
ctgcgtgagatactcaacaccattatcagagcttgttgattttattctggtatcgaatggtctttcagcccaagagacaagttttatttaggttacggccgtgtcttgactctacaaatcatacgaaaaatctcatgcaaaatgagtatgatcatcaactattgtagggaagtacttatggccattcaaagagagagtagcacaatgacaccaaatattaacatgaataactgaaaaacgagtagccacatgttgaatagtatatgcaacaagcgattntatgtgctttgatttatgacaagcatcacaaacaaagtgtttaacatttgaaaatgtctgatgacattgttttatccaatgaaatctatcatgtgaacggtggcctaa

SEQ ID NO: 120761 - DNA, 422 bp, Glycine max
ccttaatctcagctcttaataattgtgagttcttactcttattattagtacatatatgtgaggggtagaaagggtcacactaatcaacaccttgacacacgcaccccctcccctcttcacacccagagaataatgcatgacttttgttagtgatcatatgatcactaactaacttgttatttcaactatccatatatgatggtctgccctagatatatagttctcaactatcaacagaattctgacttgacaatatacctcacacatcaaggaagaatatgcactaagggtgttgacatacatgcactatcatcctccctaagtgcagctcttaaaaggaagtagggcatttgttgtctatattcttcaacactcatcctcccttgttaagcctttggagcttgtccatagctccctttata

SEQ ID NO: 120762 - DNA, 121 bp, Glycine max
tatctcagatatattggtaagtgctaaaccagaaacactttcaacgggttttctttctttacatgcacatgaatcttgggattgaattctatactatttcctcaagggattgtagcccttc

SEQ ID NO: 120763 - DNA, 380 bp, Glycine max
ctcttaagctacgcgcggcgtgcactgtacgcgctgtacaactcgttggcccagctcttttctatctcagacctgtacactgtcgcaagggacagtgggacgagcgactcagctgaccaccatacatgccttcgccgttccatgcttttgtcatggacagtgggacctcactgatgcttatgctgcgaatatttactctatatcctgctgaatctcaccagcaaaatcccctcagcagatcattatgaccttaacagcgacacaactgccctggatggacgaattccctaccctatatgtgccagcctacaaaaacaacaagaatctgcccttctcaatatgctgatggtgcacaaccatcactctcatcattcgcatca

SEQ ID NO: 120764 - DNA, 382 bp, Glycine max
  unsure (1)..(382): unsure at all n locations
gctagagcntagctacacacaaccctctaataactaagctcacctncttgagaagcttccttaagaagattcctaaagaagctagagcttagctacacacatctctgtaatagctaagctcacctccttgagatgagaagttagagcttagctacacaccccctataatagctaagctcaccacccccattccaaaaatacatgaaaatacaaaanagaagtccctactacaaagactactcaaaatgccctaaaatacaaggctaaaaccctatactactagaatggccaaaatacaaggcccaaaagaaggaaaaacttatgctaatatttacaaagaagagtggatccaaccttgacccatgggctcaaaaatctaccc

SEQ ID NO: 120765 - DNA, 282 bp, Glycine max
aatagtacccagtgatgtaacatgctccttataaagcgacaaagaaagaccgttgtcttgctaggaattctcatcttgcataagaacttacgccatatctattgccggcctgctgttgtatataacaagaccggattatatgcggtggtgggcctataataagatggtagatcacctgaccactcccagagaaccgatacgttgccgctgataagctaatgcctacgatctccgttatgaaattgatggctgactcgattatgtcatcaaacagcgatcgtg

SEQ ID NO: 120766 - DNA, 408 bp, Glycine max
  unsure (1)..(408): unsure at all n locations
cagtcacactgctggtgtctacaacaagataatatatgtgtatcttctctaaagatacatctaataatacccatgattataacatgtcccttattaaccgccaagcgaataccgttatcttgctaggaattctaatcttccataattccttacaccattcctcttgccgacctcctgtaatagtttccaaaatcagattatatgcgctgcttgtcgaataatttcctgattgatcacctaaccactcccatagatctgatccttgctgctgaatgttcatgccttcgatctcccttaggaacatgatggctgactcgatttcatatcaaacagcgatcttctncacataaaatgccactcccacccctgaatgtagatgatgtcccatctgtctaatgggttgggtct

SEQ ID NO: 120767 - DNA, 444 bp, Glycine max
  unsure (1)..(444): unsure at all n locations
tatattatagcatttattatggctttccatatgttagtgttaaagcatttagaatttacataaaanaaaaagatataagtaaaaagataataattaactactattatgttcgaagtttttttttgtgtgtgtgcatgttgaagttctaaataaacatatacttcctccggtctgggttatatgagaaacaaaactatnttatgtttattaaagaaatagttaatttcattaaattgtggttaattgtaataaaaataattttttaacttttcatttgtctgattaaataagataaaagtatntcaaatttgtttatggtgtaagaccaagatactatgattttnttcttataaataagactggaaagtgaaataanaatanaatctttataaataggtaataactaagataaacaaagaacattagtttaagaagtgggcatgt

SEQ ID NO: 120768 - DNA, 167 bp, Glycine max
atgatggctctcaggctcatctgctcgaggtcgaatatgaactacgctcactgctggaaatactacatatactggcgcggcggcggggacatcctcgacactgcgggccccaactagcactgctgggacatttaaggattcactatatcacccggtgagtgaccggc

SEQ ID NO: 120769 - DNA, 154 bp, Glycine max
tgagctataaggtggaactgagctcatgcttatacagaatggtgtgtgcaggaatttagctatatctacgattcctagcagaagccatgtgtcaggagatgactaaattcacgtctctggttgtggaacggcttattatgcttaggaaacttga

SEQ ID NO: 120770 - DNA, 208 bp, Glycine max
gagacgcgctctgcttacatggtatagaccgagtggacctgccctaacctatactactacatctccacaaggaaaggtggagaatactagaattctccgacgaacattagaactgtataatgcatcacacattgttagaatatatacccaccgttatggcctgccgtaatctcgctggaggtccagccgacgcatctccatatatttc

SEQ ID NO: 120771 - DNA, 285 bp, Glycine max
  unsure (1)..(285): unsure at all n locations
atctgattgctctgccgactcactgcaaatatgtcagaaagaggtgatcctttaagaatatcgccgcgatggaggattggcggacangtagcttctccatggtgagagaagagatcccatgatggagacctctgccgtatctactatagaactagtggtacatgccgtccacttgcggactgggttgccgggaaggatcgagtgattgaaaaagaaattgatactttctcccagcgcaatgcaaaaatcgggcacatggcanaagaagaggaatccctcctcttt

SEQ ID NO: 120772 - DNA, 302 bp, Glycine max
ggaggctccgctgcggacatgaatggctacaggcgactccagagcatacaaacatcattgtgaatgtagagcgagcttatgcgcgtgacttgtttagcgagccgttcactctgctcagagacattcttagaacgctgaaaactgcacccatatacaaacatggcaccgtacgatgctagattatggatatgtgcttccacggtgtatttggttcctacatcacacgcatcgtcttagctatgtttacatacatgcatgctcacagcactatggccatcagagatagcatacgtgcacaatac

SEQ ID NO: 120773 - DNA, 178 bp, Glycine max
cctggagatatgtcgcgggggtcaagagaccttcgggacgtcaggtggggtgctatttgtcataaccaagcttggccaatcccgacccaacctcggcataatcagtcagtgagaacctatgacgtacctaaataggtgagctcctgacaggcaaccaatataagaacaaagtccacga

SEQ ID NO: 120774 - DNA, 228 bp, Glycine max
gatccctcgcttcctctatccaaggagcagtgggttatctttaagtccttcgccttcatatgatcttctttatatatcctacattgtcttgtggtccgttgctgaagagagtcgattgactgaatttctctgctttggtcgtagctttacaccaggagctgcgcttttgtcgacctcataatataaatctactctggaatcatgcatttgtgacactattatgatcta

SEQ ID NO: 120775 - DNA, 366 bp, Glycine max
attgttcggtcaattcactttaattccttgttattcatcttattcttcgtatatatcctccattgtcttctggtttggtgctgtctagagtagattcataagaataaaccgaatgaatcttagatttacacttgttcttgcattattatgcgtcaaatagtataaatctactctgcatcatgtttttgtgatgatgttatgttctatcattattcagtcataagatatctgtgctgaacctttagatctaaatcttattccacactattgatataaaaataacacaacaatctcagtgaaatcacttgatctatgctgcctacagtcatgttcggcatagaataggcacatatgtgcaagttgcgt

SEQ ID NO: 120776 - DNA, 166 bp, Glycine max
gagaagcactctgatgaatacttgctagagatgcttgcttaagactccttgcatgcctagtttcttagagagcacttcctaggcaagatcagggctaaccacaccctcccttttattaacgtgacctaccttgtagggaatcttggtagataagctatagattatc

SEQ ID NO: 120777 - DNA, 305 bp, Glycine max
tatgcagtcactgccgtttgaccatctctatgtggatgcgtaagcgcacctcatacgacattgtgtggcgcttgtctggaacatctcacgccagataaagataataaacagatggttactatcatagaccgagcttcggtgcaatccatgtattttgccgacgatctccatgaacatggtggcttctgagtgagctgtatgatcagctggccacatacctagatgtatgcacttctaatactgattacagcctcagaaatgactgagttgccatgatctatgcagaagcccatgatgaaatccat

SEQ ID NO: 120778 - DNA, 301 bp, Glycine max
  unsure (1)..(301): unsure at all n locations
gctctgagagtttgctcaatgattctattcatcacttccggttgaccatcgctttggggatgctaaacgaaactcattcgtaattgtgtgccgctaatctggaacagctcacgccacaaattgctaataaacagagggtttctatcatagaccaagcttcggggcaatccatggattttcccgacaatttccatgaacatggaggctactgtgtgagctgtatgagctgctcgtaacatccctagatgtatgcctttcgaatactgatccacaaccacaagaatgacngagtttgcatgat

SEQ ID NO: 120779 - DNA, 242 bp, Glycine max
agtcttgggagtttgcgtgtcgtataataaggggggtaggtcctgctttggggtgtatctacggagccatatgctgggcgacctttgaaatttttcgactgtcaaatgttcctgacggtataactgagcttttaacaacctgcggtagttctaaatgtgtggacctgagagagccttggtcatataccgtaactactgcgcataagtgcgatgactgatgcgaagcgcagtccagtgtcctg

SEQ ID NO: 120780 - DNA, 309 bp, Glycine max
  unsure (1)..(309): unsure at all n locations
tcgtgtgagctcaactgaagttgtgtttcggccgacaccggcatgttntcatttatatcggcaatgaaaacattagcccacctcagaaaaaactctttattcaccgatactgatcgaaaagatgctagtcaacatctgtccaagaaagatgaccgatcgatgtctaaaaaagaagcaatcacccggtgacgccgatcgaacatgttctaatagacatcatctatataatattcagggatcgaatagaaagtacacctgccgacatctgtctgttgtatagcccccgcttgattttttcagccgacattg

SEQ ID NO: 120781 - DNA, 104 bp, Glycine max
gatgacccaatcaccatcattgctgggtgctctaagaacactaccgtgcgcacctatccttcttcgttcggcactatgaacactatgcccattgagagccatac

SEQ ID NO: 120782 - DNA, 312 bp, Glycine max
  unsure (1)..(312): unsure at all n locations
acaaaatggcccattcattaaacattgctggtgcaccaaaaatattactgggtgcacctaacatttcccgtttggtactctaaacagtaggcccattgagagtcatagttnttttttgtagagtcacaattggtttcaacctttttntttaaaacaaatatactgtggactcttaatgaaacattattaatataaatcacctcgccaatcttaaatactatcacaataagtgtttctcgaaataccttgaactctttgccgttcgaactgacagaaaatcagatatcttatgagaagatacaacagtacaca

SEQ ID NO: 120783 - DNA, 481 bp, Glycine max
  unsure (1)..(481): unsure at all n locations
cgccccatgtnttcggacgacggtgcacataagctctgagagtttgctcaatgattctatacatcacttccgttcgaccatcgacttggggatgctaaacgaaactcattcgtaattgtgtgccgctaatctggaacagctcacgccagagattgctaataaacagagggtttctatcagagaccaagcttcggcgcaatccatggattttcccgacaatttccatgaacatggaggctactgtgtgagctgtatgagctgctggtaacatccctagatgtatgcctttcgaaaactgatccacaaccacaagaatgactgatatgccatgataaaggggtaggcccatgatgaaatccagagataggtcctaccatggcctctgatgcacctagtatggacacaacaggccaacaactctggtcggttcatacttggttagctgacaattacacattggcattgaatgtggcacatcatt

SEQ ID NO: 120784 - DNA, 191 bp, Glycine max
  unsure (1)..(191): unsure at all n locations
catgcgcatactttcttacgatcgttgactcgcacaagagattcttctaattaagaaaaacgcacccacgcacaatcaaggcgccttgggacctccatcacttatatgtacttccaaggagtattngctatctacatcacacgcattgtctctgcttaattacactcatagcgactccaagcctttggctc

SEQ ID NO: 120785 - DNA, 352 bp, Glycine max
tgctactcttaatacgagaatggcatacaacctcctccaatatacacaaacatcaatgtagatttagagcaaactcatgcacatacttccttacgaacattcactcgcacaagatattcttctaattaagaataacgcacccacgcacaatcaaggcaccttcgttacctagatcacatatatgtactttcaaggtgtatttgctacctacatcacatgcatttcctctgctaaatttacatacatgcatactcaaagcactttggctaccaaatattgcatacgtgcacattctggtatttctaatacctatacatacacaaacttcgtgatgaatcttggctacctacac

SEQ ID NO: 120786 - DNA, 315 bp, Glycine max
tcagctatcatatcatacatagtattacgagacatgtctgattattctggagctcgccataatcaatgaccatgtgatataatcgatgacttcttcttctatgagtgctttcacaagtagacaagaacacttgaatcgataactttgagtatctaatcaagtataatgttcttgagctggttctactttcttggaagaacacctttatcgattaataagatatcttatcgatacctctgagatttaagcgattacaagcgggtataaatgtttctctataataaccacctcgtgtctctcttatacaccacattt

SEQ ID NO: 120787 - DNA, 235 bp, Glycine max
gagagatgtggaagaatatttgttaccttatctatcacgccgtgactctgatacaaacgctattgattggaggccaagaaatatatgcatctaactccaatatatacgctgatacggatccagccactgcagtgacgtcacactatgcctcatcatcagagactacacacgttctatggaaaactgtatatctactctagttcaatcagcgagaaatactgaaccacaccactgt

SEQ ID NO: 120788 - DNA, 294 bp, Glycine max
gttgatgaacaaaggacacttgtaaaccattattattcaactaacctacgctaaacaagtattggtctatgttctgtacatattgagcacctgatattaattagatacctcatcacgttgaaatagcaacagatacttattcttttaccagaatatattcatcattccctctgctgaccatgtggacattacaaggcttcagatacttgaacagagccttatcacatgtcatgtggttcgtacaaccactatctatcatacgactttcactggattctctactatatacgcatg

SEQ ID NO: 120789 - DNA, 387 bp, Glycine max
  unsure (1)..(387): unsure at all n locations
actaagctntacctttcatttaacccttagaacttcgcggccaagattgttatatataantcaatgcngangctcaaaggacactctagatgcctntttaatcaactaacctacgctcatcaagttttggtcaatgttaggtacataaagaacatctgatattaatttgatacctagacacgttgatatcgcaaccagttcctcttcctattacaggaatatagccatcattcccaattctgacctttgagacattagttggcgttcaaatcctttgaaatagagtcttatcatatgtcatgtggttcgtacaaccactatcaatcaaccaactttcacttgagtcactactcaagaagcatgtaaccacaaacaagttgtcctctt

SEQ ID NO: 120790 - DNA, 275 bp, Glycine max
tcgaatggttggaggcgtaggagacaccgacctctatagcgcatccgcggagtcacacacggacctctcactatacatgcacatactcagacgctgcgctacggaactgctgctgaatattcatgtgccccataattggacgaatatagctatgtagaatccacaggagaccacatgccccatgctctcttcacaccatggtggacaattaacaaagaagctgttatcaccacttatgatgatacaagggcacttgtctcctgctcaactaccac

SEQ ID NO: 120791 - DNA, 453 bp, Glycine max
  unsure (1)..(453): unsure at all n locations
ccctgttcaagtatccacctttacattattggtgctgaagtcaaaatcaagaacacattgaattttggaggcgtggtatcaccgacctaaaagggttatccacggtgtcccacacaaaactcttaagatacaacaaaaacacagagctaaggttacaaaactcataaagaataaataatttgcccaagatgtaaagagggaagatnagcttaatcagaagcataaggaatcaattgaccccatgtccttttgaaaatcatgtttcaaaattcaacaaactttttttatcaccaattatgagcctataattgtcattgtctccctctcgattcccactttcattgacatatataggaaatttaaattttaaatttcaaatataatgtcataacttttcttgccagttattaaatatttttataaaattctttgaataaatataaatcacaacat

SEQ ID NO: 120792 - DNA, 150 bp, Glycine max
ctctagagagaagccgcgcggcggcgtggattttatgatgccgtgaccgatcttattactttctatatagatgctactgcgtaaatgccgtcgcttcaacgtccacactgtgcaccctgcctaccagttaatctggtggccacatgatga

SEQ ID NO: 120793 - DNA, 180 bp, Glycine max
aaaaagacaaactgctcgcgtgaggtgctgaacacttcctattacctcccccgcccgtttatcccaaaaaagggacgggctgcgccagttgccaacagcagggtcctacaaagatgagaaggccccgctgattgaccccaccacgagatcactcacctctcatcccagtgctatgcattt

SEQ ID NO: 120794 - DNA, 213 bp, Glycine max
aattcacacacccgtttaatgaacaataattgattgattgcggcacctttcatgatactcgggacgagagagattcaaactctatctatactgtatctgacacgcccagtgccgtctcaaacggtttgaacagatacgtctaccaccaaagctatcttgtttatttttcacacattggcgcgaatagatgctaggctatggtaaccgactcgc

SEQ ID NO: 120795 - DNA, 227 bp, Glycine max
cttaaaaccccgtattataatattgtctatctacaactcaccaatacatttaatcaaatgtgcattacattaccacatgcgctaaagtctatacgacctcattgcttgctacatgccggtatggtacactcaatctggcactataccacaaattaagcgaaccactatgttgctgaaggctatgcaccacaactgagtatgtatgtgctcatgccctccggaactat

SEQ ID NO: 120796 - DNA, 244 bp, Glycine max
  unsure (1)..(244): unsure at all n locations
actaagcttgcccatcttgctatacagcctacttacataattttctttactttccacactcatattcttacttgagcatcgaagaccttcgttttgcaggtcccccctactgttaatggtacctctctaagccgacgcgtgaagttcaagaccgcactcaaccacgttcatcccaacgtgtcacggttccagattntggccagaacaagtttaaataattaaaccaccggtgataaatgagatg

SEQ ID NO: 120797 - DNA, 263 bp, Glycine max
gtctaaatccactaatctcattctatggatgacgtgtgaaaccttactgatcatctcgagagagtaagtgcgttgaattctcacgtgatctccactggagagtgttgtgactctcaaaggctctcattctgttgcaatattgcctcctgcgagtcctgtaaatataaccacaacacgtgattagcgcctgctacggctaccgaccacacgtgatcccatcgttgatgaggctaagtgagtaatgggtgcgccctctaatgggt

SEQ ID NO: 120798 - DNA, 419 bp, Glycine max
actcaagcttggatgatatggaatctctggcatatggagaacaaaactatattagtatatagtatacttcagtatacttgtattccttgtgagcctcgccgtgttgtagatgaaaatctgtcagattcttactggctctcatatggcgaggttgatatacaaaatttgcacgtatgtcgcgctaatatatgtttataggattgagcttttgttttctttctgtttgctgtcatttgaattatgaaactcatgccaacgtttatttttattatatggttataagttatgttctgaaacagagaaatcatgcgaacatatttcacagcataattgttactacatgcttgtgctacattaataatgatgtgatgcccatgatgaaggacctatcactaacatgctatgaataatatttatca

SEQ ID NO: 120799 - DNA, 61 bp, Glycine max
gaagagatcgctttataaaaaaatttctcgccttctactctcgtctacttgtgatttcata

SEQ ID NO: 120800 - DNA, 283 bp, Glycine max
gacaacctctaaggtgaaaaagtttatcacatgaactatgactgaagcaccattattatgcctcagatgtagtatcaatagagttccatggatcaaagaactaataaagaatactaaacataccccctagtgacatgctgtatgcctatctcttacattctcaccccacccccaacatataatagatgttccacccgaatacgggagatctgaaaaaatacaaaacgttcgtacatgaaaaatcgatccgacatgacatagcctttcgccatgagaaatgctc

SEQ ID NO: 120801 - DNA, 441 bp, Glycine max
  unsure (1)..(441): unsure at all n locations
actttanggtgaaaaagtttatcaaatgatctatgagtgaagcaccattattaatccttagacttattattaaaatatctcgatggttcaaattaaaattaaataattgtaaacaaacgaattaataaataactgtatttctatctttttcattctcaccccacccccaacatctcaaagatgttccacatgaatctgggaaatcttaaaaaataaaaattgttcatacatgagatattgataatacattacatacattttgtccataaagaaatgctctcatgtgtgtgcctgtaaatcattttcatcacgagaataacataatagtctaagtatactcgacatataccaatattcattattcttttcatctgagaatttcctatcatgactgaacataattgccgcgaaacacccatgcagcccatcaccagacatatc

SEQ ID NO: 120802 - DNA, 301 bp, Glycine max
gatataatataggccacctgatcgctctagacttaatgcgccatcagttggtgcataaactacacacgctctaccagtcgaatttgcatctagagatatcccatactggactacaaattatctcttccatgcgcttaattgccccatattgtgaaccatttgctgcaaagatactatcgacgatctatctgatcatatggataacaaatatacacgctcttctcgagtgaggctactaacatagaggaacgattttgcatttctgtgactgaacgacagggaatctgttcccatcttttct

SEQ ID NO: 120803 - DNA, 251 bp, Glycine max
  unsure (1)..(251): unsure at all n locations
tatgaccattagaacatgctatgtgttaacttttccggtcaatagagtattggccaattgttgaatctagaattcaagtgccatcagtaggtgcataagcgacaaatgctcaaaaagtagaatttgaagctagaanaatcaaagacttgaanaaaaattatctcttccaggctattaattgccccatattggaaacaatttgttgcaaagatacttccaaggatatatgagattaaatgaagaanaaatat

SEQ ID NO: 120804 - DNA, 259 bp, Glycine max
attgaactgtggagccgactaaatcgatggagcatcctcctgagagaaccttctattgaacacagagaccaactatctctatgagttgtaactgcacatggaagactgtgtttgaagcaatgccgagagccctttgcttttctcaaaagtgaaagggattgtcaatgacaccaaattatgcgtgttgtagaagttgagttagcatggtgatctatacatgctgctgctgccgtgatacaataaacaactcctgcggtgt

SEQ ID NO: 120805 - DNA, 249 bp, Glycine max
attgctgatgtgtaaaacctagtatggcaccgtcgtccgaccgccacctagaaccgcatgtgatgggtaccacgtgatcgtcctagcttgagatcatgaaactgttaatggagaaactgactgctttgattgctgaccacagaatggcaccggtatatataccatgactgtcgagagactcttgggaccctacgaggcgtgctatagaccaaaccagattgatcaacccgagccgctccggcctacttc

SEQ ID NO: 120806 - DNA, 266 bp, Glycine max
cctaccgctctatcatacgggaatgtgtatataacactctacattctcatggactctaatcctaactccacgcactgccgtttctcgagatgtctgctaaaccctttggatagctgagctgcctaacaatgctcagttctctcacgcctacatctcgacatatggagacaacataggtctggtgacacattagcgccggaaacatgaggtgtgaccttatccctttcgttcagaatggaatacaccatgtggccagctgactgcat

SEQ ID NO: 120807 - DNA, 397 bp, Glycine max
gggctgccgctgtgctaatgacgcagatgtgagagagtagtgtcgtttctagcggtaattgcgtgatgagaggtgtacctctgaatctgtggagataactgcttgcctccacttggatcgcacctaagacactggcctcaacgaggtgcagatgagactatgccgccgaatgacctagttcctactctgacctctacagcctccgatatacgctcgatgtgcacggtcatggatacctagacatcgctggattgtggtttgtactatagcgactgcgttcagcatgaggatgacatgtgtcatgacttgcaggagacatatggcgcgagatggggtccctgctgtgtactctcctggacctgtctgattatgcagaatacgctggtattacgcgcat

SEQ ID NO: 120808 - DNA, 390 bp, Glycine max
  unsure (1)..(390): unsure at all n locations
tgggtgtgagaggcaaatttgaatggtggagaatcaccttaaaaccagtttgagcaagtcttaatcaatgttatagacttgatgaagatgagagttaccccaaaatacccaattttcaatttcacctttcaaaccttgaacatcactanatttgatgggttgttgatacctanaattagtntattttggtctgaagttcgttttggtttgaacatgatttatacatggtttacgactcgtaggatccaagttgagtgatattggatacatgcgatctagaattcgaaatctgccaaaatatgcagaacaagctgtcaaattgtgcagcanattttgccattatgcagaaaatgggtgtcaaggctagtcagggggaaagcagatatctcg

SEQ ID NO: 120809 - DNA, 384 bp, Glycine max
gaaaatgcgcataaatcaagtacaaacccttctcaacaaagcataatcgagtagtaattttagctgaagatagacaaagaatgaacaaagggatcaaaaactaaagttataactaaatgtaagaacaaaatcaaaaccctcgatatgtaatgtgtgtgatatagagctgaaccgattgaattgcgacttttgaacatcagataaaagtgaaaataaatataagagagtgatgatgctgaactaagaaatatatacttggtggcatggtctttgcacagccatatcataatcgtcctgagaccatcgagatatcgagattcattggtattttataagatcagagctcatatgttggcgaaaccacatattgagtcatcttgtgga

SEQ ID NO: 120810 - DNA, 520 bp, Glycine max
  unsure (1)..(520): unsure at all n locations
nttctactcatgctntctgcttgtatctcatagaaatagatattcatgtatcttattcatgacaggctaacacanaattatactgtgtaacatcaacatctttgagattcaattgtttgatacaatccaatatgacttggacgcagtcatacctaacaatatctaatgttagaatctccttccctaatccacttacttatagactttcgtagcatcaatgattcctctttagtagacaaattcctaaatagagaaatgagagaagccctttccaccaaatcctcattcgataattactcctcctcatcctttacgtccaacatatttattttgtataccgcttctatatatgcattgtttctttacgaattcttgttccaccatatcaaacttgctttaacggtctcaacttttctttaacacatatgagggtcttccatgaagaccaactctcttcagactttcaacatatccacaacttctatcacaaaacattcataagattcggtttggccattaa

SEQ ID NO: 120811 - DNA, 337 bp, Glycine max
gatgcatattaatgtgggcaatactacgatgactcagccgtgaatcatcagactctcatctcccagcagctcaactcagtgtacgaagcgctgttatacattcaccatgtagatgttccctatactcttaccagagagaacaaccttaccatacttgcctgcattataagactgcgatgcttgttgaatacaaccttgttgccatgctcacgctgatcgccactcactccaataatatgctatctcacctcctcgtatagcacactctatatgagagcttagtatgcatgagctaaactacctattcctaacatgacgcatacaccaccctctacac

SEQ ID NO: 120812 - DNA, 375 bp, Glycine max
taactagatgaattaaatgatgcatattaatgtgtgcagtcctacaatgacacaaccatgaatcatcaattttactcaccaagcaacttatctcatcaaaagatgcatgttcaacattcagcatatagatgttacctattctcttaccaatgtgaacaactttaccatatatgccttcacttataagacaacaatgtttgttgaattcaatcttgaaacctttatcacatagttgactaattattagaagattatgctctagtccatcctcatataacacattctttatatgagttctgtgttgattccctaatattccttctccgaacatgacgtattcaccacccttgacacatagtcagagaagttggactt

SEQ ID NO: 120813 - DNA, 322 bp, Glycine max
  unsure (1)..(322): unsure at all n locations
gcgctatggacaaaggctctgggactatacactacagcacttgagacatcatcgcttctgcgacttctactagggccaatgcatctacgacgtagacatgggcatctctgacataacaagctgatcatgcccaattcactctagtccatattgtcaagatgataggcccagtangaacatgcctgtcgcatcattactagcggaatgcccacctaccagcaagtatgtacaatctgatataatttagagatactctactgacgtaagttgctgaaagagtacggaaatagtggatcgagtcatgagactgcatactgcatgt

SEQ ID NO: 120814 - DNA, 136 bp, Glycine max
ccctgagaatgctatggacgactgcaccctctgtggcttggctgctggttagtaagactatacccgtgcgctttgtgtgcgttattacgatgtacaaaggtattatcattcttatctatctgccagctgaaagtac

SEQ ID NO: 120815 - DNA, 151 bp, Glycine max
tggatcttaagaggaggaaatactccctagcttatgaaggaatccagaagctcagcatcgcccaccggtatggagccgctctgcaactcctaaagagactctgactgattgatcccaaggacatacgggtaggctgtatagacaaatacat

SEQ ID NO: 120816 - DNA, 194 bp, Glycine max
  unsure (1)..(194): unsure at all n locations
gccgagagagagaatgccacattgcttgtgagcacgtntatgatgttattacgcactgcaagtcccagggaatatccttcccgctctatatatttatcagacaacagactgatactctcataacttcatatgttgttcttgcggccgacccgaccacattgtatatgggtgctccatgtttcaatgcttcaacc

SEQ ID NO: 120817 - DNA, 336 bp, Glycine max
tattaaatgagaccacttaccttatcacacatcgagacggtccactgtgacactggatcctcacataacgaacaatgaaacgcggagcgcttataacactccaccatcctatctcacgcatattatctatggaagcatactttagcgccactgacgacgtataacagtctgccgatttatactacgatctcgaagcatactctaactccaactctgtgtgttcgagtcgataatagacaacatctacatctccataactactcatcgtatcatgatggtgcactacaagctctctttcattaatgtctaccgccttctgctgagatataaatggct

SEQ ID NO: 120818 - DNA, 123 bp, Glycine max
accatctacactgtccgggctcgaatacttgatggcggacactgtagatgctgtgatcacaatgttcaccatgtgccaggaagatcaaacatatgcagcgcgctctctctccttgttagagct

SEQ ID NO: 120819 - DNA, 167 bp, Glycine max
aagacctcgtcaagacacctctatcacactttattattagtatggagtccctacccctggcttgactttccccgtgagtgagcttttcaccttgtctagattttcagctctttgaccatatctcccaatgtctcaaaataaaatttaatttgggcatgcttttagtt

SEQ ID NO: 120820 - DNA, 400 bp, Glycine max
aacaactagtgcatgctagtgtgtgaagcatgctttgggtacaagaccaacacacctgcaagacaattctattaagcaactggttaccagtgaccacgcatcagttggctaagcttttaattctaaatgatgcagatgggtttgtagctacctcatgcactccttctaatgactattgcattcattatagcgctcaatgctgggagtgaggcatttctaattaaattcttgcttcatcaggagtcatgtctccaaaggctccatcactggcagcatctatcatacttctctcatattactgagtccttcataaaatattggaaagacctgtctaaatctgatggggggcactgcacatagttcttaatctctccagacgcataccgctctctcaatgatt

SEQ ID NO: 120821 - DNA, 317 bp, Glycine max
ccgctaccagaggaacacactgactacaacttagcgtggacttcttgcactcagaaatgccggctgtgtgcagtttggtgatgtatcactgagaccttggatgcaactgtgatcgtatatccatatcagctacatcttgacgggtattcaagccatcctatgacttgccttgaatgttaaggaacgccccaatcacactgtcgcaaacattattctctacacgcataacatcaatacaatgtctaacgtgaagatctcaccagttcggaagatcaaagaatagggacctcttcttgcatatgcaactcgtaacttta

SEQ ID NO: 120822 - DNA, 127 bp, Glycine max
  unsure (1)..(127): unsure at all n locations
ctcagcttaaccttggcgctcatttctgtccaaccgcgtattgtgtgctattttggagtcgngaagcgcgtggctacgaatgggacttcgaatatccatgtttgggcggacttctttctctcttaaa

SEQ ID NO: 120823 - DNA, 224 bp, Glycine max
  unsure (1)..(224): unsure at all n locations
ttacggcgaacgcccatgcacgataagaatctcacgctgaatgcttactcgcagagcgtgaataanactcgctcacgcaagatgctatggtgagcttggaacctgttgtccaaaccgcttgcgggaaaggccagctgtgctatcatttgacataacgtgctgtctgcggtgatgcttggtcgaatcaggcgttgccgatgatcaccgctgatcgcgatcttctg

SEQ ID NO: 120824 - DNA, 231 bp, Glycine max
  unsure (1)..(231): unsure at all n locations
gctccanatggagagagcagctaatgaagtaccaatggatgatacattgtcggatatgaaaactatcctgatgaagaccaatgagccgtgtagaatctcagaggactttgactgttttgctcacagactcaccttaggcacccctggggttgaagattattcctaggaacattatgtgctcatcattcacagctaattgcataacatgaggaggtaagtatggctcgaaca

SEQ ID NO: 120825 - DNA, 278 bp, Glycine max
tgacaagcgtgtgaacgatgtgcacccctgcttcaacggccgggcggaatcagagtcttgcggctatacacaagtgcatgcacgtgctcggaacactgtcgtacttgactgcaggacattatctctgttcgctcttcattgtcttcgagacccgcctgagactgagagacagacttaatggccgccgactcgctgtaccatgtgcactttgcgttattctaagcgatgccgcctcataggagatgagatcggagttgctcaactgactgacgtctgcc

SEQ ID NO: 120826 - DNA, 274 bp, Glycine max
ctagcttatacaaatcgacatgctcagatatctcgagatgcactagacggagcctacttaaattacgatgcctcatcaggagacctatatacctctggttggagtagacaacatatcaaagatctgtataggtgcgacatatttagaaccatggcttactctgctcatcggtcagtttagacgagaatataagtctgctgcattcaacctcaaaggcggcatgtacatatgccaatgctggagtcacctaatcaagctcacaaatggttgatca

SEQ ID NO: 120827 - DNA, 372 bp, Glycine max
  unsure (1)..(372): unsure at all n locations
tcgncctcagatccctcttggtggactatgcctcactgtagacatgctttctatgttaagactaacttaaactaagcttcatccttagatccctcgtgttggactatacatagcctaaatagcttacgaagcctaagctttgtcctcagatccctcttgttggagtagactttagaccatatagcattattgtaacaacatatttaaaaaccaaacttaatctgcagatccctcatttaagactaaggttcaattctgcttcatgcaagttcaaaggcaacaatacatatcccaatgctaaagtcacctaatcatgcacacagatgtgtgatcagaccaagagcatacaatatttaagcattgaaagaagca

SEQ ID NO: 120828 - DNA, 403 bp, Glycine max
attcatgtgtaacatcaaacttcatatttcaactgaaaatggataaccttttaaagcacaccagttgacttttcattcttacctctcttttgcctctttagaacggtcaaaactacaaatggttacaataaacacatgtaaaatatagatggacaaagaaacactaagctaacctctcagcacaacaaaaacactctaaagccaagtaaagaaaataaaatgaaggctaagtttgtctgacatgtactgcggaggagaaaatttacatgaaatacattttataaaatagttcctattttatctttcggttgtaaaggtcaacaaaatattaattactaattactatcttctcaattatgacattattctaattcttaaatattttgcacctcacaaatgatat

SEQ ID NO: 120829 - DNA, 270 bp, Glycine max
acaacaaacaactctcagagctcactacattccgacttgagccatgctgttaccaatactgtgctccacacgtacaaaccttagtggtacattctgagatgaaagctgacatgtgaccatatctttgaccacatgactaagacgacatgcttcatatttccttgcaatgtagtcatccatgtgctatggctagactaaatgacgacctattctatatttgatcatcacatgctgcaacgagtgtactcaatatctgattagtaccctcta

SEQ ID NO: 120830 - DNA, 375 bp, Glycine max
tgtaatcgattacacatatactgagatcgactaccatatgtgttattcttattccagtctcaacagtcacatctttcagtgtggctcttgaatggctctcataagcctatatatatgtgactagagacacgaatgtgcttagagattctccgaacaaaatggtcttatcctcttaaaaagcaagtcgtcttatcctcttacaaattccttggccaaattacttgtgatgcatatatggaattatggtgagcgctctgattgtgcgatctatctatttcaagagaggattgttctttcttcatctcattctgacagggttgatagaccggggttcttgctggaagattctaacacaaagaaggtgccttgtggtta

SEQ ID NO: 120831 - DNA, 255 bp, Glycine max
aacaccaagaaacaaaccaagcaggaagaaagcggaaaaacacccagattaacggcggaacacccggcacatcagccacgacgcgctgaatctcaaccgaaaacctacacaaccaaggagacccctgcctgacaggaaaccgcaaacgacaaaagacccctgtcagcaacagaagacacatgaccaagagacccaggaaacaaccaggaaacgaactgaagggacaaacaggaactgaactgaagaagaacaaac

SEQ ID NO: 120832 - DNA, 219 bp, Glycine max
gtacacgactgtctgagatatcttaaagagcggggtttgcttatgataatgcttactgaatcatttagatagctaacatatgggcctatatgatatgttatgacctggctatgatacgacctatataagtatcattttacacgaagccacttgatgacgaatgtacagcgctgattagcgggggacacctaggggctaaatctcagcactctgcatgtg

SEQ ID NO: 120833 - DNA, 315 bp, Glycine max
  unsure (1)..(315): unsure at all n locations
aactcagcttagttaatagaaaatctgaaatgtcaagaattgtgttttataattcttacaagactttctgggattagtttatagatacaatctttgcagatgagaatgcttcacaaacattaagaaagctagctaatgggcctaaatgaaatgttataacctggcaaggatacgacataaacaagtattcattttacacaaaagcacaagatgacnaaagtacaatgcagaatagcggggtcaccctaagggctaaatctcaacactttgcaagtgtcaatgacgccaatccctgtgtagcttccattccatact

SEQ ID NO: 120834 - DNA, 119 bp, Glycine max
tcttttttttataggggggggggtcggattttaccctagcttctttcattttttcaaaaccgttcggagaaattatcatacttctacgtttcgacatctgggaattcatgtttccgttc

SEQ ID NO: 120835 - DNA, 366 bp, Glycine max
  unsure (1)..(366): unsure at all n locations
actactgggaaaacccgaatgcaaatttttatcgaggcaatagatctaaatatctgggaagccattgaaatatggccttatatacccaccacagtagaaagaagttcaatagatggtagttcatcaagtgaaagcataaccatagaaaaacctanagatagatggtctgaagaggatagaaaacgagtacaatacaacttataagccaaaaacataataacatctgccctacgaatggatgaatatttcagagtttcaaattgcaagagtgctaacgaaatgtgggacactcttcgattaacacatgaaggaactacagatgttaaaagatctaggataaatgcactaactcatgagtatgaatta

SEQ ID NO: 120836 - DNA, 390 bp, Glycine max
  unsure (1)..(390): unsure at all n locations
tatcaagacgctntaaattgaaaacagaagctctgagcaagttcaaacgacaatagtgttttactcggatgtccaattgtgtcccgtagtatatcgagacgctcgtaattgaaaacggtagctcgtaccacattcaagaggcattaanattttactctgacgtccgattgagtcccataatatatctagatgctcgtaattgtaaacggaagctcgttggaaattcaaaccataataacttcttactcggatgtccgattgagctcccgcgttatcgagacgctcaatatttagaacagaggctcttagcaaattcaaacgacaatcatctgctattcggatgtccgattgagtcccgaatatatcgagatgcttgtaaatgaaaacaga

SEQ ID NO: 120837 - DNA, 180 bp, Glycine max
atgaatgacaatgatgaaacttttggagaaatttttaaaaattgtgaaaaattatcagaaaatggttatgtttagacatgaaggctttattttcaaagaaaacaaattgtgtgtgagtaaatgttctactagaaatttgcttgtttgtgaagcacatgaaggaggtttaatggggcattt

SEQ ID NO: 120838 - DNA, 444 bp, Glycine max
tataagacacatcttcttcaatcttggtgattcttgactccatctcattgaagcgcatgtccacttgtaattccaaagtgtcaaacctttcaccaacaaaggtttgaagaccatcaaacctgtccaaaatctttgaaagaagagatgaatcttctccatcatgtccttcttcaccaatatgtcgagcaccctttttcatccaagagccatcatgctctttttgataaccaaaggatgcaatgactgaagcgcctataaggatctcttgattggaacatagggttcaaaatcaataaggatgttaaagtgttgaaggaaaagggtgactagatgaggatatggcaaaggagcattcaatcacaatgccttatgcatgtgatatctaacaagatgtgcccaatcaatttgtagacctttatgaaaggcccacataacaatgagatc

SEQ ID NO: 120839 - DNA, 330 bp, Glycine max
cttttggtgcatagaatgtgtggaaaaactagtaagtgacatgttatctctgacataagcttcaaccaattaacattgtttgaatgacaactgatgtagttgcaccgcaatcacatagtttgtccaccatggcatgctatatgttcctattggttatagttgtggtatgcgttatgttccttcggttatagctttggtggtagaatgtttaatttggagtccacaacaggaggatctccatatggtgctggagtttatgctggagatggtcgaagacaagcaagtgaaagggagctggagcttgcagagtatcatggcaagtatatatga

SEQ ID NO: 120840 - DNA, 363 bp, Glycine max
  unsure (1)..(363): unsure at all n locations
aaaatcgtcagttttaattgaggtgcattgagctactgtaaaatcaaagtaatgtgtgactatgatgtgagtgtggtgcagagggaaaaaaggggcaaaacagatttggagggaaaaaaagagaagaggagatgctggtggcgaggcangagacgtgcgatggaagagtgaatgctcagtgtagacatggattgcttctacgttcaaggtaacataacccttccattctgctttaatttgagaagtgaatttagtgatatattattatacgatgtttgttgtgtttgtgtagtggaacagagaaagcaaccaaatntaagaggcttgccctctgcaatcatacagtacaactcctacaaatgt

SEQ ID NO: 120841 - DNA, 331 bp, Glycine max
gcacgaatatcagaaacatcttcttcgaccttggtgattcttgactttatctcattgaagcgcatgtccacttgtaattccaaagtatcaaacctttcaccaacaaaagtttgaagacgatcgaacctatccaaaatcttttgaagaagagaggaatcttctccaccatgtccttcttcatcaataggtcgagcaccctttttcacccaagagccatcatgctctttttgataatcaaaggatgcaatgacagccgcgcctattagaaaggatctcttgattggaacataaggttcataatcaagagggatgttaaagtgttgaaagaaga

SEQ ID NO: 120842 - DNA, 479 bp, Glycine max
  unsure (1)..(479): unsure at all n locations
ttaagtcacctgcggcatgaagcttgaactcttggcaatntcttagtcacttaaaagttatgactnntgaaataatcttcagaaacaagtcacttgaagaattgtgacttttggaaatgtatttttcgaaatcagtcactggtaatcgattaccattgaggtgtaattgattacacatcaacatatgtgactcttcattntgaattntgaaaatcttaaagttttaaaacactagtaatcgattacagctttgtaaatcagtttgaaaaacaatgcaagctactagtaatcgattactaccttctggtaatcgattaccagagagtaaaactctttggtaaaagatnttgtgaaaacttcatgtgcaactcaatgttntgaaaaactntntagtacttatcttgatggagtcttctcttgattcttgaatcttgatcttgattnttcttagatcttgattcatgaatcttgaaacttga

SEQ ID NO: 120843 - DNA, 331 bp, Glycine max
ctttgttaaattcgaagaaatttctgcagcattttgcattggtctctaagtacacaacatgaaagttgtaacattaattccccaacaatcaagtatacactcagagaacaactagaaatgcattgtttcaaaattcattcaaattcaacaaaataatcttaaccttaatgcatgaatctaccataaaaatatgacttttcccaaactgtccaaacggaaaattcaagattcaatacaatgattaatgcaaactgtccacaagaatcattgtattcaatctcaaatgggaatctaaggttcactcatgatgaaaaaattgtgtatataaagc

SEQ ID NO: 120844 - DNA, 396 bp, Glycine max
  unsure (1)..(396): unsure at all n locations
aatttaaaatatcttggatttctanaaatgcccattnnttctctcccccntttgtgcaacatcaaanaagggccaaagtacgtaaaaacatgaataatttaaaacatacataaagtataatttgtaaaacaaacataaatgattctaaaacatacataaagcataatttgaataaaaccaaattgaaatgcaatccacttagtcatatatcacaaaccataaacatcaagttcagtcataattaactaagtactaaatacttaaaacataaccaatgtttagagaataaataacataatgtcataaattattcatagaacataataaaagcatatgcattaaacaagtcataagttatcataacataaaacaaatcatttgtctaagtcactggca

SEQ ID NO: 120845 - DNA, 265 bp, Glycine max
  unsure (1)..(265): unsure at all n locations
ccacattttctagtacctgtgtnttttntaaaaaaatttttctttctatccttggacttaccgcttctttcacacccgattaagacaaatgaagttcttcctctgctgccagtatatgtatcagacctcataattactacaacaaaaccattttcatgggcaaccattcgagcccacttcaaaacatcttctcgggttgtaaagacctaggatacaaccacgacatattaatttttacacaaatcatacattagaccaaataatt

SEQ ID NO: 120846 - DNA, 345 bp, Glycine max
attctgatttgagaagaagaacatatctatgaattgcgggtctataatggaacgagaggaaaagaggtctgtgtccgtatatgctgattctctaatgagaacgacgcgccacaggaaatgacgggaggaactggtgttttctgagacccgaaatgccgccgacttctactcgaagcgcctttccgcttcttcaatggatctgccatttgaggagttttatcaagagttcaattggttcagatgaaaatgagtgaaatatattaagtttgtgctgtgtggcgagtgatctggacaacaattaattgagatacggctggaagacaagtggaggcgagggttttaaga

SEQ ID NO: 120847 - DNA, 164 bp, Glycine max
cgtcttctgtaaaaagtgtttacaagaaatgcttaactataatagcggacaatgggtattaatgatatataatagatactgatgaaaaaagtgtctagtaaagctttaactgttttccgagataatcaacttgttttgtattataataaatacattctatgaat

SEQ ID NO: 120848 - DNA, 412 bp, Glycine max
  unsure (1)..(412): unsure at all n locations
agcttgtattgtatcttcttactgctcagatcttggtagcttcttctttgatcctgaccatttctcanactttatctattgtctcgagctttacccttatgttttcttcattntgttgttgctggaacaacagtctccttgttgacgattccccgactttagcagtgatcatggcgtttgtgccatgtgtgaatcggtaaggagtttcattagtcattgtctaagatgaacaatggtaggcccagagtatataggggagttcctctttccatagacccttagacatgtcgagtctagtgcacagggccctgaggatgactctgttggctgtctctgcctaaccgttggtctaaggatgtttgacagaggtgaagaggtgtttgacgcccaaccttgttacgaagtcttcata

SEQ ID NO: 120849 - DNA, 309 bp, Glycine max
ggtgtggatcattggccgaacgttattttataacaaatgggaagggtaccccgtaatgctacaaacttgaaaacaagaagagtttaaaggtgaaaatttctggttttattggggaacccaaaacggtacctggaaaaatttcaccggggtgaagaaaacctggggacagctgggcgcggggctatttcccacaaacatactttgacaataccgacccaaccacggcataggctgtcagcgagaacctgtgatgtacctaaacaggcgagctgctggcagtctacagattaatggtacaaagaccacact

SEQ ID NO: 120850 - DNA, 168 bp, Glycine max
  unsure (1)..(168): unsure at all n locations
atccttaagtcacctgcggcatgcaagcttgatggtgtcaaagaaatacatgtttgtcatcatcaaaaggggagaattgaatgatgtatacatgatntgatgaggcaaaagaaaatcaacaagactcattttgcttcaagataatacaagattgttaacaaacaaagc

SEQ ID NO: 120851 - DNA, 316 bp, Glycine max
tatcacatattgtagaaaaaatcttgttttccagaaagcgctaagcacaacctgcagtgctaagccccagatgcttacgggattttacaacttcgagttgggcttagcatgaggctaggctaagcactagtgttttaaactcaaacgtcatgttggcacgctaagcacagctgtgcgctaagcgcgtcatacgaatttcaatttttaaaaatcaaagacagacgcatttgggttgctacctttgcacccaaacctctgcaccttcttaccttgagcaaattcttttactttctactaagtgtgtactacttctcta

SEQ ID NO: 120852 - DNA, 381 bp, Glycine max
  unsure (1)..(381): unsure at all n locations
agctngtagggttaaagtcttatcgatgtcatttgctcatgcaacaantgttagacgaggctatacgatacatcttgccaaacaaagtcttgttcacgataactcgcctgtgctttatctttcatgctatatgtagcaaagtgattgatccactaatgtttgatgagttggaaaatgaagccgcaagtatactactgccagtgaagatgtatttttccctgcttctttgacatcatgattcactggttgtgcatctggtcagagaaatcaaatgctgtggtgctgtttatctacagtggatgtacccggttgagcgatacatgaagatcttagaagggtatacaaagaatctatatagtccggatcatctattgttgagag

SEQ ID NO: 120853 - DNA, 319 bp, Glycine max
  unsure (1)..(319): unsure at all n locations
aaatataccaactaaagctttacatagacccagngaacaacgtcttatgtcacatattttcggttggcatcttcacgagtcttaatggtaatctggaccttgagcaaactgcgttgaagggctatgtgaatgacatgcctggactatattatagaatccacagcctagatgttggaagagcctgctatgttctaacgtattgatggcagaggattgccgtaaaggattatatatggtgtaaagctgtgcctggagtggagagacatgttataagaccactcagatgatagtctaaacttgaaccatctcgtacgttgat

SEQ ID NO: 120854 - DNA, 367 bp, Glycine max
  unsure (1)..(367): unsure at all n locations
ctaaaaatctcaattcttattctcttaaattcatgtatatagcaaccgcatatgatgtgaccatatatatccagggtttggtttcacgaaaatatcccaagcacgggctaagggggcttcatacgcccttcaaagacccttaatacctaagcaaaagtcacatatttntgcaacatgatgagctgacacatttccattacatataatccatatccatatattgcacaattcatttcccaaatcttgtaacaaattaaccatacgtgtgttctttttttggcaacattcgatccatcatatatattatccattcagaaacacttgaaatagtactttgggggtccttccttctcttccttaagaacta

SEQ ID NO: 120855 - DNA, 218 bp, Glycine max
ttattgaaaggaaatggagatccatggacttgaggcaagggactaattactatgacacgaaggagggcgatacgtgtgcgttgatcatctgataaaaagaatgctgcagctgaatacggaagatagacatgggagtaatctgatccaaggagtgctgtagctttttacttgataaacacttcttctgttttgaaaaaacccacatgtgcgaaaataac

SEQ ID NO: 120856 - DNA, 268 bp, Glycine max
  unsure (1)..(268): unsure at all n locations
gagctatagtgtgttntatactcttttctgattcaaaccggaacaaatcatacaactaaattntacacttgtgctccaattctattaaattttaaatcttaggtaacttatcaccttattatcttattatgtcagcgctacacgtgggttttaggtgaaatgtctatggtgcgacgccttacatattagagtcagcatgacccacacatatggtcactctcatagcgattggagatgcataacaaatcgcgcgtctttgaagattcta

SEQ ID NO: 120857 - DNA, 309 bp, Glycine max
ctcaagctttagcttctttttctaaagctgatttttaatacaaagggctgcttttgtaaataataactatcctgatgcaagtgctatctcaaggaagttgaaatttaataagttttaatttcatggaaacaaaattaataactatcctgatgcaggtggtatccaaaaaaaatattatgcttattaataagcattaattactaatacatggaaacaaaatagtctattcaatgtgttacatatgttaccatttgcaggagctatctacagtcaaaccaaatccaaaatgccggctcataaatgaatatc

SEQ ID NO: 120858 - DNA, 285 bp, Glycine max
  unsure (1)..(285): unsure at all n locations
tcgattacacatcaacatatatgactcttcattntgaattttgaaaattaaaacgtttagaagatctggtaatcgattacaagtattgtgtaatcgattacacaagtttaaaatactttaaaactgtttaaacataagttataactcttaaaattcgaaatcttaacattttaaaacactggtaatcgattactaccttctagtaatcgattaccagagaataaaactctctggtaatgattttgtgaaaaattcttgtgctactcaatattttgaaaaaaaaat

SEQ ID NO: 120859 - DNA, 313 bp, Glycine max
atacacaggcagttttaaagacaaagggaatgagatttgagttctgaaatgcttgatgcattcgaaactatcatcaaaaaagaaatccatatctatgaacttagggtcaatgatagaacgagaggagaagaggtttgtgtaccgtgtacgttgttcttctgatgagaacaatgaggaggaggaaatggagtaaggaattggagtatcctgagccttggagtgttgttggcttctactcaaagaacccttgcgcttctttgatgattccgccatttgagagacttattcgaaatttcaatcggttgaaatgaaa

SEQ ID NO: 120860 - DNA, 449 bp, Glycine max
ctgcagctgaaatgtcatgtaaagaagttgttcactagagaatcatctcagtcaaaacaaactaagtgttgaacactgtcagtttagttggatgaatgaaacttgactgagttgagtgaatcttagctttgctaagctaacaaatttcattgtattcgagctaattatgtaaacactctttgactgattagaatacattttctattgagcatttgttgtttgtgaaagtcaggagtagctttgtgacaaaaaatacttaggttttaatctcagggggagattaagggtagtgccagaagtggcctataaagtattcattgtagctagaagtggcataaagaataggttgtaatcaaagatttgattagtggaacccttcaaggtttgaaggaaaactggacgtagcccaagagttggggtgaaccagtataaaacctctgtgtttttta

SEQ ID NO: 120861 - DNA, 281 bp, Glycine max
  unsure (1)..(281): unsure at all n locations
ttaagataagatgaatgggaagattaagagaagaaatcaagaagacttnacaagggaagtattggaaagattttttnaaaaaacaaacatagcataattttgtttttcaaaagagtttttatcaaattttctaagttaccagagtttttactctctggtaatcaattactagtttactgtaatcgattaccagtagaaaagtttgatttcaaaaagtttttaactgaatttgcaacattccagttgatttcaaaatggtgtaatcgattacaagatattgg

SEQ ID NO: 120862 - DNA, 448 bp, Glycine max
tgcggctgcaagcttagtgaagaatcacccgtggagacacatcactttgctatgaccctcacataaacttcattttcttttttgaaaaaaactctttataaatgtctatataactccgcaaaataacttgattatcttaagagaaatgactaagggctaagattgtatatttgtttgtaagacaattaaaagccggtcattgtgcacacaaacaacaaatgtgtttgatttatataagggctaataagattgtatattcgtgtgtaagaagattaaaagctagccattgtacaaacaaacaacaaattcatttgatttatatagagtcaacagtggctttgtaggacaaaaatatcgagttttaaccaaagtggggtagagtttgtcttgtgtagtaaagtgtggtcgtgacaaaatactcataactttgaaaaagttattgaaactt

SEQ ID NO: 120863 - DNA, 278 bp, Glycine max
  unsure (1)..(278): unsure at all n locations
acaagcactangnaagggngnatnatactgttaattctatccgaagcannnnnnnnnangngagacgatgccgcaagcagagctggaaatgaggtaagactttctagagatagccttcctaactaaatcttttgatgggatcttctttagctgaacctgagttcgattaaagttggcctgcacctaagaataaccatttttgacctctcccattgttcgagctacttcgtaacctctccttcaaggatagaagctagaagcagatagcagccatatgg

SEQ ID NO: 120864 - DNA, 453 bp, Glycine max
  unsure (1)..(453): unsure at all n locations
agcttgtgaatctacctaanaatcatagggtatttggatgcaagtgggtcttcaagaaaaaggaaggcatttcaagtgaggagaaggcaaggtataaggcaagacttgtggcaaagggttttacacaagtggagggggtttattactatgaaattttctcacctgtggtaaaacactattctataaggatcttgatggcaattgtaaattagtatgatatgaagttgcaataattggatgtcaagacaactttcatacatgaagaccttgaggagaccatttatatgcaacaacctgaggggtttgcagaagattagacgaaggtatgtctattgaagaaatcactgtatggtttaaaataaaggttgcgttagtggtgcaagaaagtngatgaatttcttctaatgagagggttaaagtagttatgatagtcgtgtctacatcttgagaaaa

SEQ ID NO: 120865 - DNA, 334 bp, Glycine max
ggctaggtctaagacctaacaagttgtaaacctataagctaactgtgtgcttggtaaaataaattgatatgttaacttattaatattaaatgacacaaaaagatatatttaatatgtttaatatttgaatttatttttaataatctatcatcgtagtacaacatgtttgtattttaaaagaatagtaaagatttagtggttttactcattatttaaaatcaatttttaataaattaatattgttttaaatgacgttttccttttttaaaaaagtataattaaattaaataaactttattgtttaaaatcaatttttaataccaacaagtcattg

SEQ ID NO: 120866 - DNA, 451 bp, Glycine max
agcttgcttctacacatctgtttgattagtcttagtattgagtaagagatgtgatggcttcaactgatgcttctatcattgctagatcccagatcttcccatataccttcctaaaagcctaacattgaacttgatccatctgctgccctagctttttgcaagctggctacttgttctaaccccatgtttgcaagtgtcgcaacctacccttcagtgggagggcaacgtgagactcacgggtgtgtcttccaaggaaggaaaacgcggggagtcgccaccaaaatttattcgaggaaaacgtcgggcaaaccaaaacatgtggtctacaaactttaagtgtgaaaggttcgggagttgtttttacacacagggaaggtgttagcaccccacgcatccgtcacaagggacgacaaccttcaatcaagtttgcaaatacgaacttcaaaattat

SEQ ID NO: 120867 - DNA, 317 bp, Glycine max
ttactaggcgagttgattttagccttagtttcaccttagttattaatcgattcgattaaaaatgagaaatcccaaagagaaaacgtccgattgattttccgctttattttactaaaagatgttttttttttatttccaacgtggttacggcacgaccgaacggtcggaattcattctaaccgaagttaacggataatacaattcaaacgatcggtggaaatttattttatttttaggttaagcgagaaatgacttaagtaaaatggcttaagcacgtcaaaatggggtataaaaagtaaatgaaatgagaataaaaa

SEQ ID NO: 120868 - DNA, 449 bp, Glycine max
  unsure (1)..(449): unsure at all n locations
agcttgcaaacttctacaatatttaagtgatcttagttntttcattggagaagaaggggataggtgacctgatggtagaaggttctttaacatcgtcatcatatcaagagctatggagaagcattangaataggaatgggaaggggataggtgacctggttcaatgaagttccaaacatttactaaaaatcacgttagttgctatttcaatgtgattctggatgatccaacatgaatccaaatgcgcacacaaactgacattgatacaagattataagtattttggagcatgacaatattttcccctttcattattgtcaagatggttataaactggtatatatttgcttttctaattaaaagctttntcattccgttgagcaggtcanttttgatntccgcttcttggcattacttgctgttggagggtccttggcanggtcactctt

SEQ ID NO: 120869 - DNA, 314 bp, Glycine max
tttagcggtatttgactaattattgtacttgactttttatggtttagtgttacttgaccaattaggttttagggttatttgataatttaggattcatgggttacttgacaaattataagttgtttattccatgtcagttttgctggtgagacatttagttttttagagacgtgtgcaaattgcagagtattgtcaatttggactgtgattgctgtgtatgacataatttagaaaaaaaaagacagaacatgtgaacttaagcattgttgtaaggatctaaatcatagttttttcgattttgtgctcgtattttg

SEQ ID NO: 120870 - DNA, 415 bp, Glycine max
  unsure (1)..(415): unsure at all n locations
agctntggaaaatgatntctatactccaaaattacagttntgcttgtcctgaagcaaagaaagaacaattcacttgtcctcaagtgacaaatacagtggccaatcaaaagaaaatggtgtttgattcatcaaggacatcaaccatatcaactgaataccatggaatgcttaaatcaattacttctcacaagcatgcagttttttcaaagataagagcacaagtattagagtcacaactgaaataagctagtaagcatgacaaaaatcaaggaaggatcatcaaccaaaacctcacagtcattgtttcactcaaactcaagtgtttaggcttattccatcataaataaccaacataagttccaaccttngcatttcatctcctattatacaacaatgaacacacaaaaatgaattc

SEQ ID NO: 120871 - DNA, 397 bp, Glycine max
cacccttaaatcaagaaacacatacacattcttttttctagtagatcattcacttaattctccatattctccccctttggttttgagtttaagcttcacttgaaattaagctatttaattatttaagttcttgatttaatccctattttctctccccctttggcatcaacaaaaagccaaagtgtggtagaaatataaaatcatacataaatgactaatcaaacaagagaatagaaaacaatccaacaagatatcttaaccattcatcaaactagaaagatactacttcatagaatgtcatataatccagaaagtcattcataataaccaaataaaactactaatgcaggaagaaaaaataatgctagtaagtgttttaagacatagccaatacacg

SEQ ID NO: 120872 - DNA, 442 bp, Glycine max
agcctttaaatgaatttgcttattcaatcaattttgtaagggatttttttataaagagcaacaaatatgggtggtatttatttaaacatataagggttattttcgctctcctttgctctctgccctttctctcatttaaaaaatatatattgaattagatttatttgcaatatatatttgatgccttttcaaataataatatatttgagtaagaaacaatggggtggggatgggtttatggtttcccatccttatatccgattctccaaggtcattctcatcctcgtcttcgataggtatgaaatctctttcccattccaatttctgatggggatcgggtataccctccccaatctatccccacccaataatgttatagaatatatattttttacacaaaaatcataaatattatatttagaacaatagaacaagtaaatat

SEQ ID NO: 120873 - DNA, 314 bp, Glycine max
tttagacccaaagctctagagggatatatgtgtatcacgtatgttgttgccactattgcctctcacctaaagctcttaggtaggcatacttcaaatagcattgctctagctctttcaaggatagttttgttgaaccttttagtcaatccattctattgaagggttccaaccatagtcttatcccttgctatgccttcatcatcacataattttatgaactccttagacaaagactctaatccattatttttcctaagcttctccacttcctttacagtttgattttcaactaggtttctccaatgtctgaattt

SEQ ID NO: 120874 - DNA, 434 bp, Glycine max
  unsure (1)..(434): unsure at all n locations
ncaagctttttggagtaganacatgggaccaacttcatttatttcagaaagtcgtatctagtcaaggtctgagagaccatacaagtttcctagcgatttctaattatgtgggccattaagtctatcatatgctgaaaatagccgagaagcccatgaatttcttcgggggcggagtaggtgtccgccatcgccttggccttggctaacaatcggggaagttcttgactcccgttcaaggtaagagcaaaccgatccatccacatggttgcctcttggtgtaaagagtcgatcacccttcctctagcctctttttccgcgtatacttgggcatactcgtccgcgaccctatgctcgtgggtcgtggctagacctaactcttcttggtacttggcgatgatagctagcatgttggtctctgtctcgcataaacgctg

SEQ ID NO: 120875 - DNA, 309 bp, Glycine max
ttgatcttccaccaccacctccactttcttaaaagttaggttataattttcttttttttataagccatgtattttggctatgaaatttaagttatcattttctgcactttatttatcttttggtatttggactttagtcttttatgattagattttatgtggttttgaattatgattgtttggattatattttggttatgacctctttatgatttgcttatgtttggttacaacttatgattgatctttttcctatattatctgatattgattcccatgaactttggctttttgatgttgccaaagggg

SEQ ID NO: 120876 - DNA, 435 bp, Glycine max
  unsure (1)..(435): unsure at all n locations
agcttgataagaatagtgaaatattnatctctttaaataaagngtnnttttatgttttctatatatatatatatatatatatatatatatatatatatattaaaataaataaaaaataaaatgacatctttataattaaaaagtaaaatttaaaaaaagttatatttatcatttctactttctaggctaagtttttactttaaaaaaaaatctcttttcttcacccgtgaaattaattctccacacattaaaaagtaatactaatatctgacattaattctacaggtgaagacgagagaaagatttctttcgggcaattgagaagattttcttggcgtgaacttcaacttgccactaaaaatttcagtgaaggcaatgtaattggtcagggtggctttggaaaagtgtacaaaggagtactctctgataacacaa

SEQ ID NO: 120877 - DNA, 305 bp, Glycine max
  unsure (1)..(305): unsure at all n locations
tgcagaaatgattatacatcaagtattcattcatagacaaataaagtaaaaatggctgaaaggtggtgaagcaaagcttggacttggagagtnaacaaacccgagtgccatccgaactttaagttggactccattggtgaagntgagaaggtagacatcattgagaagcacgccaaaggtcgagtactgatctgcataattaatttcatagtcacattgatcagggtgttcacagttgtagtcctcagttggctgcaaggatgcacaaaggggatccctgcaaggtacaaagtcattgctgggcc

SEQ ID NO: 120878 - DNA, 442 bp, Glycine max
  unsure (1)..(442): unsure at all n locations
agctatcccatgcttctttggccgtcgttgcgttggatatcttctcaaatgtatcttcatccaccgattgataaatgagaaagagagctntcttgtctctctttcttgactccttcaacgtctcctctacaccttgacttagcgaggcttcatcttgctcctcgaagccattctctatgatatcccacacatcttgagctcctagtagcgccttcatcttgatactccaattatcatagttgttctttgtgagcatcggcatttggaaaggaaaacctccattcgccatcttttgaggatcttgaagctctgataccactttgttggaaataaggcttttatgtttaggaaaagtgtttaggaatattggagactttgaatagaaacttgataggaaggagaattctttatggtggagagaactntgtatttttgcttgata

SEQ ID NO: 120879 - DNA, 324 bp, Glycine max
  unsure (1)..(324): unsure at all n locations
ggatccncctctactgtataggccatataattgtgcccataatctttagcaattcttgctctcttacctcttcgaggctctatatctagttctggttgtgcaagattttcactactaatagcaggaagataactggatgaagtacccccactatcccttaatttaaaaggaaatttattttcataaaaatcagcatcatttgactgtatgatcacttttgcgtttaggtcataaaacctatacgcttttctattaatagcttaaccaatgaacacacattcataggctctacttgcaagtttaaccctcttagggtctgggatc

SEQ ID NO: 120880 - DNA, 300 bp, Glycine max
  unsure (1)..(300): unsure at all n locations
atttctagttgaacatttcttcagaggcaaaactctcaattntaattgattacatagttttcgtaatcgattacaacaagttgcttaaagagttaagtcttgtatcnggttagtcaattatggtagtactttatttggttacactggtgttntagacaatgactattttttcaggagtctctactttaatcgattatcaggtggattaatcgattacttctctcttgtttaagttgttcagaggtgaacaagaacactntaatcgattacttaggtcatctaatcaattacattattctt

SEQ ID NO: 120881 - DNA, 330 bp, Glycine max
tcatcgcttcttcttgtgcgatagattacttcaccatatgggtcgaagcggcttcctatatcaatgtcacgaggagtgcggtggtcaaattcataaagagggaactgatttgtcgatatggactccctaggaagatcattactgacaatggcaccaatctgaacaacaaaatgatgcacgaaatgtgcgaggatttcaagatccaacatcataattccaccccttatcggccaaatatgaatggggctgtagaggctacaaataaaaatattaagaagattattcagaagatgacggtgtcatacaaagattggcatgagatgctgcctt

SEQ ID NO: 120882 - DNA, 456 bp, Glycine max
  unsure (1)..(456): unsure at all n locations
ctgcagctcacatactccactctcgtctcctattaacaccctattcattcggattgagagtgaataatccaaagaaaatcagcatctatcatgatgtgcaganaattttgcaacttcatttgcattactttcttgcaaaatgtgtggaaatgctattatttttttggcatcttaattctggtttccttattgttttggctaataggtcattttaatacgttgatattccaaagatgcatgttagtagtaacttttcccaaaaaattataattattagagctatatacaaatgaagttcaaacctgaagattaagctcattgtatagggcctttactttagcaacattttctggatctggcttaccatagttctcctgcaaaccacaaaaaaatagtgacttattgcagtctaatcatggcagaaaataacgaaagaaatatgaaactataagatgc

SEQ ID NO: 120883 - DNA, 342 bp, Glycine max
  unsure (1)..(342): unsure at all n locations
cctactaagtttgccgttcttctcatcaagatctatttcttgtttggaattctggtccgattgacttctttgctccttgttgaattggtttcctggatgattcctctagcttgagccctgtttgaaattcctcccttggttgaatctcggnggncctctttggntatagccttggaatctatggcgattctgagctcctatgtagttcacctccttggaagaatcttcttgggctatgcattgccctggctcgtgtgctccactgcagatgtgtcatccccttatttgcatgactgaagagtgagagggacttaccacttgtagttgttgagggagcttgct

SEQ ID NO: 120884 - DNA, 316 bp, Glycine max
gcttgaagatgttttggcttttatatgcacattttctttgagtggcatttgtattggctgttatcttgattgatgcatcttagtacatttgatatctattttgcattgtgcatcatcatagtttgtgtgaagaaaaatttctaagttagaaaaatttcatcagaggcaaaacctctatgttttaatcgattacagccttgttgtaatcgattacaacaagctgtctgaagcttgtagagttaagtctcgtatcggtttaatcaattgtcgatatctggtaatcgattacactattgtttgagacaatgactaattt

SEQ ID NO: 120885 - DNA, 475 bp, Glycine max
  unsure (1)..(475): unsure at all n locations
cgatctgcacgcatgcaagcttagcgcaacattggcgccaagtccaaatctatttactcgtgctaagcacgatagtggcgctaagcgcgacggcgcaatttcagagcctatttaaagcctgaattatcagaattagggtaagaccgaaattattacactcttgcacaaaattttacacagagaccttggagagtgagctctgaagatagtagaggagaggcagcacagcaaggagcctagggttcatctttgagcaagattagagagtgtttgaatgattgtgaggtgccaagaagaggaggagggatcccccttcctgtgtaagcagcaatttctctatattctctatctaatngtagaaaaggcctccttgttatggcttgctaaaaccctagttggggatttcttatgatacagtgacgntaaacattttcatatctaattaagggtggtttatgtgttcattgcttctatc

SEQ ID NO: 120886 - DNA, 323 bp, Glycine max
atggggactcggcgttgagagatacgaggatatgggtttcttgggagtacgtgagctcagctggaggtgggctactggggatggagggtttatgcgcgcattgtggatgcggaaaaacttgttgtgcaccatcgcccgaccggcatctagtaccacatgtgatgggtaccccatactcctactagcttgagatgaggaagtgttgaccggtgaaactatgcgctattattgttgaccacagaggggtccctgcggatatgtgaaggcggtcatgagaccttggggacatatggaggggtgctattgcccgaacccaaacttgt

SEQ ID NO: 120887 - DNA, 201 bp, Glycine max
agcttcttagaatggaagccttttgtagtgcttaagcaattacgataaaggaatacatgttcgagggtcaaagactaccagacatgcttccttcatgtggaagccaaaagcaggaatcgacttaattgtgaattgtgatggagtaagggatacgataataataaatgtgtcttgggggggggggggggttataaatatctt

SEQ ID NO: 120888 - DNA, 318 bp, Glycine max
  unsure (1)..(318): unsure at all n locations
tagatgaagagtgcaacgngtctgttttagtattttaaatcatattaattagatgaattttaaaatgcattgtattatgagtttatacggaaaagaacttacttaaaaaatggtgagtaaagtagtaaaccatgttacattaatggcgtttccataaatactcaattttagtatattacgtttttcatattttttatatagcgaacaaatatatatgctcgtatatgacttttaacttacaggtggtgctacactcatatttgacgctgagcttgtgggagtgaacgacaaaagtttaagcgaaggaaaaggaaacaa

SEQ ID NO: 120889 - DNA, 170 bp, Glycine max
  unsure (1)..(170): unsure at all n locations
agcttcttgcgtagccgctcttggtgctcactatatcccattatacaaaccctcttattactagctantttgaattctttagttcctgaatgtacaaccttcaaattgttgctcgttcccctctttgagaatgaggaggatcttcataggacttcatccagctgatgttt

SEQ ID NO: 120890 - DNA, 294 bp, Glycine max
  unsure (1)..(294): unsure at all n locations
tctctaggaagctacctaancgtttaatagatgcatgtgtaacactgcgttgtgccatgatgaatgaatgtcttgagagatacactctacagttccacttccttacctagttaggactctaataccgagactacccgctgactctttcttatactccattatagcattctgggagcgcgtgagattccaggcacatgttggtggcgaagctcattactccttggcttatatgctagtggatggagtatcccctctactcatctactttgggttgcgctgcatatacatggcgaa

SEQ ID NO: 120891 - DNA, 444 bp, Glycine max
  unsure (1)..(444): unsure at all n locations
agcttaaatttntagtcatattaaaacatatttttcaatagcaataaataaaacccacttgagaacataattgaaaattttatggaggccaagtaattaattgtgttatataaaaacacgttacgaataaaaataaataaacagccaactaataaaaatagaattggacgtcttacgttttttactaatcatgacgtgaaacagcacaaagaattttttaaatttcattcaagttctaaaattttatataactgttcaacatatgtacctggttctcaaattcaagtatgcatattgaaacaatgggatgaaatgtcaacataaaagcaaaacacaactnttttttattgatttaatcaaaggcaatgggtacttaagttatttaacactcaccatgatgatgttacaaattacaatgccaccaacatttcaaatgaatacatc

SEQ ID NO: 120892 - DNA, 315 bp, Glycine max
  unsure (1)..(315): unsure at all n locations
tatacctncaattccaatgcattgtttagtcaaattgctatatctaaagggactagcaaaagtttaatgaaaaaagaagacacttaagagtgagacataagtctataagaaaatttgatttctcatgttgtcatttctcttgactttgtcaggtcagaaaataatattgcggatccgcttacaaaaaggttgacgcgtcaacaagtacttgagtcgtcgaggggaatgggattaaaacccattatttagttacaacaatggacacccgtcttcgtgtgattggtgatcccatgaatggagttcaacaggtaacaa

SEQ ID NO: 120893 - DNA, 323 bp, Glycine max
tactgaagctttcagcaaattcaaacgacaataatctctttactcggatgtttgattgagtcctgtaatatatcgagacgctcgaataggaataccgaagctctgagcaaatttaaacgacaattaccttgttactcggatgtctgattgagtcccgtaatatatcgagaagctagaaattgaatgttgaagctctgatcaaattcgaacgacaataactttttactcggatgtccgattgagtctcgtaatatatcgagacgctcaaaaaggaatatggaagctctgagcaaattcaaacagtaataactttttactcggat

SEQ ID NO: 120894 - DNA, 416 bp, Glycine max
  unsure (1)..(416): unsure at all n locations
agcttgcatgatntacatcttcttctatctctatcaaattcttcttgatatcatcaaaatcttcatgatttacaaaaaggtacgttttattgcattactttccttaattttttaaatagtgatcaaggggttcccatggaccctaagagaataaaggacattcctgattggcccactccaccaagtataagggaaatctggggctgccatgacttaacaaacttttgcaaaaggtttgtcccatatttttctatacttgtagcaccactcattgagttggtgaggaaccatgttcccttatgggaagatgtccatgagaagggttttcagaccttaccctactctaacatatccaacaccactaatacatatgttgttattcttttatacgtgtcgagggaacgagccccaagtat

SEQ ID NO: 120895 - DNA, 317 bp, Glycine max
tgaaggacatacacaaagtgtgactatatgatgtgacaatcgggtgtagcaagcatatactcacctccccctctaaaatttaattggattgggcttcccccaattcaattaaatttatttcccaatacatacatcaaatattcacttaatgcatgtgaaattacaaagcaacccataatacaaaaattagtctaggtatcctaaaatataaaggctgaaaaatcctatatttctagggtaccctacctacattatgaaaccctaaatacaaggcccaaaaaaaaatgaaaccttaatataatatgtacaaagataag

SEQ ID NO: 120896 - DNA, 242 bp, Glycine max
  unsure (1)..(242): unsure at all n locations
agcttgcatgtttggagagtaaatccttttttgggncccctcnaagaacatgatgtaaatacctgtatatctattcaatgatgtggtatgtgtcctctatgctatcagcacgtcattgtagggtgtatttgcactgatcacatccatgcatgcttcggtaggatcattcaactatggaaactggtctgattcttataactngataggacaaggctagtctattgtattatcactagggatca

SEQ ID NO: 120897 - DNA, 311 bp, Glycine max
cttcctatcaatgcactatcttggttgtgaagctcctccttccatggattaattcttaatggatggcgcctcctctcaaattttctcctctatattccattgaatccctatagtgcaaaatcaccattgatggacctcattgaagctcaaagatctagcctccatagaagctacttaagcaagctttcatcacaaaaaacttcctattgcatagatcttcaactgcagcaaggatacactaaccatggcacttagaatatggctactcacgtgacatgacaagagaaaagagtatgttacaatgcctgatc

SEQ ID NO: 120898 - DNA, 426 bp, Glycine max
  unsure (1)..(426): unsure at all n locations
agcttgtagaaatcaaacacgataataaattatcctcatattataatagaagcatatgtgcataaataacaaataattcataagtcatcaaaacacaaatcatttgtctaagttagaaagagtctttggttagtggttttgtgaagatgtctgcaagttggtttttagtatctacaattttcttttttaaaatacagntactttttttttaagactaagtgctaattgactaccaacacttaccaagatgagtgtttattaacattgaaggttctatcatatgaaaataattctatttgaaatacaatataataantttaaaaagcataatttttntgtgaacaatcaatcaagtnattcaaacatatcaatcaagaattatacaaggattggaggatatagatcacagacattatcaaacattca

SEQ ID NO: 120899 - DNA, 307 bp, Glycine max
ttgagccaaaatcctgactcaccatttaccttgacccagggtgagaatgtcaattcttaccctcggaagcaaaaaaaaaggggagagggaaaatttccaatcaaagaggaagcaaaaaaggagagaaggaaaatttccaatcaaaggaaaaaaagagaggaaagggaattcccaatcaaagagtgggagaaagcaaaaagaaaagaaagaaaattcccaatcaaagaatgggagaaagaaaaaagagaagaagaaagggaagaaagttcccgatcaaaaaaaaataatatgcagaaaggtctttgga

SEQ ID NO: 120900 - DNA, 438 bp, Glycine max
  unsure (1)..(438): unsure at all n locations
ctgcgctgcactgtaggtcctaacttttggatgttgcaaggatgtcatcctttgcaagaactaatacaagtacaatatgcatcaatttacttccncatcatcaaaaattgagcgagtagaatgccaaaaataatttntagtattatggagttgaccaagcattgtgtgaatattntttgtaatagacatccttacagagctgtaagatattctagaactcctatccttgggttcaagtatcctgtgaatcccatatatgctagtgatctgaaatgaagcaatttatatattacacagcaagcacgaattaaagatctaaaaatgtgaaatatataattttctaaaatgaatagtgacagccaacatcttcagcaaatcaaataattaatagataacaacaacatataatactaaaatatcttacacttgcatgacatt

SEQ ID NO: 120901 - DNA, 314 bp, Glycine max
aaccatttttttgtactatctcacataattttgcagcagggtttaagccagccaacacagcaggatcaactgaagcttttgtgtgtcctggtcttctaagaacccctccttctctgtacttcatgggaaatatatgacctggcctattgaaatcatcaagcctcgaatttcttgatgcaagtttcacgattgttgttgctctatcttgagcagacactcctgatgtagtgccttgctgtgcatcctataatattcaatggccttgctatcagattcgaaattaaatccacattaatacattatacttgaaaaca

SEQ ID NO: 120902 - DNA, 333 bp, Glycine max
aagttacttgtatcttgaattcattagtctgcttcaagtaaattatgccaatctgcttcagtaatttaaggatatgtttctgttatctgagtcaaggaagctaaagtttgcaaaacaaaagtttacttcagatcttctctggcttcaaatggtataagagaacttagagaacaaacatgaaattaatcaaataacaattattgaaagggccttcctaaaatatttcccaaacaagacttctttggcctcttcgaagacattatttgggtcagcaaagaaacaaatccttgttttattatttctactttctatacaatatttctaaggtcattg

SEQ ID NO: 120903 - DNA, 381 bp, Glycine max
tccgtcccggagtacgacagtcaccgctttaggagcgttgtacaccagcagcgcttctaagccatcaagggatggtcgtttcttcgggagcgacgcgttcagctcatggacgacgagtatactgatttccatgaggaaatatggcgccggcggtgggcaccactggttactcccatggccaagtttgatccagaaatagtccttgagttttacgccaatgcttggccgacagaggaaggcgtgcgtgacatgagatcctgtgttaggggttgtcgcaacctacccttcggcgggagggcgacgcgtgactcgcgggatgcgtgttccacgaaaggaatacgcgcggagtcgccccaacgtttatttgtggaaacgtctgaa

SEQ ID NO: 120904 - DNA, 314 bp, Glycine max
ggcgggctttcttcactttcttgtctccaacgcgagctctgacttttgttcttccttcccgcgatgcttcttttcatgtccgcctgagtgggcttatagcctaaaccatacttcccacgatatccttgggtttttatcaagctaattatgccgccattgtctttgcctaaacccatcccgggttcataaccgttccccaacataactcgggccatcattaccgccgcatcggacagacaaggttgcccaaagagggagtccacggaggaaatgctgaccacctcaaaagactggaaagcggcttctaacgattc

SEQ ID NO: 120905 - DNA, 441 bp, Glycine max
  unsure (1)..(441): unsure at all n locations
atgctcaccactgctagattatagtcttatgttgnncatataaccctcttctctaaatcaccattaaagaaagattgttctcacatccatttgttgcaactcaaggtcaaaatgaacaactaatgtaaagataatacgaagataacctttattagatacaagagaaaatgtctgtgtaattgattcattctttntaaagtaatcccttagcaatgagtcttgccttatatctttcaatgttgcctaatgaatcccttttggtcttaaagacctatntactgccaatggcctttgccccattaggcaactctacaaggtttcaaactccgttactctgcatgaaattcatctcatccttcatagcatcataccataaattngactctttacaactcatggcttgctcaaaagtttcgggatcattttcaactccaatattat

SEQ ID NO: 120906 - DNA, 324 bp, Glycine max
tggattttgtctacaatttttgggtatagttgaacctttttatcaaacaactgaagcaactatgagtctatgggtgtgtggatgcatgtctaaaaggatgcttttgtcctactttgattttagtttacaaatgttatcagactgaagaaaacaacttttagactgatgctatcaaactatgacactaccagactgaagcggaaatagctatcaaactgagcaatgatctgattagactatgcaatcaaactaagaaagcataaaagtagtgaagtataaaccataaaacataaacgtatatgaagaagaagagaggaacaaaac

SEQ ID NO: 120907 - DNA, 423 bp, Glycine max
  unsure (1)..(423): unsure at all n locations
agctttagccatgctgcttggaatntaatcaatgaatcaatcatgtcactgatatttggaacataaatgaacttctcccttgctatcattctctttctctattttttctctctctctagctgccttgttatgttatatatctatctgcatatataaatgacactctctttttacttcatggtgaataattaacctacctaggtctacaatgagggactgaaagttccaagagaagagtttgaatccagagaatatcagttgtggcagcaactaaacttctatattttgctgcaggggccacttctatatcagttgtggctttgtatctattgatattgccatcagaattaataatgatcaagcaaaaaagagaaaagatgttatttcatatacattgacctaaacattgatctactaacccgt

SEQ ID NO: 120908 - DNA, 335 bp, Glycine max
tatcttgattcataaatccagccacaactcagcaccgcaactcaacttcatcataggcatcatgtaggaaacttagaaaaaaaaaaaaagaattcaacaacaagactacttctaggaattgatttagaacatgttatgaactaaataacatgcacgaattagactcaagattcaaaagataggctaagaatgacaagaatacatgaacaaatgtatctagaattcaattaacaaaaataaaaattcaacacaaacttagaacataatgtgacaattactatgactaaacatgactctaagacaatatggattaagtgatttacacttagattttt

SEQ ID NO: 120909 - DNA, 415 bp, Glycine max
agcttgtaggattatggggtacccgtcatatgtggtactaggtggcgatcgggcgatggtataaatcatctctccacatccacaaatcacacatgaatccactatcctcagttgcccaccttcaactgagctcacgtactcccacgtagcccttatcctcgttcctctcagcaccgggtccccatcaatccctccaagcttccacaacatccaagcaattcaaaatccaaacatcatgaactatccaaaatcaagaaaacagggcagaggcaaagaactctgcccaaaacacattccaataccacaactttctctactcaaatacccagtaacattttctttgttccgcttcgttaaccggtggatcgacccgaaacttttactggagggtcctagtacatatgtctacattttg

SEQ ID NO: 120910 - DNA, 317 bp, Glycine max
tgtaagacatgcacaaagtgtgactatatgatgtggcaatggggtgtagcaagcaaatgctcacctccccctccaaaatataattgggttgggcttctcccaattcaattaaatttagttccaaccatacacatcaaatattcacttaatgtatatgaaattacaaaactacccctaatacaaaaacttgtctaggtgccctaaaatacaagggctgaaaaatcctacatttctagggtaccttacctatataatggagccctaaatacaaggaccaaaaataatgaaaccttaatctaatatgtacaaagataagc

SEQ ID NO: 120911 - DNA, 447 bp, Glycine max
  unsure (1)..(447): unsure at all n locations
agcttgtcaaggattaataatcttcctttattattcaaatcaaggtaaatgaaagactagaaagtcatttggttgtaaatgcaattattatattatctttaaaatagtaataacaaattgcaaaagaaaacattatcaaaagaataaaataaatgatattatgatattttatttaaaacgaggaaaaatataattatcttctcagtagctatgaaaaaggaaataaaatatttcatcaaaattaagaaaaatataaatagcactgaaatattatttattatctctaaaaatcaaaccttatcaataaaataaaagcaattactatagtattataaaatataattttatactaaaaaaatatttgaaaaaaccaggggtaacctccgtctncgtccctggtaaaaagtccattcacgtactttagtatttncaatgggatgcatcaag

SEQ ID NO: 120912 - DNA, 314 bp, Glycine max
tttatatggtaccatcaatttgattttacacaacaacaaagttggcatgccaagtgggatcagagtggatgaattgataaaatgatttgaatcaaaggttgagtcatattaacttacacatttgcactccagtaagactacaaaagacatggaactaacaaagaagaaaacgtgtatcaagaagacgactaaaggaataactttaggaatgacgacaacatgttaaatccacatccttggttttaattatgacaaaccattagcaatgcaaattgaaagcatgatgggtttaagtgataactaatgtcgcaacc

SEQ ID NO: 120913 - DNA, 371 bp, Glycine max
actttgatttctagccgtgtattgggctatattattataacatttgaacaatttaatatttcttttatttgcatggtatgaatgaacaattatgaattatgttatatgactatgtgggttttatatatttgaacatgatttggttatactctttaatgaatgtcttgtgtatgattagtagtgtatgtatgtttttttacttattacgcactttggctttttgttgatgccaaagggggagagaaataaggattaaatcaagaacttcgcgtagtaattaacttaatttcaagtgaagcataaactacaaaacaaagggggagaatatgggaaataagtgagagatcgactacgaaaaaatgtgtctatgt

SEQ ID NO: 120914 - DNA, 276 bp, Glycine max
tagccctagaggggatggaccttttcaggttttggagttgatcaataacaatacctataggttggacctcccagaagagtatggagtcagcaccacatttaacatatctgatttaattccttttccaggtggagctgatattgaggaggaggaactaacagatttgaggtcaaatcctcttcaaagggaaagggatgatgcaatcctccctaggaagggaccagtcactagaaccatgagcaagaggctccaagaagattgggctagagctgctga

SEQ ID NO: 120915 - DNA, 441 bp, Glycine max
  unsure (1)..(441): unsure at all n locations
agcttgatgtcattcaatagatactatgtctttctaaatgaagactaaacatgcattgtttatgtaattgtattcattatgcgatataatttgttgtaacccattactaaccaattaatattattaagtactcgtttggttaagcaaaaaaattgttggtccaacaaatatcatttacgcgtgtagcatacatcattgtcataattgacaacacataatgacatgcatgcgtattaaaagttgagcgcgacaacacattgactgacttgactacacattctgaatgaaacgtaaacacgaaacatgttcacgcgtgtctatttttttgtaaacaaaatgaagcaatcgctcggtcacaaccatctatatatatagcagacacggctaataaatcacacattatcttgctttcanatagtcttccaattgatacacaaagta

SEQ ID NO: 120916 - DNA, 311 bp, Glycine max
  unsure (1)..(311): unsure at all n locations
tttatcttggtggggagatatcattctctattggtgacttggtaaccttgcaatccatgtatgtattatatcttttgatttgtaattatttgatcatacaccttnttctcttagctcttatttttttaacctgaattttgcatttcttgcaatgacagagacctgcagggaaataaactaactggtcaaattccagatgaaattggaaactgtgctgaacttatttatctgtatgaaccatgccatgatcttgtttctatttacttatgtgtatgtgtcgttcttttcataccgtgctggaatttcccgtg

SEQ ID NO: 120917 - DNA, 420 bp, Glycine max
  unsure (1)..(420): unsure at all n locations
agcttctttttagacctcgataggtcgtctttccttgccgacgccgactgtcanttttttcgatcaatatcggtgaataatattttttttgccgaggtgggctaatgttttcctggccgaataaatcggaacatgccagtttcggccgaaacgaaacatcggttgagctcgcacgaaaaaacctagccgacctacattgtaaagtttttatgcaacaccgaaacaagaaaacttcccctgccgtaagaaaaaacattatcggccagcgagcattttttttttaaaaaaattgcgcaatgtcggctgacgaatatcagtcggggccatttcacgaccgatgtcggctattgagttttctattcaatccctcgaatgaaattgcaagatatcgattaggaaatgtttgatcggcgtcatctg

SEQ ID NO: 120918 - DNA, 308 bp, Glycine max
  unsure (1)..(308): unsure at all n locations
tcaccggatgatgccgatcgaacatttcctaatcgacatcatccaattgttattcaaggattgaataaaataaacaatggccggtgtcggtcgttatatggccccgactgatatctttcagccgacattgcgcaatttcttttacaaacgctggcgatgatgttttttttttgttttttacggtagaggaagttttttgttttggtgttgcctaaaaaatttacaacgtaggtcggctaggtttttccgtgcgagctcaaccgagggttcattccgacagacactggcatgttgttnctctcattttg

SEQ ID NO: 120919 - DNA, 433 bp, Glycine max
  unsure (1)..(433): unsure at all n locations
gcaagctaaaaaaaaaaaaggatagaaatgtttgattcgttcatgctanaatgggcgaaacttatcaattgaacagggtttcatgaagactatatcgtgtacttctcaaggagcagagataagcattctgaataatgtcagtggcatcataaagccctcaaggtaggtgaatatgttatgtgtgtatgttattttagaacacgagataacttagaaatgctaacaacacactttttattattggttgaaatttattgtaactcatttagagtaagactgggagtgagacccacatgatttaatgtgttacaaatgaattttaaacaatagtaaagagtgttattagtatttctcattntcagctagttactgacaaaataagtattcatgtgcacatgaatgtgtctcaagcacatgntttcagtctttaaaa

SEQ ID NO: 120920 - DNA, 301 bp, Glycine max
tggagatgcctgcccaatagagctttgattggaattgtagttagttaggataatataatatctaattatctattcatatgttctgagtttgcaagtgggaagagggagttagctaagtcaagtttagaaaatgtaggttgattttaagaaagaaaaagaaacaaacaacttacaaggagccagtcaatacagcaaatattatggtcacgacctcgcctcctgtatatcctttctctattaccatttttgcaccaaaccatacagccagaccataactgcacattaaaacaaagtagagcac

SEQ ID NO: 120921 - DNA, 223 bp, Glycine max
cctaccacccctccacgggatcagggacgaaaaaataacaaggccgcgtcgtcgtatatggccccactgaatatttcatccgacttgccactacttttacaaacgctggcaagagtcatatttgtcgttacgcatagaagtttttgttaggggtgaccaaaaaatgacaaccagtcgctagttttccgtccagccaaccgaggttattcctacaaacacggca

SEQ ID NO: 120922 - DNA, 180 bp, Glycine max
  unsure (1)..(180): unsure at all n locations
agcttgaaggtgtgtaacccaccattttcataatagaacactgtttacgtgtctactatcatgngatatctcttctctgtattggggcgctactgagctgccaatctctcatttgtggcgatttttgaaaattcgccccccttttgcacaatgtcgttttgcattctttccaactcatta

SEQ ID NO: 120923 - DNA, 326 bp, Glycine max
gtgcaaatcatatcactcctacatttcatctctagcatgcattttctttctttacccactcctcacgtttggttttttagggaaaaacaccataactaaacgcgccgcaaggtatccctatcgcaccagatccaaatctagaacgatgggtgatcaagaggagacgcaggaacagatgaaagccgacatgtcggctctgaaagaacaaatggcttccatgatggaggccatgttaagtatgaagcagctcatagagaagaacgcggccactgccgccgctgccagttacgctggcgaagcagacccgatatcttggcaactatgca

SEQ ID NO: 120924 - DNA, 369 bp, Glycine max
  unsure (1)..(369): unsure at all n locations
gagtacgacagtcaccgctttaggagcgctgtacaccagcaacgcttcgaagccatcaagggatggtccgttctccgggagcgacgcgtccagctcagggacgacgaatatactgattttcaggaggaaatagggcgccggcggtgggcaccactggttactcctatggccaagtttgatccagaaatagtccttgagtnttatgccaatgcttggccaacagaggagggcgtgcgtgacatgagatcctgggttaggggtcagtggatcccgttcgatgccgacgctatcagccagctcctgngatatccgatggtgttggaagagggccaagaatgcgagtatggccagaggaggaaccggtctgat

SEQ ID NO: 120925 - DNA, 267 bp, Glycine max
  unsure (1)..(267): unsure at all n locations
tttgagccncaangaggtgcgctaatggtttttttgcaccatggagatgcagcggaagacaaaggataagatgtgagatgaggcgtcatccactaaggaataagccatggtagaaggagcttcatcaccaaagatgcgccttggataagaagcttggagaggatgcttctttggaggaaaagaatgatggagagatatagagaggggggagcacgaaattgaaggaagaaaaacggagagaagtttaacaccaaactgtgtcgcaca

SEQ ID NO: 120926 - DNA, 457 bp, Glycine max
  unsure (1)..(457): unsure at all n locations
cctgcngcatgcaagcttgtctcagcgtttatgcgagacggagaccatcatgctagtctatatcgccaagtaccaagaagagttaggtctatccacggcccacgagcataaaatcgcggatgagtatgcccaagtatacgcggaaaaagaggctagaggaagggtgatcgactctttacaccaagaggcaaccatgtggatggatcggtttgccttaccttgaacgggagtcaagaacttcctcgattgttagccaaggccaatgcgatggcagacacctactccgcccccgaagagattcatgggcttctctgctattgtcagcatatgatagacttaatggcccacataattagaaatcgttaggaaacttgtatggtctctcagaccttgactagagatgactttctttntgaaatataatgagttggtcccatgtttctactcccaaaagctt

SEQ ID NO: 120927 - DNA, 332 bp, Glycine max
cttctatagaaggttcgctcctaatttttctacaattgcatcacctcttttgagctggtgaagaagaatgtggcatttacctggggtgaaaaacaagagcaagcctttgctttgctcaaagaaaagcttactaaggcacctgttctagctcttcctgacttttctaaaacttttgagctagaatgtgatgcctctggagtgggagttggagctgtattgttacaaggtgggcaccctatttcttattttagtgaaaaacttgatagtgccaccctcaactaccccacctatgataaagagctttatgccttaataagagccctccaaacttg

SEQ ID NO: 120928 - DNA, 385 bp, Glycine max
  unsure (1)..(385): unsure at all n locations
tgagaacngggaaattgttagataggaatcgctgttttgaagctccgcttagtgttcgcttggagttttgtatatttttagcccaataaattatttcttatataccgagatatatttcaatttgcatttacccaacggctattattactcgggtaacatatgcccgtaattttagttgtgaaaattgttattaacttattagctcgagggttagtctcaaaggaaaggaaaacaaaaattaaactacattactcgaatacttgttccgaacttccgcgtctttgctttgctntatctcggaccatatatatatatatatatatatcagattgatgaatgcgcatggaagaatcatttatacagaatttgggttgacattcttgca

SEQ ID NO: 120929 - DNA, 309 bp, Glycine max
ttatttttttcatgggaattgtttttgcccttccctagctaaatgcttaaagacaggattaacttgtcaagcaacatctactttccttgaatataaggtgaaaaaattggtcgggaaacgactgggtttcgttacacatgctttatccttaaactgctgcgacaatttgaaaaaatcgcttcgtgccgaaagtttactgaaattttaaaaataaggtcaattccatctttttttagagaagatccttaaatataataacggtcgttttctgtcccctcacggcttaatgttcaattcacgattcatatg

SEQ ID NO: 120930 - DNA, 449 bp, Glycine max
  unsure (1)..(449): unsure at all n locations
agcttgaacgaatgtaagactcatcttcttcatccttggtgattcttgactccatctcattgaagcgcatatccacttgtaattccaaattgtcaaacctttcaccaacaaaggtttgaaggccatcaaacctgtccaaaatctttgaaagaagagatgaatcttctccatcatgtccttcttcaccaacatgtcgagcacccttcttcacccaagagtaatcatgctctttttgataaccaaaggatgttatgactgaagcgcctataaggaaggatctcttgattggaacatatggttcanaatcaagagggatgttgaagtgttgaaggaaaagggtgactagatgagggtaaggcaaaggagcattcaatcgcaatgccttatgcatgcgatatctaacaagatgtgcccaatcaatttgtatacctttatgaaaggcccacatg

SEQ ID NO: 120931 - DNA, 307 bp, Glycine max
ttcacttaaatcacccacccaaagaaaatcccttacaaccaaataaccacaacttcttaacggcataaagtgtaccacgacctcacgaaatggacccctatctatgtattggtatcaaccatcatctactcatacatgttaatctgtgaaactaacgtacaactcaaagatgaaagaaaaaaatgtaagttgttctttcactcacttgaggaaatttcaaagattgtgcttgtgtgaaacaatttatcttcgattcagtcaatgcattttaacaatttttatcttccttacaaaaataggaaataaa

SEQ ID NO: 120932 - DNA, 455 bp, Glycine max
  unsure (1)..(455): unsure at all n locations
agctntgagccaaaatcccatcttaccatattccttgaactagggtgagaatatcaatccttgccctcgaaagacaacacanaaagaaggaaaatccccaatcaaagaaagggagaaagcaaaaaaggaaagataattcccaattaaaagagggagagaaagcaaaaaaagaagaagaaagataatccccgatcaaagatcggaagaaaatagaagaaacatgcagaaaggtctttggaccaaacaatatctgaatagtacagagttatcaccaaagtaaatatgaaaagaaaggaaaccacgacctaaagtggtcctctccctttgattaccaaccaaaatcatgtgcgtcggtgacttgttcgcctcgcgctaaacaaaaacagaaaagaanaaggccaaaaatactcaaagccaaatttcccaccaagaaaaaccccattcccaagaaaaag

SEQ ID NO: 120933 - DNA, 317 bp, Glycine max
tgtagaatggctagacatgatacatgtcagggctcggtttggttcaagggtaaaagggatgccccacattatttccatgacacaaatgcaaaaatgatgatttggaaaatttatgcaaaactggtcatgcatgcacctatgcggacactcaagtgtcaaatttttatggtcatgtgatgctagggctcaggatttatttcctctattttaaatcaacccaatgtttccaaaatatgttcttttatcaatttgtgcattcattcgagtccatttcgggcgtccggggaaatttcacagcattcacccttcaggtgtag

SEQ ID NO: 120934 - DNA, 320 bp, Glycine max
agcttgtggagagaacaaatctcatagctgtcttgtcctttggtgtcacgttgttttccttggtaggaaacaagttcatggttgtagcagattgacaagatgtctcacgtgaccctgtaaaaaaattcacattaggcaaaaaaggatgaataagaaaaagcctctttaggaaagaagcaaaaacatctgaaattaaacccgttttgaactaaaagaaaccaaacattaacctggtatcattttcttcccttacaacatattacttttcactaaatagaggggcaaattgagccatgtgtatatctatcaatttgaaaatc

SEQ ID NO: 120935 - DNA, 315 bp, Glycine max
  unsure (1)..(315): unsure at all n locations
ttttttagttataaatccaancaatttagcataactaaccttcataatatatattaagacgattaaatgaagacttgaacattaatggattttgcatctgcaaggattcaactacatccttctgaaccctacagaaaaatgaatatccaaggaatcaatgccacagcgtaattcccatttctctcccctcaaaacataaaaatttgagataagaatgaatgagaatgcctgtaccaaaaaaattacccagaatgtgcaatgatcattgtggtaagatgagtgttgacagaataactagcaaagaataatttgaca

SEQ ID NO: 120936 - DNA, 393 bp, Glycine max
  unsure (1)..(393): unsure at all n locations
aaacgatcctctttgcttttatcggttaacatggaccgttcaaaaccctaaaatcaacacataactttaccgctttcgcaagaactacgtaggtctgagttcctcatcacaaatcgaggatacctaggaaccaaaaccccgcttttgtcgatcatcccttttttaaaaaaaaaaaacaagagatcgttaatggtccaatgccttaacgtttctcttctttcacaaccaagagatcattaatggtccaatgccttaaacgaactttggttgggtaaaatatatcttgcaaaaaaaaagaagaaaaaacaacttaaccaacgtttagttctgaaagaactacgtaggtatgatntcatcatcgcaattgaggaatacgtggagtgagggaaacac

SEQ ID NO: 120937 - DNA, 311 bp, Glycine max
tgcccttgttcatgatttctttcttctctttttcctctttccttttcttttttcactaggtgaggatgcttttctgactaggtcttgtagtcacccatattcattgataaaaaataaatgtgatgatttcaatatatgtgatgttagtatcacccttttttcaatgtttttttgttaaacttgtgttcttaagatttgttgtttgacttattatcattactagttgtgggtaatattattttcaatcgacttatggcttatatttttctctaagctgtggagcaatgacacataatgtaaagtcatgcacg

SEQ ID NO: 120938 - DNA, 334 bp, Glycine max
  unsure (1)..(334): unsure at all n locations
aaaaaaaaacattaggcagagaattggactataatattaataactaatatgcgtaatatatagatatcgcgtgccacgctagaaatatatatgtttaaaaatatcttcatatatgttaactatttacttgagtgtccataataaaatgttcgcgcataagaattattactcgtgtatacatcaagaaaagtttaaatagaatcaggcaatgtttccncggaaaagaagctgaaaagaatgttttgggattacatatgaccaagacacaagaattccttcttcaggttgattctttatcccttttgaaatgtcacactcacagttagttgtatat

SEQ ID NO: 120939 - DNA, 218 bp, Glycine max
tacaccatcatgtattgccaaaaggtgaaaaagcctagaatacggtaaagatgacttttttgggaatggaagcaatccctatctagcgatctatctgagttgtagacccgagaagcataactacctaataatggggacgagaaatgaactttgtttaggatttaaaatatggggagatgctatacgcgatcaaaatttgtgcgtccgggtaagaatta

SEQ ID NO: 120940 - DNA, 439 bp, Glycine max
  unsure (1)..(439): unsure at all n locations
agcttcataagatcatcctcttgacaacattattggtgatatctcanaaggtgtaacaactagacattctctntaaagatntatgcaataatatggcttttgtgtctatgattgaacctaanaatataaatgaagccataatagatgatcatttgatagttgctatgcaagaagaactaaatcagtttgagagaaacaatgtgtgggaactagtagagaaacctgaaaactacctgtcataccctaatttcgtccagggaccattgtttgatggcatgcaacctttatttgaccgcttcgaggtacttggcaccctttgttgcacaatacgtgaagttttgtgacatgccggagatcataaggaagcattgttacacaatcttgtgagttccgtaacatgtctgaaatcaaaaggatgcgttgtacgcaatctgtgagg

SEQ ID NO: 120941 - DNA, 304 bp, Glycine max
tgctaacccatggaagctcctaatatctcccacactttttggggtgggccattcttggatggccttgattttctcagggtccacttggaccccatttctaccaactacaaaacctaagaaaactatattatctacacaaaaggtacacttctctatatttgcatagagggtgtttttcctaaggactgaaagaacttgtctgagatgtcctaagtgatcatctagggtcctactatacactaaaatatcatcaaaataaacaactacaaatctacctatgaaatcccttaagacatgatgcata

SEQ ID NO: 120942 - DNA, 294 bp, Glycine max
tatgaaaaactgtgctttcctggttttacgggagatcttgcgtaggaggaaggttcgtaaatgatatctatcactttatatattccttgatcgctatatgtgtatgcatggtagtggatcactatgctagaagatacagttcattatcacagagccgaatcatggaagctgcaaaatagttgtgggatgggaggaatactggcaataagacttgttcaataccaagtgtgtaccgtgagatgatggaggggcagacttacactgataggagaggatgcgtccatcactatgtga

SEQ ID NO: 120943 - DNA, 467 bp, Glycine max
  unsure (1)..(467): unsure at all n locations
tcacctgcggcatgcaagcttccatcactttttcctatgtaaaaaaaatccttaagtctttgtggtcagtggcttaagcaattttgcagttaggggtttgcatcgtgatcatgacattcgttggtgcacactgttctggtcatcaccataggtaccaaactntttcattaaattnttatgctntaatttgtacgattgtttttgtatgtggatttatcgcattaatgtatttcgctttaaaggacttgacaatactcaacaaactaaatccaagcctcctgctaggtggattgttgttaaagtaagtcatttaaacaatatgtttctacttatantttagtactgtgtaaactaatttgtactcaacgttgaatatctaaatttcataatgtatttagtggaatagacaaaaaggaagcactgagtggntgtattacgtcatgcactgaatatcaactataatctta

SEQ ID NO: 120944 - DNA, 279 bp, Glycine max
ttgaatgtatgacatgtatatttttcgacatgttctcataaaaatgcaaactaatcaatggaaacaaacaattttattcaaggataggtgaaacagtttcacggataatacaacaaataaaagaaaaaatgatctgtacaacaaattcagagaatggaaacattattggatgactttgctgttggagtgacgctatccaaatgttaatgttcaaaacacatgttagtgactttgactgttctacaatatactttagagaaaaatctttttaacacttat

SEQ ID NO: 120945 - DNA, 316 bp, Glycine max
gagttttttattttttcttgagaagccttttcatgcacaagagtctggccttggcttgaaacttttgcatgtttaggaagttctaaagagagaaaggtccaagttccagagagttctgagagattttgctgtgtgaagatctacagagacaagagttcgaagcggaagccattcttagagattgagatgagtttgtgagtgattgtgagatcctagaggtgaaggagacatcctcaccacttgtatttttgcaatctttcatcttgttcttctctgtgttgtaaaggaggtttccagaccatggaaagctaaatcc

SEQ ID NO: 120946 - DNA, 457 bp, Glycine max
  unsure (1)..(457): unsure at all n locations
agctntaacctcatcgtctctcacagtctttatatttgggagctcttccaatccttgtgttcggactctcagccacttatgatagctgccgatgatcccattacggcttcccctaagctctctgtcctttcttcacgccgcatcccatgccttgcgaactccttagagtaccctcgcattggggtcactgaaaccccgtgtgatgaaaagcgtgatgctttcgtctgatggcactcctctcatggggtagccaagctgtcttatggcgaggacgagattataattaatacaaccccttgttccatcatgggaacatttggacatccttcgcatgaagatagaatcctgattcttccttccttctagcgagggaaccaattaacagacgcccctctatgctagccaagagttggtcccaattcgtctttctttttttcgacgcacgagcggtgacctt

SEQ ID NO: 120947 - DNA, 313 bp, Glycine max
tataacagttcccaggttctagtttaggctcctcttctctctctcctctcctttctctctttttcgttttagttttagagtgctactctcaattcgttttagtttctttttcgtttttcgagaataattctagttttcttcgtttctactacaattttgttttctattgattaatggaaggctaagtctcgagcgttgttttctcttgaggatcaagcacaactctcattgaggttctattattactattaaattctgatcagtttttcctcttcaccaattactctgtatttgatgatattaattcatgcat

SEQ ID NO: 120948 - DNA, 448 bp, Glycine max
  unsure (1)..(448): unsure at all n locations
agctntagaagggattgcatgacaaccggaggcataggaagaattactatgtgctntattacgggtgcatacttgagcaacttggtttgatcaatttttttattattattacttttactactacggtatgggtgtgagaaaaanaatttcaaatgatattggttgttcctcctttntacttctattaatctctgttcctctttattcctaggttgtgtatatttgcaagttctataaatttaactctgctaagacgttcttattgtatcctgggagatttgtgtgggataccgcagataaaccttttaggtcagtgactaccacgtctcaagaagttcaaccacgttcatgattttcgacttcagcaacaacacatggaaggaattttgctattntcaatcaagtgggaagctatatcaaaagaataaagcttgagtattcatatttt

SEQ ID NO: 120949 - DNA, 326 bp, Glycine max
cgaggtactcacccgttgaagatcgaagaacgatgaagaacgtatgaagaacgtcgaagaacggtcgaaaccttcgcgaaattcctcacggaaatgtttcggaagtgcctcggcttggattttcttcacggaaacaatttttccaagcaaattcgaaagagagagaagtgcctaaggggctgaaccctttttcacttcacttctccccctatttatagaaaattgggggagaagcttgcaacccagctcgcccaggcgagcagggttgcttcctccagaagcaacagccttctggaggaatcttccggagggcccaagtgggcctg

SEQ ID NO: 120950 - DNA, 394 bp, Glycine max
  unsure (1)..(394): unsure at all n locations
agcttgtattagagagctctaaacactctatataagattttaattatattcctttattaatatatatgtgaggggtacagggtgtcacatgaaccataattgaaattcactaatcatagttagtaaaatgttggcactaanatagaatgtcacatttgcccctgaagatgttgagaattacatgatgaatcttttctctgacggaaaatcgagctcccgcaacggatgaaacaaatcgtgttttgtaagcgtaaaaaatgctgatgattagatatttcacaacatgggtgcacaaatctatttcttctggatcctcttatctaatcattgtcactgaatagggttacaacttaccattacatcatacacatattattatatgactctttcctta

SEQ ID NO: 120951 - DNA, 355 bp, Glycine max
  unsure (1)..(355): unsure at all n locations
tagtgacactgagactgctaagctttgctcanagcttacggtaaaatctgttacctagccatggtagaagctttcacagaggccattgtctccctcaccaggattatgatcagcagatgaggtgcttcacctttggggacttccagctatcacccatggcggaagaatttgaagagatcctaggatgtcctctagggggaaggagaccatacctcttctgagggttctatcccttattagctagaatttctaagatagcccaaatctcggcgcacgaattataccacagaaagcaagtctaatatggggtgggtggaataccgagaaaatattcggaggtcaaagcgagaatctt

SEQ ID NO: 120952 - DNA, 343 bp, Glycine max
agtgaactataaaactcagcttttattcagctgatacactacagttataaacacacgtggagtattatgcgaaaattacagcatatctatctgacctaagagagagcgaatgctcgtaggtctcgagtgattgaacaacactacgcctgtatcggaaggactacacaaccggtgtgtgcatggccgtcgattggatatgagtgatgtcggatgcttcctattatcttcacccttgtgcttatagaccactatctcggaaaagacgcctgtgtcgataactagctagtggcaataacttcgggcatacgcactgactataaccggttcttgagcctgaaatgag

SEQ ID NO: 120953 - DNA, 435 bp, Glycine max
agctatagtagacactggttgttcctttactttcatatgcaaaagtgttggatctcaacataattgctttagaagtaatataataaccaagactagaactatgtcaggagacataataatgaatgatacagaaactgaaaaattcactatacaattatctacaaattgtgacatttttggcaaaaagatttttataaacaaggctgacatagtagaattgcaacctgctaaagaacaaatgatcctaggacttgattttattaaacatgataatatattagttactattacaaaagattatttattaatctctacaaactcacaaatgtcaaaaataatagatgaactcacataagagatacgagcaaagtgtggtgatacccctaccaaccctacacctaccctcaattcccaatgtccttttgacatacgtgg

SEQ ID NO: 120954 - DNA, 317 bp, Glycine max
ttatattttgttgtgtcgattctttatagagtaccttattaaaaaaactaaaaaaaaatctgtatgagctatggagaaaaagagaaccaaatctgaaatatcttaaagtgtgggggtgtctaataaaggttaatatccctattaataagaaaaggaaaattgaaaaaaaatgttaattgtattttgttggatattttttacataatactacttatagattcttagttgttaattcagaagtgactaaaatttataatgttactattatgcaatctagagatgtcactttctttgaaaatctttttccttaaaaaata

SEQ ID NO: 120955 - DNA, 449 bp, Glycine max
  unsure (1)..(449): unsure at all n locations
agcttgtaggattatggggtacccatcacatgtgtgtactaggtggcggncgggcgatggtgcacaacaagttttccacatccacaaagcgcgcataaacccaccatcccctgttgcccacctccatctgagctcacgtactcccatgtagcccatatcctcgtttctctcaacaccgggtccccatcaatcctcccaagcttccacaacatccaagcaaaacaacattcaaacagcacaagctatcacagccaagcaaaacagggcaaaggcagaaaactctgccaaaacaccaaccaaatcacagcttttctcacttaaagaccccagtaacaattccttcgttccagttcattaaccgttggatcgactcgaaaattttactggaagtctttagtacataagcctacattnntgaccgtgggatctactagcaaacatccagaact

SEQ ID NO: 120956 - DNA, 311 bp, Glycine max
tgaagaggatgctttaatggaggttttaaagagagaaggggggagcacgaaattgaaggaataaaagagggaaagaagtggaactttgaagtgtatcttataagactttcattcatcaaagttacaacaagtgttacacatgcttctatttatagactaggtagcttccttgagaagctttcttaagaaaactttcttgagaagctttcttaagaaaacttccttgagaagcttctttgagaaaacttccttgtgaagctagagtttagctacacacacccatctaaaaactaagctcacctccttgagaa

SEQ ID NO: 120957 - DNA, 335 bp, Glycine max
acactatcgacaactcaagcttgtgccacacgtaaacaaccaaagtttcataggccatatcaatggcaaagtaagcaccaacaaagaacggtatcgccattaccatgggcaaaggcatccatttaccaatcttattgggggagaggtctctgaccatgttcacagccaccgggaaagcgaagaacccgtaacagagctgcaagcagaggtggggaagtgcctagaaaacttcgacgcctaagactgccatgtttatgtaaatgagagcatagggagccttgaattcaccatgcgggttccccacatagaacgccttgtataacagaaagaaactg

SEQ ID NO: 120958 - DNA, 476 bp, Glycine max
  unsure (1)..(476): unsure at all n locations
tcctctcagtcacctgcggcatgcaagcttgtgcgaatcanatcactcctatattttatctctagcattcattttctttctttacccactcctcacgtttggttttttggggaaaaacaccataactaaacgcgccgcaagggatccctatcgcaccagatccaaatctagaacgatgggtgatcaagaggagacgcatgaacagatgaaagccgacatgtcggctctgaaagaacaaatggcctccatgatgaaggccatgttaagtatgaagcagctcatagagaagaacgcggccaccgccgtcgctgccagttcggctgccgaagcagacccgactgtcttggcaactacgcaccatcctccctcaaacatagtaggacggggaagggacacactgnggcacgatggcagccctcacctgggatacaaccgagccgcttacccttatggattgccgccaactatcaccaccc

SEQ ID NO: 120959 - DNA, 320 bp, Glycine max
ctcaagctttgacttgagttatcaagagattatttattgtgggcatggcatgaaggtcaataatgaatgatctatcatatcttgtagtcaatctgacaatattttatttcatctctttcaacagattttatctgactcatcttctgttcatctttctgaaagtttttgttcaatactttttctttcaagagaagttctttgataaaaaacttgcgttattcatcttttggattctcttctccctttgccaaaagaacgaaggactaaccgcctgaatacttctgtgtttctcttctcccttacaaaagattcaaaggact

SEQ ID NO: 120960 - DNA, 430 bp, Glycine max
  unsure (1)..(430): unsure at all n locations
agcttagttatctctctcccttatggtcccttaaataggggcacggagcanacacgctgcgtgccattnttcacactgccatgcataaagtgtcatgtacccttattgcttatatttgtttgtaaatattgtcgtactatgtacatatctgtattgtacctctcgcatatgcatcatgcgtgggtttcgtcttaatcccctccttaaacaaaccaacggagagtccgtgtcaccttcttaaatacatatgttgggcactttgctaccctaagacgtcgtatctaagaaaaagacaatttctcgggctcccgtattcgtgaattgcatctgtatcatatgcattttcttcatgcattcatccattccacccatgatagatgtcggagttttgattcgcactagattttgtttcactttggtaaaacatggg

SEQ ID NO: 120961 - DNA, 307 bp, Glycine max
tcaggctgctcaattgctccaggttgttgcatggaagggcaaaggtctgtatggtggtcagcagaggagcacaaaccacagactcttgcgacaggtacagatttcttattcaaggccagctgggttaccaagttaaccaatgcatctagtttgccttcaagcttcttagtttcagatgatgcagatgagtttgtagctacctcatgcactcctctaatgactatagcatcatttctggtgctaaactgctgggagttggaagccatcttctcaattaactttctggctttagtaggagtcatgtctc

SEQ ID NO: 120962 - DNA, 394 bp, Glycine max
  unsure (1)..(394): unsure at all n locations
ttatcggtaactttttcattaatcctaccaaatatttttaattaaatatggctagttataaaccttctatttttcagcttataacttataaggttttaactaatttatccgctagttttactaaacataatgagtaaatgtcatatcacattcgctatattttaaatcaaacccccaaattgcaatcccaaatctaatcaattctcaaaatcacaatcctatattntaatcaagcattgaggaaacgatttcgcagagccaattcttacagtcatggaatgaattcagaatatggtcatcaaaccaaatggtgttgatttgggtatttgaattgagttacattttaaagacaacaactatctctacttgtgtgtgtgtgaaggagcatcacaca

SEQ ID NO: 120963 - DNA, 301 bp, Glycine max
ttgtgtctctttaaaatctgcacttactgatcttcatctattttcttcaataaactactaataatcactggttttgagtcattgttctccaaaaacacatactgcaaatgggcaggtaaggtcttcaattctgcttttggtttttctatttgcccactattcttcaactcctcaaatacagaatgtccctcagagatttctcctgcaccttccaatcctttgatgcaagtctgcacttcttgttcctcctctttagtgagatattctacatgattaaccaatgctttttccaaaggagaat

SEQ ID NO: 120964 - DNA, 281 bp, Glycine max
  unsure (1)..(281): unsure at all n locations
ttccaatatgcatgngaatatgaagctcaacttgatcaagcaagggctagtgtgcatgcggtcaatggaggagaacacaccaaaagattatgaagagggacgactcattttctaaggcaggtgaagtaatcacttaaaaaagagctctaaaaagtattatgacatgttgaggaaaatgaaggatatgaagttgcaaaatgccaataactttcattaatgaaaaaatcacccatttttggagcatatccgatgggactaagaaaaccatgtctagatttaca

SEQ ID NO: 120965 - DNA, 446 bp, Glycine max
  unsure (1)..(446): unsure at all n locations
ctgcagctacaactagttggttagaataaataataatttgatttatatataatcaaatgtagcttttaccataaaaatatttaaataagtagttattaaataacggagtaataaataaaagaagttatttggtatttgctaaacgttaagacaccaaatttcaactttcacatgttcctattttcggtacctacactatgggattatntaattatttattatgttattgatatggagtattgattaattttggtgctaattaattntgattgaaaaatttaactgattattataatgggtttttttttctttcatttatggttttttatcctcacaaattaaattaaaatttttattaaagataattaaatatatacgcctatnggtcacatgctacttcacttataaaatacatgatacatactagtctttcaaaaatagagaaa

SEQ ID NO: 120966 - DNA, 334 bp, Glycine max
taaaagttggggtcacttataatttaaatcattgattttccgagaattctaatggaaatacgagagtgtgtaatgatttttgttttttgtcttgtatgaacatcctttggtaaactgaatatttctctctatatgatttactttggattttgagtcataccttatccaaaactagacatacatgactttttatactggtaaagtttataaaattttgttatatgataagtttaagttatgcaatagttttataaatactctatagaagaaaaaaaatgtaaacttgagttttaatataaatttttaatcagataaatatatttatgtataaatt

SEQ ID NO: 120967 - DNA, 462 bp, Glycine max
  unsure (1)..(462): unsure at all n locations
tcttacatcacctgcggcatgcaagcttgcctcanagaggtccaggaaggacaatgcggccgaaggaactanttccgctccggagtacgacagtcaccgctttatgagcgctgtacaccagcagcgcttcgaagccatcaagggatggtcgtttctccgggagcgacgcgtccagctcagggacgacgagtatacttgatttcaggaggaaatagggcgccggcggtgggcaccactggttactcctatggccaagtttgatccagaaatagtccttgagttttatgccaatgcttggccaacagaggagggcgtgcgtgacatgagatcctgngttaggggtcagtggatcccgttcgatgccgacgctatcagccagctcctgggatatccgatggtgttggaagagggccacgaatgcgagtatggccagaggaggaaccggtctgatgggttcgatga

SEQ ID NO: 120968 - DNA, 332 bp, Glycine max
tgcttgtggagcttctatggaggctggatctttgagcttcaatgaggtcctttaatggtggttttccaccatggagatgcagcggaagacaaaggagaagaggtgagaggaggcgtcatccactagggaataagccatggaagaaggagcttcatcaccaaggatgcgccttggataagaagcttggagaggatgcttcaatggaggaaaagaaagagggagagaaagagagaggggggagcacgaaattgaaggaagaaaaagggagagaagtttaactttgagttgtgtctcacaagactctcattcatcaaagttacaacaagtgtcac

SEQ ID NO: 120969 - DNA, 440 bp, Glycine max
taactattggatgctcctcacagtttttaaaaccctttgcacctctcaattcttatgcccaaattggaattcttattccctgttcaacataagggggaccctaaccataaaaagaaaataaaaaattagataatttcattgtaataaatattatatgaaaatgaagttgaaagatggagattcggaggaattgagttgggcccagatatatcagtcagtaacaagaacaaccaagtaataaagttttggtaacaatgaaggtcatgttctattcatggataaaaaggaacagaaaagagtgaatctattgtcactaatgaaatgggttatataacaatgtctatggaagagagaaaatacgataataacagaacctgtgtcataattaaaagtcaagtagccaaatttattttggaaaaataaacatttaatttatggga

SEQ ID NO: 120970 - DNA, 333 bp, Glycine max
  unsure (1)..(333): unsure at all n locations
cttgtggtcttgtctacatgcatgtatttgacaggcagcgnaaacaaagagatagccagctaaaagacaagggttattcagcatttttcccagatggctaccaagacatatctgtatgttctcgtatgttgttattttggtgttcttattctgccatgcacaggtgttcatatatacatgttgttgaatgtaatcaactgacataggctatttcaacttaataagtaattttgagttcaaattctgatatacacctgcattaaatacttagagggagaattttatcatccaatcatcataatgattctatctaactcaagcactgtatttctt

SEQ ID NO: 120971 - DNA, 421 bp, Glycine max
  unsure (1)..(421): unsure at all n locations
cgatccgcagcatgcaagctntcttaaaagattaagctagagcttatttcacaccctctataatagctaagctcacccccatgacaaaaaacatgaaaataataaaaaaaaaagtccttattacaaagacaactcaaaatgccccgaaatacaaggctaaaaccctatactactagaatggccaaaatacaaggcctagacgaaggaaaaacctattctaatatttacaaagataagcgggctcatacttagcccatgggctcgaaatctaccctaaggctcatgagaaccctagggactttccttggatctctagcccaatctacttggagtcttctagccaatgcccttgcggggtaggattgcatcaggaagcactaagaaaagtcaaacgacaataacttttaactcggatgtctga

SEQ ID NO: 120972 - DNA, 270 bp, Glycine max
  unsure (1)..(270): unsure at all n locations
ttgatttatgagtgtaattttattttgggcctatttttggacctataatgggtggtcatgaccttttatagttattcttaagtctttaaattattagattagntattgggctttgggcctagtttagggttatttgtaggagatataaatagattcattccacactttgaaggcaattttttatgatatatcatattaaacacaattaagggagtgtttttcttggtgcttatgggaaaactgaggttcttatcaaagaattctattctc

SEQ ID NO: 120973 - DNA, 443 bp, Glycine max
  unsure (1)..(443): unsure at all n locations
agcttctagttgaggtccttatttctgctntcttgacctcaatgtaatgaaactcacattnttgggattctggacagattgagaaggtaatctgtcagaattctgggactattgttgatttaactatgtagccaattgtctcatctgattagttaagctctgaatggaggctctggtctcttgttgaaactgcatgttttgcatagtcatttgtctcacaagttctttaagggaaggttgcagaggggcctcaactgtttgttgattctggggctgttgttgttgttggtgctggattagtggaggaacgtatggtgtgcttgggccaccaacattttgaaaataaggcttgtgttgttgttgctactgttgtgaacgattcgaccatctanggtagggatgattccttcacctacggttgtacctgttgctggagaggtcat

SEQ ID NO: 120974 - DNA, 318 bp, Glycine max
ttagtcaaacagaataatccgaatttgtcaaagaattgggcgttgaaaaagcataacaaaactttttgtgattggtttaaagatacaatctttgcagatgagaatgcttcagaaacattaagaaaactagcagatgggcctaaaagaaatgttataacctggcaaggatacgacataaacaggtattcattttacacaaaagcacaagatgacaaaagtacaatgcagaacagcggggtcaccctaagggctgaatctcaacactttgcaagtgtcaatgacgccaatccctgtgtagcttccatcccttactttggg

SEQ ID NO: 120975 - DNA, 404 bp, Glycine max
agcttcatggtgaattaaaggtgattcaaagtgtgttatgatgataacaatgatgatgacaaaggtgatgacaaacagctcacagatcaagtcaagaacaactcaagtgaatcaagaacaattcatgaaagtcaagatgagaatcaagaagaattcacgactccagacgaaagtctagagacaagaatcaagattcaaggttcaagatctcacgaatcaagatcaagattcgagactcaagattcaagaataaagagaagactcaatcaagataagtattaaacagttttttcaaaactttgaatagcacatgagtttttgacaaaaccttttaccaaagagtttttactctctggtaatcgattaccagatcggtgtaatcaattaccagtagcacaatgagt

SEQ ID NO: 120976 - DNA, 315 bp, Glycine max
tgataaaatctggcatacctgtcttcatgttgatcttcgtcccttcacataagatggtgcatccatcaagatactttactataggtgggaaggctgcatatcggctcatatgcatattggcttcataacctactcattcgttcaccctaacatagtgatgacaatgttgttctcaaccatatcactaatgttaggtccattgaccactaaacgacccttcctaccttggactttgatgattacaaaggtttaaattattgatgaactaatgagttattgttaagtgaactagatctattatacaaacgaactaat

SEQ ID NO: 120977 - DNA, 375 bp, Glycine max
tttccctcttccctcccatgctgagatgaatgaactcgtattgtttgtttccggtatgtaacttatgaattttaatatggagggttttcatggttactttgttctcactcaaaagttcttgcgaatataccagtgatggagtggtttggtataatgcatatattacaactgcccactctttttcttatgttttctaaagtctaaattactcaggtagttgtttcactctattataatctcttctcctatttattaataggctgagaataatcttttaaggaacatcttgtttagcatatttatcctttttaaatataatcgtttatattttggacacgactctaatattcttaattattatgagtaaaattattt

SEQ ID NO: 120978 - DNA, 290 bp, Glycine max
gtcatcacctaaaaaccatttttaaggtccaacgcttaggaatggtccttctcacttttattggttaaacgtggactcttgacagcctaaatccaatgcataactttgtcactacttttaaaaaaagctaacgatcatttaatggtccaacgcctaaaatgaccttttattcaatcaaaatatatctttccggaaaggattataaccacttaaccaacgtttagttctcaaagaactacggaggtctgaattccttatcacaaatgaggaatacaacaagggaaacaccc

SEQ ID NO: 120979 - DNA, 281 bp, Glycine max
agcttgaactattaatgtcgagcgtctcgatgtattaccggactcaatcacaaatctgagtaacacgttatggtcgcttgattatgcacacaactctaacgctcaagtacgagcgtctctatatattacgagactccatcagacttgcgaataaatgctattgtcgtatgattggctcgacgaccacatttcattcgagcgtcccgatagttacgagactcaatccgccatctcacaacagttttgacatctgaatatctcacacgataacattctttaca

SEQ ID NO: 120980 - DNA, 159 bp, Glycine max
acatgaaaaatggagacgctccaaatagatcgtggaagctgtggaccaattttgaacacaatcactcttgacatgggtgacgaatcgacgccatggatatgtcctgatgctttaaattgaacatgggggctttggtccatctcaggcgacaataacttt

SEQ ID NO: 120981 - DNA, 374 bp, Glycine max
  unsure (1)..(374): unsure at all n locations
cttttaatgtctctagaggttacttcctcgttgacatcttttgtcttgaatggaattgccatgacaggtttgttgttactgtctttgatatttggtagttgatattgtgttgtgggaggtaattccgactggattaactcaccatccttcacttgccaatttgttatgacatttgttgttggattacctatgatgtcttgtttccaagggtagtctatatcctttctgatggcataagcatgataccaatcaaagaaaaggacatgtaatttgactctttcgacaaattcgtacaacttgtcttggatttgttatctgtttgtacccttgtnatgttggaaaaaccatctcctttgcgttcattctccggagaa

SEQ ID NO: 120982 - DNA, 304 bp, Glycine max
tgcgatatttttactatatatgtgtgtgtcttcgcttatctctacctgtttaaaaatgatgatattcactcctcatgtgttgtttatatttggatcatgtgatgatcttaaaccttgcgtttgtgagagcaaatgactaggtgaattactttaagaaaccttgtgatggaggactccgagacacaatattttgatagaatgtaacattggaacaagagtttttattttaattgcatgacgtatcaaacatgtcattttactttatttgataaacttgaacagtcttgttttaagtcataaatat

SEQ ID NO: 120983 - DNA, 401 bp, Glycine max
  unsure (1)..(401): unsure at all n locations
agctngtgcatatcactcctacatttcatttctagcatgcattgtctttctttacccactcctcacgtttggttttttagggaaaaaacaccataactaaacgcgccgcatggtatccctatcgcaccatatccatatctataacgatgggtgatcaagaggagacccatgaacagatgaaagccgacatgtcggctctgaaagaacaaatggcctccatgatggaggccatgttaagtatgaagcagctcatagagaagaacgcggccaccgtcgccgctgtcagttcggctgccgaagcaaacccgactgtcttggcaactgcgcaccatcctccctcaaacatagtatgatggggaagggacacactggggcatgatggcagccctcactgcgataca

SEQ ID NO: 120984 - DNA, 219 bp, Glycine max
  unsure (1)..(219): unsure at all n locations
gttaaaatgtagtttttaaaggaaagttttgttaaaaaaggtatttaaggaagttttattaagaaaattttttaaggaagtttttttaagaaagattgtgtaagaagataagtagaatataaatagaaacatgggtaacattttttataactttgatgaatgaaagtnttatgagatagacttcaaagatccagtgcgttggctcttttatttcttcaa

SEQ ID NO: 120985 - DNA, 399 bp, Glycine max
  unsure (1)..(399): unsure at all n locations
cacaacaagctttcacatccacaatgcgcgcataaacncaccatnccctgttgcccacctncagctgagctcacgtactcccacgtagcccatatcctcgtttctctcaacaccgggtccccaataatcctctcanacttccacaacatccaagcaaaacaacattcaaacagcacaagctatcacagccaagcaaaacagagcaagggcagaaaactctgctcaacacatcaaccaaaatcacagcttttctcacttaaagaccacagtaacaattccttcgatccaattcgttaaccgttggatccgactccaaaatttactggaagtctatagtgcataagcctacattgtgaccgttgggatctactagcaaacatncagaactcattttacatt

SEQ ID NO: 120986 - DNA, 337 bp, Glycine max
tgaaacatggaagacacattgcaaaaaataccgttactattagggcacttttgatatacgtatttttgtctaaaattatgcagaataaacctgaagtgatagaataaaaaagctctgcattctatcaaaacttcataggagttagaactaattaaaccaagcagtcacttgacatttccattctaatttcatccaaaagaattctgaaagcaaatttgacatttgcaatagtgcaataatagtgaagatctgaatcaaaaggtccaaactccaaattaattgagttcatagcaatcctggaaactaaaaaatattaaagaaacattcttgattcttc

SEQ ID NO: 120987 - DNA, 462 bp, Glycine max
atgaagcttaagaaaatggcctcagcaaacttcttatttccagatgtatattaatcaatagacctccaatctttaatggagagggttaccactactggaaaacccgaatgcaaatttttattgaggcaatagacttaaatatttgggaatccatagaaatagggccttatatacccaccatagtagaaagaattacaatagatggaagcacatcaagtgaaagcataacaatagaaaaacctaaagatagatggtctgaagaggataatagacgagtacaatacaatttaaaagccaaaaacataattaaatatgccctgggaatggatgaatatttcagggtttcaaattgtaagagtgctaaggaaatgtgggacactctacaattaacacatgaaggaacaaacagatgttaaaagatctacgataaacacattaactcataaatatgaactatttacg

SEQ ID NO: 120988 - DNA, 236 bp, Glycine max
tttcgtgttgatgcaacaatcgtttttcgtggctataccagacatcttgctcaacaaagttccgttagccataacttgcctgtgctttttcttccaagccatatgtagcaaagtcgatggatcctatcaagtttgatgagctggaaaatcatgccgcaattatactgagccagttggagatatattttctcccagccttctgcgacattatgatgcacttgattgagcatctggtc

SEQ ID NO: 120989 - DNA, 420 bp, Glycine max
  unsure (1)..(420): unsure at all n locations
tgtttatgtttgagtttgtgtttgaggttcgtgttttggaagaaaaactcgaagaacaaggtttgagtttaggtgtatatttctcttcatagagtttggccaacgaaactgttctgagaagtgatgtaggtgattgtgcaatgacatccattctgatattangttttaatcctcctacaaagcaatccaatagagcttcttgtgtaattccttgtactcgattagctaaagacgtgaactgcacgtaatatgactgaactgaaccaatttgagtgagtttaaacaactgagatctatgacattcacacggtgatgggccaaattctgtctctaaggctcgcgtaaaagcaatccatgttgtgaatgaattntcacgagtcatcatttggtaccagggcacaacctctttatccaagtgaa

SEQ ID NO: 120990 - DNA, 226 bp, Glycine max
aagtagagcactatctgctttcgaggaaaattttttgcctaaaatctactatcaggccaatatgatactgtgtccgatgggtatggcgcttcaaaagtaacatgcttgcccaaatgactgcatactgagtagactgtattgaaataaatgcctaaatgccccaagagtggggccatacattccagatcgaaggatgatgatgactgctcttcaaactaaaactgaa

SEQ ID NO: 120991 - DNA, 247 bp, Glycine max
  unsure (1)..(247): unsure at all n locations
attttgttttaaatgaaacgggtttatgatcccaacatggttggctcctaacacatgaaactaagaatgtagtgtgaagtttcacgcttcccccttcttttgttttggtttgtagaggaaaacgcaaggatgagcanacatgaaaacaaatggtatgcaattttgcagatcaaaaagtttggtgaacgcatatgcatgatgatgccatgactcatgcaaaatgtgaggcttggatatgataacggac

SEQ ID NO: 120992 - DNA, 324 bp, Glycine max
caactagtattctttgtctttctaagccactactggctctatttttaataagaagatttgttagtttgattgcacactaactagcactttgtcatcttacacacagataaacaaattcacatttagtcttttctttaaaaatgaacaaaatgttttgagagcttttctaaactttacaagaatttacacaaagttcttttaacaaacagaatttgaatattgagcatttcagttcctttttcatattttcaaagcttttggtattcataggtctccttcaatcaagtatctattgtctctaaacggacatatttcctctcttaa

SEQ ID NO: 120993 - DNA, 437 bp, Glycine max
  unsure (1)..(437): unsure at all n locations
agcttggcaaacatagttgacacagaagggatatctcctctagatataagcataatatcatctgcaaaagccaaatgagatagctgaatatttgcacagttgggatgaaatttaaaattggcatcatccttgaggctgctcatatctctggaaaagtactccaaacagagcacaaacagataaggagagagaggatccccttgtctaagaccccgctaccttttgaagtgaccataaatggattcattgactgccacactaaaggaagtggaagaaacacattccatgatccaagtacagaactgggctgggaagccaatggacttaagcatccaatccaagaattcccaagaaatggaatcataagctntatgcaagtcaattttcatgaggcatctcggagaggatcttttccggacatatttgctcaaaatctc

SEQ ID NO: 120994 - DNA, 345 bp, Glycine max
  unsure (1)..(345): unsure at all n locations
agctngggaggttacaagcgcacaatcgtcatgttctctagccacaactgcttgcggctgctatacaacacagggcgctcctctctaggccagcatccagagatggtccgagcctttgattacatgctatccaggatctgctattcagtgatggatgaggaccaatcttgcttacgccatacatatactgtgtcatccagaaatggaggtctcgccagttggtcctccattatgacaagttatagagatatgtcctaagatactgatgagtccaggccgtctgatgccaaccgaatgtgagaccatgacagatgtcgaccggatgtcacgacactacatcttcac

SEQ ID NO: 120995 - DNA, 279 bp, Glycine max
ttgtttggaccttgtaacagcatgttttttctgtttcagacccatgctatgtgctggcgactgggatctctcttcactcaccagcttgggtgcactattgctaccccatagagcatcctgaacactattccggccatactgttactggcgagccctcttgggctcttgctcaagggccctggcggtagttgcatactctataagacacccggcacactcattacgaatgagagtaacggccaacttgaactactccttgaggagtttcaggcttcctaa

SEQ ID NO: 120996 - DNA, 317 bp, Glycine max
ttacttttaaattaacccaacgacccacgattccttttatacaagaactcctagataataatgcaaaataatcttacttaatagaaataataagcaatcaacaataaaggagtgtaagggaagagaaaatgttgactcagatttatactgcttcggccacacccttgtgcctacgtgtagtccacaagcaacctgctcgagagtgccactatcttggcaaatgcttttacaagatctggaccacacgaggaccacccttcctttgtgttcagatttgcttacaacaagagaccctcgatctcttaatcccttttgag

SEQ ID NO: 120997 - DNA, 317 bp, Glycine max
  unsure (1)..(317): unsure at all n locations
tgcatcttcatcctcatcatcgcttatattttcgntagaactgagaacttgctaaagggttgctttttatgaactcggcccccatggatgcctttgggagaacgcaaccatggtgtactgaacctccaattcattgcatattagaacaataagttttaaggctttttaacaaactattttgcgaagatgtggcattttcatttgcatgcatgttttcttgccttatatttgctttgttattgtcttggaagaaatcctaatacgagtgagacactatcacattgttcttaaatgattaaaaaaaagctttgattttc

SEQ ID NO: 120998 - DNA, 386 bp, Glycine max
agcttcttatccaaggctcttcttggtggttatactccttcttacatggcttattccctagaggatggcgcctactctcacctcttctactttgtcttgcgctgcatctgcatggtggaaaatcaccattgaaggaactcattgaagctcatagatccagccttcatacaagccccacatgcaagtgtgcatcaaccagtggccaccacgagccaacgttgcttgtcactgaacccgcacacctagaggaaaattttaatcaaagcggaatcctcaaaatccaccttaaggatgtggctgaacaaaaaccctcaatcctttctgtcgaagcttctgtgaggaaatcttaacttataagcctttctcttatgtagttcgagtttctc

SEQ ID NO: 120999 - DNA, 314 bp, Glycine max
tctccttcttttgcctataaatagtggttggagggaagaacaaaaatgttcaaccctcctggtatctgagaatcacttaaaatctgtgaagaaaaattgtttccgtgatgaaaatccaagccagggcgcttcctcctggtatctgtgcgtgattgtgccaagattttcaaccattcttcgtcggtcttcgttcgttcttcgtcgttcttcggtcttcaactggtaagttcccaaaatcgaacttttcaattcattctatgtacccttagcgggccccacttggttcgcatgcttttattttcatttcatttact

SEQ ID NO: 121000 - DNA, 312 bp, Glycine max
tattggccaccccacccatgactattctcaattggcgaaacagttctagaagacacaaaatcgacaaggaatgtgaaagaaaatttggcatttcagagtaatagattataattctattagcattcctttagcccttccataatcttaaaacaaggatggcttcattttttttcttctggtgaattcaccggaacttgattttagagtgtaacatttttcattatataattgtttaaatatagaaagttatggttaataaagttcttttaattttcttgagctggcacaaaattaggagaacaattattgcag

SEQ ID NO: 121001 - DNA, 375 bp, Glycine max
tgagctgcagcttaatcttttgggagttcacgctcttattatgtgaagagattccttgagggaccttcagccgacgaaaacactgacaaatacttatcttctccttcttggacaaagtagaggcaggctgggggcaaggaaattctcttcccatcagagcttggatgcaactagtgatcggttacctacttcagctggagattgcaggtattcaagccatccttcgacttgacttgaatgttaatgagcataccaatcacactgtcacaaacagttatcttcacatgcataacgtctataccatgtctaacgtctagatcacaccagtacgggagatccacgaaacaggacctgttcttacatatggaactctga

SEQ ID NO: 121002 - DNA, 310 bp, Glycine max
tctcattaagcttggctaccatctttggtacctgcataactgaagaagtgtggtctgggctatataacgatgctcggaacatgtcacatcgaaaatttcatgattggaagagtctagatatagtgtattgctgtgttcggagaagaagagaagaagaatgcatagggtgcgctctttgatgtttgaggataccgagcatctaagatgccacacaatagatgcaaggtggcggatatatatcaagcactaaaactgtcctgacatgatattcagcacttaaattggagaactactcaagatgtgctaacgg

SEQ ID NO: 121003 - DNA, 436 bp, Glycine max
  unsure (1)..(436): unsure at all n locations
agcttgaagatgacgaanacctaacgtacactcattntanatgaggatgcgacctttcagtaacttgcgagagttgaaaagacagcctaaaaatctatgccacaatgtaacccccatcaaaccatataactcgtctttaaggcgtaccctctcatagagtgacatgtgtaaaaaagcaacctgcatgcataacacgcgctcaccttgagtaaaatgaaatgcatctttcaaagcactttctaacagttagaagtgtcaaaatggtcaaatacatggacctctcataaaacattcaaacacctggctctacttgaagggacgtaaagcacactcaccctagacaatttggtagccttagcccagacaatgctcgtccaggttgggggcttgtctagcctatgactcttataattgtcaagggtaccaacttcgacat

SEQ ID NO: 121004 - DNA, 303 bp, Glycine max
tctagccaaattgtcttaccttgaattaattcctttgatagcccttttgagccttgtatccctttccttgttttgaagctcactacaagccttaagtgaaaaaccatgatattaccatatccttaaggaattttggagctttggaattgttttgggaataagtgtggggggtttatgtttcattggacaactcgtgttgttgactatgcttcatgatggattttgggccatacttgatgaacatcgtatattggttaaatgttggacatgctgaatgaaatgttgttactcaactgcgaaaaa

SEQ ID NO: 121005 - DNA, 296 bp, Glycine max
tgaaatcggtagcgtaatgcacattctctttgtgagacgtgctctctcccatcaagagaggccgaataagcggttgaccctcatggaagggatagatctggtttacgtcctgatgccccttttttgtttgcactgatagtgcttttggaaccctggggtgagacttgttccatgaccctacctttgcatggagggtctaacccctgaatagggaaagtcgaagtggaaaacacactggagaactcaaatgaaaaaccgaaaaacaagaaaccttgtcgagagggccaatttcttac

SEQ ID NO: 121006 - DNA, 242 bp, Glycine max
cacaaacgactactgtgggtacgtgtgctgactcgcaatgggtactccttaatacttatgggcctggttgatggttctgcacatgaattgccagcaacgtgagtgagactaaaatgctgatgcttggtggatccaacgactatatcatcatatatcttaaatccgaatgcatggaattatttttggggatctacggtgttcactccaatacggaactgtgtgtatacacctcaacggttcat

SEQ ID NO: 121007 - DNA, 366 bp, Glycine max
gtgttgaagggtgaaacttcctgcttttattgttgaccacagagtgtgtcctggagatatgtcgcgggggtcaggagaccttgtggacgtcaggtggggtgctattgcccaaaaccaagcttgaccaatcccgacccaacccgggcatagtcggtcagtgagaacctgtgatgtacctaatcaggcgagctcctggcagtcaacagattaaaggaacaaagaccacaaagcaaggaggcttgtggtggctggccagttgtgaattttgtgtgatatgtaaagtaatggcctctggtaatcgattaccaagggtgggttatcgattacaaggcttagaaatgaagacaggaggctaagatggtctct

SEQ ID NO: 121008 - DNA, 421 bp, Glycine max
  unsure (1)..(421): unsure at all n locations
tagtagagtatcgataatgtgtctaccatcacgatcatcgtctccctttccatcattgggggtaccacctgngccgccagatccctccaccttttgggtgtgttctttgaaagatctgtccccttttttgcaaatgttctgtagttgcatcctatccggaaccatatcaaaattgtactgatactgcctaacaaaggcaaccattaggtccttccaagaatggactcgggaagattccaagttagtgtaccaggtaacagctaccccagtaagactttcttggaaggaatgtattagcaattcctcatcttttgcgtattcccccatcttctgacaatacatctttagatggttcttgggacaagtagtccccttgtacttgtcaaagtccagcaccttgaacttgggaggggtgatgata

SEQ ID NO: 121009 - DNA, 185 bp, Glycine max
tatctgcgacttttttgcccatcatttgtaaacttttcttggtgtacacttattcttatactacttagaacttcatcctgtgctttttaacaactgcagaaacaagattgtaactacataagacataggttaatttgacatacggacactccattattctatgcacatcagcatacatctcctgt

SEQ ID NO: 121010 - DNA, 475 bp, Glycine max
cttcctctaccggtgaaaaacattgtcggccagcgcttgttaaataattgcgcaatgtcggctgaaaaacatcagttggggctgtttaactaccgatgctggctactgttttttctattccacccctgaataatacttggacgatgtcgatttggaaatgttcgatcggagtcatccggtcatgcttctttttaagacctcgatctgtcatcttttcctggccgacgtcggctagcatttttttcgatcaatatcggtgaatcatgctttttgccaaggtgggctaacgttttcgtggctgatgaaatgagagcatgccagtgtcggccgaaacacaatctcgcacgaaaaaccctagccgacctacattgtaatttttgtaggcaataccgaacagcaaaacttcgtctaccataaagaaatattatcgaccagtggttgtaaaaaaattctgcaatgttggctgaaaaatatc

SEQ ID NO: 121011 - DNA, 420 bp, Glycine max
  unsure (1)..(420): unsure at all n locations
ntaacctcattgtctctcacagtctttagaattgggagccaatccaatccttgtgtccggactctcagccacttatgatagccgccgatgatcccattactgcttcccctaagctctctgtcctttcttcacgccgcatcccatgccttgcgaactccttggagtaccctcgcgttgtggtcactgaaaccccgttcgatgaaagggcgtgatgctttcgtctgatggcactcctctcatggggtagccaagctgtcttatggcgaggacgggattataattaatacaaccccttgttccatcaagggaacatttggacatccttcgcatgaagatagaatcctgattcttcctttcttctagcgagggaacgcaataacagacgcncctccatgttagccaagagttggtcccaattcc

SEQ ID NO: 121012 - DNA, 461 bp, Glycine max
tcactcctacatctcatctctagcatgcattttctttctttacccactcctcacgtttggttttttagggaaaaacaccataactaaacgcgccgcaagggatccctatcgcaccagatccaaatctagaacgatgggtgatcaagaggagacacaggaacagatgatagccgacatgtcggctctgaaagaacaaatggcctccatgatggaggccatgttaggtatgaagcagatcatggagaagaacgcggccaccgccgccgctgtcagttcggctgccgaagcagacccgactctcttggcaaatacgcaccagcctccctcaaacatagtaggacggggaagggacacactggggcacgatggcagtcctcacctgggatacaaccgagcggcttacccttatggatggccgcccactattcaccacccatcttgcaagaagatgcgggccacat

SEQ ID NO: 121013 - DNA, 388 bp, Glycine max
ctaagcttgtggggagagtctatggggctgtatcttagactttaacgttgtcctttagaggcgatgttccaccatggagactcagtggaatacaaatgaaacaatgctctaggctgcgccatccactatggaataagacatgggagacggagcttctccaccaagatgagccttgcataagaagcttggagaggatgcttgagaggatgaaaagaaagagggagagaaagacagatgggggagcccgaaattgaatgaataaaaatggagtgaagatgaactgttagttgagactcacaagactggtattcatcagagctaccacaagtgattcacaggcgtctatttatagactatgtagcttccttgagaaggtgtcttgagaaaa

SEQ ID NO: 121014 - DNA, 481 bp, Glycine max
  unsure (1)..(481): unsure at all n locations
ctaagcttggaaagggtgtttcaccttctcgctaagccaatatgctggcttagcgagcatccgctaagcgcaacactcctgcgctaagcgcgaggaagaattcagaagaagatgagctgtacaggttcgctaagcgcaccgcttcagttcatccgctaagcgagaaaggcgtgctaagccaaaaatcactaacgtgcgctaagcggtccatacgtgcgataagcgcacaagcacgaacaatgccacctatttaagcttgaaatcagattttgtgaagagagtttggactgggattcagagctttgcatgtctagggtttctagagagagaaaggtccaagttccaaagagttttgagagattttgctgtgtgaagatctgcagagaccaaatcttgaagcacgagccggtttgagagnctgagatgagnttgtgagtgattgtgagatcctagaggtgaaggagacatcatcaccacttgg

SEQ ID NO: 121015 - DNA, 97 bp, Glycine max
tgcgctttctgacttgttgtagctggatgttttcacgccctcactgaacatgatctgagtcttcaccttgatgattgctcgctaatttgtaattatg

SEQ ID NO: 121016 - DNA, 468 bp, Glycine max
  unsure (1)..(468): unsure at all n locations
tcaagtaaatntaattaacgttaatattaaatattgactaaaaaacattaatattaaatagggtaattaattatttccaaaaaaatattacttttggccattgaataatatccattttttactactaaatacaaattgattttggcttaacatttataaaataaaaagtagtagcatattttcgattgaggaattattgtgggaccaaagcttaaaatcttgaagatatgtctttaggtcttagttttggtttaataattttacaatgccaaaaaagttttatagatatggcatatgtattgattgttttagactaaacatgatgattgttataggttaagtcttcttttatacattcttaatatgattctaagatgttaaacaaattgattcatctctaagtttcttaagagcaatgagttcaacatagtgtaattgaattataatatttgagatcaattacaaagt

SEQ ID NO: 121017 - DNA, 433 bp, Glycine max
ctcagctagcagcactctgaggatcaggcctcagaagtgcatacctggaatatgcacacaaatgttccacctcttccagaactacaggggtctttacgaatgtgttcagagtatcctcatcaaatttcactagatgacctctcaccctcacctgcttatgtgacttatcctctgtgtcataaaagtagcatcaaattccttcagaatggcaatgtctatgctactgtcattaaaattagtcaactcctcatcccagtgtcttctctcgagttcctccttgaaatcgtcaaactcggtgtaataaactaccacattcctctccggtagtagtttcctgagcaccacaatatctgtatacctctcccaagcctcttgagatgtgaacccggatctatcgtatctggcctgggaaggtgtagaaggagccttcctt

SEQ ID NO: 121018 - DNA, 375 bp, Glycine max
  unsure (1)..(375): unsure at all n locations
acccggtgaagatcgaagaacgatgaagaacgaatgaataacgtcgaagaacggtttaaacgtttgcgaaattcttcacggaaaacgttacggaaacgtttcggaagcgcctcggcttagattttcttcacggaaacaattnttcccagcgaattttaaagagagagaattgcctaatgcgctgaacacttttcttcttcacttcctgccctatttatagcaaaataggggaggtggttgccgcccagctcgcccaggcgagccaggttgcttcctccagaagcaacagccttctggaggaatattctggagggcccaagtgggcctgggtgctatttgcacccccatttgtactaagtacacccccctctgctt

SEQ ID NO: 121019 - DNA, 422 bp, Glycine max
  unsure (1)..(422): unsure at all n locations
atcttggtgtggaagctccttcttccatggcttattccctagttgatggcgcctcctctcactttntctcctttgtcttccgctgcatctccatggtggaaaatcaccattaaaggaccccattgaagctcaaagatccagcctccatagaagcctcacaagcaagcttccatcataaactggaaatgggttttgaagatcagaggatcaattttgatctatttgaagaacacaagcatgtaccagatcagaatgtctgcttgcaagtgatgtagggtgataaggaggttctaaagttaaaggacaaagtggatatcaacgattgaggtatatgcgtcaagctaatgacattaaagaagcgcttcctgtgaggcaacccagtgctattttctttcattttggtttcatgcatcacataagtt

SEQ ID NO: 121020 - DNA, 430 bp, Glycine max
  unsure (1)..(430): unsure at all n locations
tttttatttgcaaatggataaaaagcatgagaaactttgctctccacaatctaattntatcatttggaatagtgcaaatatatatttaactttaacgtctaacaaaaaaggttagtctcactatataacaaactgagatctgaatcaccattaaataaaagtgtttaatttagtatctgacaatactttaaacaaaattatctccaagagatgatacatgtacaatacatggttcaccaaaaaaattgaaagttttcatctccctaccaaaaaataacaaatctagttatgctttaaaccctgtagtcatgtacccgtacataggcggtatttgcgatcataggaatttgtcattaaaacaaaacagctaaaatgctatgcaaacaaagtcatcattngcaattaaaatccattcttggctcgactttca

SEQ ID NO: 121021 - DNA, 454 bp, Glycine max
  unsure (1)..(454): unsure at all n locations
tcctcgtggcttctntgagaagctctctcaagaggcttctttgagaagctagatccttatctatccacccctctattaactaaattaacttccttaaaaataattacggatgaaaataacgcaacaaataatcaaacatcaaacataattactaataatatatagatatatatatcacggtattacaacttcgacctctcagaataagaaaaggaagaagactaagggtgctgcagaagggacttctcagcaaaagaaacaaaataaagatgaggaatttacttgttacttctgcaagaagtcgggacacatgaagaaagagtgtcccaagtatgccgcatggcgtgtgaagaaaggaaaattttttactctagtttgttcagaagttatattgacttttgacctaaagatacttggtgggcaattctagtgctactactacataagttgacta

SEQ ID NO: 121022 - DNA, 475 bp, Glycine max
  unsure (1)..(475): unsure at all n locations
aagctgtcatagtttaagaagatcttgntatcatgatgataatttattttaaatatgtcattaggcgcaacatttatgcttctaatgaaaatcttcttaagtatgcattttgatgaaagtcattttgatttagatgaaatatatatgacaataagttacataatgtaaagaggaagagaaaagagcattcaccatatatttttatattggatcgccctgagcttgggctacgtccaatcctcacccttcaagatgagattttccactaacacaaccaacaacatgttgcactagccaactactagatttttacaactaccaacccccatgctggactctccttgtgaaacctctgctgaacttttgttgctagcaacatactggactttcaacatctcctcaccacaacaccacacttgatctttgcttggagatcacccactcaaccacaacacccactttgttatgggagaga

SEQ ID NO: 121023 - DNA, 260 bp, Glycine max
tatagacgacgtagcattgtgattgtacccctcaaatgaagaaataggtaaccccaaggtcaccttgtagttgaatgttccaagactaagaaacttacaaaaccagatttcgaaaaaacaagtcttcttaaaagtgatttatatatacatactgaatgggcactaaaagctagatcaccccattattataaatacaaatgaaatatggttggctgaatattggcttacataaatctggagcttagctatcttacctggtt

SEQ ID NO: 121024 - DNA, 411 bp, Glycine max
cttctacaaggtcctctgcccttaatgcttaacctttacttgtgctcccgggtaaggcgccagtagtatcctgttatcagttcctgcgccaccccctgatctcagaggagggccaactgtgcgagcacaactagaggaggaggctatcacgcaactactatgtacactgtggcaagatttcgtccgggccgctgcaaagagacaagtgcaaattgtgcgcaccaacatgaccacttttacacaaatgtggatgacgttgctacttagaaacattctacccatcgaccacaatgtcgatctccccctgtagaagtatcagatggtctgtgctgtcacgacattggtaagtatgcatatggctcaattgatttctgatgccatctactatttgcagggatcgcgccctctaca

SEQ ID NO: 121025 - DNA, 421 bp, Glycine max
cgagaaggtggtaatggaaaacggcaactcgtataaaatggaaatcgccacaacttttaactcggatgaccgattgagtcccgtaatatatcgagacggctcgaaactttgattaacatgaatgtctctgagcaaaattcaaacgacagtatgagttaactcggatgtcggattgagtcatttaatgatccaattgattaccgtcctatatcgagacgcatgaaattgaaaatagaagctctcagctaattcatacaacaataactgtgtactcagttgtccgattgaggtttggcatatatcaagacgcctgaaattgagaatagaagctttgagcatattcagatgactataactttatgtctcagatgtccgattgagttccataacatatctagacattcgaaattgagtatagaag

SEQ ID NO: 121026 - DNA, 368 bp, Glycine max
  unsure (1)..(368): unsure at all n locations
ctcaagctntacagagatttattaatgacccactaacctagaattatataacttaatgccattaacctagggaattaaaaaaacttaatggctgagtgtaactgaaattgtggcaaccaaaagtcacccccaacagccaacaagtcagccaccatttggtctcccaaaaggctgatgcctangttgccaattgggcccttattacaacttgaactaaacctaactaaagccctattagttgattaacccaaaacatatttttggtcagccaactgtacaaggattgggccattatttaaacatactaaacactctaaaattgaaacaaagtggtgtcatttaagccctctacatttgggccatgatac

SEQ ID NO: 121027 - DNA, 350 bp, Glycine max
taagagccaagtcaagggataaggtgtttctcttaaagttacatgtgaagtggaagattgcctgcatccaggtagcttttggattcatctgagaatgaccttgggtccttaatgactatctaaatctttattttattatttctttatcttatttgttagttatatggattgagaaattaaacatcaataggctttgttttgtctcagaagaaaatgctggaaatcataagctggatgctgttggaaaaattattgctgatgacaacagagtatccgccaatttatctaatttggacatgctgtctggtgttggttatggggagcaacttctatcaccccgtaatgcttgg

SEQ ID NO: 121028 - DNA, 452 bp, Glycine max
ctaagcttgtggttcgtcttctcgtgagcgatcgatgtttgtacgactagatgacaattatatcattctactatgacgaccgagaataccgtggcaagcgcttagggtgtggattctggataaacctctgcagtgactgccaatcctgttcttacaaggatggcactacctatctatgattcttctaactcgtaacaaacatgttcccttactcatcgttctaacatcctcacctgctatgcgtcaattaaccacggccgtcgttttccgcactctccctgtcgtacacacgctatcgcactctccgctaacgcctagcattaagcgaattgtgcttcatgaacacctcttgatataccccaatttcagagtcatatgcttactcgctacactattactagatgtgcaatggtggcataactctgtgaggctccctcaacaccattgcttga

SEQ ID NO: 121029 - DNA, 250 bp, Glycine max
tttgccaacactgacatccaccaccggctatcgtaggaaactggtgactacagcactctgcatacaataagaaacaaccaacggagtgggtgtgcactgaattggatattgaggcttgaatatcagggggacatcagtaaatagaagagtaatgtttgattttcagggattttccctgaaataaattaagttgttgtcattgttttccctagatatttattcgtttggtttattctttacattatttttt

SEQ ID NO: 121030 - DNA, 481 bp, Glycine max
  unsure (1)..(481): unsure at all n locations
gaggattatggngtacccatcacatgtggtactatgtggcggtcgggcgatggtgcacaacaagctttcctcatccacaatgcgcgcataaacccaccatcccctgttgcccacctccaactgagctcacgtactcccacgtagcccatatcctcgtttctctcaacaccgggtccccatcaatcctctcaagcttccacaacatccaagaaaaacaacattcaaacagcacaagctatcacagccaagcaaaacagagcaaaggcagaaaactctgctcaacacatcaaccaaaatcacagcttttctcacttaaagaccacagtaacaattcctttgatccaattcgttaaccgttggatcgactccaaaattctactggaagtctatagtgcataagcctacattttgaccgttgggatctactagcaaacatccagaactcattctgtactaactttttcacagccaaccacacaca

SEQ ID NO: 121031 - DNA, 94 bp, Glycine max
tttgcataactgatcttggttctggaaacttgatactgtcatactcaagtgttggatgcttgtacgatgttatctgtattataacaagttaatt

SEQ ID NO: 121032 - DNA, 404 bp, Glycine max
aactccgctgaagtgcgtcaggctaccaagggcgggccttgtgtttgacaagcctttgtagaaaagaggctcaccaagggtgaaccttacgtttgataagcctttggagaaaagaataaagacgcgtctgtcctgcgttttggcgagtttcaccaagggcgggtcttgggttttgcgagcctttggagaactgagactcaccaagggtgaaacttggtttgatgagcctttggagaagtgagactcaccaagggtggaccttgggttttgtgagcctttggagaaccaagactcaccaagggcgaaccttgggttttgcgagtctttggagaatcgaccagtgacgtctatcttggattttggcaaaactcactaaaggtagaccttgggttctgtgagtcttt

SEQ ID NO: 121033 - DNA, 430 bp, Glycine max
  unsure (1)..(430): unsure at all n locations
tcgtcctttctatctccgcaggctgcatacaaaccaaattttgagtcacacatacatgataccccctcctcactattcacttcctcaaccgatccatttttcttagtttttcgctttcctcaggttcgtaatcttctattctcctcttctttcctttatcgnttttgatttcatcttcttcgctgtaaatgcccccaatctctaaacccttatttttcttctaagtagaaattcggaatttttttttttttttgtgacaaagacgttgttattattatctagatttcttcttcttctttggtttccctacaaaactatgtgtggcttatttgtcaccttcacctattcctgtttgtttgaatctctctgcttgacatgactttatcaattttctttagagaatttgatgcaattgtcaagttctctcaat

SEQ ID NO: 121034 - DNA, 412 bp, Glycine max
cttattggtctcctgagattttacaagacacacatgagggtgaaattcatagaaaatagagttgtctctggcaaattgactaacacttaacaaatttttcgaaattgaaggaacatgtagtaacttgtgaagtttaaaggttatgccaacatcattaaatattttggttaactgaattacttcagttttgtacgggaagggttgtaactgattttctcagttttgttttggtgggcttgttttttatttgtgtgtttcactaatgtatcaatcaccagcagtacctctggtgctgctgggttcattttgattattatatatatatatattatctgaggcccttcacaaaacaaaatgatgaagaaccagtgttagaatacataaccttcactattgcctataatatctgatc

SEQ ID NO: 121035 - DNA, 445 bp, Glycine max
tcattacagaatcgcaataacatcaactctaacatatactccattatcaatgtcaaagagcacattttcatacataaagcaaatgtgttgcgatatctgtagcacctcacccatggttcatcttctcaagaccaaatagggcttatttttcgcaaggtaatgagaagacaaaacacggctaatgtggtgatgacaaaatggtgttatgcaacgaagaggatgtgcttatgaacttacctgctaacagagcaaatgctacgaagaggcatgaggaggcgaacagacaagaacacgatgaagagtccgtgcaagagaaaatatggcttggagagacacttcacatattcttaaatgtacgttctaacttctgttgttagtaaaaaccgatgttactttgtgatgttaacgatacaacggcttttttataacatatcatttataacat

SEQ ID NO: 121036 - DNA, 360 bp, Glycine max
tgaaccgccagatgcacatggcgaggatatgtggactaccgtctagacgtattcaacgggacatgtacctgggtcacaacgtgtacgcaacatattctcctggcggtgaatatctatcaacggcttgacaacatattactaatctatttcacttcattactcttgaatatctaatcaataatcttgtctttaagcagtgataagttcgttcgacaaaaacttcaaccgacttataggataaacatatatataacttggagataaatattatatactctattatacgactctctataaaaccactgtgttcttcttaataccacatatggctttagattacacgatacatcacgtttactc

SEQ ID NO: 121037 - DNA, 267 bp, Glycine max
tactcagcttaaggaggagaaatgagggaggttattgacatgttacaccacaacatgcctcagatgagggctgaactatgaagtgtaatctctcaaatgatataaagttgagataacacacacccgccgatgtctcagtgtatcgcctcagtgtctcttgagattggatggaaatttgaatatttgattaaaatggcacgagaatttgagtttgaatttgcggcgtaaaatttggagggcacagccataaattctgattagtgaatt

SEQ ID NO: 121038 - DNA, 338 bp, Glycine max
acacaagaatctaagcttgcattggagacatcattgctatgatttcattattttagcgagaataattcaccgaatggatcgagtaaaacctacatacattcatcttatgcaaataaagcatgctatccccccacattattgcattttgattccatcttttcacattcaaattgctgtgtattcatcctgaatctttaccgtttgtcagcctaattgcaaacctgcaataggctttctttttctttgtgcaacgattctaaaaatggaatgatactgagacacccattctttgtttaatgtggactaatccatctactgtgtatgattggccttgtatc

SEQ ID NO: 121039 - DNA, 461 bp, Glycine max
  unsure (1)..(461): unsure at all n locations
tctntggttcagctgctgaatatgaatccgcggctacttatgcactcctctaatgactatatcatcattactgccactgaactgttgggagtaggaagccactttttcaattaaatttatggctttatcaagggtcatgtctccaagggctctaccactggtagcatatatcatacttctgtccatgttactgagaccttcataaaaatattgtagaagaagcagctctgaaatctgatggtgagggcaactggcacatagttgtttaaatctctcccaatatatcatacaggctctttccacagaggtgactaatacctgaaatatctttcctgatcgccatggtcctgtaagcagggaaaattttgtataagaatactctcttgaggtcatcccaactcgtgatggaccttggagcaaggtaatacacgcaatcctttgccactccctctaaataatga

SEQ ID NO: 121040 - DNA, 463 bp, Glycine max
  unsure (1)..(463): unsure at all n locations
aggctcacattcactntcttctacatcatattcaaacttgtccaaataaataataaagtcatctcgactcaaagaaggtcatctaagtcccatacaattaatatagaacctatatcctaatgtcacatcctatcagagcgtggtgttcccgtgtcctctagcatgagggtctttatagtcatccacctattcatctgctccctcgaacacaaagttcaagatcatcacaggatccaaacacaaacagcaaaccgggagtgagttatcacatttctaactactagagagaaacaacacaacatataatagccaaatacaatttacttagcatatctcacattatttcatcactgtgtcattcatcaatcacacttttcatccatcaatcacacctttcaatcagaatcactatacacaggagtcacacacttcgatcaagacataataacacattcatttcata

SEQ ID NO: 121041 - DNA, 242 bp, Glycine max
ctcttccttaggagaccagaacccagttactctggaacactatttctagacctgctacttctctgatacaaacttatactgagaactttgttaagtatcctgtgtcaagcaacctgagatccgatacagattgtctatctttgcaatatgtgcacttagtcagactaaagttttaacagagactaattgtatagctatgctgatgttttagatgttttcaatggaaaaatgctccgacaaga

SEQ ID NO: 121042 - DNA, 476 bp, Glycine max
  unsure (1)..(476): unsure at all n locations
gcctctgtgaacaagataatcaattatcacattatataatcttttatcatgtntatggagattcacataaaagaagagatctgaacgaattaatcgattaccatatttgatgatggagtaaaccagttttagttgttaaaattgtaaatactctcacttgtgctttcttattaatgactcttgatacaatcttaccttttagaaaatatattctaagagtcgtctaagggaattactttgcatttcttcaagtgattcaagttgatcaagattcattcattcttcatcatgggttgataatcataggaagaacttgcaattattgtgattggcacatcaaggagtattcaatccaattctgattactttctactttcttattcttggatggcgataccaacgggtatctgagttcataaggtttcaactcttggaaattcttgtggacgggtgaacaagggcttgatttttctcat

SEQ ID NO: 121043 - DNA, 483 bp, Glycine max
  unsure (1)..(483): unsure at all n locations
actcaagcttaagtttctgcacacataggagaacagtacaaattgaattggcatgttatcagcaaataaaatccaataaatctataattaggtcaattaaaaatgtccctttatgcatagacccacccaaaagcatgggtaattactaggtgaaagctcatgaatgcatagacctaccacctactntatgctaaaattcaatagttaatcataagagggtaacaaaaagataagcatcccaacttaactttgatatcatgcaaaaaaaccaacatttcaattatatgttaagctaccagacaacaaataaattaaaaaaataaaaagtaaaaaagagctacttttaagtttctacacacagtagaacagtacaaataaaataggcatgctatcggccaatgaaatgcaataaatctttaatcaagtcaattaaaaatgtccctttctgttttcttccctacatggggtactatttttggaaat

SEQ ID NO: 121044 - DNA, 449 bp, Glycine max
  unsure (1)..(449): unsure at all n locations
aactcaagctatagcattcaaatcactttttgtacctcaccatattatttctggtaacatacaccatactagtagcaggtgctacacagcgcatatatgccaatttccttagttttcttttgacccttaatatatatatatatatatatatatatatatgaaaaggaggctaataagccattccatattaacataacgcgggtgtgtgaacttttgacccttaatatatgaactatgaagtagctaggaccccggaaaacaagggaatcctgtacactctgaataccccactgcttcattctttagggtgtttatgtatttattagntattacatatatgtgcactgcttactataaagatgcttattatatactcgaatggataaaaatttaaacttggacactataacaaagcacctatattttaatacaaagctgaaaaaatatta

SEQ ID NO: 121045 - DNA, 451 bp, Glycine max
  unsure (1)..(451): unsure at all n locations
tagtgaaaacagaagcatgtgtatatgagactatgtgaggccaatcatttctgggacacccgtttatgcatacctatatttcatatgcatatatgttaggtattatgttaaaataatatttgaaattttgtgcatgttcggttgaattgtctgagtaatttataaacatggaatgaagacgacgtgtttatttattgaatgattaataaagaatgcacatggggttgaaaatttgaccaaaaattcggacaactcaagccagtaactaatctgtattgtattcctttctcagtttctcttatgttttcagcttttctttattatatgaaatatttaactatacacacacggttctcccttggtggaagatgtaaaatggcatgggaaaagtttgattcngttttcctttcgntntctttccctttggacttatgtttatgtgcgtaacatg

SEQ ID NO: 121046 - DNA, 378 bp, Glycine max
  unsure (1)..(378): unsure at all n locations
agtctacgattgtcacgtgctcatgcttacaattgttagtcgggctatacgagacatcttgccaaacaaagtcaggttcaccataactcgcctgtgctttttcttncatgctatatgtagcaaagtgattgatccaataatgtttgatgagttagaaaatgaggccgcaattatactgtgccagttggagatgtatttttcccctgctttctttgacatcatgattcacttgattgtgcatctggtcagagaaatcaaatgttgtggtcctgtttatctacggtggatgtacccggttgagcggtacatgaagatcttaaaagggtatacaaagaatctatatcgtccggaagcatctattgttgagaggtacattgc

SEQ ID NO: 121047 - DNA, 423 bp, Glycine max
tgcatttggagatgagaaagcccgactatatcattatgattagtacctgacatctcacactatctaatcaaacgttacatgacaaatatagttgctgatcgaatacctcacccactcaagtgtatcacacaatgatggcttttctctaatgaaacactattgccttttaacactctaattacccttgagctcttaggcagttgacgagattatggccaccacagagaacaattcaccaatatgtgttaggtaaggatagagagacaaggaaaaggataaccacaaataaagctaacgaatgtgctacgcgcaaacgaaggatataaaattcagaatgtaagaattcaagtgacaatccttcatgcaaccaatatattaccttatagagagatttatttacagctcttcaagcatgaaccgttc

SEQ ID NO: 121048 - DNA, 77 bp, Glycine max
  unsure (1)..(77): unsure at all n locations
tttttaaaatagatattttctacatatanttgatctcttacagtagaaatatgtaataaatagaaatattatttaag

SEQ ID NO: 121049 - DNA, 468 bp, Glycine max
  unsure (1)..(468): unsure at all n locations
tatgattggtgaacaaaaaattcacaaacaattgtatatattttntctatatcatttaatattttaaatattaaacatctttattttttacttaaaaaataaaaagtataaaatagtgattcaatacttttataattaccaacaacaaaaataagaattaaagatgacaaattacatcaatccatcttaaagaattaagaaaatgatcttttttattttaggttaatcatgaagttggtaagaaatatttatctcaatgattaattcctactaatgaatcgcgttcataactttttatgagatattttttattatattttttatctacaaaatttaaacttgtaaaattcattcattttttattttacaaaaaaaaatatcaatccatcttaatccactaattaatgtcatggcaatatacgttaggtcaatcttattacacctttgaaaaacgggtccaggcataaa

SEQ ID NO: 121050 - DNA, 389 bp, Glycine max
attcaatgccaagaaacttcaagcatttagaaaacatctcacattgaataataaacacagaaaacataatcaaacccacttaccccaagcaatatcatcgacacaagatcctgtttggatgtgagaaaattaaaatctgaacatcacgaggtctaatcctccatatctttggtattcccacccaccttcgtcttcaaattcacgagaacctaagttgttgcagcttcatactataacaacaaaaacaaaaaagaagtttacatagaaaacatgtgcaattgagtagagagagagaaagagatagtaccaatggcaagacatcggtggtgttagagtggagttttcaacactgtcaaatcgaagtcgaaggattgagaactcctatatcg

SEQ ID NO: 121051 - DNA, 456 bp, Glycine max
  unsure (1)..(456): unsure at all n locations
ctacgctgtgaataaacnttgcactagtaatcgattacaggttactggtaaacgattaccagagagtaaagactcttgtaacttacaaaatattgatgaaagctcttcttgtaaaacaaaactgtgctatgtttggtttttgaaaaattcttttcaatacctcccttgggaaatcatcttctcttgaatcttgattcttcttgatgtcatttcttgaatcttcttgtgaaatcatcttctcttgaatcttgattcaatcttgatctttgaacttgttgactcaatcttgaaatcattctcttggactttttgtcatcatctttgtcatcatcgaaactacttgaatcaacttgattcatcatcatgaagcctgcttctacaaagacaacgattgatacctcacagccctacactgnggtcatgatgggcactatgcatgagcctcatgcgaacgta

SEQ ID NO: 121052 - DNA, 445 bp, Glycine max
  unsure (1)..(445): unsure at all n locations
tgttccaactnggggggagtgttagaactaatgtcntttgggattntgtatatgtacttatatatttctttatgcttgtactgtctgttcttttcttttcgtgcagtctgcaacctttcttgtcttgtactcatgaccttgngtctatatatatatatatatatatatacaagtcttttggctgagtgataaacactcaagctttaccaaaatacctagagttctaaaatctgaagtgtgaccatttagtaactttcttacagaaacaaggaccttccatgaatttcagatttgtcaagatagaagaattttttgatgaaacagagaataaacataaaaaatggatcaggaactctcctaacagcaacaataacaaanatatgtatgcatatccagtccctctgaatgtgcaacaaataaacctattacagatgacacaaaagtg

SEQ ID NO: 121053 - DNA, 440 bp, Glycine max
  unsure (1)..(440): unsure at all n locations
tgtgaaagaaagacctcttattggtaaattgggtgttgagaggtcaaattttgaataggtggagatttcaccttaaaaccagtttgagcaagtctaaatcaatgttatagacttgatgaagatgagagtttaccccaaaattacccaattntcaatttcacctttcaaaccttgaaaattcactaaatttgatgggttttggatacctagaatttgctttattttggtttgaagtttgtttttggtttgaacatgatttatacatggtttaggacttgtaggatccaatttgagtgaaattggatacatgcaatctagaattcgaaatctgccaaattatgcaaaaaaagctgtcaaattgtgcagcaagattttgccaattatgcagaaaaatggttgtgcaatgctagtcaagggaaaggcagtatatctcgtgttct

SEQ ID NO: 121054 - DNA, 136 bp, Glycine max
ggccagactgctaagatcagaagacagcgcgagactatcgtcggaatacatacgttagacgcgcacacacctcagctcagatgcgttcgacaccgcctcgcacagtctgtcgaaatgggcgcgggctatgtctctg

SEQ ID NO: 121055 - DNA, 451 bp, Glycine max
tgcccgatgaaacaccatttcctagttaaccatgcattaggtaccatgttcaattattttgttttttaagcgaaacgggtttatgatcccaacatggttggctcgtggtgcctaacacatggaactaagaatgtagtgtgaagtttcacgcttccccctttttgtttttgttttgtagaggaaaacgcaaggatgagcaaacatgaaaacaaatggtatgcaattttgcagatcaaaaagtttgttgaacgcatatgcatgatgatgccatgactcatgcaaaatgtgaggccggaatatgataacggacaaatgcaggatatgtccattatgatgttatgaagagatgcttatgcgatgcatgatatgaatgcattttacggacacgagagcccggaaaaatatctcttcttacttgtgcatttgggggcgcagtgccccatgtgtacaa

SEQ ID NO: 121056 - DNA, 373 bp, Glycine max
tgctaactcaactcattttatactgtgtgatttttttctgaattcatcatttgcgtcgactatccctactctaatgatttttattctgattgaagacttaatgatctatacttctgcagatctaaactattgctgttaatatactatctctatgtgtgtgcgcgcaccactatatgcagttataagtgcggtgcatatctctttatcgaccattattaatatacctcctctaattgtttacttttttttttaatcccaacttcctaagctgcgcttcataatgctatacagggctattcgacattaaccgttgtcaccatatcttatagggatctcaatgtccctaggtccatacttctctcaaatgaacacg

SEQ ID NO: 121057 - DNA, 445 bp, Glycine max
acttcaaactcagcttcaaattaggtaccaactaccacggctccggccagctatcttgaaaaagtgtataatagcttctcgtccttagagtgtgcgcccatcttgcgacagtacatcttgagatggtttttgggataagtcgtccctttatacttgtcgaagtccggtactttgaacttcggggggataacaacatcgggtactaagcaaagatccgtcttgtctgcgaacggatagtccccaaatccttccacgactctcaatcactcctcgaggagatcgagcttcctcctttcttcagttgccgggggtggtccttccgtggacaaaactattggttgtgtcgtgatgttgggctgaggcaacgtgctgtgtgccggcccttcggggatcgggggatagaacttgacatcccttcgagcatagtcttgagggtctttgtgga

SEQ ID NO: 121058 - DNA, 285 bp, Glycine max
aagtgataacagctaaaatctttttaaaactttacaacctgtaagactgcacaaacagaccgctaagatcagaaagtcaaaggtcttcttctagatagagataagacttggtttttacctcattaccggtggtgtatgactaactagcacaggactttttttttcaccactgatatgtatcaactgaacatgcaactatgcggcccagatacccttaaacttctatctgtacaagatgcagtgggtgtactatcagaactacgtgtacttaataccctgtctgat

SEQ ID NO: 121059 - DNA, 477 bp, Glycine max
  unsure (1)..(477): unsure at all n locations
tttggtaattcttgtaaagatacaaagctctcanaactctctcgtataccttgagagaaaagactaaaagtgttaagtgatatatttgtctgcaagacaatcatactttgtagtcagtgtgaaatattccaacaaatctagttgatttgtttagagccagcagtgtcatggtaggacaaaaaatattgggtgttagttaagcttagggtagagcttgcaagtgtaagagttagaagttacaatcaacaatacatgtaactgtgataacttagtggaaacttggtggttgccaagaactgcaagaaatcttaaggttgagacgaaccagtataaattctttgtgtgctttcttggttaactaacaaagggttttaaacacctgttagttcttgaagagttatgactctctagacttgaaatttgagatttttgtgcctagtaatcggataccacagttttgttatcgattacagacgt

SEQ ID NO: 121060 - DNA, 407 bp, Glycine max
acaaactgatcagaccactttattacacaagcaaccaccagctacctgtctcttaacagcaaccaccagctacctctctctcaacagcaaccaccttctttttcaccttcaacacacaaattttacaagcaaccgtgaactggagcctccctttcaaccaccttcttttaaatcccactgaagctgaaaacgccaacatcactggcgcctccctctcacccaaatcgccacccgaggtggcgccttccagctacgaccgcagagctgcaggtgctgcagctacgtttgcagaagtgcaggtgctgaagtcgctggtcaaaccagcgcttccatgcacctctggatgcgccaataggacctgcgatatgcagtcctttgtcgccagtcacagtggcgacatgccacgt

SEQ ID NO: 121061 - DNA, 226 bp, Glycine max
ttattcggctcccacctcctttctttctcataagctctctaagctttatcaagcattctgagggagtcttttcctgttatcctagggagggctcctatctttctcttgcttcgtgcattctgtgaaatacatgaggactttgagctaaatcacctcataaactccaacacttcatagggaatcaaccatactcagggggtctaactcatatgttgttactcctcat

SEQ ID NO: 121062 - DNA, 468 bp, Glycine max
tctgtttaagtccaagcccatataatacatattatctggacaagataagataagattggatgaaataaaatctagatgaaataaaatccggataagataagataagattggatgaaataatatctagataaaatctggataagataagatttgataaaataaaattgtctgctctcttcaagtccaagcccaattccggattcaagcccaattgcttataattctcctgaaattaaattaataacacaaaattagtccagtaggcccaaatgacaaaattgcataattaatttgacaattaaggctaatcagtaattaaaatggtgacaaaaagggttaagaaatacgagaaaataatgacaaatcagctcacttcatactttgtgataaagcaaatgatgcttatgtgatgactcacttcatacattgtatctgatagggattctaagttcctaagccactttcaaa

SEQ ID NO: 121063 - DNA, 346 bp, Glycine max
tattaactatgcaagctgcaggtcacatgcatggccttccccatattacatggatgtcagtatcttccgagaaatccattaccatcaagactgtcgggaagataaaatgttttactctgaccaacacatcttcaattactccatatggcctggtatggagtgatcactacttgtaaagcacttgagtggcatgatgtacactctgcaatctttagacatggaagtgacatcaattgatctgatccacgcataaagctttccacatgctctcatcgacacgatagtacctccagatctatgctggtgaggatcttgacacacctgagttcttcctagacgttcctga

SEQ ID NO: 121064 - DNA, 248 bp, Glycine max
gctcactactccctcctcctggatactaaagtaacataatatatttatgcgccttcgggcgagcaatactatttggctgtctgccaacaatttgaagtgcccttacatgtttgctatactacgaataatgagatgatgtgtcatactgttgccctatcatacaagatcttatatagagaaagtgaagcgtgcccgttcactatatgtcattcgttgtcgatacgataactttattcgtctcaattatg

SEQ ID NO: 121065 - DNA, 457 bp, Glycine max
cacaaatacacacaatttcttcatatagttcccatagacagatatactaactgtaacaattttcaagacacactctcaatgggggtctctcatcaaattcattccaacctccaacaagttcaaaccctgcaagaaatgacaaagtggagaaagaggttaaggtgtgtgtaccaatggagagatctctaatggcagaagaggtggcaacagtgcgctcaatttgggtcatctgaccaatcttctccctcagagtcatgcgagaaagaaggtccttcacacgagcttcaatttgctcttcgggattcttgtaaacgcaagccatggctccttggttgaaggtggttggggagtgactagtgagtgtgttattatgtttctggtagcaacaaacaaatgatgaacacaacatatcagaacagaacagaactcaatttggtgttgtcctcttatatataac

SEQ ID NO: 121066 - DNA, 333 bp, Glycine max
ctactctcaaccattctgtatatccttaagactaaggcctttgcacacctatataatatgccagctgctatcctgtatgcttaggaatggtatatataactcggggcgtttgtctgtgctccttgagaaaaattataccctttatttatatgaatgtgaatataatgagatgtctattattttctattgtatgagggcgaggctcaatgtgtcttgtgtcataactcacaaataacactttttgagtattctattgtacaatcgggttttcattcttttacctgcgcttattttgcccactatcgttattaactattaattgggggaaaaaaa

SEQ ID NO: 121067 - DNA, 442 bp, Glycine max
acatggatttggattctggtgctacagatcatattgcatcctcattgacttgttattctacatatagagaaataaattccatagtagttcgcctgcctgctagtcaacaagtcatagccatacactctggaacagtcaaatttattgaatttttacacttagtagatgtgttatacttgccatctttcaatttcaatttaatctctatatcaagttaactttcttttctaattcatgtttgattcaggatataagtagctagataggtacaattgatgtagtggaaggtctatacaagcttagagtacttgctgccaattcatttcccaaggctagcaacaatttcatttttgttaagtctgtgttaataaagaaatcattgatgtttgacattttcgtttaggtcatccttcatatgatatgctgcaatggttaaaacaaa

SEQ ID NO: 121068 - DNA, 356 bp, Glycine max
  unsure (1)..(356): unsure at all n locations
ctccgcttacgtctcacataatgcnaaagttatacggataactactcgggtattttcgctcgtcagcgcgactcaaaagtcagtatgacagatcttgtgagcgcggaagatgacgtagatctccacgtgtcaacgggcttgacggccgcgattgacgaacgccgcagaagacgacgttagtctttgcgtgttatcaagcttgtcctcttacagacagcaaaaagtttatacggataagcactcgggtatttccgtccgtcagcgtgactcaaaagtcacgttgacagatcttgtgagcaccgaagatgacgcaaatctccgcgtgttaatgggcatgttggccgcgactgacgaat

SEQ ID NO: 121069 - DNA, 450 bp, Glycine max
  unsure (1)..(450): unsure at all n locations
catctatttgactntcctatgctgtctctacatacataaaacagccccaccatcccaattttgcaaaatcatattcatatatcattggggcatttcactgagcacttgatgggcgcatgtttggacataaattgcaagagaatgggggcaatgtggcatgctccattgcttcagaatacaacatangcctaaggccttcttattcaaatcctcaacccaaaaaatcaagcataaaaacaaaccaaaactgccccacaaatataagcacattctcaccaaaagatgaagaaaatataccaatgggaagctaacaacatcaaggattgaatacttacttgttggagtgaatagcaacaccaaaaacgaaagcaaaacgcgatcaaaagttgcttatgggagcaagaaacccaagccttcgtgttctttatcttttgaatgaagggggggggg

SEQ ID NO: 121070 - DNA, 484 bp, Glycine max
  unsure (1)..(484): unsure at all n locations
ggtcatttcatctcatcaatgcatgcctataagaagaacattcagnggctttccacctacatcagagaactctctcaaagttgaatatcatatccagaaaagctatgtaagctaaaagatatgcaaatgatgcatatacaaagcataatataacaagtgttctgatgagtttagaacaagctcaaaatggacgccttaactatgctttcaagtgagaagcttcagaagatttaaaagaaacccatctgttgattaggtaagtgcttccctttgaagatctaaatcttatcatgttgtaaagacatcaagaaggccttacacaaaagatttatcaaagtctacaaagagctcacaacatcataatgaagttgcaccagagtctacattagaatgatgagatatctgactctgaagagctgaacatcagaatggcttagaatgcacctcaaagacaacattagtttttccatatgttatcgcacat

SEQ ID NO: 121071 - DNA, 430 bp, Glycine max
atttcgaccatctcgatatattaccagactcatccggacttccgtatataaacttattgtcaattaaattttctcagagctttggatcaaaattttgagcgtctcgatatattacgggattcattcagacatccgagtaaaaaattattgtcgttagaatttgatacgagctttccgtttcaatttggagcatctctcgctaaattgcgataggctatcgggcatccgagaaaaaagatattgtcgcttcatatttctaagagtttccgttctcaatttggagagtctcaatatattacgggactcaaccggacatccgtgtataaagttattgtcattacaatttgctcagagcttctattctcaattctgagcgtctccatatgttacccgattccatcggacatgcgagtaaaaagttattgtcgtt

SEQ ID NO: 121072 - DNA, 467 bp, Glycine max
tactcaagcttaacatcagaccacttccagggtgctggaactacttctcatggatttgatggggcctatgcaggttgaaagccttggaggaaagaggtatgcctatgttgttgtggatgatttctccagatttacctgggtcaactttatcagagagaaatcagaaacctttgaagtattcaaagagttgagtctaagacttcaaagagaaaaggactgtgtcatcaagagaatcatgagtgaccatggcagagagtttgaaaacagcaggttcactgaattctgcacatctgaaggcatcactcatgagttctctgcagccattacaccacaacagaatggcatatttgaaaggaaaaacaggactttgcaagaggctgctagggtcatgcttcatgccaaagaacttccctataatctctgggctgaagccatgaacacagcatgctacatctcacacagagtca

SEQ ID NO: 121073 - DNA, 452 bp, Glycine max
  unsure (1)..(452): unsure at all n locations
tttgatagtctatacattaatcttganatggcaaatcaaaaccatttcctttcaggccctgatcaattcttgcaattgcaccatttgtaagttttgcttcttttgatgcttgaacatcattccatttttccttgcaacattcatgaacagcatgcatcatctcgtgatgagaagtataggctacgcagatcaaaagaactctctggttgttgtgagcagtaactctcattgccttttccacagaacatgagaacattaaattcaaccttatggccataaccttcttccatgtttctcttctttgcatacctttgattcccatccatgatgaaagcaatatgacttggcataggaaccaccgataaaatggcaaacatgcatcttcttatataacaatataaacctccaacgaaatggcctataatatttccggaacttttctgcattgaact

SEQ ID NO: 121074 - DNA, 422 bp, Glycine max
  unsure (1)..(422): unsure at all n locations
gattcgcacctcattttccaactccaacaattttacctttggttggtgtctccatagatcacatattcactatctttgggagaaatatgaataatctttgatgcatctcccgccatgtgtttggggcaatcgctatcaatgtatcaactttgctcttcttcactttcataatctttcaccatgagagccaaatttatgattttattttctgaatcacttgaagaatttatgtcattatcttcccaagtgatgtatactttctttgtgaaattcctcttgtcggattttccattcttcttttaaagacaggataattgaatctcgtgtgcctangntgatcgcattcatagcattttggggctaaagacgaatcttctcctttcttctttcatcatcatccaattcttctctaggggtttcta

SEQ ID NO: 121075 - DNA, 230 bp, Glycine max
ataatgcgtccagtgaccggattaattgatacaacgctgggcgcttacccagatccataacctgacctcgatacggtgtgacgatagcggcttttcgtaccagacaagatattctctctcgaagctaaccagctttcccgtgtgtagcgcctgcaaccagtctcaagtgacgtatcaggtgctctaacatggcggcagagctccctcatatcatgcctcagaagcagcct

SEQ ID NO: 121076 - DNA, 142 bp, Glycine max
caccaacaacccctgtctgaaatgtattattatcaggacgcattagctactggttttcattaatctgatgcatctttatgatggcctcctgcagcagtattaagattcagcagttaagcaacaatttgctcttctacagcga

SEQ ID NO: 121077 - DNA, 452 bp, Glycine max
tgaactaacctctagccactcagacatcttctcatagatcccaactgtccgatcatggacaactgtcttgtgaagtagaaaacccagatttcgagaacatccaacggttaacaaaggctgggaagcatttttaccgaagcaactacctgtaggtttctctagaagcttcattaagaggcttcctccaaaagcttcattaagaggcttctagcacactccatgcatcttctcaaagatcccaacggtcacatgatggaaaaagtgtcctgtgaagattaaggccaaatttcgagaagatccaacggttaatgaatgctgggcagcgtgtttaccgacgcagcttcatgtagctctctctagaagctatattaagaggcttcctttagaagcttcctcgtggcttctttgagaagctttctcacgacgctactctgagaagctagatccttatc

SEQ ID NO: 121078 - DNA, 437 bp, Glycine max
  unsure (1)..(437): unsure at all n locations
gcatcatatattccgattaaattgtcattctggtttcctaattacttaattcatgacttcgatcttttggattataattgtagcattcggtcccctaatcttagaattaatgattttggtcttcttaatagattattaacacataattatgattaataaaattattaagataattattaattaatcaaaactactaattattaaacactaactaaagaattattattcctaatttttcataacattatgtgtttcttcttttacacaagcacttgttctacctcctactatcacacacaatttcacaaaagtaatgtctcattcgagttgatagttttttattataaaaatttaacgatttatcatgtttatgtattctataattaatntaatatatctaatcatcataattattagatcacaagtattaagaaatc

SEQ ID NO: 121079 - DNA, 444 bp, Glycine max
  unsure (1)..(444): unsure at all n locations
catctagtgatgaagaatataaagaaggttctgagagtcagaatctaacattacttgttagaaagtttaagaagtttctaaacaatacgaatcccaaggaagatccttccggcacaagaaaaatttaagaagaatgacttaacctcccctaactttaagtgtttcaagtgtggcaagccgggccacataaaatctgaatgctccatctttcaacacttcaagtgactcaagcaatgaagaagacacaaatttctatcttatggtggatggtgaagttgaaagcattgtaaattcttccaaatccaaaactgaacttgatgaaaactatgacaagctntttgatggattcaatgagatgcatgaagaggcttagaaattatctcaagccaacatatgtggataaggtagtgagttgtcaaaaagagttatctagtttaaaattga

SEQ ID NO: 121080 - DNA, 89 bp, Glycine max
ctgttaatactgttgtgatatgagaggtgatcatttgttagagacatcttgtaactacttcaatgtgctccagaatgcccagaactgct

SEQ ID NO: 121081 - DNA, 465 bp, Glycine max
tggttggggcgaccgacactctatagaactaatagaggtctataatcagagcaagaaatcccaaggccctgttggacttctctgggtccactaggtgtcttgtaggcgctatccctgcaatctggtaaatagcgttagaaatcagctgagccatatgtacactcacctatgtcaggatggcgtagaccaactaacacttcggcaggctgaggtctgagttgtggccgctggggaaaatgttgctaagcagcaatgtcatccagatctaagtaatagtggtcacatgatccacacccgtctccccgctacggtccgagcaaagttctgacccaacacgcacaacaactaggcgatagcctcctcatcgaagcttgaggcctgactcctcatctggttgtactcgcactgctggcattcatccaagatcagtggatgcccaaaaaaatggctgatggcatctctgtc

SEQ ID NO: 121082 - DNA, 212 bp, Glycine max
  unsure (1)..(212): unsure at all n locations
tgctggtcatgaactgtctagtttgtgacacaactactgatgtttagctgactgactattttgaatctatcgtcatctttgaggataacatcacaactggaaatagcagactaacttgaaaactantntgtgcttgttgactggagtgttgctggtttgggagtgagatgangcaagatgtcattcctactatatgttaaagggactgtcta

SEQ ID NO: 121083 - DNA, 443 bp, Glycine max
  unsure (1)..(443): unsure at all n locations
ntgacaaattccagcatgatgtctccatgtgactctcttcaacttgcatctcagcgttgcaccgngtattcgtgtttgcatgtgcgtctcttaagcgccctattattactagaataaaatcttagtcacactagtactcatatttgtgtccttgtgaactaacacacaataatgcatgtctttcgagacatacagtgcctataagaacatggttctagtcgataccttgacttgtacccaagtccatgtaactacaaaacaacaacatctaactcatgtaattacatattacagttganaacaacaatatcacacataataatcacatgcattttagtgtctgaggccacacctctcaatttccaattaaaataatgcacacgacaataataatttcccgattcacaattcttgtgtcttccacacatatcacaattacacat

SEQ ID NO: 121084 - DNA, 432 bp, Glycine max
  unsure (1)..(432): unsure at all n locations
gctgagaggatgcttaatggaggataaganagagagattgtgggagctctatattgaaggaataatagagggagagaagtggaacattgaagtatgtctcacaagactctcattcatcaaaggtgcaacaagtgttacacatgcttctatgtatagactaggtagcttccttgagaagctatcttgagagaacttccttgagaagcttctctgagaaaacttccttgagaagctagagcttagctacacacacccctctcataactaagctcacctccttgagaagcttccttaagaagattcctaaagaagctagagcttagctacacatacctctctaatagctaagctcacctccttgagatgagaaactagagcttagctacacacnccctataatagctaagctcaccgccatgaccaaaaacatga

SEQ ID NO: 121085 - DNA, 460 bp, Glycine max
actatacagtactcaagcttgtactaacgtttatgcgagacggagaccaacatgcttgttatcatcgtcaagtaccaagaagagttaggtctagccacaggccacgagcatagaatcgcggacgagtatgctcaagtatacgcggaaaaagaggcttgaggaagggtgatcgactctttacaccaagaggcaaccatgtggatggatcggattgctctgaccttgaacgggagtcaaaaacttccccgcttgatatccaatgcctaggcgatggcagacacctacttcaccccctaaaagaatcatgggcttctcggctattgtcagcatatgatagacttaatggcccacataattagaaatcgctaggaaacttgtgtggtgtctcataccttgactagatacaactttctttctgaaataaaatgacgtgtgcccatgtttctactccaaaaagctt

SEQ ID NO: 121086 - DNA, 174 bp, Glycine max
cctgtcttaaccgaaccatcttagagtgactacggattgtctattagctgttgaagattatactgtcttgtattgagcataagagaattattatttatgtggacagatcttatcattatgttagaaaggtgaatgtgagcgttgtaccctcttgaaatgcttatattctaatgt

SEQ ID NO: 121087 - DNA, 468 bp, Glycine max
  unsure (1)..(468): unsure at all n locations
tcagctgccatttgttgataatttcttgtacaagctttatttagtggataactctaataaaatagtttcaactcaaggcaaattgtcgacatagctaaaaagtgaaaatgatcatgtaggctgagaatgatggctctgaacttaatagtaggatttattagcttatagatggaggaacagactatgtagatgctgagaactatttccctttggatgatctcctttctaaacttactcttttttcctctattatgaatgttgtttttcctctattcatttagttcattctttgctttcataattaatagttctgtcctttgtggatttttctaatatatatgaccgagaatgaattttttgcattgacctattaaaaaatcatactaccattttcagctaccactattacgcctcgatttattaatgtcatgtgaagtataattttggatgacgattatntatgtctct

SEQ ID NO: 121088 - DNA, 208 bp, Glycine max
tcttccaagcattcattaacattaacctgttctgactagaaacaatcttctttttcagcatttaatcacctttctcccgccataccaaactgtttcacaagacctacgacgactcactgctgcgtgaaacaactactacttcattattcagacagattacctgttctgcagttatctgcttgcttttatacttgacctcatgatgcta

SEQ ID NO: 121089 - DNA, 438 bp, Glycine max
  unsure (1)..(438): unsure at all n locations
ctcagctgccccagctcgcaggcagcagggttgcttctcagtatcacagccttctggaggaatcttctggagggcccaagtgggcctggttgctatttgcacccccatttntactaagtacaccccctgctttttttggtgattcttttttcgtaaagttacggaaacttacgaatttcgtaacgatacttgttttctttccgtaatgttacagaaccttgcggattacataatcatcccttttttgacttacggaatgttacggaacctcactaattgtgcaacgatgcttccatttgatttccggtgtgtcacggaaccttatggattgtgcatcaatattttcttttgttttccggcatgtcccggaatttcacaaattgcctaatgatgggtgccaagtacctcacaaagaccaaacaaaagttgcatgtcatc

SEQ ID NO: 121090 - DNA, 342 bp, Glycine max
  unsure (1)..(342): unsure at all n locations
ctcagcttgtcatgaccatcttcaattgtgaggccaccactnttttatccaccttatgaattacattgcgcgagctgattgagctatattgcttgatatacatggcgcaaactaccttcaggattaaaatcacgttcatgtgattcagaagcttaatggaagagaggttcaataaagcttcttatcacgaagaaaaatataagacctaccagtatcccattgggataaaacatataggggattcaaatcgtctggccctagagctttaagggctctgatgctgaagacaaccgatttactctcctcattaacgggagcattttgaatgagagcaagatcttc

SEQ ID NO: 121091 - DNA, 450 bp, Glycine max
catcttcttcaaccttgatgattcttgactccatctcattgaatcacatgtccacttgtaactacaaagtatcaaacctttcaccaacaaaggtttgaagaccatagaacatgtccaaaatcttttgaagaagagaggaatcttctccaccatgtaaatgttcttcttcatcaatgggttgagcaccctatttgatggaagcttgcttgtggagcttctatggaggctggatctttgagcttcaatgagatcctttaatggtgattttccaccatggagatgcagcggaagacaaaggagaagaggtaaaaggcggcgccatccactagggaataagccatggaagaaggagcttcaccaccaagatgagccttggataagaagcttggagaggatgcttcaatggaggaaaagaaagagggagagaaagagagaggggggagcatgaaa

SEQ ID NO: 121092 - DNA, 291 bp, Glycine max
tcgtgttaatgtcacattataaatgccattctccttttatagtatggagatcgaggtatgggattgttgtgacatacttggtctaatggatctgttgggatgcactaacacatgatcacagtagaatgaaatgcttgaagaatatgatcgaagattttaatagcgcattgtatcaagaacggactactttttgttcaccataatcagtaacgtcaacaggctaacggaaattgatgggtaaaacacgctgctactgttgttgaacagataaaaaaggacaggaggatgcta

SEQ ID NO: 121093 - DNA, 161 bp, Glycine max
gatgatgtgattagtaaacgtttctgaataagggtgaaagttgatttgacgaggattaatatttataacgagatgtgaggctaaagcaaatgagggaggatatttcgcattagagtgtaagttttttttaataaaaaatgaatggatcttttaagtatcgt

SEQ ID NO: 121094 - DNA, 437 bp, Glycine max
  unsure (1)..(437): unsure at all n locations
ctcgcccaggcgagctaagttgcttcctctataaggcacttccttctataggaacatcctaaaaggcccaagtgggcctggttgctatttgcacccctctgtttactaaatacatacccctgactnttattgcttattctttttacgtaacgttaccgaactgtacgaattccgtaacgatacttgttttccttccgtaatgttaccgaaccttacggattacgtaatcaccccttttatggcttactgaatgtttcggaacctcacgaactgtgtgacaatgcttcctttagattccagcatgttacggaacttcacggatcgtgcaacaatgctctcttttaacttctggcgtattatggaacttcagggtttgtgcaacaatgggtgccaagaatatcaaagcggtcaagcaaatgttgaatgccataaaaaat

SEQ ID NO: 121095 - DNA, 359 bp, Glycine max
  unsure (1)..(359): unsure at all n locations
gtcatgcatgacttgaaggcctaagagcatagatgacttatgagacaataacgaatagtggaatgtgctttccgttcccaattgaagatcaaaaacaaaggtggcaaaaataagacaaaggaggaagctgaagaacgaaaccaatacaataatccacaatcttttttgccatgtccttactgcaaaaaagctaatcactcaccaaacagatgttggtggaggcccgatgcacaatgctacaaatgcggtcaattatgaaactnggagaagatatgcaagtcgatcatcaacaacatgtagatgctacagttgttgaggatcaacaagaagatgaagagaaacatgttagcagtgtcata

SEQ ID NO: 121096 - DNA, 472 bp, Glycine max
  unsure (1)..(472): unsure at all n locations
ctgcttgcaatgcaaagcccactcatcataggatagtaccttcatctanacaaacaaatcaaacgtaacaagacaattatagttgttgtttgaatacctcacccactcaagtgtatcacacaattatggcttttctctaatgaaacactcttgccttttaccactctaattccccttgagttcttaggcaattcaagagattatggccacaacaaagaacaattcaccaatatgtgtaaggtaaggctagagagacaaggaaaaggttaaccaagaaaaaggctaacaatgtttttaggcacaaatgaaggaaataaaattcagaatttaggaattcaagtaacaatccttcatgcaaccaatatattaccttaaagagatgttttttaaagttcttcaagcatgaaccattcagcccaattttattttttttaaatttgcttatacgaaattctgctgnttctttttaaca

SEQ ID NO: 121097 - DNA, 378 bp, Glycine max
gaaaaattatgctgacattcattgagctccttatagaggttgtggttattgtgggtgtagctcgctacatcattaaagggtattccgccactggtgtgttatttgacggtggcctgtaattgctgattatcaatgccattatggggcacaaagtgttaccgttcagccatgcttcaacaggctacagcgccacggatatcgttgaatacgttaaaatattactaatgagccgtggtggcgacctctgcatgatgattatgatgctgtgtggatttgccgcttacatgacccatatctgcgctaatgatatggtggtcaagctggcgtctaaaccattgcagtttaataaactccctttcctgctgatgaatgccacct

SEQ ID NO: 121098 - DNA, 428 bp, Glycine max
tgagctggccctcctaagacagagcttctcacatggactgttgcacaggacactacacgaataatctgcacgggtaactctatggatgatgggcagatcggaagtaagcacacacagacagaaaattgtcaaagaatcctattgcatcatgttaagattgtattcctattaaaaaaggaagagaagattatccttttactttgcattcaataaaatgaaatataactctacaagaatggattcgctcatatatcataattgccagcaaggctacgtagaaattaggcaaaacgaaatgttatgaaataattacattcactaaagcaatcgcatcgaccaaaggaatatatttcgtacctagtgaataagagactctgagcatattacacaggttacaagtgagatttatactatataataagacaatg

SEQ ID NO: 121099 - DNA, 417 bp, Glycine max
tatctgaggtgccctataaccgtggttaaatccaccactgtcatatttaataactaatgacgttgaagctctggggtgtgatcaattaactacagttgtcatgacgtgactatgatctagtgagtttactacaaccgtcatcagaatgctaacgctatttgtagagggtcattgtcccctcaccatggtcgatatgctcaccacaaccgtgttgtatgcactacgaacgtggtcaagtgatagagtcttcaaatctttgggtaaaagtgaaaatttccactcttttcgctcaattgagcgactataattctgcatgacaaagctagtatccaaacgtgagttctatcaagaaaatgcatgctagtgacataaaaactcacaaaatatcactgccaaagtgcattatcacatactact

SEQ ID NO: 121100 - DNA, 397 bp, Glycine max
tctcaacagacacatctgtttatgtggctcttgaatggctgtcagaggcctatgtatatgtgacttgagacacgaatttgcgaggagctgttcagaacaaaataggcgtatgctcttataaagcagaagtgttttatcctattaccaataccttggccaaactacttgagattcaataaggaatgtttgagtgctcaaattgttcaatctatctctttcaagagagattgcgtcttttcttcttcttcatgtctgaaaagggattaagagaccgacggtgtcttgttgtgaaagaattcttaacacagatgaagggctgcccttgtgtgtttataacttgtaaaacgaatttacaagatggtggaactctcaagcaggttgcttggggactggacgt

SEQ ID NO: 121101 - DNA, 213 bp, Glycine max
tactcctacctcactggtactaaagtaactttttatttagccctcaggggagcaatacactttggtctgtacgaccaataatttgaagtgccctcaatcgttgctatctacagtataatgagatattggggtcatacatgttgccactaatacatacaagatcatttagtgtagaggaaatgctgcaaggatgcaccgctttcactatatgta

SEQ ID NO: 121102 - DNA, 339 bp, Glycine max
tctagccaatagacttaccttgaattaatttctttgttatcccttatgagccttgtttccctttccgtgttttgaagctcactacaagccttaagtgaaaaaccatgatatcaccatatccttaaggaattttggagctttggaattgttttgggaataagtatggggggttcttgtttcattggacaacttgatttgttggctatgcttcatgatgtattttgggccatacttgatgtacattgcatattgtgtaaattttggacatgctgaatgaaatgttggttcttaaaggccttagagttaaaaaataaaaatattctaaaaaaaaatagattc

SEQ ID NO: 121103 - DNA, 468 bp, Glycine max
taactgaggaaatctatttaaaaatgacaacctagtcttatttgtcacagtaatatgccttcttgtgacctttatagtctatatccattatgattggtcaaattcctaataagtttatttcctaaatactagtagttcactagattagttatttaactataagaacagaattttcacttctaagcaaccataagcagcaaggaagtgaagcacacaatgaagggtctcaaaatctaccataacacagttgctacacattacgtggaaatgcaccttttgaaatgactagttgctttaactcttttatttttctttttggctttaagtctaaaactacttgacttgatcaagccattgacctcataaaaaacaaaagaccattcgtactatgaacaagggtaatatgtggaatatagaagccacattttgtgatatgaaggatcactaatcaggcataaattgcaaatc

SEQ ID NO: 121104 - DNA, 446 bp, Glycine max
cggaggagctaaatataccttttgatgctaaattctttcttctctaggatggagctctgatggctttgtttagagtgcttctaattgcccgtgataagtgctagttcttattactgttagtagtgcatgacttgtattgtacaattcccctataattaaataataatgtcgaaatatcccgtacaagaagcttctaagataatttaaaatttgtttcaaagaatagactagattgttatcctaaaccacaatagagttttttttaataagccaataaatattataaaactatgtgaaagaaatgttgcaggtgaacgcagaccttgacatggaactaaatccccaagcacaaccatggccatattaggcgaagagccttaatagaatgtgtggaaatggtaatcctcacaacatttgccaattgcaaggacacatatcactaacag

SEQ ID NO: 121105 - DNA, 344 bp, Glycine max
tgtgtctcacaagactcgtcttcatcaaagatacgacaagtggtacacatgtttctatttatagactaggtagcttccttgagaagctttctagagagaactgccttgagaagcttctttgagaaaacttccttgagaagctagagcttagctacgcacacctcctctaataactaagctcacctccttgagaagcttccttgaaaagattcctacagaagctagagcttagctacacactcgtctgtaatatctaagctcacatccttgagatgagaagctagaacttagctacacaccccatataatagctgagctcacccccatgacgaaatacatgataa

SEQ ID NO: 121106 - DNA, 378 bp, Glycine max
  unsure (1)..(378): unsure at all n locations
aattgaagggaaacaaagggagagaaagtgaacttgagtcgtgtctcacaagactctcattcatcaaagttacaacaagtgttacacatgtttctatttatagactaggtagcttccttgagaagctttcttgagaaaacttccttgagaagcttccttgagaaaacttccttgagaagctagagcttagctacgcacacccctctaataactaagctcacctccttgagaagctttcttgataagattcctanagaagctagagcttatctacacacacatctctaatagctaagctcacatccttgagatgagaagctagaacttagctacacaccccatataatagctaagctcacccccatgatcaaatacatg

SEQ ID NO: 121107 - DNA, 213 bp, Glycine max
  unsure (1)..(213): unsure at all n locations
catgatataatccacaataactcacatcaaccttcctcaccactgtttccacaacctgaacacaccacattcactccgtgcttctacaatcttatttacatgacgaccatcttccaccaataccaagaactttcttgtacggcttggcaactataatatgacaatctntatgcacgtcaccatgaacatttgagacaatctcaccacctaaat

SEQ ID NO: 121108 - DNA, 353 bp, Glycine max
  unsure (1)..(353): unsure at all n locations
tatctgaaggtcagtgggagtaaggttatgtttctagtcctgtatgttgatgatatattgctggcaactaatgatcttggtcttcttcatgagactaagaagtttctttctagtaactttgaaatgaaggatatgggtgaagcaagctatgtgatagggatagaaatattccaaaatagatcacaaggatggttatgctcgtctcataaggcatatatcaataaagtactagagagatntaggatggaaaagtgctcaacatctcccgttccaattcagaaaggagacacnattagtctcgcacaatgtcctaaaaatgatctggaacggaagcacatggaagcaatntcgta

SEQ ID NO: 121109 - DNA, 357 bp, Glycine max
  unsure (1)..(357): unsure at all n locations
ttttttaataattaaataataaaaaatgaagtgtgactgatgtngtagtgattaaacttaatgacatgacactccgtccgtcacattatgagactaacgacacatatatagatgatcaaaagtgaatntcaagtagtaaattgaaaataatatatttttcanatatgataaacatcattaaatcaatgtaattatatatttttcaataaaactaaattaacgctcatgtgtcatacatgatcatatgtaantggtgacanaactataatatttaaatataatntttataaagatgaatatgaatatgactanaatcgtgtgaagagtaatattagaaataaatgaaattcatccgtt

SEQ ID NO: 121110 - DNA, 435 bp, Glycine max
  unsure (1)..(435): unsure at all n locations
ttcatcattcctaacccttcccctccaagtcttaactcgtcgaccctttctccaaccaccattgccacctaagaaatgcttgtccttgccgtactcctccactatcaaagatgcttatgctcttaaggttgctctcacactcacacaatctcttagaacgtgggttngtttctaactcaatgtcaaaagataattcatagggcgaggatttgttccttacttatatactatatcttgaccttatctttaaccaatgtgatacttggattnttntccaatgcatctgcttatacccaacacttttgggtctgtgctcgatgacatggtgggtgatcattaatggattaggatacagctgatatcatctanaatatgggtctggtcaactcaccctaaaactactctaggatgaggatgccttcactatatatctat

SEQ ID NO: 121111 - DNA, 506 bp, Glycine max
  unsure (1)..(506): unsure at all n locations
cctgaaataagagaaaatgattattaatagtattattcttataacattacaaaataaccataaattaggagagtttgatacaatttatacaagttttatacataaaagttagtcgttttcaccgactaacaggtacaaggctagcaagagaagcgatgtanggaataatcctcgattgcgatttaccagtgcctaggtttctcttttcttctttntccttcctctcccttcgttgttatcctccctaatctttctgaacccctcaacccctcacccaacatggctatntatagganaagggccattgnggcaggggaagctcgcccaggcgagccaaatgttagcctgggccatgaaattcccgaaaatggcaatgtcacacttttccttgtggttttgttcctagatccgacaatcaaacatcaattcaagtgatccctcgcccttgtgttgcaactgtgccnacatcganattagttagtatgatcaacatcaaagtggatatg

SEQ ID NO: 121112 - DNA, 383 bp, Glycine max
  unsure (1)..(383): unsure at all n locations
tccttagaactggatagagcanggctagataactgtattgtctggacacggagtgcanggactttatttttcaatatgttgtgatcttaatgttgttcagttaggctaagttcgacgagggatccgagaacgaagtttaatcagaattagcccattcatgcgagacatcggtgtttgggataattgtcctcagcatagaacacagaaacaacattaaatagagaanaacccttaattgcatcaagttacttagtagaaggacccaacattntaatcatttgttatttctcgcattacatagttaattntgtagttatcttcagaatngcaactatatcctatgcttatttccatttcatgaatttatacanatgtctacttat

SEQ ID NO: 121113 - DNA, 300 bp, Glycine max
atgtgatcggccaacaccacattatgaatactgcactaacaactacctgacccacatcatcacataactatgcatcgaattcacttggaagtttcctccgtttgcaacacatacaagtacaaccatcttatcggctagaacatatgatattgtactaattgccccgatgtcactataaaccaaggaagatacgcctctaagcactagtttccctgaagatctgcttacgtcaatgcataaacaatacgaaggagaattgttggagtcttcgatctagtgattcatgctattattcctact

SEQ ID NO: 121114 - DNA, 405 bp, Glycine max
  unsure (1)..(405): unsure at all n locations
agctagcgatgtgattggcaacaccacaatatgaaatactcagtcacagcctcctgccccacatcaacacataactatcattgaaaatttctggaagtntcctttgttccaacacatacaagtacaaccattatcttggcaagtaatattntctttggactgcttgcacttctgtcactaataaccaagtcagatacgcctctcagcatttctttccctgcttttctgcttaggtaaatgcagaaacaattcaatggggaatggttggagtcttcaatcaagttctccaggcgatcatcccaacttcaatactgcccncaacctcaacaatcaatcaggtaaaccaacatgtcaacgaacactagaatatagaaacgcttcatgctaaaataattatatgaagta

SEQ ID NO: 121115 - DNA, 377 bp, Glycine max
  unsure (1)..(377): unsure at all n locations
taatctaagtaatcttggttggctcaaaaacaaaatcatactgcattttatttcgtcattaatcataacaactactcatgaactcaacgacaaaaaccaagaatttgggctgaaaaaagcccgatagaaccaaaatacgggtatctatgacttaggctcactaaaatcacgattcgattatgtaatctataattgaattgtgattccattacactctnntttttttcacacttcactagtgtaatagaagtgtgtttccattgtgtatctaggtgtaaaaaaagtatataatcaaaccatacatttgtcgtacaagtgagagtcaattaagagagtataatgaaagtatgatttcattcatagtatgctacggaatc

SEQ ID NO: 121116 - DNA, 403 bp, Glycine max
actcagcttcaacattcaatttgagcgtctcgatatatgacgagtctatcatcatacatccgagtaaaaagttatcgtcgtttgaatatgctcagagcttcaacattcaatttcgagcatctcgctatattacgggactcaatcagacatccgagtaaaaagttagttgcttgaataggctgagagcctcaacattcaatatcgagcgtctcgatatattaagggactcaatcagacatccgagtgaaaagttattgtcgtttgaatatgctcagagcatctacattgaatagcgagcgtctcgatatattacgggactcaatcagacatccgagtgaataagtattgtcgtcggaatatgctcacaggttcaacattcaatttcgagcgtgtcgatatatta

SEQ ID NO: 121117 - DNA, 219 bp, Glycine max
ccactctgcttattgatttttgtagtttgttcttgaagtaacctttaacctgactctagaaaaaataagtaatgcttcgcgggcataaacgtggacacacacaattcatgttaactaagctgagcaaattggtgtactggaactgtgagagcagggtgaactgactttgagtgaactggtgcagacacggctagaatgccttacttggcgatatttttg

SEQ ID NO: 121118 - DNA, 197 bp, Glycine max
agctacctgaaaaagaaatatttctgaataactaccacagctacatcctagctacattaaaaaaaagcaactacgactggcatactacctataatgacctagtaccacacccataccactcaactaaaaataaagtactaccacggctactactataatcaaaggtaacgatgctactataaaaccaactatgctac

SEQ ID NO: 121119 - DNA, 265 bp, Glycine max
  unsure (1)..(265): unsure at all n locations
accagaatcatccgaatccgagtaaaaattatggcgtttgattttctaaagcctcatttcaattcgagagctcgaatacacggacacaatcgcatcnagcaaaagtattgtcgttgaaagctcaagctttgtttcaatacagagttcatataatacggacacatcggcatcgataaaagtattgcgttgattgctaagctctgtttaatacgacgttcaatatacggactaatcgcatcagaaaagtatgcggtgatttctcaac

SEQ ID NO: 121120 - DNA, 283 bp, Glycine max
tctgagattgacttacaagtaagctgatggacaggtggcttgaatatactacaagactgggcgctaccatatcgctatctatgcgtttccgtgtgtgatttcgagattgataccaacagcactgctctatgcttcgttcggtcaccaatgaacttcgcactctcatcgggtaatggcacaagcctaactttctaaatcattctgtgtacccgctaaggttcttaattgcgagcctagcttctagttccatctcatctactatacgtgcgcccgttggacgagc

SEQ ID NO: 121121 - DNA, 459 bp, Glycine max
  unsure (1)..(459): unsure at all n locations
ccctcctgggatctgagattcacttaaaattaggtagaanaattgtttccgtgaagaanatccaagccgaggcgcttccgtaacgctttcgtaacgtttccgtgggtgatttcgcanagaatttcaacagttcttcgtcgttcttcgttcgttcttcgtcgttctttgatcttcaaccggtaagttccagaaatcgaacttttcaattcattctatgtacccttagtgggttctcattgttccacgtgcctttatttccattttcattactttctgtacccccttttgacgtgctntagtcannttattaagtcattntctcgtctaataaaaaatannaataaatttcaccgatcattcgtatggaacatcctntaatttctgtaaaatgaattccgaccgtcggtcatgccgaaccacgtttanaccanaagaggcaaanntatatatatataaaat

SEQ ID NO: 121122 - DNA, 156 bp, Glycine max
  unsure (1)..(156): unsure at all n locations
cataaccgcctgttacaccatgaacatatcgangtgtatattgcgcatcgttcttagcctgcctggtgggcgttcgatggaacaattttacctcgctctttgtggttgtgaacaatgaacatgtgatcaccactgctatgatctatatctcaaaaa

SEQ ID NO: 121123 - DNA, 399 bp, Glycine max
  unsure (1)..(399): unsure at all n locations
cgttggaacggctgaatgcatctactgttgtttttcctgnacatatctncgngnatatgcagcattgnntatttgttatcatggttgatgttctctggtacaatattctctctctttntttttttctgtaacaatgttcatattattaccactgctattatctttattacaatactggatattcctctattccctacttgggcatagcttttgtcctgaacacagcttccaataagattcatatccttgctctgtagataaagactgcccatatggaagctcagctcgctaatcgagacactcatagttatcaatagcagcatatagtgctgctattgtgcggtaatggagcattgtggctgctggctactataangaaactcatagcatcacattttt

SEQ ID NO: 121124 - DNA, 164 bp, Glycine max
gactgagtgggaacactatatcagctacacactggatgacattaataactaaactcttacttcttctaaccactgcaagtatgatgatgtgaaaaagtgaatatattactgtcacaaaaatgagagatatttgagaaggttattccgcttttaagattctcact

SEQ ID NO: 121125 - DNA, 466 bp, Glycine max
  unsure (1)..(466): unsure at all n locations
atgaaagatctgttcagaatatccatattaattccaagatttactttgttggatcacaatatcagctacgcacggtcaaactttcaaaactatacacttccttcttctaacaaatgcgagtattttcctgtagaanaatgagtatatntctgtaagaaaacaaagtgatatatgataattntattccacttttaagattntcactanagtattagtagttttcgttaanaaaattattaccaaaatatcatttacactattatcccttaagagatgcatatattaagtcactttctcctcttgtgtcaagatagaacattaccttatattacccacatcttaaattttcatcanaactatntntgagttactaanataccttgtgcactccctagcttgagaaattaaatatatactaccttcatcnttatataagaatatataatagattttggtgcccaatata

SEQ ID NO: 121126 - DNA, 428 bp, Glycine max
  unsure (1)..(428): unsure at all n locations
ctcagctcaccgatgacgccatcaacatttctaccgcgtttgtttatttcttcanggattgaattgaaaaactcgtaggcgacatctgtcgtgaagtagcgaccgatatttttcagccgacattgcacaattctttttagaaaagctcgctggtcgataatggcctttntacggcagagtaagttttcttgttttggtgttgcataaaaaagttacaatgtacttcggctaggtttttcgtgcgagttcaaccgacattntgtttcggccaggaaaacattagcccacctctgcaaaaaaaatatttgctaaccgtcttcatgcatatttcattcaacgattgaatagaanactcaatagccgacaacggtcgtgaaatagtcccgactggatattttcagccggcattgcgcattnntttttaaaaa

SEQ ID NO: 121127 - DNA, 400 bp, Glycine max
gaaacttctgagaggagagctcactacacttcccctctcgcaactaagctcaccttctagagaaggttcctccagaagatctctaaggaagctagagcttatctacacagtacctctctaacagctaatgtgacctacgtgagatgagagactataactaatctacactgcctctattagagctaaactcaccatcatgacatatatggtgaaaatataatagacaaagtccttactacatgaactactcagagtgcccggaaatacgaggctaagacccgttactactagagggtgaaaccacaacgcccaaacgattgaaaaacctattctagtatttacaaacatcagcgggcttatgctgcggcgatgggctcggaatctaccgtatagctcatga

SEQ ID NO: 121128 - DNA, 411 bp, Glycine max
  unsure (1)..(411): unsure at all n locations
gctcacctnctggagaagcttncttaagaagaatcctaaagaagctagagcttagctacacatacctctctaatagctaagctcaccttcttgagatgagaagctagaacttagctacacaccccctattatagctaagctcacccncatgacaaanaacatgaaaatataaaaaaaaaagtccttactacaaagactactcanaatgccccgaaatacaaggctaaaaccctatactactagatggccaaaatacaaggcccaaacgaagganaaacctattctaatatttacaaagataagcgggcttatacttggcccatgggctcgaaatctaccctaaggctcatgagaaccctagggctntcccttggatctctagcccaatctactgggagtcttctacccaat

SEQ ID NO: 121129 - DNA, 359 bp, Glycine max
gtattcttcataaacgacagacctgcatgcatgctttatatgagtttgttataggtgtcatacagatatacgcccagtgtctgctacatcaagttattagatcgagcatttgactagaacgtctgcaaactagagaacctacctaaaaagaaggttccctatctcgccatcatcatagctaaccacactatggatgaagaggagtaacctgctcatactctttccttaattctacgcgatcatctcatcatatggatgctcaagcacatgaccgactcgaggcagggatatatattataatgtacactcactcgactctagatggcacatgaagtcattactatcctcacgtgctctga

SEQ ID NO: 121130 - DNA, 343 bp, Glycine max
  unsure (1)..(343): unsure at all n locations
ataatgttggatatnnttttaatcggcagataaacaagtatattaatataagagtatattagaggtatcatagagataaacaaccagtttctgctacaagaagttataatatcaagctatcgaataaaatagcactaaacttgagaacctcacatgaaagaaagttacatatcaagccaacatcatcactaaccacgaaatggatgaagagtagtaacctgttcatagtctntcctacattctccgcgttcattttatcacatggatgctcaagcacatcaccgtctcaaggcagtgatttaatcttataaggaatacaaactcaacaccaacatnggcacat

SEQ ID NO: 121131 - DNA, 345 bp, Glycine max
  unsure (1)..(345): unsure at all n locations
gccatcaatggagcaaaacacaccaaaagaatatgatgatggatggctcaaattctcacaaaggtaaacttatcactttcaaattgagctttcaaaactatcatgacatgtagaggaaaaacaaggatttcaaatcacacaaagtcaagagacttttattttcagaacaattacccattacttgaacatatcctataattcanagacaaacatgcaaatntaacacaacanaactaacaaaattaaactagaacccaacanaactaacaaaatttaaactaattaacacaactaacanaaccaaaaccaatgaacacactccccccccatactgaaacaacacat

SEQ ID NO: 121132 - DNA, 254 bp, Glycine max
  unsure (1)..(254): unsure at all n locations
actactcctatgattatngtcaaagcttggttttgccctttggaaactaagtgtaaccactttcagaaccttgacatttcatctattgccaggacatggaatgtaaagaaatttagtgtttccaatgaannatgagctatgcttcattngcctgttangaaaaaacaaagtataaagcattggaaaagaaagaanatngtgtgtatatatttgatttgcaatcaatngcanaatngtaatcttctcactttgat

SEQ ID NO: 121133 - DNA, 112 bp, Glycine max
caagcattattaccactatccaccattgttgattcaacagattaacatagctagcatcgagtaccgatttcatgtaggagaagacccacgagataaatcgtacatgtcaaat

SEQ ID NO: 121134 - DNA, 349 bp, Glycine max
  unsure (1)..(349): unsure at all n locations
tttcaaaacattgaggtgcataagaatttgtcacaaaatcctttaccaaagagtttactctccgggtaatcgaataccagaaggtagtaatcgattaccactagctagcattgttttcaaaactgatttacaaagctgtaatcgattaccataatcatgtgatcgattaccaatggtntaaatcgttagatttcaaaattcaagagtcacaactagtgatataacatcttcaaatcattttacacttgtgtaatcgattactcaatacttgtaatcgattaccagagtntctaaacgtttagagttttcaaatttaacatgaagagtcacatctgttgatgtgtaatcg

SEQ ID NO: 121135 - DNA, 208 bp, Glycine max
gacgctcatatgtcttatatgggaccgatgtcgcccagatcttcatccggttgatacatctagcccacttggatctttccactattaccctttcgagctacaagcgggactcatatagaatatgcataactcgtttgcttaaaagcctatcgtgatctacaccgatatgtactacatctattacatgcaaacaattgacatatatact

SEQ ID NO: 121136 - DNA, 298 bp, Glycine max
  unsure (1)..(298): unsure at all n locations
atctatctcattagacattagacattttaggaacaagagnctttgggagaagaactacacccagaaacaatagggtctanatcagtaagaaattttcaatctctttatttctaatggcaatatggatgttgtttagttattctatgaatatgggtggctaaaccccttagaactcgggatggtgatgtagtggacccatactttagttccttnntttaaaaaaagatattcaatttatcaagtaattgatcttctatggcttactctatgtacaatgacacttgatatagtaatgatg

SEQ ID NO: 121137 - DNA, 125 bp, Glycine max
catccatgtggttggatcggccgctctctcctaggacgggagtcaccaactcgcactattgctactcgacgcgcaggcgatagcgaacacgtactcctaccccgaccatatatatggtctcctcg

SEQ ID NO: 121138 - DNA, 470 bp, Glycine max
  unsure (1)..(470): unsure at all n locations
tggtctcagcgttatgcgagacggagaccaacatgctagctatcatctccaagtaccaagaagagttaggtctagccgcggcccacgagcatatgatngcngacgaatatgcccaagtatacgccggaaaaagaagctagaggaagggtgatcgactctttacaccaagaggcaaccatgtggatggatcggttngctcttaccttgaacgggagtcaagaacttccccgattgtagccaaggccaggcgatggcnacacctactccgccncgaaagatcatgggctttcgctatgtcacatatgataactatggcccataattaaatcgtagaaactgatggcttaaacctgctagatcacttcttttgaataaagagtggccatgtttactcaaaagctgtcaataatactctacttatcttactcattcttttaccatctatgttgtttaggaaacctactaacccg

SEQ ID NO: 121139 - DNA, 241 bp, Glycine max
tcgaccccatgatagagtaacctactcttctttagcagagcaataaggatttcttcttaaggggcataaagctatacctaaaatgcccctttacttgggagaaagctaaagcgtaggacctatattccttttctcagagacttatgcagatgtacacatatgtctgtgaaccaaactttatcttaacatcacttatttttctcctcatattcatttaaggaagaggaatccctgacctaaa

SEQ ID NO: 121140 - DNA, 372 bp, Glycine max
  unsure (1)..(372): unsure at all n locations
tgactcaccataaaccttgacccagtgtgagtangtctatccttaccctcagaggcaaaataagagtgaaaggaatatctccaatcagagagaatgcaccatgaaaagaaaggaaatttctaatcaaagagtgtgagaaagaaaaaggatnagacagaaaattccctacctatgaatgggataatagtaagaaggaatgaaagaagttcctgatcaaagaaactataagaaatgtgcagagaggtctttggaccagacaatatctgaacagtacagatatttcaccatataaacaaaagaaagagaaggacaccatgacctatagtggtcttcttccttcgattaccaaccanaatactgtgcgtaggtgac

SEQ ID NO: 121141 - DNA, 217 bp, Glycine max
agcgagctgtgcccatatcgcataacgaaagatctctcgctcaagacattctatttactatgaatgatgcacccatacacaatctatgccgcgtcgttatctagatgatatacacgtgcgcccaagagtgttggagcacttacatcacacacatcttcttggctaaagagccctacatgcatacacatagcattgtggggtaccaaaaattgcacat

SEQ ID NO: 121142 - DNA, 377 bp, Glycine max
  unsure (1)..(377): unsure at all n locations
tgggacactactcttaaagcaaaaatggcatataacctccttccataaatacaaacatcaatgtaaatttagagcaagcttatgcgcatatttcattacgaacgttctcttgcacaagacattctattaactaagaaaaatgcacccatacacaatcaaggcagcttcgttatctagattatttacacgtacttccaaggtgtatttgttacttacatcacacacatctccttggctaaatttacatacatgcatactcaaagcantttggggtaccaaanattgcacatgtgcacatcttggtatttctaatacctatacatacacaaacttcatgatgaatcttgactatcttcacanaaaggtgctacacttca

SEQ ID NO: 121143 - DNA, 91 bp, Glycine max
ggatgccgatactgaatgcaccttaattatgcaacctacacagtgcactcacatcttatccgtgacattatctctctctatggtcgctcaa

SEQ ID NO: 121144 - DNA, 230 bp, Glycine max
  unsure (1)..(230): unsure at all n locations
tgctctatcactggatcaccctgtgtgggcctgcaaccatttgaattcacgatgacagatgctgtgctcactatttacgatcttgatacgaacttcttctacataggaattgttgcgctccacattagatcctacgacaagcctctttaatgcgtggagctaaatatgtgacaacctgtntactcatataccgaatatatgatgttaaacctacactaggtgtgactcta

SEQ ID NO: 121145 - DNA, 339 bp, Glycine max
ctgtttccctgctaaaaatttcatcttacactgattaattactactgaaacttttagtgtacttaagatcgctgcgttgaatataaccttattcactcaggaaattacgggaagagataatgcatactcagatttatactgagtaggccacacgctcgcgcatacgtacagtatccaaccaacccacttgagatgtccactatactgtagattccttctaacagtcctaaacacacaaggacgattcttccttagctttatagatccttacaacaagagactactagctctaatacttacagatgatagaagatacgaactatctctctacaagacatg

SEQ ID NO: 121146 - DNA, 350 bp, Glycine max
  unsure (1)..(350): unsure at all n locations
cccaataaacaattattgcactgtgtacacaagttatgaattccctctatgacaatcttcttaaatggtcattcatatgaagcaactcgaatatgaatgtgaaacaatattacataaacgagaataagggaagagaaaatgcaaacgtcactttatactggttcggccacccccttgtgcctacgttcagtccccaagcaacccgcttgagagttccactatcttgtaaagttcttttacaagttctaaacacacaaggagcatccttgctttgtgttagagatcctctcaacaagagactcacagctctaattccttataaatgagaagacgagaggacanatctctct

SEQ ID NO: 121147 - DNA, 414 bp, Glycine max
gtatgcacgcaagctgtccttatgaaagagagatgcgcgaaatgctcacctcctctaatgaccgtgcatcatgtactatgactaactatcttgctcctaatagagactggatgatgatcccatcatggttatctcgtgctgccttgcacctaagactagaagcgcttcgagtactaatacgctctctcgttggatggtatagggaacaacacgaacccactgggttcaccgaccctgaaaccgactggtgtgcggtggtgcatatccattatttggatggacgcttgtgcgtgatgatgacctgtctgatgcgggatgtgaagctgtaatatgatctctgacaggtggccgatatgtgcattatcatgctttgaacatatgcttatgcgaggcatgatatgatgtgtcatttat

SEQ ID NO: 121148 - DNA, 442 bp, Glycine max
  unsure (1)..(442): unsure at all n locations
tcgatatagtggtntatcttagatataacactttatataagaagcatgctctattatcacaaacatacacaacacctgttgtatcaaagtggccctcggaataattaaagaggggagggttgattaattatgaacaggtcttgactaattaaaaaaattattcctcttaatggtactagatttcaattggctttactacntaagtattgagaaagtaagaatagaaacaataacttagacaaaagtaaagcggaaataaaaagtacatagcggaaatataaagagtgtagggaagaagagacaaacacaagattatactggttcgcaacaacccgtgcctacatcagtccccaacaaccaccggttcttgagatttccacaaccttgtaaatcctttacagaaagatcacanggatgtacctccttgtctcttgacaccagt

SEQ ID NO: 121149 - DNA, 295 bp, Glycine max
  unsure (1)..(295): unsure at all n locations
tcgatatatgacgggactcaatcagacattcgagtaaaaagttattggtcgttgaagttggctcagagcttcaacaatcaaattcgagcgtctcgatatatgacgggactcaatgacacatccgagtaaaagttattgtcgttggaatggctgagaagctcaacattcatattcgagcgtctcgatatgttacgggactcaatcagacatccgagtaaaaagttattgtcgttngaattggctcagagcttcaacattcaatttcaagcgtctcgatatatgacgggactcaatc

SEQ ID NO: 121150 - DNA, 440 bp, Glycine max
  unsure (1)..(440): unsure at all n locations
ctcataatcatgtatttacttcttctatcttattatgaatatgttttaacttagtcaaaatttaaagagggagattgttangtctaaatggtccacagaccactggatgacccattcccaccttggattntgatgattataaaggtataaattattggtagactaatgatttattgttaagtgaacatgacctactacataaatgagcacacttggtattaaattgtattctacagctctagtgagtatgcatccaacgggctattaaagtacctgcatccacttattgtgaaactagtgttcacacactgagttgtttttattcgtgttcattggacttaaatcacttatacactntattttatatctttataagtgatgtccaatgaagtacaaaaggacaatgtnggctacanacgaaagtgcatgaaatgtactgt

SEQ ID NO: 121151 - DNA, 152 bp, Glycine max
tgcttagagggttttcataaagaaggttgaactttgaattttaaatactgtaatcgatcaccatgtcactgtcatctattcccagtaactaatattttagaaatatgaaatgcaaaagtgtgacccctgcttgtataactgcgtaatcgatt

SEQ ID NO: 121152 - DNA, 278 bp, Glycine max
ctcttttagttatctacctctaaaatctatcacctggcttttttcagaacttttggtcttgggtggcatttcattccctgctgttcatagagctgtatgatgatgatctagattagcttgatcatacaaacgatctaagtttcagagtgaatgattaatctgacatccttctgacatcctcaaattaaatgagaagctaccctgtacggacatccagggttaatgttaagccatttaagttgaaccaggcttttatgtcaattaagtttcttgctatt

SEQ ID NO: 121153 - DNA, 326 bp, Glycine max
acaatatcgtaggtgacgtcctttataatccacctatgttgaattcttatgcagactatcttattcggatatgctaacgctcacaccattgtatatgcgatgggcgctctgctcgaacattacaacgaggcaattgatgattacgactctaagcacattatgcatcagatttgggatcgttctgctagaaccgacttgctacatccattgccttaggaatctcataaatctactcatgctgtcgatgatcaaactatcgactgaaaacgacaactgatccggttgataagagcgtctcttatgatgatagcaacctaactactgac

SEQ ID NO: 121154 - DNA, 467 bp, Glycine max
  unsure (1)..(467): unsure at all n locations
ctgaatacctcanatcctcagcttcctttattccagtgatgtctgatgggtccnncaatgctgatcactnttctcatgtaaagcaatttatctaaggggacatcccttctaatccagctatgttgaagtcaattcagttctctntttcaaaattggtcaaggctcctacaatattttatgctagttgccaactcctcaaccataacaacatggcaattgatgatttaatctttaatcacaatatgcatcaattntgttattgttctgctgtagctgacttggaacaactaaggcaaatggaaactcanaaatctactcatactgccaattttcaaactatcgaaagaaaatgacaagtgatttggtagaataagagcgtctcaataagaggatngtcaacctaactactgaacttgggagaatcaagaaagaatnggttgaaataaatcccaatatcactcttctaa

SEQ ID NO: 121155 - DNA, 158 bp, Glycine max
attgggcaagacaatagagtgcatgtccgccatccttgctcaatgcaaggaaaagctaggcctcgtgtaagcccatgagcaaaagctaaaggatgagtatgcgaaggtatccatactagatacgaagagggacctccttgacggagagagaaactaat

SEQ ID NO: 121156 - DNA, 428 bp, Glycine max
  unsure (1)..(428): unsure at all n locations
tcagcttagctgcaagagccggaaggaccagtcagagctatgtcttgttgttngagacacgttgaaggcttgcctaaggtccaaaaagagtctgtccgagcaattgggcaagaccgaagaagacatgtgggccatcattgaccaatacaaagaatagctaagcctagtagaagcccatgaacaaaggctagaggatgagtatgcagaggtatccgtcctgcaagcgaatagggaagcgagagagagagagagtaatcgattcattacacagagaagcaatgatgtggatggataggtttgcattcaccttgaatggaagtcaagagcttgcgagattgctagccaaagccaaggtgatggtggatgtatactcggcctcgaggaagttcacgggctcctcgattattgtcagcatatgatcaatctga

SEQ ID NO: 121157 - DNA, 254 bp, Glycine max
  unsure (1)..(254): unsure at all n locations
cttataattaccttcatccatgacttcagatgcccgcatgaggcctttagcttcgcccttagggcatcccgaggagtgactacctgcttgtgcttcagagacattttcttatccccgaagaaccctgacactgtgctacccatgagcgcggcagccanataaccttagattgatcatgtgcatgtgcactacgtatgctgtggatcacatggcattggagaacacactatcactatctaactctagacagcgaa

SEQ ID NO: 121158 - DNA, 506 bp, Glycine max
  unsure (1)..(506): unsure at all n locations
gttagtcgtataaagtgtcttattcttgccagcatggacgacttagaattaccttcacccatgaattccgatgtcgtcaaatgatattntgcttagcacttgnggcagccagaggagtcaatacatgtttgtgctccaaagactcatcgagatccccgaagtcttctaatcctttgtaaaccatgagcgcaacatttaataaacattggattgatgatttgcatttcaactccttgtgttgtgtcttctattggttntgagtacacactatcgttntcgaatcctaagccataaattggctcanatccatggngtgccatanaagcatntaagtaaatngaatataataaccacttgttaattgtttcacttaaactgcctaatcatgagcgtgcatgcatgttcatntggacatnctgcgagtcgganggataatgaagaattgttttgagtaatggtcgataccacaccanaatcaagaacaanggtagtgtcataccctaatt

SEQ ID NO: 121159 - DNA, 82 bp, Glycine max
tatccgcgcggaatagagagcagagatgagacacactatcgcctcatagtatgaacatggccgacaccacacactatattgt

SEQ ID NO: 121160 - DNA, 423 bp, Glycine max
  unsure (1)..(423): unsure at all n locations
taataataactgcgcagaanagaaaagaanagaaaagaaacactcttgcctcaatgtatgttcatccccgacaccacacactcttttcttttcttttgcggaatcgcgatgagattaaaatttcgttggggatatttcgcaagcgccttatctgtaatgtggaaagaagcgtgcagccttagcctgaaatttcgtcgtgtgtgcttcggcggagtgcgcaactagtgggtgttgtgtggccattnttattctctactacttgtgttntgtgaaaccattacgtaagagaattttgtgccccacgtggcagtgtcgtttatcgcgtacacgtccttttcgtgtcggttggacttgatttgatcatgacaatatgattgactccgctgtaatgtccatgtncgatgatgatncacaactaacact

SEQ ID NO: 121161 - DNA, 366 bp, Glycine max
  unsure (1)..(366): unsure at all n locations
ctacactgatactcgccactcctttcacaaccaattaacacaaacctactcctttctctactacctgtgtgtgagtctgaccttaaaatcatcgccacaaatacgttctcatgagccacggatcgagcccaccgcaaaacatactctcggcactcaaacacctacaaaatccacatatatgtaagttgtctaccaggactcatgttattgaatatgtgacaaacattaacattataacctgagaagtcttgaacgcatccgaacaatcaacatgtggttcattcgcaccacatgaatatgcatantcataatccatatccgctcgtttagacagtatntcatacattcactcatcttcatccatct

SEQ ID NO: 121162 - DNA, 225 bp, Glycine max
gaggagattagggattgatggttgtgctatacttaaccgaatagagcgaatcttactcaccagtcctcctatttatgaaggaactaatacctatgcctgcggagatgagaagaatacaatggagcttgtatgcgcatgcagagactataaggatgaccataccgtgaagcgagccttctcagtataaaactacaatcctctggagtatacgatctctctctctat

SEQ ID NO: 121163 - DNA, 442 bp, Glycine max
  unsure (1)..(442): unsure at all n locations
actttcaattcacatatttctaatgctgatagcaaaacattngagctttcatgcatgtgtcaatgataggcttgtcgtcatacttttgtaattgtagctntaagttgtatntttgtgtgatcatnttttgtaaatagcaattcttattagcttgtaatcttatttntgttggttctaatacctttgagggggagatgaaaggaatccacagttggttagaggtgcattaagagataatagttatacctattcctagttatgaattcttttaattcaaaactcagcctttctggattatacaatatcttnttctattttgctttctgcttggtttaataacanaatttcatctcaacaacttaacttaagttgtttgtctaatattaatataacgtgcttaatttcttaactccctgtatttaaaactaatcttctatcaagt

SEQ ID NO: 121164 - DNA, 334 bp, Glycine max
tttataccccctgttgacgtgcttaacccattttacttaagtcatttctcgcttaacttaaaaataaaatcaatttccactgaacgtttgaattgtattatccgttaacttcggttaaaatgaattctgaccgttcggtcgtgccgtaaccacgttggaaatcaaaaagaggtgaaaaaatatatataataatcaaaaaatattttttagtaaagtaaagcgaaaaatcaatcggaccgtttctctttaggatatctcattcttaatcgaatggactaaataactaaagtgaaataaggctagaatcaactccctagtcgaggtcgtcacaaaa

SEQ ID NO: 121165 - DNA, 299 bp, Glycine max
gaacctctgctgctctcgccaacttcaggtggacgaaagttgtctcacaaccctgcgattgaggctcggtgcacatgacaacacatcggtttgcgcatcagaggactctctagacttccaccatggtcgatactgaccatcacaggtgctcgaatcaagcgcatgacatgcttacacactctagcttgccgatcagtatcacgttagatccaccttcagtgattacgagttatatctatgtgctgcacatgcacattacgattcgaggacctctccttctcacgacggatacaatgatg

SEQ ID NO: 121166 - DNA, 349 bp, Glycine max
  unsure (1)..(349): unsure at all n locations
atatatcgagatgctgtttttgacaacgaatgctctcgagaaattcaaatggtcagaacttggtacacggatgtccgattcaggcgcataatatatccagacgctcgaaattgaacatcngaagctctcgagaaattcaaatggtcataacttgtcacacaggtgtccgattctggcgcatcacatatcgagacgctctatattgacaccngaagctctcgagaaattcatatagtcataacttgtcacacgaaagtccgattcaggcgcatgatntatcgagacgctcgaaattgaacaacgaatgctctcgagaaattcaaatggtcataacttgtcacacggatgt

SEQ ID NO: 121167 - DNA, 184 bp, Glycine max
cattccttccctactatctaagatggcccctcgaacctccatattatagagattacgttctacctttttctatcatcattgtctcttagaattcttatatgctctaatggatctaaagacgcacgctccgtctgtggatatataccttcctagagggctctgcgtcatgtcgtcttataggact

SEQ ID NO: 121168 - DNA, 402 bp, Glycine max
  unsure (1)..(402): unsure at all n locations
tatagaaattttgtattaacctcatctattattttattagaaatttcttttnttggattattttaatagaaattttaaattttttaaaaaaacaaagacattctaagatggttcttttgaaaaccatcttagaaagtatacattctaaaataatttttgaaaaaattatcttagaattcttaatattnntaatntaaaaaaaaacgttctagccatcttaanaaatataccttttaagaaggttctttgaannaatgtcttagaatcctctaaatttttgttttntaaaaaaaaacaaggatttaagacagtttgcagaaactgcttaaaagttatttctagacggtntccgaaaccgcttagaatctcattttttaaaacaatctatacaattttcacata

SEQ ID NO: 121169 - DNA, 417 bp, Glycine max
  unsure (1)..(417): unsure at all n locations
ttattatcttaatggacggccccaaagattgatatggtaaaccttgagaagctcttcttaacagaagtcttttcaagtccctgccaaaagtccaatgtgcaaagctcaactggtcctaaatatgatanagtgcaacaactggtaatttagaatcagttggcagtagcactgacactgcttacggatatttacataatctgcttggttataactaaatgtgacagggaaatgcaagagaactaattactaagaaaatgcaagaaatgcgatagttcctagtaattataacccggngcatcaatgtctgtggtagttttagtatgatactattatataactataagagttcacttatattatagaactataagagtcacatgtatagtgcaatgtgggagaataatagtggttatctat

SEQ ID NO: 121170 - DNA, 307 bp, Glycine max
acacctacggttcgaagatatgaccagtgctggcattggaatgttgctacaaaccgacggatcgtgaatgatacttgcggagaggaaggatgagatgtggccattacgacatccttctatatctatagccatattcctatatttctttgtaattagatctatccatgtggctatggctggactcagtccacgaaagtgtcttaaatattgagcgaacatgtgcctgcaaggagcgtctgctgcatataattagttatgaataacatggatcaccacttatgacatgtgcatatatgggaccatcaaa

SEQ ID NO: 121171 - DNA, 224 bp, Glycine max
  unsure (1)..(224): unsure at all n locations
gcgcgcatgcttgctactcacaaacgatattatctgcaggtgggtctttgttcttgtgttaaaatatatacttgctctatgaaaatccacttttagtgttcatacgtcgctggacaaataacacatggttattggttctagactacaaatcatactctctgatggcngctttcatagtcaaaaagcaccgctgacatgattcggttacgggcaacagtctgaag

SEQ ID NO: 121172 - DNA, 367 bp, Glycine max
  unsure (1)..(367): unsure at all n locations
tacttgctttttgaaaagtcaatttcttgttgtaacttaagtaggttagtacaaaataacacataatatattgattcaggacttcaattcatactttcttagtttgttatcattgtttagaaaaacaattgagatgattctcttaggggtaaaagttgaaggatntatattactgtagtttgatgaaatctttgtaatctatgaatgcttctttatngtttatcttattcactagtgactttcatggcttaacttattcgctagtaactctctgcctccgtgaagagcatcttccgcttatgtcttgctttaaaatnttcgcttagtgnataaatacctttgacctttgttntaataatatctcatt

SEQ ID NO: 121173 - DNA, 356 bp, Glycine max
tcagcccggcttactcctccatagataaatgagagacactgaccttcacatagcatagatatgcaattcttcatgaatgaggaaaagcataacatttcctatcccaccttcaacacgagcagttataccaacccagtagatatattgctggtagcagtatctaaccaatgtgacatagtgcatgcaagtataatacttctaagaaccaaatgacaagggatattgattgatatatataataatgaacagtacctttggtgcatcaggtggatcatactgcacaattcagtcctaccgcacaattatgagacaatgtacctaaatcccattatctaacgatttcaattaacataaca

SEQ ID NO: 121174 - DNA, 328 bp, Glycine max
  unsure (1)..(328): unsure at all n locations
acgagctggtctaccaaccctgtggatatattcctggtagcagtataaaaaaatgtgacatagtacatcaaagtataagacttctaagaagcaaatgaaaagggatattgatngataaatagaagaatgaannagtaccttggttcatcaggtggatcatactgcacaatccagtcctacagcacaaataaggagacaataaacataaatcttatattattaatgattntcaattaacagaacagaatgctgaataaacacccggtcattcaagtgtgtaaatgtttaccatagtatantatagaaaccaaataaacatagaaattta

SEQ ID NO: 121175 - DNA, 150 bp, Glycine max
tcagcacgggatggaggattcatgcccacgctcttgatatacatatctgggggtgattcatcgaacatccgccaccgagcttcatatgtgatgggtgctccataatcctacatccgtgagatgacgaaatcgagcatggcgatacattct

SEQ ID NO: 121176 - DNA, 171 bp, Glycine max
  unsure (1)..(171): unsure at all n locations
aatcgaacttttcatttcattctatgtacccttagtggtccccatttgttcacatgcttntattntcatttcatttacttttcgtaccctcttttgacgtgctntagtcatttatttaagtcatcttttcgcctaatcaaanaataaaatanatntccaccgatcatttga

SEQ ID NO: 121177 - DNA, 153 bp, Glycine max
tgcgcgctaccatcttcatcatcaacacatgtatgtgttctattcacactattagagtggatctctattgtctgagagagagtgatgctactgaggtcttaagtgagccaacaacaccctggctgtatcatatgactttcacatcctctgggt

SEQ ID NO: 121178 - DNA, 377 bp, Glycine max
  unsure (1)..(377): unsure at all n locations
tatctcttttatcttagtgagagtgattctnctaaattcttaagtgattcaagaacaccttggctgtatcaaaggactttcacaacctttgtgtgttgccctcgctggaaagagtgattctttccttcctttcatcttcacccttgttctttcaaaccacaattccagaanatccacctctgcccagaattatctcgtggcccataactcccatttacgccactcaaataagtgattcttgagcctaaattgatntcaaaacgagacctttcacctcgttttgggaatcacctcattggagccctgtagcttcagttattgccatntctatatntctgtccagccaccacttaacctacgttntaccatcccattca

SEQ ID NO: 121179 - DNA, 229 bp, Glycine max
  unsure (1)..(229): unsure at all n locations
attaattttcagctttaccttctnctccatnngtgtttcttcattnnntctcatgtatctcttcacatgtcttgtgctannatgtattaacgtgattcttagagtttccactattaaactgtatagaactagattgatntctatggtcaattctgtctgtcttaatatgaatggtgagttagtcttgatttgcttgtaatttgggctaactaacctaaatcttaaacat

SEQ ID NO: 121180 - DNA, 308 bp, Glycine max
acggggtggcgagtaatgttagagatgtgcatctaaacatgctgtgcattagaccatatacagcgcttctgctgtgcatgctgaacaatgagatgggatggcttggatgcatctattgatggagactattctctgggagctgcggatgaggggattcgtaatgccagcccttctatgatgacataatattcaaacatgttgctttgtggggaggtacagagcgggcttcatgttttattagggactatggctgacgagattgagctagactcacaccataggtctcctgcttgtgattaccgccaaca

SEQ ID NO: 121181 - DNA, 433 bp, Glycine max
  unsure (1)..(433): unsure at all n locations
tccgattatgtggggattaatggaaactgngtggtgaatagtttaagaagtatgcatctaagcagtctgtgaattagaccatatccacctctcctccttgtcgaaatgatcaaaaagatgttatggcttggaagcatctagtgatggtaactttgctttgcgagctgcgtatganggtgatagtaataacatcccttttatgtattctagtttattcaaacttngtgctaattggaagggccagagagggctaaatgntttatttggaacttggcgaatgagatgagtttgactacaacaattatgtctgctgtgaaaccaagaaagaatctcttatcttttcagattggacatctatgtgcagggcattttattgaggatgatgcatgaattatcatgtgatgaaatggctgagtatctttatacatgagta

SEQ ID NO: 121182 - DNA, 388 bp, Glycine max
accacgtccaagcagggctccggatcagcgcatcctttgcacggacgactgttgagtgtacaaccgatccttcggaattgtctaagagcaccatcatttcctcctgtggtccttatttctgcgttatgatctctatactccatgagatgcaaactctcatggagtgcatcatctcgatggttctttaacctctcccagtggtgcaacacaggtgcgctattggatttgcaaaagcgccactccactcattaggattggtacctgtcctcttggacatacctatctaacgtaatgagacaatcatgcgcgtggtatgtatacacgctccactcaagtgtatcgcacaattatggatattctctagtgaatcactcttgcctcttaccac

SEQ ID NO: 121183 - DNA, 465 bp, Glycine max
  unsure (1)..(465): unsure at all n locations
gcttcaccttctggtcctcctcatagttgttgcatgagaaaacatgctctattttcgtctnccactccaagtaggcctgcggatcattctttcctttaaatggaggaatgtngagtttaataccaatcaattcggtttgtctaagaacaccatcattccctcttctnctnccttcttcttcattatgatctctattctccatttgatccaacctctcatggagtgcatcatctcgttgtttcattaacctctccaaatgtngcatcaaagcttgcatttggaatngcgaaagccccactccatcattangaatagtacctgacatctcanacaaacaaatcaaacgtaataagacaattatttagtgttgttgaatacctcacccactcaagtgtatcacacaattatggcttttctctaatgaaacactctngccttntaccactctaattccccttgagttct

SEQ ID NO: 121184 - DNA, 154 bp, Glycine max
atatacagactttgagctcttcctgctaactaacaatcacatatattgagttacttcagcatccgtcaagaactcatatgcttgatatgattattatacaaaatgtcccagcgctaacaaagattatgacaactctcttatgatagccatgcta

SEQ ID NO: 121185 - DNA, 322 bp, Glycine max
  unsure (1)..(322): unsure at all n locations
gtttttggtaatttggtgaaatctggtttaaatttttttttttggttctcctctatatatgtgatagctgatagtagaggagatacaacttgtgctcttctgcaactaatcacacaaatctgagttcttcacatcctttngttctttcttcttcatatatntctttcaaatattacaaggcaataaaattaaaaaactctatatgataagatctaatattttaatcatgattgttctaaacaactgataaaaaacaaaagaactttttttctgttaataactaaatgacacaacttacccaaagactcaaaataatgcctat

SEQ ID NO: 121186 - DNA, 147 bp, Glycine max
tacaatcacatgcttaaccaaaattatttggcacacgaaatctgctataccactaggataacctcccatccatcttaaataagctctactagattgactatgaatcttataggcccacatagactctgatggcttcagcaataagta

SEQ ID NO: 121187 - DNA, 380 bp, Glycine max
  unsure (1)..(380): unsure at all n locations
tgtggagcaatatctacgggctttncgtcaccttaagccatcgtcgtgggggcatttcttgttgtgggccgagtggtcttataacacttcatgccactccggtaccggggtaacgccgtttgagatcatctacggtcggaaaccaccagctattcctgagtatttggggggaacttcatcagttaaagaggtggatgagatgcttcgccaaagggacgaggttttgtagttgcttcgtcgganactgcttaaggcacaacagcagatgatacagaccgcggatgctcgatgatgacctcaagagttcaatgtcngngactgnngtttggcaaactcaaccacccaccaaattcggctttaaacacatatttaagctcact

SEQ ID NO: 121188 - DNA, 365 bp, Glycine max
cgctgcgtgccatctatatgcactgagtagatgaaatagctgttatataggcagaggtctgtacactgcgttctaaacgaccacgaaccacagagacatacgagccgtacaccctggttcatggtagtctaataagtaaacgagaatacataagcatgctatgtatcctacatcctctgaaatacagaagacccatatgaagctgtctctctctattgcgcgccgtccatgactatacataccttcacagcactattatgttgagagatgaaacctatatactatatccgagcgatgtatgaatcaggggtgatgtcttattagactaccccacagactgcactattcagtcccatctacgtgct

SEQ ID NO: 121189 - DNA, 415 bp, Glycine max
  unsure (1)..(415): unsure at all n locations
ttgcattctntacactgcattctaagcacccacgagtttgagtaaaaaaggggccctatacccgggttcatgggaatctaagaagtagaggtgaatctataatcatgctaggtcttcgacttgcttgataatagtgaaacctcgtctcgagctttctctctttataatgtgttgtcgctagtattccataccgccacaatattattatcttgagtgatgatacctctagaanatagccgtgcgagttatgaattgttgnggagtagttattagagaaccctagatattgtcctataggttcccaaataggggcaaagagcaaacacgctccgtgccattcgttctcaagcatttatcggtaaatagcactagtttatagttntgctagtgatgtttggtttctttagaggaatac

SEQ ID NO: 121190 - DNA, 377 bp, Glycine max
tgcgctactattctgcacccacagagtgtctggtggatacctgtagagtattagacccaccgaagggtgatctgtcacgtgcgatgaatgatgtggccctaaggattgacatatactgagagccacatactacccacgcccggagaactgccccatctcaatggctacgtgtgtatgagcactatcttttgtgactgtctgctcgcctgcaacatcgtgttgattcaactctttccgttgagtaccctgcattaagaatgtcccgagcactatacccctcgccttatcactcacttgtgactataggtggagtgagtgcaacactatacacaccagctgcgagactcattgaccctgaattggtcgctttgacctgc

SEQ ID NO: 121191 - DNA, 462 bp, Glycine max
  unsure (1)..(462): unsure at all n locations
acatgcataatgagattaaagtagtggttactagtggtaattacagtatatatggttgataactggagagtaataaacctagcgaggtgtaatatatcaagtgtgatagaaaatgtgttactagtatttcacatatactaattacagaacactacttatgttgttattcaagttaaattagctttactttgtatgtggcagttctttcttctgtgtctgttgagtggctgtagcatctgttggttcaacacnagtatgtttgttctctgcattangaatttcccagttaacagaccccttgcattatcactcactgtgagtttcaatggtgtgagtgcagcactctacacacttgctgcgaatcaatagacccttatctgatgcatgacctgtcttgatgccttgttccttctacttccttgcacatagtccattctctcaccccttagactcttataatct

SEQ ID NO: 121192 - DNA, 393 bp, Glycine max
  unsure (1)..(393): unsure at all n locations
gtggtcttcaccggcgaaaggatngaatngggtctttattatgaaaatttaaatcatcctgcttggacgaatgagaaaactggngcaaatgaagagggtgagaatgaaggagaaacccatgttgcgaatgtcattcctacatggccaaacttcccaccagcccaacaatgtcattactcaaccaatatcagctcttctcattacccaccacccagtcatccacanaggccattcctaaatcaattacaacgcctgtctaccgcacgcccaatgcccaaacaccacctttagcgaanaccanaaaggaattttgcagcaaaaagcctgtaggattcaccccanattccggtgtcatatgctaacttgctcccatatctactcgataatgcaatg

SEQ ID NO: 121193 - DNA, 379 bp, Glycine max
  unsure (1)..(379): unsure at all n locations
ctcagcttgcctgttatcgaaactcgcatgggagctggtatttcttctttaaccgagatgacattcagagcacggttatccatacaacaatgcccacttccatctttttttataactagaagcactggcgacgagaatgggctatgattgggttgtatgaggccaacatctagcatggaggcgacctgtctttcgagctctgtctttnggcagtataggtaacgataaggccttacattaacgagaaattgaattggtagaaggtggatatggtgggtgatngaacggtatgggggtacatgggaatggtactgaaagataaggtcaaaatgggaaaaaaaggtagtgatggtcggngatggnggaaaaagctcgagtg

SEQ ID NO: 121194 - DNA, 477 bp, Glycine max
  unsure (1)..(477): unsure at all n locations
ctatttaatagaaccctaanatttcagtcgcatcataagaaacaaacaccattggttcgtggattatattatgaaaaccaagatcaattcattaatcgatatcttcatattaacaaagaaaatatcatgagtacataactaaataaattaagttgaagaaccaaacaatttttaaaaaagtatacaagttaaaaaaatgttgtaggaaaatntctggggcaacgagtttgcatacacttttacttcgagtcanaacatttgtaccaaaatannattaatttttttaatattttaacaacaacanaaaattcataaaacggccccacaattatatgtcaaatntctaataaaaatgacaacatagcanaagggttttcttttcttgattcatcacaatgcttctgaaaaagaagtttatttagttattttgtgtccattcaanataaacanatatttatttagttatgataaaattct

SEQ ID NO: 121195 - DNA, 391 bp, Glycine max
cctctaagaatgagtgtctggagtgtgtcaaaggtgtcaatatatcgacatgattcacaactctttatttatagatttcatgatgctgcaccatacatgaataccattcatcattgtagagaggatgattcctctcggcagagagtgtatctgatattatatttaccatgcatatgctcttgttggtgtagcgaatatatggtctcaaaattccttgcgttgcctgagtgtatactctctggtgcttgattatcatctgtctgtgatcgattagcagcgataaagtgccgttccaaaagcgtttatctgaggatgcgacgctccagagccttttaaatggtgtacccgtgtcaatatgtcgcgagactgctacccgagtgtctgtacgatg

SEQ ID NO: 121196 - DNA, 235 bp, Glycine max
  unsure (1)..(235): unsure at all n locations
tgtttaccaaaagaagtttctcanaattntctaagttaccagagtattactctctggtattgatatagttcctgtatcgataccatgataagttgattcaaagctttaactaattgcacgtccaaagttttaaatgtgaatcgatacaatatatggaatcgataccaggatctgacgtggaatcanatcaatggaagagccatctttctaaatcatgtgtatcgatacatggtat

SEQ ID NO: 121197 - DNA, 384 bp, Glycine max
  unsure (1)..(384): unsure at all n locations
tactaagcttcaacgggcatacttatcctagtgcgatcgactacttancataattgttaagccacctcatactcaagcgtcatgagaaacatggtagttaggttcattaaaaaggaaataatctgccggtatggactgcccaggaagattatcacaaacaatgccaccaatctaaataacaagatgatgaagaaattgtgcgaggacttcaagatccgacaccacaattccacgccctacaggcccaagatgaatggngcagtggaggcaaccaacaagaacatcaagaagattattcataagatgactgtgtcatataaggattggcatgagatgctctctttcacactacatgtgtatcgaacctcgatacgcagatcaatc

SEQ ID NO: 121198 - DNA, 453 bp, Glycine max
  unsure (1)..(453): unsure at all n locations
tactcagctgccgtgagctgctattactccctactcttnagtctggtgatccatcagctctggagcttgacttgatagaacctctttgtgagagaacgcatttgactngatccgtatgtctactaaagtgaaacacaccggagcgaatcgaaactccgacatctatcatgggtggaatggatgaatgcatgaagaaatgcatatgacacagatgcaagttatgaatacgggagctcgggacattgtctccttcttagatacaacatcttggaggttgcgaagtgcccgacatatgtatataagaatgtgacacggaccctccgttggtttgccaaagagagtggattaagacgggacccacgtatgatgcatatgcgatagatacatcacggcgatgtacatattacgacaatattcacaaacaaatatatgcgcaagggttcttaacactta

SEQ ID NO: 121199 - DNA, 82 bp, Glycine max
ctggccattatgggatgatcgtttcttctggagcgactcgtccacctcacagacaactagcttcctgatctgcagaacgata

SEQ ID NO: 121200 - DNA, 372 bp, Glycine max
  unsure (1)..(372): unsure at all n locations
tgagtatgacagtcaccgctttatgagcgcagtacaccagcagcgcttcaaggccatcaagggatgatcgtttctccgggagcgacgcgtncagctcagagacgacgagtatactgatttccaggaggagatagggcgccggcggtggacatcactggttactcccatggccaagttcgatccagaaatagtcctcgaatttatgccaatgctgggccaacagaggagggcgtgcgtgacatgaggtcctgngtaaggggtcagtggatcctgttcgatgcagatgctatcggccagctcctgngatatccgttagtgttggaagagggccaggaatgcgagtatggccagaggaggaaccggtctgatggg

SEQ ID NO: 121201 - DNA, 153 bp, Glycine max
gctctgtccgagagcgcgagctctctataacggtgcgcacctgggcacagtctgctagagcctgccttgtgggacatgtgagacagttaacatgccccataacgctaactctctgtaacggcacctatgactggtgcactataatacactgat

SEQ ID NO: 121202 - DNA, 463 bp, Glycine max
  unsure (1)..(463): unsure at all n locations
acccggtgctgagaagaatgatgatattttctacgtangagtgcgtgagctcaagttaaaggtgggcaactggggatggtatgcttgtgcctgacttgtggaaatgggagagagttgatttgcgccatcacccgatcaccacctagtaccacatatgacgggtgccccataatccactaagcttgatgtgagaaagcgtggaagtgtcagtcagtgagaacctgtgacgtacctaaacaggcgagctcctggcagtcaaccaataaaagaacaaagtccacaaagcaaggaggcctgtgtggcagctggcctgctatgtatctngngtggtatatggaaatatcctctggaatcgataccattcggggtatcgatacagggctanaatggaacagggtgtaaatggccttggaatcgataccagggtgtgtattgatacacgagtgaangcactggtatgata

SEQ ID NO: 121203 - DNA, 156 bp, Glycine max
atattgatggccctcatcgaggagcgcaggagatatgctaaatctagcagcgacatcttagcgacggctagaggagtactactccccgatatcaatctagacggatgccgagccaacggtggcatattcattgcaccaaaacgctgcactgacgat

SEQ ID NO: 121204 - DNA, 435 bp, Glycine max
  unsure (1)..(435): unsure at all n locations
tatgtgggccatcatcgatgagtgcaaagagaagctaaatctagcggcgactcacgagcaaaggctagaggatgagtacgccaagatatcagtagaaagggaagcaagggaaagggtaattgattcattgcaccaagaggcaacaatgaggatggaccgatttgctcctactttgaacangagtcaagaacttccccgattgctagccaaggccaaagcaatggcggacacctactccgcccccgaggagatccacggacttctcagctattgtcagcatatgatagacttaatggaccatatgattagaaaccgctaggaagtttgtattgtcgctcagatctttgactagtataactttntgaatannatgagtntatcccacanttttacttcanaaatcagtgtgaatcaagtcactttccgcatttatct

SEQ ID NO: 121205 - DNA, 281 bp, Glycine max
  unsure (1)..(281): unsure at all n locations
tatacatgatttgtggatgtggaaaactttttgtgcaccatcgcccgaccgccacctagtaccacatgtgatgggtaccccatattcctacaagcttgagatgaggaagtgtagaagggtgaaacttcctgcttttattcgttgaccacagagtggtacctggagatatgtcgcggggatcangagaccttgtggacgtcaggtggggtgctattgcccaaaccaagcttgccaatcccaaccaacccggcatagccagcagtgagaacctgtgatgtcct

SEQ ID NO: 121206 - DNA, 342 bp, Glycine max
acgtggaatgctctagtatcataatattcaaaatgaccctcaacttgatgctcaaaacgcacaggatgcacaactgtgcctatactaatatattaaaatgatctatctatgtcaagagtcatatggtgattatcacctgtattgcccctagtcatgcactatatatagacatatagagcgattctcaacaagcatcctaatcattgtggttattcttagctatactcacatgattctatatgagctgatttcatgtgatgaacaccctaatatcatgataagatagcgtataatattattatcagtaattaggtacctgcctatgccaactacctagtcata

SEQ ID NO: 121207 - DNA, 188 bp, Glycine max
  unsure (1)..(188): unsure at all n locations
ctagtcatgcactatatatagcacatagtgtgtttctcaacaagcacctaacaagggggtaaaactatagctatactcaaatgatatcaaaatgagctgaaatcttgtgatgaacaccctataatcatgagaagatagcatagaanatttcataccaaaattcataagtctaactatgaaaactacct

SEQ ID NO: 121208 - DNA, 410 bp, Glycine max
  unsure (1)..(410): unsure at all n locations
agaagtgaactttgagttgtgtctcacaagactctcattcatcaaagttacaacaagtggtacacatgcttctatttatagactaggtagcttccttgagaagctttcttgagaaaacttccttgagaagcttctttgagaaaacttccttgagaagctagagcttagctacacacacccctctcataactaagctcacctccttgagaagcttccttaagaagattccttaagaagctagagcttagctacacatacctctctaatagctaagctcacctncttgagatgagaagctagagcttagctacacacccnctataatagctaagctcacccncatgacananaacatganaataacananaaaagtccttattacanagacaactcanaatgccccgaaata

SEQ ID NO: 121209 - DNA, 110 bp, Glycine max
tatggttttccatgcataagtgacttgcgggaccgcagctaaaatatttactttgtatagaatcatgcgcggacctatgatctcatatactaatccacaatctatcggga

SEQ ID NO: 121210 - DNA, 422 bp, Glycine max
  unsure (1)..(422): unsure at all n locations
ggaacttctctacatactcccttgcatttaattttgtgtccatctcaaacttctaccacgtatcgcgaagtgtcatccacctttaattggtatttttccaccagttccttagaaatgaagttatgggtggcaccgcaatctatcaatactttgactttgtaatcatcaatatttccccannattttaaggatcgtcgagaagtaaatcccacaatactattcatggataatngnnngtgtttctccaattttggttcgggttccttttcggagtcttcaacatcatgcctcatctgtactaacatttatccgaagtgttatttctgcatacatgagaggtgctccatttttcgtcatagcgaanacattcctctntcttcctcttttcttgaagctctgcttcngntaaatcgtgaaatcct

SEQ ID NO: 121211 - DNA, 181 bp, Glycine max
tcttatggactctgagactgagaaaatctttatctatctatgagttgggtcttggcatagattatcttatcttacctgcactaatcatcttgtaggcttttatgaatggctgattgaactatagacaggtattgtgactatataggatcggcataccagtgtgatgttgctatgcgtctgc

SEQ ID NO: 121212 - DNA, 266 bp, Glycine max
  unsure (1)..(266): unsure at all n locations
ttgatgaagtggaaaatgaggacgcaattatactgtgccagttggagatgtattttccnctgctttctttgacatcatgattcacttgattgtgcatctggtcagagaaatcaaatggtgtggtcctgtntatctactgtggatgtacctggttgagcgatacatgaagatcttaaaggggatacaaagaatctatatcgtccgaaagcatctattggtgagaggtacattgcagaagaagccattgaatnttgttcagaatactt

SEQ ID NO: 121213 - DNA, 197 bp, Glycine max
gggctgcaccgtgtgacttactcctgccctttgtgattccttgccaggcaacgcatggatggggatacacacattcttctttcaatcttcatatacaaaggccgttgtcacctctatcagatgcatcgccgagaataaagagctcgctgtgccaagaacatcacaatagaatcctatcgggaaccaagaaaacgtcc

SEQ ID NO: 121214 - DNA, 405 bp, Glycine max
acactatgatactcagctgcttaaacgatatgttttttagtatgcctcattgttatttcttactgaaacccatggtggtcatacaacttctctctaatcttattaaaaggcgtttcacatctattgatgtactccaagtatatgggctactatgccatgatatcctaaagaatctttcggagaccagaaatgctcttatatcaagcattttctgagtaattcttacacagctacctgtacataagtgcataatcacttagcttaaatcactcaccactttacccttggatctacagcctacacatattcctgaactatcttcttatgctaacatttaacttacctacactgaacaactgatcattataagtagtgtctgtatgagatcccatatcaatatgctct

SEQ ID NO: 121215 - DNA, 111 bp, Glycine max
actcttggtgtgacaagaacaccttttttgtacctgggctccaataaaggggactgaaactgccttccacatgcatacactccggctcaacctacgagagaccatatcact

SEQ ID NO: 121216 - DNA, 391 bp, Glycine max
  unsure (1)..(391): unsure at all n locations
gcttaaataggtgggtcggctcgtgctcgcgcgcttagcgtanatctgaatcgcttagcacgcataaatggagtttggcttagcgcatttctctcgcttagcggatgagctgaagcggtgcgctggatgacctggagcggtgcgctcaacgaacctaacagctcatcttcttctggcttcttcctcacacttagccactgagtgtcacgcttagcanatgctcactaagccagcagatgggcttagcgagaaggtgaaaacaacacttttgccaatttgcctaattaacctgaaattaagagaaagtggatattaaacacacaaaacanaagtataaattatctattacctatatttaacagacagtacttataatattacaaaacaacta

SEQ ID NO: 121217 - DNA, 107 bp, Glycine max
cgtgcatgctattaatgttctcagtgaacgcgtccctctttatgactataacatcttcagtctataacaacaaatggaactactgctctgttaacatggcaccaaat

SEQ ID NO: 121218 - DNA, 316 bp, Glycine max
cggaagatgagcggagacacaccgatgcacatgtaccctacatacgattgtggtgtgctcgcctcaatctacatttcaggtgttgtatcgtcatcatgagaaacggggatactggaggtgcaactcgctttgttgttgtcatgatcatcacgatggtgagtggactctgatgccaatgggctttacaggattgtaattcattatatacttcaagagtactatgtctcacatgaagatgaccactacaatatgtggaagggaatttctaatcgaattagcttaggtctgtgtgtatcactgaccatctaaagtgact

SEQ ID NO: 121219 - DNA, 377 bp, Glycine max
  unsure (1)..(377): unsure at all n locations
ggaggaaacgatgccattntattatatacaatgcttgtgcttgctgaatctcgtctcaggcattgtctttcatcatcaaaaggaggagacagaaatgccatggtcttatgactgatgatgagcatatatgtgttgcaatgatgcaatgggctttcaagattacattcagacaatcttcacatacaggcacacatcagatgatcctaaaattagaaggaatcctattgactacaacgctgcctagaataaataaaaggtttcaagttacttctgaatcataccaagagtctcataccgggcaatcttttacagttaaattaatcaatttaactgatcataccatatgtacatactcgtaaacgttataattaactgat

SEQ ID NO: 121220 - DNA, 264 bp, Glycine max
  unsure (1)..(264): unsure at all n locations
tacatccagatcatnctttgctaaccagaaaacgatccctcttcaccactgatgacaacgcggatactatcacgccgctcctgtcttacaataatgcacctatgccactactgacgcaaccctcacataccacctcactcaagtaggagtgcagactcatatcgtcgctaagtcactcatggctataagcattgttcactctgaacaccattagttatatctcacagagagtgtcatcacaatgacattataattgctcacttt

SEQ ID NO: 121221 - DNA, 394 bp, Glycine max
  unsure (1)..(394): unsure at all n locations
acttatcacaactgattacaacaagtattctattcttgcactcccggcttacaaatattctctangccactactggcaaaacccttatattccgcctgatattaagaacactgaagtattatttagtcactaatccacttctggctttcacaaatagtactttgttaatcaaagctataacactcagagagtgtgttacaatgaagtatatcttgatgactttgctaagacaaggattgactttataagcacagtgtttctctcttattatcttttgctattggactcgagtattagtagaggacttctctaattcctatttctctagcagagacttgatgtgccttctatgtttaaaaaatagcgaatcaatatgggatcttaatcagaatat

SEQ ID NO: 121222 - DNA, 447 bp, Glycine max
  unsure (1)..(447): unsure at all n locations
tactcaccacctctatcatatctaataattttcacattatttggctaatgcccttttatttcattctaagaaatttctaaggcatccattgcctgagaaatctcaggccataagtagacattaccataacgtgaataatcattaataatggtgataaaatatctttcctttccgaaagaactaacatcaaaaggtccacanatatcagtatgcaccaattcaagaaactgagtgcttcttgtagctcctttctttgatgtnttgcttggtttcccttaatacaacccacacaaatatttagatccgtaaaatctagataaggaagaatttcattctttattaatctttccatcctttctctagaaatgtaacataaaccgttatgccacaagaaagcatatgcgtctttcacttaaactatgttagtgccaacattatgatgcagag

SEQ ID NO: 121223 - DNA, 281 bp, Glycine max
agccttcaatatgatcagaacacagtctatcgaatcctccggcgctcatagccacccgtaacatgaagtacctctttactggacatgaccgggttggaaagattattgtgagcgtgttgggtcagcatgatgattctgggaaaaaggagcaagccatctacatatctgagcaagaagttcctcgcatgagagatgaattactcaatgttggaaaggacgtgttgtgctctggtgtgggcatcacatcggcttaggcagtacatgctcagccacatcacgtg

SEQ ID NO: 121224 - DNA, 309 bp, Glycine max
ttaagtcatatctttatttcatgtcggagtaaacctacacactatatgtgcactttacgaccgtcccatagaagctgcctttacagccagctatgggtgactaccttttttgcagatgccaacaacatctaatgcactaatgttacaatttggatactgacctacctgcacccagcaaaaccaactcgttaggtgacagatgatttctacttatctacactacttttgccatatgacgacttaacgtgggactacaccaacccccttgaggctgcacttaatgcagctctcaaagaggctgcaactaat

SEQ ID NO: 121225 - DNA, 491 bp, Glycine max
  unsure (1)..(491): unsure at all n locations
gtcatatctctagttcatgtnggattaaacctccacacttgaggtgcaattaaggacggccccaaagaagctgcagctaatgcaggctatgggtgacagcaattaaggcagattccaacaatttctaaagcattagtcttagaatttggctttggacctaactcgacccaacaaaaccaacttgtaaggtgagagttgtctcctacttatatacactactttggccatatcatgagttaatgtgggactaaaccaacccccttgaggctgcaattaaggcagcccccaaagaggctgcaactaaggctggctatgggaaccacaattaaagcggctntccaacactcgccctcatgcccaaaacttccaacctggagtgtggaaatgcagtgacccacaatggactangatcgctttgtaccatctagatttgagttggatcaactcaacttacaaactgacttgacgtagggtgtctccactatgacacc

SEQ ID NO: 121226 - DNA, 326 bp, Glycine max
acccgatgcttcaagacagtggaccaattgagactattgtcccctgagcatgtggcactctctggagaatatgggaatctttctcaccatctgagatggatctattggaaaagatctcctttaaccttcgtgcctcagaactttttatttgacggcgttgttgccattgatttaatacacaacaatcctatactaatatggcaagaaccccagggatatattatttacttgacaccttcttttaaaactgtgctaaactcctcaagatattgccgccacttaccactggagcacattgtactttcctgactatttaattggcaaaa

SEQ ID NO: 121227 - DNA, 519 bp, Glycine max
  unsure (1)..(519): unsure at all n locations
cttaatactaagctatgctttaagacaatggatcaactgagactattgcaacttgatcatgtataactcactggagattatgggtatcttcctaagcatctgagatggatctattggaaaagatttcctttaaaatacatgcctaaaaactcttttcttggaggtgtaattgcgattgatttaaaacacagcaatcttagactagtctggagagaaccccaggtatatattatatacatgacaatttctnttaaaactgagctaaactacacaagtaattggtgccacttaccactgcttcattttttattttcttgtctatttttttgtcaaaaaanaacattcattgtagggtttgccgtggctgaaaatcctcaatcttagtcattctaagtacttgacagaaacccctgactnttaaatttaccaagtcttgaaaagctattctcaagattgccaagtttgtgcaggacaccagtccatcggagatctcaaacttctgttgataattgaagactg

SEQ ID NO: 121228 - DNA, 325 bp, Glycine max
actaagctttatgtgaaaagatgccactatttcttttaatttgaatactaccgctcaaaggaactgggtatggattaccaaacattgtacccgatacagctggtgataatatcttaacagggtatagtctataataaaacactttttggaacaccaatgcgcttggttctggattacaactacctgtgaatctatgaccgcataggtgaaactgtgtggtaaaaggtatttataaaaacatatgtgcttttcaaagttttgaaaaactttttaatacttatcttgattgaggcttctcttcattcctgaatcttgagtcttgaat

SEQ ID NO: 121229 - DNA, 454 bp, Glycine max
cacatcgatactcaagctttatgtgaaaagaattgactcttcacattggaatatgaatttctacgttctattgtacttggaatcgattaccaacacattgtaatcgattacagctttttgaaaataattggaacgttgtaaattcaatttgaaaaccttgtcagaacaatattgctattggttatcgattacaacaatctggctatctatatccatagagtaaaaacatcttggcataaagttgtgtcaaatactcatgtgctattcacacgtttgaaaaacattctagtacttatcttgattgagtcttctcgtcattcttgaatcttgagtcttgaatcttgatcttgactcttgagatcttgaaccttgaatatggcttcttgtctctagactatcttcttgaatctgaattctactagattcttatcttgaactcttgaattgttcttga

SEQ ID NO: 121230 - DNA, 263 bp, Glycine max
ataaaacctaagcgtgtgcacacgctctttatattgtgattccttgccgcaaacattcaccgaatagtgctgtactagagagcatgggccctacactacttgcaagctctaaacacgaagactgcgacttctcatgctaattagatagaggctcaatctatcaaatgtgctacagcgcatattaccacagcgaagaaatgccatcagggacagactgcttctactgaaaccggaaccatgacatacatgccatatgtatccca

SEQ ID NO: 121231 - DNA, 399 bp, Glycine max
  unsure (1)..(399): unsure at all n locations
acactacttgcaagctttagtcacgatgattgcgtcttctcatactagttggataaagtctaaatctatcagtagggcttcattggtttttaccacagcgaagtaatgccttcggggagagacttcttctacttcaattggaaccatgacatccatcccatangttagccggaaagggtatttctgagtggtagattgtggggtgcatctatatgcctataggacctacgtaagctcttcaacccatcttcctttggcttcatccagtcgattctataactcacttagaattatcttgttggctgctttagattgataattggtntgggggtgttctacaaacgtcaccccatgttngatttcaaagctgcctaagaactcattgagctttcattctgt

SEQ ID NO: 121232 - DNA, 319 bp, Glycine max
aactaagcgaggtagctaccattctagacgtatggttagactgaaaagccattcagactctagaatatctacttcgggcatgtattatagagcaacactgtaactggatggattgattgacattgattgaatttacttacctcaactgctaccaagcccgtgttggtatggctccttttgaagctctatatggacgaaagtgcaaaactcctatttgttggtacgatgatggataatcagtacttctaggacctgaaatgctacaacagattaccgcacaagtgaaattgattcgagagaagataaaagcatcttacga

SEQ ID NO: 121233 - DNA, 324 bp, Glycine max
ctctataaacctaagcgttgtacctcaaacctcttatttattattggtatctctgcctaccttcctgataacccacacaataactgtttaccctccttcgggatacgcctttgtgtattttccgataactgcttacagtcttcccgtatggtcctaaatcactacacattcagttacgattaaccctttgtgcctaactagggtttccaaacattacaacagagaccgaccattgaacaatggattttcatcattaacatacaacagagacttaccttcgatggaagcgcagacacgaactccacatacgcgaactcgacaatg

SEQ ID NO: 121234 - DNA, 481 bp, Glycine max
  unsure (1)..(481): unsure at all n locations
ccctctatgtaaatatgacagcctcatgtctctcttcctgaanacccacaataaactttctaacccccctgttgttactccataatttatttngcaataactgcttaaggcagttacatatggtcctaaatcactacacattcagttacgattaaccctttgtgcctaactagggtttcgaaacattacaacagagacagaccattgaacaatggattntcatcattaacatacaacagagacataccttcgatggaagcgcagacacgaactccacaaacgcgaactcgacaatgtggttgcagtcatggaagcgcagcccagtttgcgacaaacacgaactcagacagaaggagaaacaacaataaagccatgggttaaaacgacgaatgcctaatgttaaaatgaaaggacgtacctcaatggataagtggcaaagacgatcttcacaaacacgatctttcacaatgtggtgcagtca

SEQ ID NO: 121235 - DNA, 333 bp, Glycine max
tcttaaactacccgcctggtgcgacctcacattttccattctaactcctacataatctcagaaaatcgacccgtataccatactttaattcttcaaaatcaatggggcaggctaaacgtggcttcaacatctgaacatgaatctctgtgcttatgaccgtcacctcatactatgatattactgcaaaaaggatgcttatacgtcaaacgcattaatgcctttgaaacctcacgccaaaccattatgaaatgctttactcgaacggacacaacctctggtgggacaagaaatcacactatggcgaagttcgttctcaggtatccccatgaacag

SEQ ID NO: 121236 - DNA, 491 bp, Glycine max
tctggtgtgtctccacattttccattataacaccaacagaatctcttaataacaaccctaagacagtaatttcagcttcaaaatcaagtggacaggcaattcgtggcttcaacttctcaacttgtctctttgtgcttctgaccttcaactcatcctatgatattactccaaaatggatgctaatatgtcaaacccattaatgcaattgaagcatcacgccaaaccattataaaatgcattacttgagctaacacaaacacttgtggtacaagaattgacactttggcgaagttcgttcacaggtagccacatgtgttgtagtagtttttatctctcgctcggtgggttcgtggcctcaagctctaatgctctataagtatttcaaggcaaggaaataatatactttaggctcaatacactgtttacacaccgagatgcacacaatgcctgtagaatggaaataaatatttttatgtgcaactcaatcaatt

SEQ ID NO: 121237 - DNA, 288 bp, Glycine max
tgtgaatcagactggtctctggagtggtcttctggcatgacggattatctattctagattatcatggcttctggagggcatatgaacatcctacgatataggtgtctctgccagctcaaatgattaatctaaacgagaagatttcttccatcatgattgtgaatgagggtcagcaagttagtttggacaatattccttcggatcttctagggagttcttcgaatgatatattggcttatcttctccagcaaaagaaagatggaaaactaggctccctatcaaaggatt

SEQ ID NO: 121238 - DNA, 426 bp, Glycine max
  unsure (1)..(426): unsure at all n locations
gtattggcacaacactatcatcgtgtgaatcatactgtgtaacaagaataataacagtcatgacaaactttctattcgagattatcatggcttcaagagtacatctgaacatcctatgttaaagctgtctangccagctcaaaagattaaactaaaggagaagatttcttccatcatgattatgaatgagggtcagcaagttagtttggacaatattccttcggatcttcaagggagttctttgaatgatatattggcttatcttctccagcaaaagaaggatggaaaactaagctctctagcacaggatttatgcttccaactcttatctgatgatattgatgtcaggttagccaatacacaacattcacattctgaagtctagctaatcattttcaacaaacttctcaaaagccatacaatttg

SEQ ID NO: 121239 - DNA, 433 bp, Glycine max
agagaccatgaactctataaaaaacctatctagtctgatgaaccgacctgtttagcaataatattttatgttggagatattattattaatatgatatatagtatcattattatatttaaagttatgaattattttagtagcttgacaatcttaattagtgtttggaatatctttattcggataaatataaatgtgtagcaaagagatacattcttttcttttggtgagacttaaaagactttagtaatatgtcacccacaatgttttcccatcttttattggttaaaactgccctattacttttaatcacaatatttggtgttgcttaaagatatactcttttacacttttaatataatcaaaccttaataggttaattggctaaccacttatcaaagctagtcaagctaaaattgatctgataatataagct

SEQ ID NO: 121240 - DNA, 331 bp, Glycine max
acactctataaaactcacccgcctgaatgccagatgatgctcattgttgctgccctacctgatgcactactctaaggacgatcgtgctatttctggcgctccactgctgggagttggacgccgacttttgcagtaaatgcatggctttatcaggagtcatgtctcctatggctccaccactggccacccatatcatacttctctccatattactcgagcccttcataaaaatattggaaaagacagggctctgaaatccgatggtggaggcaacaggcacattgtgtcgtaaatctctaccaggacacatacaagctctctccaccgaatg

SEQ ID NO: 121241 - DNA, 427 bp, Glycine max
cagatgatgcagatgtggttgtagctacctcattctctcctctaatgactatggcatcatttctggcgctaaactgctgggagttggaagccatcttctcaattaaatatctggcttcaacaagagtcatgtctccaagggctccaccactggcagcatctatcatacttctctccatattactgagtccttcataaaaatattggagaagaagttgtctgaaatctgatggtgggggcaactggcacatagtttcttaaatctctcccagtactcatacaggctctctccactgagttgtctaatacctgagatatccttcctgatggctgtggtcctggaagcagggaaaaaattttttaagaatactctcttaaggtcatcccagctcgtgatggaccttggagcaaagtaatacagcaatcct

SEQ ID NO: 121242 - DNA, 282 bp, Glycine max
acataaagcgcgttactacctcccacatttgagccaactcattgccaaatagggaacgcattacacctatcctccaacttgcgggggggtctcatgattaaccgaacgaagttacctaccaagacttgttataagtgacgacaacccacacttatcaatcttactacaagttattgatgccttctactaggaccaactacacgtgcgctactcgaacctgttgttggatctatgtggatcaatcaagacaccttgttttactatgatgagtgagtacgccaa

SEQ ID NO: 121243 - DNA, 267 bp, Glycine max
aagcggcctcagactgcatcgccacgaggagcctggtaatatggcctatagaaccgcaaatattctaccactatggattgcccatgaagaatatcatatacaatgctacctgcctgatgaactttaagatggaggacatgtgtgacgatttcatgatccagcaccacaatttcatgcctcatatgcccactatgagtggggcggctgagacagccatcaccaatataaatgaataacattgagattacgatcgattcaaataaagac

SEQ ID NO: 121244 - DNA, 400 bp, Glycine max
  unsure (1)..(400): unsure at all n locations
tactccagcgtcacgaggagcatggtaattatgttcattaaacaacagatcatctaccagtatggattgcccagtaagattaatatagacaatgccatctgtctgaataacangatgatggaggaaatgtgtgaggatgtcaagatccaacaccacaatttcttgccttatatgcccaatatgagtggcgcagctgagacaacctacaagaatatcatgaagattattctcaagatgatcgtgtcatataaagattggcatgaaatgctctctttcgcattgcatggttatcaaacctcggtacgcccattcaccgatgctacgccattctcattggtgtatgatatggaagtcatgcgtgcatttgatgtggatgtccctttcttgaagaatctggtag

SEQ ID NO: 121245 - DNA, 258 bp, Glycine max
ttgcccaagtgctcgtaggcggactttaagatcatgcattaataatccaattccagactctagagctcggagatgaaatctagacgccacctgtatcgacttcctattagtatggtataacaagaatttgtcttaagcctaatgacacagatttgtgaaactacctatgattcgcagatttgctagatggaccataatgattactatctggccatgcattaccggataaccgctttcaactcaccagtggccagattg

SEQ ID NO: 121246 - DNA, 348 bp, Glycine max
  unsure (1)..(348): unsure at all n locations
gactctanaatactgacaccgcatgccttgcattcttctatgtttctttgtgaacgatgcaagaacacattttatatggccctcctgtgatccgacattgacttacaatgtaagcttattgaatcaggtggcgtgaatatactacaagccggggcgcttccgtatcgctatttttgcgtttccgtgggtgatttcgcgaaggtttccaacagtcctgctctgtgctacgttcggtcttcaattatctttgcactttcatcgggaaatggctcaaacttatctttctaattcattctatgtaccctcaaaggttcttatttgctacccgtacttttagttccatttcat

SEQ ID NO: 121247 - DNA, 342 bp, Glycine max
tcgtaacgttccgtgggtgaagtcgcaaagaatttccacaggtcttcgtcggtctttggtcggtcttcgtcgctctttgatcttcaaccggtgaggtccagaagatcgatcttttcaattcattctatgtacccttacgggttctcatttgtaccacgtgcgtttaataccaattcatatactttctgtacctcctcttgacgagctatagtcatttatttaaagtattttctcggctaatagaaataaaataaaatctcaccgatcattcgtatctgaacatcctttaatttctgttaaatgattccgaccgtcggtatgccgtaacccttttaaaccaat

SEQ ID NO: 121248 - DNA, 339 bp, Glycine max
gagatattaagatcaccttggcctacgccttgcaaatgctttaaacttacctgacagggatagctttgataactgaaaacagtaaccgtgcatgcgttgcacaagcgcccccactgccaccgcccttgtgggaatcatgtgcaaattgcacaccatctaacattgagctttgagacgagggattacataaattttgtggccaacagccacaacaaccacactgtgctgaccatatgtgaggtatcaacaatcgttgctgtggcggctgggaaaccaacccatcctgtgggagacccagcatttcgctgtttgacacctgtatgttcgcgatcacacact

SEQ ID NO: 121249 - DNA, 318 bp, Glycine max
tagtaagagtgaaagttcttgttttttgtaacgagcttatcaacctaagaaggcatgttcaggaatcacgttatatatcaagtgttagtgacagaatgcataatcccaagtccatacagagtagagcatccttacaattgtaaataacgacttgtgcaactcctctagagctgtctgaataaactcacattcctctgacagcgagaactgggcgaggaaaatagtcacgtctgtcagaccatatcactaattcatattcttgaacatttagaccgaatgattgaccacatagagaattgtttgccacaaatgaaatat

SEQ ID NO: 121250 - DNA, 298 bp, Glycine max
acttataaactcaaccttagcggatgactccgccttacgtttttttctaccatgctcgcgagtgggggtcacggcttgaaatggaaacacctttagcgacatatgccgtggagtgatccaccgacggttatgaaccagatctggacgaagctgtttataccagctcgttactcaatggacgccttattacggctccataaactaacccgttgcggcgtgggggacgaagagtacaatgaggtactggttgggcttatgagccaagccaaccgagattatgattaggacgcgaatatgg

SEQ ID NO: 121251 - DNA, 400 bp, Glycine max
  unsure (1)..(400): unsure at all n locations
cagcttaccggatgacgccgatcgaacagttcctaaccgacgtcatgtatatnttgttcaaggattgaattgaaaactcgttatgcgacatctgtcgtgaagtagcgaccgatatttttcaaccgacattgcacaattctttttagaaaagctcgctggtcgataatggcctttttactgcagagtaagtattcttgttttggtgttgcataaaaaagttacaatgtactttcgctaggtatttcgtgcgagttcaaccgacaatttgtttcggccaggagaacattatcccacctctgctaacaaaatatttgctaaccgtcttcatgcgtatttcattcaacgaattgaatagaaaactcaatagccgacaaccgtcgtgaagatagaccgactgata

SEQ ID NO: 121252 - DNA, 315 bp, Glycine max
aacctttaacacccaaacctctaaatgaatttatgtttataccgaatgttgggggcactattgtctctcacctaacgctcttaggtgggcatacttcaaatagcataggtctatctctttcatcgattgctctgtggaacctttttcacaatccatactattgaagggttccaaccataggcttatcccttgctatgccttcatcatcacataattatatgaactccatacacagagacgctgatgcattatttgtcctaagcttcttcacttcctttttacgaagattttcaactacgtttcttcaatgtgtga

SEQ ID NO: 121253 - DNA, 264 bp, Glycine max
  unsure (1)..(264): unsure at all n locations
gctctagagggacatatgtgatcaggtatgttgtngccactattgactctcacctaaagctcttatgtaggcatacttcaaatagcactgctctagctatttcaatgatagatgtggtgaaccttttaacaatccattctattgaagggctccaaccataggcttaatccttgctatgccttcatcatcacataattttatgaactccttagacaaagaccctaatgcttatttgtcctagcttctccatgcctttcagttgat

SEQ ID NO: 121254 - DNA, 237 bp, Glycine max
atgatgacagggccgacctcactctagaggagaaccataccgggaaatgaggcaacatggactacgagtcggaataaaaaaagacaaaagtacacctcagaaactcaatcaatggacccggcacacactacaaggtgacgctgcgaaaaaattagggaacaacgccgaggtttatgcgaggcacgaacgaaagagggaacatcaaccagtggtggaaggggaccaatgacaggagcg

SEQ ID NO: 121255 - DNA, 173 bp, Glycine max
ctaccctaagcaagcagcttgcctatagttttgcaacacgtccgcacaggcaaagcccttactaggtggggctccaatgcgctcgtgaagctttgcatttccttagaagaaacacggccatggtggagacgtgtggcaaatccgccgcacagaggttacagcatccgttgagt

SEQ ID NO: 121256 - DNA, 274 bp, Glycine max
aaccaccctccgcgacgtgcatatgacccgcctctaatgtacatgccacataagagagcccctaaaatgtatcaacactcgccgtctgacctctgagaagcacaacatctaggtctggctgtgcaggattctctctactattctctagaacatgactggatgaggctccctcactctcccttaatccaaaaggtaagatattctcctcataatgagcatctattgactgcctgatcactatagcccatatgtcataaaacctattcgcgagcct

SEQ ID NO: 121257 - DNA, 315 bp, Glycine max
caagctatactttgttttttcttttgataagcaatctctatggtactatctctgcccgacaggcatgtaggttcacccgcagcgacagaccatacgaagctacgaagcgctgtcttttactcttagtttaacattgtgggctcctaaacaattttcgcttgaaaagttcttatagctaccctctgacagaataatactatctctatccatttcttaccaacctccctagttccattaataagtacacaccattgatttggataatgaaacattcctatttattatgcttgcatctgcattaccagtcactatatt

SEQ ID NO: 121258 - DNA, 325 bp, Glycine max
  unsure (1)..(325): unsure at all n locations
atgattggattaaagatacaatctttgccgatgagaatgcttcatatacatctagaaagctatcagatgggcctaaaacaaatgctataacctggcaaggatacgacataaacaggtatttatnttacacaaaagcacaagatgaccatatgtccatgcagaacaacggggtcaccctaagggctgaatctcaacactctacaagtgtcaatgacgccagaccctgcgtagcttccatcccttacattgggttcatcgatgaaattctggagagtaactatgtgatatctatggatggtgttcctaaagtaatgggctgacagaa

SEQ ID NO: 121259 - DNA, 303 bp, Glycine max
ggtgcagcaaggggttgattggtgttgagaggatgacagatgatgagacatgaaacgaggatatgggtgagaacagcaaacgtcaaaaattgaactgagaacatctgatgtgactcaaaaatcagtggaagaacaactcattgtgaatcatgtaagaatgcatgacttaataagaaaggttatatgtaagaagcaagattcatggttcaagatctcgagagtcatgaccaacattctggattcaatagaaggctggatcaagataagtatgaaaagcttttctcacatggggactaacgcatg

SEQ ID NO: 121260 - DNA, 277 bp, Glycine max
tgggtggccaaagaaaccttcataactaaaacacaacatggtggacaataaaggggagataacttgaaaggaccccatagacaatgcggaaggaaatttgccctatactaaccatgttcacacggtagatgccacctgtgggtcaacgagcatgatctgctaaaatgggatatagttggtcacaccaatgaacaggttattggaaacatactaacgcacacaggtggcctttagggaatgaagccgaacacccttataaagaagacgcccggacact

SEQ ID NO: 121261 - DNA, 59 bp, Glycine max
agggattaaaataggagagggtgataatgaagagaagaaaagaagaagaaggagaaaag

SEQ ID NO: 121262 - DNA, 317 bp, Glycine max
aactaaccgtggattatgcatcgagcctttcacactctgtagatgatcctttcgtggagtgtggatagaatgaagctccgctattcctgtgaacaacaaatgaggcgcggaattggatcatccctcactatgagagacacagcaactctctctctgtctcgaatattacaggagctcgtttgcaatcaaaacactaactttgctaaaatatctttagataaaataggatggcatgttacgatcataaccgctaacttgaaagagagaatatgttatagttgtaatgacacatgcgaggtggtgttgacaactttata

SEQ ID NO: 121263 - DNA, 313 bp, Glycine max
aaccttggctgcacctgacagcattattttattaaaaactttggcacttttcgatttatgaccgaaatttcaaactatcctcatttcactaacaaatgcccttggactaggaacacctttggctgcctacactactaactatacacggaagctagggcgatggagcaccatacactgatgcttaattatctggaataaaacaataagagagagcttactactaatgggagattacagatcccaccattgcttcccaacgccaatgcaactggatgatatgcattctgtccgtgacttagttacaagcatctgt

SEQ ID NO: 121264 - DNA, 367 bp, Glycine max
cagctgctaatagctgaacgaagacatgtattaacatcttatgtgtctactattatacaaccaaaaaatactatacctccaataactcattggagagtgtacttccaatttatcccaaaagagcgatcacaataacactatctaatatctgattgaccaataagaagctatctatttgattaaatcacctaatacccacaactaactatatagctagctagaactataacaaaaaagtcacacagatactcttgatgattaaactgtttaacaatacatgttgaaaactaaattaaacaagctaaatactgaaactgacaatggtttgattatcaccaataaattgatcaacttgacatatggacat

SEQ ID NO: 121265 - DNA, 170 bp, Glycine max
tacgtgacactctataaaactcacccgcatataagcaatcgagcctttttttctttcgagcctaatattcttgcgctgcgcaggtggactcttgcccagatttgacagcctttttacagaactcaggtgatatcaatccattttatgcctgtcgtcccaccctatccatc

SEQ ID NO: 121266 - DNA, 317 bp, Glycine max
ctcttaaagctcacccttggcatgcaggctatgaattctattagatcaggtcatggcctgcctctttgtcatgaccagcttgactgatgcttacagagtatggggtctgttgaaaaatgaatattaatggatgaggcttctaacgaatcatttaccatctatggtatggtctaacggactgttaggataatatgaaatgaactcatattgcttattatgggaagaaagatgtttatgagcattatttgattatagcttcttaaattgtttacctatcggcgagagccaaaggacatgatatatgagagttatggttt

SEQ ID NO: 121267 - DNA, 325 bp, Glycine max
cgtgagactcttataactcaaccgcggctttcaagctctctttgtttttatttgcacccgaaaccagaaacacctccatctgggttgtaggctagtgcgaatgctctcattaatgtgcacatattctacgcctttgatttgaggctaagctttatttgtgatcaaattatgaagctatatgagaccttgatctaaatgctattattgctcccctttgggctgctacaaatggccaaagggcgtaacaagaatccaatctacattatggactgatctttctctctacagatcttggggaagctaatccaatcgtgaagctctaacc

SEQ ID NO: 121268 - DNA, 468 bp, Glycine max
actcagctgcttctacaatctcccccttatgatgatgacgtccttgaattctataaacacatacatattctgtttcctagtcgatcactcacttaattctccatattctccctctttggttgtgagtgtaagctgcactcgaaattaaatgatttaactatatgagttcttgatataaatcctattttcgctccccttttggcatcaacaaaaagccaaagtgcgtaacaaatattaaatatacataaatgactaatcatacacaagacattcattgaaaaatctataccaatcatgaagcaaaaacatgaataacccacattaaaatgtagaccacatagtcatataacataattcataaatgttcagtcatacttatcgaataataaaagaaatactaagtattcaaatgttataaaaatataaagcagtgagataagtcactatcatctagcagctctaactctc

SEQ ID NO: 121269 - DNA, 324 bp, Glycine max
actctctaatgctacccgcggcgtgaagctttatgccctttttgccagttttgtgcgctgaaagcaaacactccttgctttgtgcgttgaaaacgcgaagagctggcgcacgcaccttcgaatggtggatcttcacggccgtattgtggagactacccttccccgcaatggcgatatcaaatgtccctgtcctctttttaatggagacaatgattcctatgcggacgaggtcagagggatcaaaatttagcttggggttccttgcaagcatttttttgaagcccatacgagaatcttgccttgtcggcccaaactgactctttt

SEQ ID NO: 121270 - DNA, 174 bp, Glycine max
gaataggccaaggcaaaacttagcttctccaccaacatgacccttttttacaggcttggagagattcttctctgcctgaacaggccgacggataacatcatacaggggggaggactatattccacgatgaaacgaggctagaagtggctctcccagttgtgatttacagtactc

SEQ ID NO: 121271 - DNA, 315 bp, Glycine max
ttcaccatgaagatgcaccggctgaccaaagagaataggtgagaggaggcgccatgcatttaggaataagccatggcaaaaagagcttctccaccaagatgagccctggattagaagcttggaaggatgcttccatggacgaaacgaacgagggagagatagagagacgggggagcacgactatgcaggaataataagggatagaagctgaactttgagtcgagctcacaagactcttattcattaaagttacaacaagtgatgcacatgcttctatttatagactatgtagctatcttgagatgctttcttgag

SEQ ID NO: 121272 - DNA, 263 bp, Glycine max
ctaagcgtggcacacctctctgctatcgctctctcgagctttatataagcatatacttgactcatctcctaggctcatatacttacttgagcctcatactcttttattttacaggtcttccctcctgtcctcttatcaaaggtgtctactactctacgtgtgacgcttatgagcccccttaggtgacatccatcttgacctgctctaactctgaattctcaaaaggagcctctccttatctaccagcgaaaaatcacactgat

SEQ ID NO: 121273 - DNA, 148 bp, Glycine max
taaaaaactcaacctcaggaacacgagcggacaacacacggatcgattttgcgcgaccacaaggagccaggaagagtcaacaaaatataaggagcaccacactaggtcagaaatgaagcagtgtactgcattaaaacaataccaatag

SEQ ID NO: 121274 - DNA, 320 bp, Glycine max
accctcgcacgctatccgaacgagctctgatacgtttggtggacggaggcctaccatatcttaagaagggggggtgaaataagatattacagactgcttccgcccgtttacagaagagagagctatccctctttttattcagaataggaattcccttaatgacgatcttcgcacatattgattgagattggactatttgcatgtgaatgtagagaaagaaggccatgggagattaagggagcgaataagcgcaaactgcggaccatgcgggtgaatgcacacccttgtgcctacgttcagggccaaagcaactcgcgatg

SEQ ID NO: 121275 - DNA, 321 bp, Glycine max
  unsure (1)..(321): unsure at all n locations
tattccaaactacttncccaactttaaaaaaaaaaaaactatttcactctttattcaaggtatgaattcccttaatgacaatcttctttaatattgattcaaataaaacaatttgaatatgaatattcatgaattatataataaggagatttatggaagaaaaagtgcaactcaatattatactggntcgggcacacccttgtgcctacgtacagtccccaagcaactcgcttgagaagtccactaaccttggaatgcctttacaagttctaaacacacaaggaccatccttgctttgtgtttagaattactttacaacaa

SEQ ID NO: 121276 - DNA, 334 bp, Glycine max
acactctataaaactcacccgtatgcaagacgacgagttcagactgtatcatgagggggccgtccacaatggacacacttcacatagcgctctttacaggctcttactgttatatatggaagacacttctagggcctttaatgaaccacccttttttatggaagcggattacaaattgattgaccatgacaaaagatcagaatagaatctatatatgcatggattcctacgagatctgccattctaagacagattgagccagcgtcccatgagagatcgagaggcacatccccttcctatgttaagagacgaactatttcgactgagtcatatt

SEQ ID NO: 121277 - DNA, 425 bp, Glycine max
  unsure (1)..(425): unsure at all n locations
gctataaagacgaggatntcacactcgagcatgatgtctccgtttactatatacacatccatcatagcactttttcacatgctactctctattatatcggtgacacttctaaagcaattaattcaccccactttttcatggaagcaataaataaatttattttcaatgactctatattagtattgaatctatatatgcatccgtcccttgaaatctgccattctaagagtgtttgattgagcgtcgcatttgtgatcgaaaatcacatccatttcctatgttaagatcaaaacntatntgtattggttcatattttcacatcctggattcacattcttgggggtttgacgcaaattcaaaaacccattcgaattgtgatggccttgctgggcatgagatactgtggcaagaaatatgaaagtact

SEQ ID NO: 121278 - DNA, 321 bp, Glycine max
aactaaccttaggtgctacttgctctattttttgtattaaaggcaatgtacgatggtggtctcataagagctcaaaccacaaaccctcgctacacgtaaaagatttatgattcatagccaggctgcggtaccaccttaaccaccgcctacggttggccttctagcttagtaatcacagatgatacgaatgggtccgtatctacctgaagcactcctctcatgaacttagcatcatgtgtggggctaaactgctgggagttggaggccatcttctcaattaaatttctggcttcagcaagagtcatgtctccaagggctcca

SEQ ID NO: 121279 - DNA, 319 bp, Glycine max
tggcttgaagcttcttttttctttttagttactaacaaacatcaagaaaacttttcctgaacttttcgttgatcaaaagtttaggaagagtgtcttcacttcgatcaatcgggagatcatctttgacctcgacttcatcctcaagcagacctctctcattttcatagagaagaatcaaatttatcttcattatgcaaaaacccactcaattcaatgcctgcaaattagaatcttctccaacctctttagcaaagtgtaaatgttgatttaaataactagggccccgtcgacattatttaattgcgctctattttaccca

SEQ ID NO: 121280 - DNA, 302 bp, Glycine max
taaccgtagcatgcatgcgacataaaattgaaaatgggggtaaaatgacgacgtttgtgttgactctgggtactggccattagaattgggtaaaagaaactatatgcacctcattggagcatcactaacacctataatgtgaccatctgtgaaaaataaaaaaatttcattttttgcagatacaataaataataacggtttttgtaaacttatgataaaaaatatattcttataaaaaagataacttaatgtcgaaatatcacaagtgagcttggatacacatatttgaaatgtgattgccc

SEQ ID NO: 121281 - DNA, 500 bp, Glycine max
  unsure (1)..(500): unsure at all n locations
cactatgatactaagcttacaatcaatgagagaagagagaatgaagaacaaatggtaaatataaatgatgtatgtattaactttgggttcgttttattagaataaggtagaagaaacaataatcaaaacatcggtgcatcactaacacctatcttgtttctatttntaaaatataaaaaaataacataatatagaggtaaattaaattttaaagatgtttttagaattatgatagaattaaatattctagagaaaagataatataatattgaaatagatcaactggagttggataatatattttaaatttaattcaataaataattttttgaagaatgattatttatataaatttaaattaattaataaaaactcaaattcttatattaatagtccctgtaatatatacatatatatatatactatatatatatatatatatatatatatatatatacacgcgatttggctttaaccagcttttaaaaatatgtattaat

SEQ ID NO: 121282 - DNA, 303 bp, Glycine max
ttgacagtagtctcttcatctcttgctcactaccatgggttagacccaaagacagtgagaccactccagtggatgaatgctttctcctacaggcattaatagggacataaaacacattcatatgccattcataatcataaaggaaaggcatctttcggtatcccttctaaagtaaaccctactttactgctctatggatccctacacatgttctcactacctcccgcttgtgagtaactcatcccttagctctgagcggactcgcctgtcttgaaacaggcatttgaacattactagcggttc

SEQ ID NO: 121283 - DNA, 420 bp, Glycine max
  unsure (1)..(420): unsure at all n locations
gtttctcacaattgtatcaaaatcaattaatcaaaatcatgggttaaacacaaagacatcaagagcactcaagtntatcaatcaattctcataaggacatcaattggtacatagaacacaataatattgcattcataatcataaagaanaattataattcaattaacatcctacaataaacccaaatttagttctctatggatccctacacatgttctcactaactcccaattgtgaataactcatcccttacctctgagcggactcacgtgtcttcagccagcgatagtaacatttctagcgggtccttgagattctnttcattattcctctgactgctgcgatagaaatcccaaacgtcagagagacggagaagagattgaaccttcacttgactgcttcatgtgatccttttctcct

SEQ ID NO: 121284 - DNA, 335 bp, Glycine max
agactctatagagctcaagcgcgcgcacccatggtagcggttaatatattccgtaccatttggggtgggccgttcaaggatggacgagacattctgcgggtccgcttggaccccattgctgccatctacgagcgctagaaaaactgtattatctacacataatgtacacttccctatattagcatggaaggtgttgattgtgacgactggcagaacatgcctgacatggcatgatgaccatctatgctccatactgaacactaaacgatgactcagaatgccagctacgcatctacctatgataatcctcacgacatgatgcggaagcgtcataa

SEQ ID NO: 121285 - DNA, 440 bp, Glycine max
  unsure (1)..(440): unsure at all n locations
tcatggatggaccatgattgtctcccggtccacttggaccccatttctaccaactacgaaccctatgaaacacttattatctactccaaaaggacacttctctatatttgcatagatggatgttttgcctaangactgacagaacttgcctgagatggtctcagagatcatctacgctcctactgtacactaaaatatcatcaaaataaacaactacaactctgcctatgaaaccccttaacacatgatgcataagcctcatataggtgcttggtgcattattgagcccaagaggccttactatccatacataccaaccaaactaggtcctgaaagtggttttcactcatcaacccttttcatactgatatggtgatacgcactttaagatcaactttgaaaagatatggcccatgcactcataaccaatcataatttag

SEQ ID NO: 121286 - DNA, 320 bp, Glycine max
ttaagctacccgatgatgactctggatttacatatgatggagactaccgccaccctagtttgcacactgataataatatgtttctattacccccaatgcctttctgattgggtttgccatgggagggatatgctactgacacctgtaatcttcacctacacgcaatccagctccttgagcatatcaaagaagtgaaggcatggagtgtaagcataaccccttcgctctctaataagagagtggcaacggattaatgctgcctgacatttaaggttacgagcatgacgctactcaagctcttgacgcagcgagtgcaactg

SEQ ID NO: 121287 - DNA, 499 bp, Glycine max
  unsure (1)..(499): unsure at all n locations
tatgantaactctgttataatagagcatattgaataacttctgtttacccaagcttggacatatatatntatttatttatatattcagtagtagctatctgtntgtgcttgccattggagtcctatgcaaatgataccgttcattttcacatctttgttatttggtttctacaaaaaaaaaatgaggggaagggagggagtctggcaagaaaacgtgctcgctaataagtgtttgggtacgtattaatgtggcaagatatttttgtttaagtggaggatgctaccaaagctcttgaggcaacgaatggaactatgcttgaaaagaatgggcagattctaagagtggcgtatgcaataaagatactgtgccctggatcaggaacatcatgaacttcccaatcacgcagtcttgcagctgctgctatcgaggctgcgacattttgccaacaggagttttattcttatgtattatgaattttgaatgtggagttatacatgt

SEQ ID NO: 121288 - DNA, 308 bp, Glycine max
acgaagatacattaaagcttatttttcttgaggagatgaatgctatatgttagcgcaagatatagaagaagtcgataaacgctgaggctatagattcacagattactatgtgaaaactcgtgcgaatcatccttactcccagctgcggcacgtgttcaggcatgaggtaatatgtattgctcaagcgagactttaacagaattacttgattacattacagatgaactctcatgtaagagacagaaaactggcattttatctaatatagaacaagggatttctcacctcattacagagcgtaatttgct

SEQ ID NO: 121289 - DNA, 373 bp, Glycine max
agatgggtgtgagatgctaatctctagcttatcaaggagagtttcttaagaaagctctctatggaagctacctagcctatatatagaagcatgtgtaacacttgttgtaacttttatgaatgaaagtcttgtgagacatacttctaagatccacttctctccctcttttattccttcaatatcgtgctaccccctgtctgtatctcttcctatttctttaactccattgaagcattcttccaagctttctatacaaggctcatgttggtggtgaagctcatgctctcatggcatattccccagtggagggcgcctcctctcacctctcctactatgacttccgctagtcatttcatggtggaaaatcaccatt

SEQ ID NO: 121290 - DNA, 223 bp, Glycine max
ttacgtgccagaggcgggctttcttaagttttttgttggcaacactgacctctgaccactgttgttccctttcgccaagatgatattcccgcccccatgagtgcgcttatagacgacaccatagcgctcacgatttcttagagttttaatcaagctagttatgctcccattgcttttgctgaactccctgccggtttcggaggaccttcaaacaataactctg

SEQ ID NO: 121291 - DNA, 331 bp, Glycine max
ccggagatttaagctaccgtgttgcccgacctttttttttttccagccgagttgtagccatataattttagtttatcccttctctccgtcatgagagtgattattccaaattctcgagtgattccttaacaccctggctgtatcaaaggactactcacaacgctttgcgtgttgccctcgctgggaaagaaagactctttccttcctttgatcaccacgctcggtctttctaaccacagttccaaaaaatatacctctgctcggaattatcttgaggtcctcactccccttgtacgcactctaattatatgcttcttgcgcctaaattgaa

SEQ ID NO: 121292 - DNA, 302 bp, Glycine max
  unsure (1)..(302): unsure at all n locations
tagaggtgatttcttgtatcttagagagagcgattctcctaaattcttcgagtgattcaagaacaccctggctgtattaaaggactatcacactctctgtgtgtcggcctcgctggaaagagtgattatatccttctctttatcttcaccctctgtctgtcataccacagattcataanattcacctctgcccagaattatctcagggacataactaccgtcttacgcactcataataagtgattcttgtacctaatatgaattcaagacgagaactctgatctcgttctggaatcacctta

SEQ ID NO: 121293 - DNA, 306 bp, Glycine max
aacaccagtggggcgattcttttagtcctactccaatgcaaagaaatgttttcacctatggtgattaagagaaccatatttgccataaacttaaacgtggggggggacataataggtgaatgatccctataactgagaaatggactattcaataatcttgttaatgggatattgttggctatatgatacataataccactgatgaattcttagatgtgcatcctgctgtgactcaaatgtatcttggacctgttatgctatctcaagatgatattttctttgctattacttaatcattatctatta

SEQ ID NO: 121294 - DNA, 239 bp, Glycine max
aaatatacaataaaagataaacaaaaaaagatgaaacatttttacaaatacaaaacggagacataacttaagaaaaatatgaaaaaaaatataaagaagaaaagaaaaaaaaaaaataaaaataaaaaaaaaaaataaaaaaaaaaaaaaaaagataaaaataaaaaaaaaaaaataaataaaacaaacaaaaaaaaaattaaaaaaaaaacagaaaaataaaaaaaaaaataaaaaaa

SEQ ID NO: 121295 - DNA, 486 bp, Glycine max
  unsure (1)..(486): unsure at all n locations
ngaagaggatgctntaatggagggaaagatagagagaaggggggagcacgaaattgaaggaataaaagagggaaagaagtggaactttgaagtgtatctcataagactttcattcatcaaagttacaacacgtgttacacatgcttctatttatagactaggtagcttccttgagaagctttcttaagaaaactatcttgagaagctgtcttaagaaaacttccttgagaagcttctttgagagaacttccttgtgaagctagagtttagctacacacacccatctaaaaactaagctcacctccttgagaagcttccttgagaagctagagcttatctacacacacccatctaaaaactaagctcacctccttgagaaacttccttgagaagctagagcttagctacacacccctattatagctaagcctacccgcatgacacagatacatgaaattacaaaaaaatcctactaccaagactact

SEQ ID NO: 121296 - DNA, 243 bp, Glycine max
tggcttatgttcgccccaacaacgaagggtattgccaataccatgggcgaaggcatccattcttcaatcgtattggggagagaggtctagactatgttctatagcctccgttaaatgcattatcccctctcaaatctgtaatcaatagtggggatatgccacaaaaccttatactgcctaaaaccgacatgtttggtggtaagagagcataaggagccttgaattgaccatagcaggagccca

SEQ ID NO: 121297 - DNA, 267 bp, Glycine max
caattagaccaaatatgtatctaactaggatttattaaggatgagattaccggaattggaccaaatgaatacacgaattgatcatgcccctttaagttagaccgagaggaacacccgtgctagaattgctacctattagtcgatccaactgatacagtgccagtcttatcacattgtgccgacaaacttaagcacttcttacaatgtgataggctcgattccgttctcctacaactgataaattggaacctgcggctgtaccggctt

SEQ ID NO: 121298 - DNA, 369 bp, Glycine max
  unsure (1)..(369): unsure at all n locations
ttccgtgaactattaaaactaaccgctgcgtgctagcttatcttgtactttatgcggctacactttattcaacttacatctatacctacataatttattaacctggaattatgacttgatttgtataaccaaactactacatacatgcttaataggcgtcaggtagagtgtgnaacataatcttgatccgcgtggttttatataagcactactgattttaagttatatcaaatccgattgatcttaaaacatatctcctgaaccttataatacatttaagcaattctgcacttcacgatcctattctttaatgaaacattgtagatactatatcaatgatccttttctaagagacatcgaatgaatgga

SEQ ID NO: 121299 - DNA, 311 bp, Glycine max
tataaaactcaaccgtaagcatgactagcatagcagcaagcatttttttcttgtacttctgcgtgctactacaccccacacctgccacgatgccaatttctgggttagccgcgtgtattatctcgtcacagctccttcttctgctgctctttgcatttgctcgcaagagacacgagatactttgcatgggcgccattttttcattctaaacattaaacggacaaacctaatcgataaggaatgaatggggcttatcctcttttcgctctgaactattccttacttccaaggcaatacggttcgtaagagaa

SEQ ID NO: 121300 - DNA, 319 bp, Glycine max
gctgacacgtggggagagtacgttattctattaccctggcttcagctcgggacaattgctcgtaaccctgctgcctgttgccattctttttgagcacggttaaaactcataaggccgtgagatctcgaaacatgattgtgacttttcagaagaaatgagacaaaaacgttactcgacggtgaaaagatcgatttaccgagatgtcttttccgctgggcccagctaggcccatcgtggttctggtgaattaagccacccactcagataagccagatgggcggcaacatcctcccctattttggctataaaatggtggggg

SEQ ID NO: 121301 - DNA, 370 bp, Glycine max
  unsure (1)..(370): unsure at all n locations
ctganacatggaaagaagacagtattgtcataccctaatntcatctttggacaattgcacgtcgacatgcggatttttgccagtcatgttgagctgcttaaaaccaattgtcgtgtgatccgtaagatcttgtgactcttcacaaggaaatgagataaaaactcatcatgagggtgaaaagatcaatttacggcgagttcttcagcactgggcccatctatgcccatcacgttgcttctggagtaagtcaccagctcggctaagcaagttgggcggcaacctcctcccctattttggctataaaatggtgtgggacgctgaatggaatggttcaacaccctttacaagcatatttcacttaatattagtg

SEQ ID NO: 121302 - DNA, 168 bp, Glycine max
ttcttcttccatggcttattcactagaggatggcggctactttcacaatgtcaactttgagttccgttgcaaacccatggaggtaaatcatcattgatggacctgactaacactccaacatacaggcgctatagaaactacaaaatcgtactttattgaactggtatc

SEQ ID NO: 121303 - DNA, 205 bp, Glycine max
taagcttctttatatcgtttgaccttgagccatgataggcttccctatcatatatcgattcgctccagcttgctgagccatgctagagttgaacttccactcctcgatcttaggtcaacctacccctctgtttttcttacgggacttgtctcttcaaacttcctggctacaaaaactacttattaggcccgctccctatggttaa

SEQ ID NO: 121304 - DNA, 253 bp, Glycine max
attcatctggagtaatgtaaaaatccattacttattatcatctgttcgaacctttaggacatgaaggctactacattatcaatggatttggtcgaagtcactgatccaacacatattcgcactgtcacttttagagcttcggacaacctctacttctcttttcttatgaagcttgtgccttcagacttacaggcagtggaatccttcatctgtatacgctccctatatagaatgtggacttcctcgaccctta

SEQ ID NO: 121305 - DNA, 284 bp, Glycine max
taacaatggtgccgccgaacaagcataacaaacttacatgattgggataaagaaccaattgttacagatgacaatgctatataagcgactatagaactatcaaatgtgcctccaagagacgcttttaactggctaggatacgacttgaagatgtggtcattttacacaacagcacgagatgactaaagttcaagtgcacaacatccgtgtcacgcctaagggctgaatctcaacactctgcaagtggcaatgacgcctatccctgtggagcttgcatcccttac

SEQ ID NO: 121306 - DNA, 285 bp, Glycine max
tgtgatcccgggtgttcacatgagaagtaggatccatcacgatgctgtaatctaggggggaaggctgcatctagacacatctgcagtgtggcttcatcacctactcattttttcgccctaacatagtgataacactgtagttatcaacaatgtctctagacgtaagtccatagaccacgtatcacgacccttcctaccttgaactttgatgaatactcaggattcaataattgatgaactactcagtcattgttagttgaactaaatctattctacctacgacta

SEQ ID NO: 121307 - DNA, 280 bp, Glycine max
ccctaacatagatgtatgacaattgttggtctcaaccatatcactatagtcatgcgcattgaccactaaacgacccttcctacctttggacattgatgattactaaggtttaaactattgatgaactaatgagctattgttaagtgaactagatctattattcaaacaaactaatctattattgtatcattcttctctacataagtatacgtccactcatatagtgaaaattgtcttatacaatatatatatcatccatcatgctattatgatgatcatg

SEQ ID NO: 121308 - DNA, 230 bp, Glycine max
agaaagctacccttagaagcctagaagaggcgctactccatcccactcaacactgtcctattttcactctccattgcccaaacactacatagatagatctgcttttggaagacactccttctaaaattcacatgagaggttagcctccactcttggcatagaatagcactaatagcttttacttcgatacagaccagagatggtgggctaacttcacatctcctcatcat

SEQ ID NO: 121309 - DNA, 232 bp, Glycine max
accctctaatatctaactctcggcgtggaagactggggatttcgttcttataacaatgaggataagggctccgtccgtgagcgcaagctttctttaacggtgctcacctggggacagtattcttgagcatgacttgtgggactgggggagagttgatatgtgccataaagcgtactctctgttacggcacctacaactggctgccctataaaagcctaatcttgatgaaaaa

SEQ ID NO: 121310 - DNA, 337 bp, Glycine max
  unsure (1)..(337): unsure at all n locations
cgtgacactctataaaactcacccgcacgcaagcattctttttttcaatacattgngctggatattaatcttatagaggaatccctttggcgagaagataatgacagaggcggggcgactggatactttttgtgtctctcttctcccttttccaaaagaacaaatgacttaccgcctgaattcttttgtgtctcccttctcccttgtcaaagaatccaaatcgacacagtctgagaattcttttgattcttccctttcccttatacaaaagttttcaaaggactaaccgcctgagaattctcttctatccctattcaccaagtattaaaggtttaac

SEQ ID NO: 121311 - DNA, 239 bp, Glycine max
atggcgggcgacacagattgaaattggggtcccaccatcaaaaaccacgttgagagacatcctttaactataatgaccttgagagttctacaagaatctaatttcgttcccagaatcccacgacatatgtatatcctgcacggatggctaatggaatgctctatgcaatattcgcccacctagctggtgggaaaggataagcgaaaagaatcctattggaaaggtggcaacagagatat

SEQ ID NO: 121312 - DNA, 163 bp, Glycine max
gtggcacagctagcatgatctgggcttactatgccactaccgggactgacaaaactagaaagactatgctgcaacgacagcccactagcgagaactacgtcggcttacctcagattacacacgacaagtaactttactttaaaagaccaaagcacagaccatt

SEQ ID NO: 121313 - DNA, 282 bp, Glycine max
ctacccgatgcaagcatggttatcacataataatgttataactccctcctttgggcgacgataaacaatgcccctatgaaaggaatacaggcggcacaagtcatgatactgccccccctgagtagggctcacgcctgtgacccgattcatcataaacacacatcgacccgcatgcctgaacctccttaattagctgtccggaagaacatgtaataatgaattgccattaaagtgattgacctcactcttttaagttcatactaaaataacttctttcctgaa

SEQ ID NO: 121314 - DNA, 209 bp, Glycine max
  unsure (1)..(209): unsure at all n locations
aacaanggtggatcacataatcttattgttatataaaccttatcctcactagcagcagcatctaaatcaattatctatgctcttcatatgtagaaacgtgaatataatttgtttgtttagcagagttccatgattctgcaccaccagctaaagttaatacataaccacttgttgattttgtttcatcagaatcagtaatccaatttgca

SEQ ID NO: 121315 - DNA, 281 bp, Glycine max
cgaacatgctgctgcataaacaactagccattgtaacacaaacactcggtgaccagccaactaagttgtccataggtcaacctacccactcttttgatgcgctaggtaccggatgcaccaaccctgctaaggctgatgaactaggccaaggtgcccccactgtacagaacactcaggaaattgattataccggaagataacatcgactagggaatacccaagagaggacattcaggcttacaacacggaccctataggcacgaggatagacggggacacac

SEQ ID NO: 121316 - DNA, 394 bp, Glycine max
taactgtaacttatcagagtatggtaaaatttctttaaaactgaattaacagaaccttggaagctgcacatatttgttattgtcaacctagcactcttttgtttgcagttactgggtgtaccatctgtgctaaggctcattaaatacgccaatgtattcccactgatgaaaacactcaagaaattcattatttgggaaatcaacagcgatcagggtatactctacgaggattattcatgcttccagcatggtccctattatcatacaatgataagtggaggacacactcctggctaccaatttatcacagaccataatggaccgtttaataagccaatccaacaatgacctaacatatttcagaggactaccaatttggaggaatgctaatcat

SEQ ID NO: 121317 - DNA, 351 bp, Glycine max
aacgtgagactctataaagactcaacgcgcgcgctctgcaagccttataattctcttactttacggaagacctgatacctcgttcatggagatgcttcctatgaactccgaccacagggctggctttgggagatcgcagccatggcgtacagtacctactatactttgcatattacccaactacccattatggcttttaaacaaaatctcctgtataaatatgccatattcatttgcatgcttgaattaatcccctataatcactataggattgtactggaagagaaactgttacctctgatacactctgcttcggccacacccttgtgcctacaactcgtccccaagcaa

SEQ ID NO: 121318 - DNA, 265 bp, Glycine max
caccacctataattacaacagtcccatttgcaagatctgttcatactcttgggacatggtgaacctgtggcgacgcggttggaggacggtggcattggcatcatgctaccggtggctcacgaatactatattcaactctgcgcatatgacgttaggcaaacatcctttccaccagataatgaaagcgtgcctgaatccgccccattacaatgtcctgtaggtttgtctaggctgtccaagaaaagtctgaatcaaactatacctt

SEQ ID NO: 121319 - DNA, 277 bp, Glycine max
  unsure (1)..(277): unsure at all n locations
ctaagcccggtgaataactgtgggatatgaagaattggatatctcttattttctctatagcnacaacagtcccattcgcatgttaattttcttactcttgcgacatggagaacatgttgcgaagtcgttggataaaggtgccactgtcatcatgcgatctgcggctcatgaatccaatatccataactgtgcagaagatgcttcacagacatttactccctatgagaatgcgagcctttctgaatatgccaaatctcctcaacctgttggcttcttt

SEQ ID NO: 121320 - DNA, 329 bp, Glycine max
tgagactctataaagctcacccgcatgcaagatagcaaggtatttggttgtatctccccgacagacttcctcactgtctactgacgcgacctacttacaatggcggcccactacacgggctcttttgaaggagtgtatgtgcacccgtcgacacgtgctgatttcatgcttgagggactatggggggcccctcatatgcgattctaagggggcgtctgccgacgtgctaagacacactctcacattctcatgtcgggaccaaccgggactaccctactgtccagctacaagtgagctcacatactcgcacatagcccttataccccatg

SEQ ID NO: 121321 - DNA, 397 bp, Glycine max
atttcttggttctggttgaagtatttcatgactatagaggttgggacattctcacaatggcagctaaatacacaagttcttttgaaggagtttatgtgacaaggaggataggtgtggaaattatatatgatgaacatggggtggaagcttatatgctagttaaaaggggcatgtgccggcctgcaagggtacactctcattttttcatcgtggtacccagtgggacaacaaaagtttgtgagacaagtgtggtcgaaacattgattatagcattaaaagcccatgtgtgatgctctctagttggaagaaaaaccttcaacgccgttgcttatgtgtcgctattatctatctgatgtgatggatggtgttcacgctcttattcctaggtcaaactata

SEQ ID NO: 121322 - DNA, 318 bp, Glycine max
agctaagcgatgcatcgagcttctctttttttgggcgccacgtctctgttgatgagagatatggtctgtgtaacctttcctggagcatgacacatgctaaaactgacgattctccgtggcggacatacagtgtctggcgggtggcgagaaaaatagattaacaatgcacggggtgcgcttctggatgcggaggaccctatatctatgatggcgcgcagtaaatgcgccgtcttttttcttgctcttgctcgttaagagctttgccatgatactgggcacttctattggctcaccctgcataacgtgcttacagtgttt

SEQ ID NO: 121323 - DNA, 261 bp, Glycine max
ctatgccgaagcttaacctaatgatggcccgagtaaaggaggggaacagattcgaacccaggatgagtataagcaaaaacaatggccgataaccaccggctattgccgaggaaacaagggaatggggaaggctaaacacacgagaaaataaacaaacattaggaaggagacgttccaacctcggtgacacaaacgcaacgaagccccctgccataacagaacttatacgcgtcaggggacaagtcaagggctcgagtacaa

SEQ ID NO: 121324 - DNA, 384 bp, Glycine max
acactattaatacatcagcttgcctatccgatgcagcagtaatgatggaccgagttatgtcgtggaacagctaccaaccccgaatgggtttatgctaagacaatggcggcataactaacctgataaatgccaaaggaaatccggtgaaatatggcggaagctatatacccactcaagccgatataaagagaaacatcgcgggaaggaagagcgcgtgtcacagctcgccggtgagacaagatagtgaaggaagcccaccctgcctcataagcatgaactatattaacgcgggtctgggggacgaaggtcaagtggtcgcgatatacgaagatggtattccgagtacattgcattaggtacgaacatgccctcctgattccagct

SEQ ID NO: 121325 - DNA, 235 bp, Glycine max
agcttttctatattctttcgctgaaattgcttgtggtttcccagaagggggagattgtgttctgcatcaagggacgtatttgtctaacatgtggagtgctgaaattactctggctacatcgaaggatcctttgaatgtcgggggtgactattgtcctattataacactctcgcttgctaagtctaagggcaatgctataaccttcactgtgggaacaaatctgtgtcttttatgt

SEQ ID NO: 121326 - DNA, 448 bp, Glycine max
  unsure (1)..(448): unsure at all n locations
tcaattctgtagcgtatgtacatgctatctctcatacctagcttctctcttcttcatgagaaggaggacagatgggngttctgcgatcacaggaacagtcttcgttcctgttctngtgtgtgcagtagttctcttatttgtatacatcgctggttcttctggatgtagggggtgtgtcttgtcttattatcaaactcttgcttgcaggtttaagaccatagttgggatattcggattgagagagaatctgacttctttttatttttctctggagattgagaaactcttttgttatcattaaatactgaaaatctgatttggtttacgaaagaatatgattaattctaattatgattctcaagcaattctaagaagttattccagtaaaaaatctgttgtattaaatcaaaactttctaatgatagagataaatcttatatttgtcatc

SEQ ID NO: 121327 - DNA, 169 bp, Glycine max
  unsure (1)..(169): unsure at all n locations
acctgtaggccngcaagcttgtaaaaagaatgtaatactaacaaagcctagaaaggggttcccattcttttaaagcggagaacgaggactcattgcccaattttgaatccaaaacttaataccggtaggaaaactggagatgggccccctgggtaataaaacacccccc

SEQ ID NO: 121328 - DNA, 270 bp, Glycine max
tagaggatacctgtaagcatgcaagctttttgtcagcttttcgttcttatgtctcccatactctaatggtgccttccacagaacatgtgccatgcagtttccctttgaatgataacccacacttgttacctgtcaaaaaacccacatgcattatattcattctcacatactgcaaaaggctgttaaataaaagaaacctatgcacacgccttatcatatatacaggcaaaaccacacccatattataaaaccctttggccataagtccca

SEQ ID NO: 121329 - DNA, 233 bp, Glycine max
agcttatagaacagtcatcaatgcatttaaataatggtataacccatatcaagatatctagtgcaccattaatatcaagtctttggacaatggtattaattgctagtgatatccttgttgtaatgttcaaacattgataataaaatcatatcaaataacaaacccatcttttgatgtgatttatcattcacatgcaaaacctcataattatcaatgtttaacatcacatgtgt

SEQ ID NO: 121330 - DNA, 232 bp, Glycine max
agcttttggtcaatctaaggagtggtgtcttcatgctgcaaattgatggttcctgagcggaaaattctaatttggttaagcatgaaattctgcagcatttgcaaagcagattcaaattaattgaagttatgtacgagcactgtagcttttacaaaaataagcactgcagcttatttaaggcacaaattctgcagcatctgcaatatgtgggtgtgtttcagtgtgtgtgtgt

SEQ ID NO: 121331 - DNA, 259 bp, Glycine max
tccacctgtaggcatgcaagctttttgaatcttttaaaaaccatgatttgtgggtagcccaacctcattaccagcctcgaaagtccttcggattcattttgtgtgcttatttctatatggcatgagatgaaatgcaaaggttgggacttgtgttagttgtttatgatggaataagcctaaacacttgtgcttgagtgaaataatgactgtgaggctttggttgatgatccttccttgatatctgtcattctcactagct

SEQ ID NO: 121332 - DNA, 239 bp, Glycine max
agctttcaatactaacaaagcataaaagtgttttccatttttttaaagcagagaacgcgagtcattttccctttttaacttcaaacttggcttttctagcctcatcctggagtggtgtctgttaaaaggagggttgggaggacacagatattaagaagcaaagcttctaaagatacaaattatagaaaatagaaactgaaaccacccacccatgacaattacttctgtttctaaagcaa

SEQ ID NO: 121333 - DNA, 268 bp, Glycine max
cctttaaagtccacctgctttatgcaagctttttccgcatatccctcatgtaagactaagcttaaactaaacaacactattctaacaacataattaataccaatacttaacccgcatatccctcatgtaaggctaagtttcagtcctgtttcaatcaagttcgaaggcaacaatacattttccgatgctaaagtcacctatatgtgcacacaaatgggtgatcagaccaaaagcatacaaacattaagcattgaaggaagcattgaac

SEQ ID NO: 121334 - DNA, 184 bp, Glycine max
tgcaaatttaaaaaatttagaggcggaaaaaggggtaaccgatgcacagacgaagcccatatattcaaatctgaaaatggatatggctaggattcctgtgtatgatatcatgacatgatcctttcaaaaacaaccgtcttttgatgagagaaaattcgagcaaacctataggagtaggtttaaa

SEQ ID NO: 121335 - DNA, 225 bp, Glycine max
agcttacaaatctgttttaagtccaagcccataaataaaataaaatctgggcaagataagataagatttgataaaataaaatctagataagataagataagataaaatctagatgaaataatatctagatgagataaaatctggataagataagattttataaaattgtctgctctcttcaagtccaagcccaattgcttacaattctcctgaaattaaatcaaa

SEQ ID NO: 121336 - DNA, 236 bp, Glycine max
agcttttctttctcaatgaacttggctattgactaacaattctaactgccacttcacattctcgttatttctttgtctaacatacatacttgctcaaacttatgaaaagaaacacaaactccatcacaatcatgcattcaatccaaaatcaattcataacaccaattttcacaaaaagataaaaatgtttcactgcataatcatccaagtcaagttaaattgttccatatgcttca

SEQ ID NO: 121337 - DNA, 236 bp, Glycine max
cattcaaactttatgctctagctctatgggtatgtgacaattttgtcggacacaaatctttatagagacattccaatgaaagcattaaatgtggcctataagcccatagtgcatcatctagtataattgcccaatctgtactaaatgcactacctggtttttcaagaatcatttttaactccctattggacaattctatttggccactatttagtgggtgatatggggttgcatgc

SEQ ID NO: 121338 - DNA, 218 bp, Glycine max
agctttttcaacaatggcgaatcacataacaaatttttaagaaactcggcctcactagtagttgtgtctaaagcaataatttttgcttccatgctagaatgcgaaataatagtttgttcagtagatttccatgatactgcaccaccaactaaagtaaagacaaccacttgtcgattttgtttcattagaatcagaaatccaatttgcatcactaaacc

SEQ ID NO: 121339 - DNA, 251 bp, Glycine max
agcttttttctaagattctatgccttttcttatttgacaataactatgtgtttgaatggaggatttaaatttttttaggaaattcaaatacataatattttgattgccttgatttaaattcctttcattttgtaaatattttatttggatgaggtaattcaatttgttgtattttaattgccttgtttggatcagataattcaatttcaatgaaatttcaattgcaatcaaattcaaattttcatttttaa

SEQ ID NO: 121340 - DNA, 282 bp, Glycine max
ctccgtacccagtgatcctgcaagcatgcaagcttttttcccaactctctgttcatgctctcccaaaatctagaggtgaatctaagatctctattagatactatgctagatggcacaccatgtaacctaacaacctcacttatatacaaggtggtcaacttctccaaggaaaatctgatattaatgggaatgaactgagcagacttagtcaatctgtcaacattaacccagatagaatctaaacctctaggggttctaggtagtccttccacaaaatccatg

SEQ ID NO: 121341 - DNA, 232 bp, Glycine max
agcttgctctaaatttacattgatgtttgtattgacgggaggaggttacatgccatttttgctttaagagtaacgtcccactggtaaaactaactttccaaatgtttgccttcgcaggaatggccccgaggaagcttgcctcaaagaggtccaggaaggacaaggcggccgaaggaactagttccgccccggagtacgacagtcaccgctttaagagcgttgtacaccaaca

SEQ ID NO: 121342 - DNA, 232 bp, Glycine max
agcttcaaacatgttttgaagttgtctgcagtcttaactagttcttttgctttacacactaactcagacaaaatgttgacccaatatgcttctcagttcaagaaaaccatggttacattcatcattgacttttggacaaggaattcaggtaagtaacaactagttgcaagtaaaacttacatattattaggaaagaaatgagcttatacgcttggaatagatctatcttcta

SEQ ID NO: 121343 - DNA, 253 bp, Glycine max
cagcttttttctaacatgtttcacccttaactaaatgacactatagtgaatctacattctctattaaaatctgcgctagacggtccaccacataacattatacctcgcctgtgacatgaaactacattacattgcgtaaagacattatgcggatgaagtaataaaactcttactgttttaattaccgcgttgggatctgataaggcattatcaagaacctgtgcgagtaatagggattcacattgtcattttt

SEQ ID NO: 121344 - DNA, 225 bp, Glycine max
agctttcgatttaatatttcaaatgcatgctcttttttttttctccaccactactaaaaaaaatctttcaaaaataattattttatattttttacgtccatttaagattgtctttgaatctatcattataaaaagtcaacacgtatctatctagatgaagaggatcatatacgcttacaatattctagaatgttgatctacatatgaagggtgaggacggataac

SEQ ID NO: 121345 - DNA, 224 bp, Glycine max
agcttaaggaggttcatcaccccaccgtggtccaagaggatcaattatgttcggtcgttgcatctggcgagcgaaccaaattcgggggcggattccgcacgggacttgtgctggaccattcgaagagcgtacgcgaagggacaaacccaagcgatagtagggtcgcaagctggcaatgcgaggaagagagacatcggtgccggctttggattccaagatggcga

SEQ ID NO: 121346 - DNA, 244 bp, Glycine max
ttctgcaagcttcaggctgctcaattgctccaggttgctgcatggaagggcacaggtccgtatggtggtcagcagaggagcacaaaccacaaacccttgcgacaggtacagatttctgattcaaggccagctgggttaccaagttgaccaatgcatccagtttgccttcaagcttcttagtttcagatgatgcagatgggtttgtagctacctcatacactcctctaatgactatggcatcatt

SEQ ID NO: 121347 - DNA, 224 bp, Glycine max
tttgcaagcttttagccaaatggacttaccttgaattaattgctttgagagcccctttgagcctatgttcccctttctttgttttgaagctcattacaagccttaagtgaaaaaccatgatattaccttacccttatagtgcgtttggataaagaattttaactgaggaaagaatttatcagagaatttgaatttctgtaatttagaattcattgtttggatgc

SEQ ID NO: 121348 - DNA, 253 bp, Glycine max
gcaagctgtgtatcggcgtttacggcgtttttttccttgattcaatgccatgctttctttattcttccctaattgttaaatattattactagctgtggctgagaatagggattagcgttcaatttgtgattatatatggcattatcggtgctggggctctctggtttattttattagcgacccaaaatcattgtaggtgtggggaagagctgtctactcttgaggatttctgatggctcattcacaacaagtt

SEQ ID NO: 121349 - DNA, 248 bp, Glycine max
agctttaaaaggaagtcttcgtgagagcttgagatgagtttgtgaatgattgtgaggccttagaggtggagaagacatccccgctacttgtatttctgcaatctttcatcttcctcttctctttgttgtaaaggaagcttcccagttatggaaaactaaatactctgttggatcttccttgtatgtacttgatgtaaatatctttttatctatctaatgatgttttgtgtgttctctgtgctatcagt

SEQ ID NO: 121350 - DNA, 232 bp, Glycine max
agcttctagtcaattggacttaccttgaattaattcctttgatagcccttttgagccttgtttccctttccttgttttgaagctcactacaagccttaagtgaaaaaccatgatattaccatatccttaaggaattttggagctttggaattgttttgggaataagtggggggggtttttgtttcattggacaacttgttttgttggctatgcttcatgatgtattttgggc

SEQ ID NO: 121351 - DNA, 232 bp, Glycine max
agcttctatagaatgtttgttcctaatttctctacaattgcatcacctctcaatgagctggtgaagaagaatgtggcatttacctggggtgaaaaacatgagcaagccttttctttgctcgaagaaaagcttactaaggcacctgttctagcttttcctgacttttctaaaacttttgagctagaatgtgatgcctttggagtgggagttggagctgtattgttacaaggtg

SEQ ID NO: 121352 - DNA, 245 bp, Glycine max
agctttgtgagttccattgattcacacatattcaaaaaagacaaaggttaaaagatctctctctgtctataaacattgatatactttgtagttttacttgtgagaaaacatatggtatagagcttgatagcaatgactacaagaggtatgtttttgtgtatgcttctgcttactgaatgatttattcatgtttatatcataaaccaaagttttaaatttcttacatttggtatcaaagcctatct

SEQ ID NO: 121353 - DNA, 268 bp, Glycine max
accttatagcctacctgctttttgcaagcttgctcgcctggcctatctgatctcgcttgggcgaactgtgtggcaagctcctcccctaatatgctataaatagggggaggagtgaagaagaaaagggttcagccttcttggtacttctcattctctcgaaattgctgaggaaaattattcccgggaagaaattccaagccgaggcgcttccataacgtttccgtgagtaattacgcgaagattctcgaccgttcttcaacattcatcg

SEQ ID NO: 121354 - DNA, 248 bp, Glycine max
tttatgcgggctttgacaatttcttatcgctagtatttgatatagctaagtcaaaacaatcgagtggatggtctacccaataaagacccttatgctgacttggccacctatacagagatatgcgatactatcgagctagcgggtatgcctgcggatgtaatcagggtgagactgttctcatttgctctatctggagaagcttagagatggattcattgttttaaaggaaataatctgaagtcatggga

SEQ ID NO: 121355 - DNA, 225 bp, Glycine max
agcttgtgctcccatgtgacgggctagtagtttgcttttatcagttcttgggccaccccctgatattggagggcgaccaactgtgcaagtacaaccagaggaggaggcatgtctccagcttctacgaggaggctatcgcatagctactatgcataccagggcaagatttcgctcagaccgctgcaaggagacgagtacggatctgcataccaccacaactctgat

SEQ ID NO: 121356 - DNA, 245 bp, Glycine max
ttcttgcaagcttattagctttagatgatgcagctgagtctgtagctacctcatgcactcctctaatgactatagcatcattgctggcgctaaactgctaggagctggaagccatcttctgaattaaatttctggcttcaatgggagtcatgtgttcaagggctccaccactggcagcatctatcatacttctctccatattactgagtccttcataaaattttgggagaagcagctgctctgaa

SEQ ID NO: 121357 - DNA, 240 bp, Glycine max
agtttgcaagcttttataaatatacagccccatgatgattatcaacagggggaataggaaaactatatttgattgtgatggctttcatggccctgtaatctgtgcaaaatattcaagtgccatcgttcttcccgacatgaatgattggaggtgataaagggcttctgcttggggcaataattccttacttgagcatgtcagctatcattaattacttcgatgtgatcctttaccaccttc

SEQ ID NO: 121358 - DNA, 249 bp, Glycine max
gggaccctctatatttacctgcagtttgcaatcttttatccaaatggacttaccttgaattaattcctttgatagcccttttgagccttgtttccctttccttgttttgaagctcactacaagccttaaatgaaaaaccatgatatcaccatatccttaaggaattttggagctttggaattgttttgggaataagtgtgggggggtttttgtttcattggataacttgttttgttggctatgcttcat

SEQ ID NO: 121359 - DNA, 205 bp, Glycine max
agaaaagagtgtaaaagaaagcttaaaaatttttaatcaaaaggaacttacaccggtcttaaaccccggtgttgcaaaaaataagcacccgttgatccaacacccaaatgtttcatatgtgaacccgctttttaaaaccaaacgtccccttcgcggggcgaatgaccagatgaaagcttatgggccctcccaccaaaagggaacc

SEQ ID NO: 121360 - DNA, 234 bp, Glycine max
agctttcccccacttttacccacaaccacccaccaaacctatcaatgttaagaaaatgacatcggcagaaatgcaggtgagaagagaaaggggcctatgctttacttgtgatgacaagttttcccctagccatcgttgtcctaataagcaatattttgttctacagtgggaagaagaggatgaacctgcattacaaccagatccaccagacgaggttgagacagctggtgaccc

SEQ ID NO: 121361 - DNA, 246 bp, Glycine max
agcttttagtatgtcaatgttgggggtatcaaaacttatgttgttcatgctagcagcgaaaatggttccatttggtccctgacaggttctgccatttgggcatggcaaagtgttaacagaaatagtggtcactatttgagttgtgatgttttttgggacctgactgggggctctctcaggtaagcctcttaggtttgtaatgaagtccaatgccgcacgggtgtcgttaaagtctggaagattagg

SEQ ID NO: 121362 - DNA, 244 bp, Glycine max
ttatgcaagcttgttggagctcacatcacaggatgcattgttggcacacaacaagttgttatccaagcaacttgaagcattaacagaaacattgagtaagttgccaacccaattacattctggacaaccttcacccttttctgttttgcaggttaaaggtttagttatacatggtggagcatatgattatggctgctgcatgcccataaaagatataacacatgaagtgaactacatggggaac

SEQ ID NO: 121363 - DNA, 234 bp, Glycine max
agcttccgttcccgttagcatctcttatttaagcatttcagcctttgctttcgtgtagcttaggaaaaacgtcatttcttcttctttctttcttccaaatccatttctaaagttccaataactttctacatcactcacagccaccattagccaccacaaaccatcattgttctccattgaaaactcacaccgagaggaacccttcaaccgaagcggaatcttccaacttggctt

SEQ ID NO: 121364 - DNA, 227 bp, Glycine max
agcttgggtacttttccatcaacgaaaccccatcatccttacacccgtcttcccaaaatagcacctttgatccacacccaatttttcattttgtctcgcttttaaaccagcttcccttctcggtcgaattacagatgaagcttaggtcctcccaccagagggactctctgttgttccttcttgtcacatccaaattcctccatgctccatagttggattccaaaact

SEQ ID NO: 121365 - DNA, 226 bp, Glycine max
agcttgctctgttctcctttgttatttatttattttccgaataagtaacccatatatacgccccatggctatgattattcacggactttcagtgttaattggcaagtttaaaagcagaagatatatactccatgaaatgatgagatactaataattgatgtgctactgcccgaatggtggagaatttaacgatgttaataattctcaactatgtaaactacatatt

SEQ ID NO: 121366 - DNA, 235 bp, Glycine max
agctttgtgtaattgattacacttatttggtaatcgattaacagcgactgtttctgataaatcaaaagatgtaactcttcaaaaaggttttgactttttcaaattggttttttaagtttttctaaaagttataactcttctaaatggtcttcttgaccagacatgaagagtctataaaagcaaggctttgtttttcatttcaataatcttgaacacttattcatacaaaccttta

SEQ ID NO: 121367 - DNA, 224 bp, Glycine max
agctttctatcttttcattgttgtactttgatctccttcttgatgctctaaaatgcgggaatgtgctcaaatttgtggggcaattttgggttggatgattgaacgattgggttggattggggggctcgtatgggatgggcctaggcttttattgcattttgaagggagggaactttccacattaccccctttctattgcgggaaatacctaaaggcgctccctc

SEQ ID NO: 121368 - DNA, 219 bp, Glycine max
agctttaatataaacatgcgtttagtgttttgaactaatatcttatgggatatcattaagttgttgcaaatacggtattttgttttcctaatgcgataagcttgctattaaaaccaatgttgggtatctatgaaaagtcgtttgaactggagttggttcattatttgactgaggttaactagaataccatggtcgcgggtgtgaaaggaaaagtggtgc

SEQ ID NO: 121369 - DNA, 263 bp, Glycine max
tttcagttcccctgtaagcatgcatgctttctccgacatttccacatccactgaagtcggtgcgagaataatcgccgccggggaggcacaaatggcagcatctgcgccacgactgataccaacgtttaccatcaccggaaatagggttgccatcaggaaaacacccagaccggttgcggaatatacggccagagacataatacaggcgacaaaataggcggcaatcatcaccaggtaaggggagttaatatactgcaatggtt

SEQ ID NO: 121370 - DNA, 237 bp, Glycine max
agcttgaacctcattttcactactagatgactccaccccccatctttctcctaaagacaacaccaagttaaaatcaatcatcacaattacttgccatcaaagctactacctttgcccataacttttccccttaggtcatagggagcatatacattaatcacctttgttggacaagaggcctcaataacttaagagggggagaaattaagtttcaaaatttcccactaactaactttt

SEQ ID NO: 121371 - DNA, 234 bp, Glycine max
agcttagtggtctggacgacatctattatgttgctcttatcaacaaattgctctggcattaaggcgtgcatcacgtcttcaacaaaatggacaatgattctaagcacaccctagtagccaaaggttcaattgctgctaaacaacaaaaatttagcaaagctaacctaaaagctataaaggtttccctagaatagagtctaaaggaagctcctcaggtggacctagacgccataa

SEQ ID NO: 121372 - DNA, 232 bp, Glycine max
agcttgatctctattgcaaactttggaaataaagggttttcacttaagtaggagtaacatagagtatatgcactctaattttagcaagagacaagaagatttttggcttgaaagtaaaattgggagacaatgtcatatcataggtttctaagtttaaatatatgcgattaatcataaaaggcgatggaaaaattaatgaggatgtcacacatagaatacaagtggaatgact

SEQ ID NO: 121373 - DNA, 254 bp, Glycine max
  unsure (1)..(254): unsure at all n locations
gcacgcatgcaagcttgngaaaagtttggaatccaagatgctgggggacacaagtcggtcaatcctgctcttagaaatgtgacctaagcgcttgtgccataatgctccacaggattgtaatatcaattctacactgaataccacgcaagtttgcattaaaggattcaccataggaagctacaatatcaagcaaatatagctaataattagccaacagtgaaccagatgcaataatatctgaatggaaagacaac

SEQ ID NO: 121374 - DNA, 250 bp, Glycine max
ctttacagtgacccttagagcctacctgcttgtcctgcaagcttgcctcatacaagtgactttaggggctagactgtcgggtgaacctgcttcggtgatgagtaagatgggctccgctttatgagcgctgttcacccccctcgcttttaaggcttgaagggatgggggggtctacaggggctacgcgtccagctcagggacaacgattatactcttctccgaaaggaaatagggggcccactgcggacat

SEQ ID NO: 121375 - DNA, 266 bp, Glycine max
ctatacagtatacctgaaagcatgcaagcttgaaccaaacttttatatactttatcacaaactaaatctaacaaatcataaaaaccccaaaaatctaaagctccagttgaagacttctaccctaaagttaatacaagataaggacataaagaatcatggaacgtacttggatggagtatggttgatgcttcaaagttgaaaatgcacaatgaaagcacagatgcgaaatgtgcaattttttggagagagagaatgcagagacgagg

SEQ ID NO: 121376 - DNA, 235 bp, Glycine max
aggcaagctggtttttgaaaaatgttaaaatggggaatgagagggagttcacttaatgaacgttagacataaagtgtatgggtattatttgaacaaaaaagacactaaaaacttttggcaataaaagtaaaagtgggtgacgaggttacatatgaagatactttcttataaactttgacgaggactatatatggtgaacgtaaaaagaatgacgccgtgcacaatcaaggagcct

SEQ ID NO: 121377 - DNA, 227 bp, Glycine max
agcttttacattcatcttcaagcgtctctatatattacgggactcaatcacacatccgaatgaaaagttattggggttagaattcgctctgaggttcaacattcaatttctagcgtctagttattttatgggactcaatcagatatccgaggaaaaagttattgtcgattgaattggctcaaagcttcaacattcaatttcgagcgtctcgatatattacgggacac

SEQ ID NO: 121378 - DNA, 237 bp, Glycine max
agcttccttaagatgattcctaaagaagctagagcttagctacacatacctctctaatagctaagctcacctccttgagatgagaagctagaacttagctacacaccccctataatagctaagctcacccccatgacaaaaaacatgaaaatacaaaaaaaggtccttactacaaagactactcaaaatgccccgaaatacaaggctaaaaccctatactactagaatggccaaaat

SEQ ID NO: 121379 - DNA, 219 bp, Glycine max
agcttgtacagcgcgccagaagtatggaacatgatcaaacaacaactttaacactcccctgtagtgggagcacatgaattgtgtgctccaagcttggaacatataaagtggattcgaggaccattcatagacttggtcaggatgtctgaaagccgggtgatggagttaataaagtgagtactgatttatttggactgcattttccaccaaataaaatgg

SEQ ID NO: 121380 - DNA, 222 bp, Glycine max
agcttttggccaacccctctatcataccaaacatgcttaaaatcttactctagcaatctcaattaagtcaaaacctaactacatgcaatgatgaacataaaaatgattgagaaaatcaagaaaaagctgggttgcctcccagtaagcgtttctttaacgtcactagcttgacgtatggtacctctatgggtcttgtgaaacattagctttggaaatctgagc

SEQ ID NO: 121381 - DNA, 236 bp, Glycine max
agcttgtctgcccgttgcagcagtgatgatggcccgagttatgttggggaacggttacgaacccggaatgggtttaggcaaagacaacggcggcataactagcctgataaatgccaaaggaaattgtgggaagtatgggttaggctataagcccactcaggcagatatcaagagaagcatcgcgggaaggaagagcggtagtcaaagctcgcggttgagacaagaaggtgaaggaa

SEQ ID NO: 121382 - DNA, 255 bp, Glycine max
  unsure (1)..(255): unsure at all n locations
gtcgatctgtttgcatgcaagcttgttcctgggtgtgccttattttttttctattntcaaacggctagccatacccgtgagtgccgtgttaaaagaaaagttatcataagcatttaatcgattatatgtctgttcatataaatcgttttttttttttttgcaaaattgttaaaaaggcataaattctttttagtttgcataaatatttgattttcttattttatttttttacctaccaaacaactttaatttaaa

SEQ ID NO: 121383 - DNA, 235 bp, Glycine max
agctttgggatgattatccacatgaatatgtaaggaaaggctatggtaagttgttttgctgtgtaaacatggaatcaatatttcaacaaattgtgccgggatttctttcttatagcttctaattctttgttacagacattattgaagatctttatagtcctaggactgcttccatggattttgtgagtgagttggttcgaaaacgtgggaaagaaaatcttcaaaaatttattca

SEQ ID NO: 121384 - DNA, 235 bp, Glycine max
agcttcttttggattttgaacaggcaactaactcctctttcaaaaccatgccatgtgctcgcgactggtccctttcttcccttcgcaacttgagttcactattgctaccccatagagctccgcgaaatttgttccggctatactcttccttgcgagccctcttggtctcttgttcaagggctcttgcagtaattgcattctcttcccgtaacccggcacactccttccgaacgtg

SEQ ID NO: 121385 - DNA, 244 bp, Glycine max
agcttctcaagatctctttccaccaaattcccataccataaaattagcaagtgaacaaagaagcatgttttagtcctttgtgtttaatttgttcatgctgtttctctttctcaatggccaccacaatgccgaaattcaagcgaaaacttgtgatgggtgcaaatggtcgcaccaaccccttggtgtggctagtggcgattatctgcaccatcatagcagtagcagtggtagttgtaggcattgt

SEQ ID NO: 121386 - DNA, 259 bp, Glycine max
ggatactttatagtcatacctgcattcttgcaaacttttactgaacttgtacaaaatggggttcgctcgttgtcatcatcctacacttgggagggagggcgacgcgagactcacgggtgcgtcttccaagaaaggaaaatgcatggaatcgccaccaacgttgatttggggaaaacatccgaaaaaccgaaaaagacgtggtctacaaactttaagtgtgaggttcgagagttgtatttacgcacggggaaggtattag

SEQ ID NO: 121387 - DNA, 239 bp, Glycine max
tggcttcttgcaagcttgtgaagtgctgatttttaacttctcgctaagcctatctgccgacttggcgagccatccgctgagcgcaccactcttgcagctgagcgcaccactcttgcggctgagcctgaggaagaatctggaagaaggatgagctggacacacgtgctaagcgagggctcgtcccgctaagtgcaccgcttgcatgcatccgttaagcgagaagacgcgcgctaagccga

SEQ ID NO: 121388 - DNA, 230 bp, Glycine max
agctttatgatgaatcaagattgatccaaggagttccgataataacaaagatgatgacataaagctcaaaagtcaagatcactttatactaacaaagatgatgacattcaagaatgagtttaagattgagtcaataacacttcaaagatcaagagtaaattggatttcaagaatcaggactcaagattcaagaataatcaatatcaagattcaagaatcaagagaatact

SEQ ID NO: 121389 - DNA, 231 bp, Glycine max
agcttttaaaggttgtcataccgctagatcagctataattagagaagcacactaaaactagcgatgggagacaaatagcccgtccattaagcttacgacacgtaaagcgacccagataaacataacaagcatggggtgacaactgacgaccgcacgccgggaaggggatgatacgctgaaatgaacggaaaatgagctcctactgcataaaaaagggctttccaaaaaatg

SEQ ID NO: 121390 - DNA, 238 bp, Glycine max
agctttgaaggtgcgcaaaccaccatcttttcatagtggagaaccgacaatgcgtctaccatcacgattatcgtctccctttccattattgggggtaccacctgaaccggcagatccctccaccttttgggcgtgttatttgaaagatccggccccctttttgcacatgttctgtaattgcatcctattcagaaccatatgaaaattgtactgatactgcctaacacaggcaaccatt

SEQ ID NO: 121391 - DNA, 238 bp, Glycine max
agttatctgcagtttgcaagctttttcttgagctcacaatatcggaaattagatactactgcaatgagagtgttggacacattacttatagagaatttattgatgttatagtttctcatttgttgaataattacttagtattattgtctttatttctggaccataaatttggttggctgaaatagaatagcagtttttgcttccaaatgtaatgtgattgtttattgtttaaattgtt

SEQ ID NO: 121392 - DNA, 224 bp, Glycine max
agtctttctccactaagttgcctgatgcctgaaatgtcttttctgatggtcgtggtcctagatgcagggaagaatttctccaagaacaccctcttaaggtcatcctatctgaaaatggacctgggagcaaggtagtatagccaatcttttgccactccctccaaagaatgaggaaaagcctttagaaagatatgatcttcttggacatcagggggcttcatggg

SEQ ID NO: 121393 - DNA, 234 bp, Glycine max
agctttctttttctttctctaagactcaaagcatgatagcaagctgaatgggtaaatgcgtagaaatagattttgcgccctttaccattcagatttcgcaagttgggtgataaacgcgcagagacaaattttgcgccctttgtcattccgcacatcttttcgccacctagaggcgatcgtgtccaacaaaatgaggagacaaattatggtcattctgcgtcttgtatcaaccga

SEQ ID NO: 121394 - DNA, 236 bp, Glycine max
agctttaatagaatcagagaatttcatgtgttcaattgaagctgttctaagggggattgaacaacaaacatagctggtatgttctttcaagcattgaacttgttacttattttctgtagtattcctcatcgttacaattcattatggaaggaattagatcatgcaaagaaccttgtgaaaaataggcaggacctaaacttggaaaaagctagttttgctgctttgtttggactgga

SEQ ID NO: 121395 - DNA, 237 bp, Glycine max
agcttataatgcttttataagtgctctgaggcgaggtttgcgttctcccttggcttggatctctatttataggtgcaaaaatgggctttgggccttcaaaggcgcgcttagtgtgacacctcgcacttagcgcgtttagatcatgtgcttaacgcctgccacaggcttatcgtgtgcttctgttggatcgcgtgcttagcgagtggctcgcgcttatcgcgtataacgaatcttgca

SEQ ID NO: 121396 - DNA, 234 bp, Glycine max
ttttgcaagctttatactaaagtttaatttgtgattgttattgttgattgatcgtacagttttccagaaaaggagaagggaagggcattgtttgattgtgtgctttgtcattcctgcaagcttgtttggcttgattacctgttcaaaaacagatattttaatgtatgattatgaggacagtgattttggaggcgtgcttagttcaaatttttgtttttgaaatctttattgaag

SEQ ID NO: 121397 - DNA, 226 bp, Glycine max
agcttattaaccggtctaccacgacacagttaaacctgccaagctgtgctagaatacatagacaaactcttcgaccaccttagtatttgcctggaactcatcaccgtacctcctgatagaggcaaaggggaatctccccactattggctgaccaaatggcggcactgtgcatgttgatcgtcttacgacgttggacactataaccagtgatgatgcgtcccacatt

SEQ ID NO: 121398 - DNA, 225 bp, Glycine max
agcttttaacgtctatatacatgcgcccatagctggtaaaataattacatggataccttcactatggaaggttattacatgattactctggtgcttaattaagaggatgtgttttatatggcgccatctttcattctttacaaatgaactaaaaggaatagcattggcgatatcaataactcataccaaaagataaggcaaactgcagctgaagagaaatcccct

SEQ ID NO: 121399 - DNA, 229 bp, Glycine max
agcttgtaaactgagctcaacaatgaagcgctgataccacttgatacacaagaggcctaagatatcgtaagaagggggggttgaactaagatgacccgaactggctccactaattaaaaatgtattactactgtgactcaagttacgaagtgacttaatgacacgccacgtaaaaaggaaggaaagggagacagcctgaatatgaacatatgacaccgatgcataaagg

SEQ ID NO: 121400 - DNA, 227 bp, Glycine max
tcttgcaagcttttctaatcagatgagacaattggcttcacacttaaatcaacaacaatcccaaaattctgacagattaccttctcaatctgtccataatcccaaaaatgtgagtgtcgttacattgaggtcgggaaagcaatgtcaaggacctcaaccagtagcatcttcctcatccgcaaatgaacctgcccaacctcactctactccagaaaaagatgatgaca

SEQ ID NO: 121401 - DNA, 228 bp, Glycine max
agcttgaaataaatttctagtaatgaacaaagaacaaatgcttaaggtgaaccaatacgcctttaatatatacactatcaaacgatcctataagaagtgataacatttttaacataataccaccctgttgatgtgccaaatccaaaattgtctatctggtcttacaattgaagggcttctaacacggaagtgacatacacactacacggatgtcaaagaagtagacta

SEQ ID NO: 121402 - DNA, 234 bp, Glycine max
agcttgagtttattatagttgaccaataaaaaagctaattaagtttttagtcatggggttttaaattttttatccctaaactattttaaaaaaaaaattaattcctaaaaaatttgttgttattaaaagtagttcatgtcattgatatcctctattaaataatgaaatgttatgaaacaagttagatgtcaggtgtatgtcatatatatgtcacgtaagttttattacatttaa

SEQ ID NO: 121403 - DNA, 238 bp, Glycine max
agcttctagccaaatggacttaccttgaattaattcctttgatagcccttttgagccttgtttccctttccttgttttgaagctcactacaagccttaagagaaaaaccatgatatcaccatatccttaaggaattttggagctttcgaattgttttgggaataagtgtggggggggggttgtcttatatgactaacttttggacataaaaatttggacaaaacttgtatattccccc

SEQ ID NO: 121404 - DNA, 264 bp, Glycine max
tttaagtcgacctgtagcatgcaagcttgtaaaaattttccaaaaaaaacttgagctagttgagaggttaagaatggatgagcaagtgaaataaaatgcgcatatttagtcaacctatcaattatcactcaaatggtatccttgccattggactttggaagcccatcaatgaagtccataactgtactataccaaactccttcatgtataggtaagggccacaataaattcggagctaccatcgtctcgcatttacaccacaaa

SEQ ID NO: 121405 - DNA, 230 bp, Glycine max
tctgcaagcttgtataatgactatacatgatacatttctaggattgaattaggttaaagataaaagggaggccccacattatttccatgacgcttttgctaacttgaagatttggaaaccatatgcaaaaatgggcatgcatgcgcatatgcagactctcaaatggcaaatttttatggtcacgtgacgctaaggcttaagattcatttcctctattctaaatcaaccca

SEQ ID NO: 121406 - DNA, 224 bp, Glycine max
agcttctacttatgtggcagggcgggcttccttcactttcctgtctccaacgcgagctctgaccactgtccttccttcccgcggtgcttcttttcatgtccgcctgagtgggcttatagcctaaaccatacttcccacgatttccttgggtttttatcaggctagttatgccgccattgtctttgcctaaacccatcccgggttcataaccgttccccaacata

SEQ ID NO: 121407 - DNA, 231 bp, Glycine max
aacttctccttcaactctatgcatgatggacaatagcactgaagcggagcgaattcaagcagaacaagcttgttccactcaagagtcttataataatcattctactgcagatgaagagacactgtttgacctaccatatcttttgcctgacggaaactctggacttttctcctattattcttgatggcatttatgtgcagttgattacggattcatgctataaaagcagac

SEQ ID NO: 121408 - DNA, 233 bp, Glycine max
agcttctaaactttgtacaagaatgaagctctgataccacttgttagacaagtggcctcagatatcttaagaagggggggttgaattaagatattccaaactgtttcccctaattaaaaatctatttttctttttacttaagttatgaattcccttaatgacaatcttcttaaatattaattcaaatgaagcaacttgaatatgaatataaagcaataataaataaaggagat

SEQ ID NO: 121409 - DNA, 196 bp, Glycine max
agctttcagaaagtgatcaataggatatttaataaatcttcatcgccgggagaaaacacttatgctctataaaggaatgctgtgaacaagcaagtgatttgttggccatcaccttatgtaacgaaaataggacatgggaactgtgcacacaacgaaccgctggatcaaggatgcaatggtggaaaaggatcaccaa

SEQ ID NO: 121410 - DNA, 220 bp, Glycine max
agctttgaagcacatgccactgtactctaaaatgacgctggatatggtaacctagaggaagaaatactttcatcatgaaaacatcatagtggaaggaaactgttatgctgcaatccaaaagatcctgttcggccatcatgaatacaccggtggtgtgactattcacttgttcaattggggaagacagtgtggaaaaagctattattgacatgggaaccat

SEQ ID NO: 121411 - DNA, 230 bp, Glycine max
tctgcaagctttataattaattgaattttgttatatcatagtcggtctcatacttctattctacttgtttactataggcttgtgagtaactccccccccccctgttgtttgaaatcgaaattgtatcatggcctgataaattttatgcttggattttatctcattattttttagggtgattaatggcatgacccttgttagttatttttttcttttttaataatgtcgta

SEQ ID NO: 121412 - DNA, 175 bp, Glycine max
  unsure (1)..(175): unsure at all n locations
gctttttttgctatactggctgtaatttcgtgtgattaagttattagactatgcgtagctactaactcaccgtttatgagacctaatggctgttagtactgaccataacttatctaatctcgacaccaatatngctcacaaatgattatgttttaggctacttaccatgactgtt

SEQ ID NO: 121413 - DNA, 216 bp, Glycine max
ctagctgctcctttcactatgtattcttcgatccagtggctctctgcattgtgtgtcgaaatagcacaattagccaccggattcttcaggaaattcacccatggtaaaagcccactgtgtgaaacacttttgaccacactgttattcctgctgactataaaatttggaaattaatcacctcacttgctatatctaaagtgtgtttgtatccacaat

SEQ ID NO: 121414 - DNA, 107 bp, Glycine max
actttatcacctctgctctattttcttttcattttcttcatccttctctcttctttctgcctcatgtattgacatatgtcctttctatgctacttacatattctact

SEQ ID NO: 121415 - DNA, 163 bp, Glycine max
catcacctactctctggaacattagacctttgtgactgagattctgtgacactctttgacatacatgctgtctcctctttgggacttttgactatcctatccactaatatttacattatacttagaaatctcccacacattgaattcttacaccgctaatgta

SEQ ID NO: 121416 - DNA, 318 bp, Glycine max
accacactatgatatttgacttagcataatcatcagtgagatatcaactgaataacagctccacactagctgcctcttcaatgtatgtcagcagcttgtctctcatgacacacatgcgacacaagacacagcatgagtctctcactcttaagataggagaagacatcaatcattacagaacaactcttaagctgcataatggcatgtctatgacagctatccaattgcatgctccacttcgatcaaaatatgctactggcacaccataggctccaacaactcactgacgagttttaactaaaaaaatgcaaagactct

SEQ ID NO: 121417 - DNA, 168 bp, Glycine max
  unsure (1)..(168): unsure at all n locations
tctagctctaagagttctaagaacttattagtagagcctgaacattgtacacttgtcatacttgtgatatgnatctctggtgggaactcttcttcatggctattcctagtggtgaccctcattacctgtcntcttatctttggtgatctcatgttgaaatcaccatga

SEQ ID NO: 121418 - DNA, 169 bp, Glycine max
tatgtactaacagtagggggttccttaccactgttttgagtagtcatctgtattgatgtagtttaccctacatacggatgatatatgtgttgatgaatttagttaaaatagtattggtgtaaacagcaaagtataaaaataatttaaacattactgataaactgcacaa

SEQ ID NO: 121419 - DNA, 261 bp, Glycine max
  unsure (1)..(261): unsure at all n locations
ctctatgagtctattctgtgctattatcatcaatgatgaatcgaaaagaacaaacaattgtgttatggtgccaaaacgtcagcttctaactttatgctaagtgtgagctttaagtttataacttgcactagtgaagtacttaatatangattatgtaactngcttgtatgaatttcacatattgtctcaactcttnagatctagacctataatcccatgaacagtanaaagtaaggcactattatcatgcatntatatcat

SEQ ID NO: 121420 - DNA, 282 bp, Glycine max
ctgtgcctattacgcactttttaatagcactttattaaggagttgatcaaaagcggctctcacctatgtttacgacttaccttacctatcactctttaagtcaactattttccagcactatcccctgtatgtattctcctagagacttagaagtatactacatacatgattcatattcctagctctgttacttctttagattaattgcctcagacttagaggaaatctgactttaagcctgggaggagtgccacagaatcgccctttatgcgttggggtgca

SEQ ID NO: 121421 - DNA, 384 bp, Glycine max
  unsure (1)..(384): unsure at all n locations
ttaatatattaccttggcgttattactatattaattttaaaccataaacagaaagaaaatcaaatcattcttcttgattttcttacttattatcattatattaataaaaatgtcgattataggtacctcaccatacattaattacaaaattggtgcaacattatattactgtaaatataagataaagaaatgnaacacctaactattcatgatatttaagatcactatgttcatatcctatgtatactatcctacttcacgataagtgtttaccacatacacatcttacggttctgaatcctcagtatcctcactgtcgatgatctaactcaaaacgaaaaatgaactcatgatgctatcatcttctctccattattaaatcac

SEQ ID NO: 121422 - DNA, 116 bp, Glycine max
gactgcagcgctttgcaaacgtttatttttgatacccggcttacgcacctgctttaatactgcactctgcccccctctatcgctccaattaacgctcctacgccactctcgtcaaa

SEQ ID NO: 121423 - DNA, 231 bp, Glycine max
gatatgacggaacatgaactttaatctttgttgtacatcattcggatatccaagaactttgacttttaaaatctgcatatttaaacttactatgataccttgttgattagctgattgatactaactactgatgttgttgatactcttaatgagttgacttacttacattttactacttgatctgatatgtttactttatatgtttactgttcttatgatctgaacttttaa

SEQ ID NO: 121424 - DNA, 249 bp, Glycine max
attaatcttgccttacattttctgattgctacgggcaaaggaacttactcgatctaatctgtcttacacactatgataggatctgcattgttacgttaagtatttactcacacttaggttcctagatattctgttcgggttactatgactagactactcttcatactttacacattagtttgcctcctattactagagccagtaacaatagttaacgggtattttttacgaacagcttgccttctccac

SEQ ID NO: 121425 - DNA, 372 bp, Glycine max
  unsure (1)..(372): unsure at all n locations
ctcacttctacctttataactcccacatcctctgacatcacacataactgagtccgaattatggcaacctcagatggttaataccatttgatcatcaccaactaacactactatgcttttattgaggacacctgcatgttcatgatatgaaaacataactacttctgtcaacatctcagaatgaactcattgcatcccatgagatctcagatctttcaatactagaggatattgggtactgaaaatgagcctgccaccatgatgtctcacatctctcatctcgattagtgacctactgtcagtggggtaccacttngaacaacacgaacatcgctgagcgctctgactattatacctactacacttgctaca

SEQ ID NO: 121426 - DNA, 74 bp, Glycine max
aggaggtactctctgaggctctaactacaactcaaatggctacttaaaccagttatactagaatttactgcagt

SEQ ID NO: 121427 - DNA, 154 bp, Glycine max
tgactactatgtgtgcccaagtctcgactgttgtcggtctcttttggcctctgttctgtcaggttcgcgtgcgaatgagtcttagtatgactcttaacttgtgctgctgacttattacgtcgctgtaacttgctttagtgcctctatttttgac

SEQ ID NO: 121428 - DNA, 193 bp, Glycine max
cgacttatttgactgccttataatcatagttatgaagtacttatgagactatcattgaacataatttaatggagtttaacgagaatgagtatgtaatggtaactgaagctttctctgcattgggcgtgtaacaatccatatgaatatttttataccaaaagatactgtctacaactcttcattggaaaaaatt

SEQ ID NO: 121429 - DNA, 335 bp, Glycine max
aatttctctttagacactcagccttgagtttatactaagcctccaacaaagcaagactaaatcaaatacccatataatactatctgctaacaactataaggaaaaggaaaagtatactaaaatgaaatcaatcaggctatcatctgccttatttctttacatttcagtaaactataaagtaatccaacttgaaacacggaatttttttttttgtgaaacgagccaacacatcgcatgacgaacaccatgacctcatctaacgcgacatccatgacaacgtcgccactatgtcaacatccaactataattgacaaataatcatttactccctaact

SEQ ID NO: 121430 - DNA, 339 bp, Glycine max
tgctccgccttcataaaaagagatatttgcaactacgaatctccatacttgtgtaaaaacatgtgataaaaaaagaggccaattggcggatgacattttttgacggaacttttctgcctctatgctcagcagtcatgtcttctcctgctaaacatatacaccgtagaataactgccccttatccctttttgagaatttatcgcacataattactatatctcgcaatgcaaatagtttctgctgatatttgctgcggaaatatgcaacaatattatcaaccttatttttcacccctacggcggattaaaatctaaactgaccactgttaactctagctga

SEQ ID NO: 121431 - DNA, 327 bp, Glycine max
atatcacggcaactgacatcgaaccaaatgctaatgcgggcttttgataacgcagccctgctagtgatgactgaacttcaacgagatctatctctcaagattaactgatttggtcagaccatggacggttgaggacctatatgactgtgagtgtataatattgagatataaaatttttgttaacatataacaccttttcaaacttttttttttacagaaaggacatctatccctagctactgtaattactactcaatattataagatgtgcacctcttcctctcgactacttatgttaccttttttgtgacttagcacatatatata

SEQ ID NO: 121432 - DNA, 224 bp, Glycine max
gtcatggcactctcagctaagtatttagtctgatttaactcagcaagctctatctttctaggcaatatcatatcatattgtggcctacaatctaacctgagcatagtaccttattagatagcagattcttatgacacttatttaacatgttagctacaatcctaagaagcattgcctcataccacactgtccacacctatccatcccaaacttctcttacatgt

SEQ ID NO: 121433 - DNA, 239 bp, Glycine max
tattattcaagtccttaagtcgattttgatagctataatagacagtcatcagatcacttccaatacaaataaatttaattcctgagttggctacaccttctaccatggataagctgaataaggggatatatacgtgtataaaatcttatgtcaataagttcctattaaagaactacatctacaagacgataatcttgaaaaagtggaaaaaccattttgtgcaccctctatcacaccgt

SEQ ID NO: 121434 - DNA, 323 bp, Glycine max
ctcattctttctttatcgtgactagtagaactaatgacttgatttaggttatgtttagagatcaaatagactttttgtatctttaatcatagaggtgctgttgttgcttaagctgaaatgagaacgacggttcgctttttgaacggagactcctagcactgtggcacagcataaatatgatttggttcaaaatctactccccgctacagtatttgaggaccttcttacgagtttgtatggggaccaccagactatcaattgtgaggccaccacgctgcatgctatggaatctctagtttaggtggctaccactggctacactg

SEQ ID NO: 121435 - DNA, 203 bp, Glycine max
gcttcgtatctggacgccttagtacaccgtgcgctaggaccaccagttggaactctcagtcaactcaaacgatcgacgggcgcattcaaacacaggacttcctcgagcatttcaaatcacccctccatacgacaaatcttgcatcctatcgcatcttggcgggtactccgaaggtctgacccttacaagggatacctaccact

SEQ ID NO: 121436 - DNA, 263 bp, Glycine max
  unsure (1)..(263): unsure at all n locations
tgtttattgctgtngacattcattaatgtagtattttcttatattatttagtacagaaggccgaccctcatgtaattctatccataactaacatngacatatcttctctcatatcgacttctattgatgattttcattttcaccaattgtttaagctcatcaaacagtcctctttatggaacagcataggacacattgttgttgtcgctctctaattaccaaggcaccataatgaatatggaatcttacttacctaatcactg

SEQ ID NO: 121437 - DNA, 273 bp, Glycine max
ctgcaagtgagcactgtgagtttttccgaatcctcgagatgtggactatggcgactactagatctcagattcactggatctgagcagaaagaagggacctccttaatacctgaaaactacataaagctgataactgaagtgttagaggagaaaagaggaccaatatgataaggaacgacttaggtcaaattatgtagtcaatgacagtttttaacagatctgactttgaactctgagttgaactctaacaattatcctttatcactctctaaa

SEQ ID NO: 121438 - DNA, 170 bp, Glycine max
  unsure (1)..(170): unsure at all n locations
tacttctgtatggtcttcttgttactaactacaactngtgcttgtgaaagctcagtaacctgtattgatctctgatctagagctgtgactttcatatttgacatctttgactcatcttatcttaatcacctctatttctcattatgcgctgaaaacaactctgctatggt

SEQ ID NO: 121439 - DNA, 52 bp, Glycine max
gtgggcagggggcttttatcttggactgaacccccataaggtttgatgtttt

SEQ ID NO: 121440 - DNA, 182 bp, Glycine max
  unsure (1)..(182): unsure at all n locations
ctttctatgggccccttttctttttcctagtctcacttacagtatgggagcttctgtatccaggaggncttactttctggtcctgttctgggaaccctaagacttgacagacgctctactccgcgctctaaccttgacgaggactgtgagtactgtgatcggctggaatttcacataggtgg

SEQ ID NO: 121441 - DNA, 155 bp, Glycine max
gtgactgatggctcaacttatctaagtcacaggtcactcttatttactggctctggactttgaaactctggactcttgaaatctggactgactactccctcctttactagtctctgagtctaattctagactgactacctctttatctatactct

SEQ ID NO: 121442 - DNA, 268 bp, Glycine max
aatgttatacgaatcacctaacaccttaggctattcttgttacaaagtttaacaagttaactgttgccctttatatttatggtgattttggatgagactaccagacaaccttctgactctgagttataatgatcgtgacatgctatattctgccttttatgtgcgatgtgttacagcatacttacacagtttgtacttaggactttctttgttgagatattatacatctatatgtctctaatggaacccacatgtgacactttttaat

SEQ ID NO: 121443 - DNA, 368 bp, Glycine max
cacgtggattgaaaatcaataaaactccaatatatgactagaaatgatgtctctgctaaaatataaagggatgaagactatctgataccacatattactaataccactgttttggtgtactttatacgttaaaggtatatactgccatgataaagatgcatgcttaaataggaatggcaggctttgatctgatgaatcaacacggagttagtggaaagcattcctaaggcaatttgtaggcatgtactatttgttaacactgagctcctgtccaatgcagacatccttctctgtgctgaatgactagttgtcactgtgagctgcataacaactaaacagatttaacgctaaggtctgtatccctgttt

SEQ ID NO: 121444 - DNA, 310 bp, Glycine max
  unsure (1)..(310): unsure at all n locations
ctagctgctgagtgtgaaccgggaggtggctggtatatcctcaatgcgcttagagatttttagaaagaaagctactgtttaggcagacccaatgaaggtcctttgccatcacagagcttgcggcngaggtgctaaataagtgctgtgacaaaaccccaataccatgggccctgcccgctgatgaatacgattggcgctgatttggcgacagacatttgacttgtgcagttagtgtctgtgctcttttagtcacactttattcactttgtgccttcctgcttttttgttatttggtagtgccacgttactt

SEQ ID NO: 121445 - DNA, 264 bp, Glycine max
aaatttagctcacagagcatgttcaagctcacactgcagatctatatactttttatatactggtcttataaatatgagagaactgtttgaactaggtgggcactaccatattttaatcttcatctattagctttcatgatgtaactgattctcttgctggcgacagaatgtttaaatctttaagctcactgagactgacagatcccgcttcctcttagaggaactaattgacttgcttggtttggacacagaatttaagtgcgc

SEQ ID NO: 121446 - DNA, 247 bp, Glycine max
  unsure (1)..(247): unsure at all n locations
tatctatccacaaccttctattaactaagtaacctcttgannaataatacnngatanaaataacataacanataattcaacatcanacataantactaataatatatatatatatatatatatatatcanggtggtacaaatgctaccagcanaaaaaggttcatgtcaagcaaagacagaattcacaataaggaatcttagtaatttgtattatggttccaaagtgagatgatacctgcatttata

SEQ ID NO: 121447 - DNA, 345 bp, Glycine max
ttaccttcttttcggccaagaagaattatcccctcagtgctcaacagaaacgtgctattctcattaaaaaactacttcttgactcttaaagctttcactgcaacacatcaatcatcacgttatcattgttgagatcattttgattaatggaatagtactctaaactactgtataagatagctttcatatcagttaaacctcttgcaaaacctaaaggtgaaactctcttgagagactcatcgcccatgctggagagcacaaagaagctcattctacatactcactcaactgggctgtattactttttgatatgctctttaaaaattgaccactcttatgggatat

SEQ ID NO: 121448 - DNA, 260 bp, Glycine max
  unsure (1)..(260): unsure at all n locations
acatcatgccgagtgatactattttttcttccatgttctattgtacatagctngngtcttcttcacatataaggcatgcacgatggcccttaacactgtatncactcaaattcctgtatngttgtaagncattaatggtacanaatancattgcacacaacttgaatgtcatattntgatacgcatcatacacaacaacctcctcgttccacaactttgtcaagtcttcaatcaagggactgagataaacatcaatgtca

SEQ ID NO: 121449 - DNA, 203 bp, Glycine max
  unsure (1)..(203): unsure at all n locations
tggtcataacttctcacctagatgtccgattatggcgaatcacatatcgagacgctcacaatngaacatcggaagccctcgagaaattctaatggtcataacttttaactcggatgtccgattcaggcgcatcacatatcgagacgctcgataaggaacaacggaagctctcgagaaaataaatggtcaaactntccacactg

SEQ ID NO: 121450 - DNA, 212 bp, Glycine max
agagtaaccttaaaacggaacaactgagttttttaaagagccaacataatgaatagacatgctgtaagtaactggatgaaaaactcacagggaaacgttgcttggggaatatggaacagtaaactattagaagaagccaattaaggcatgatttgacaatacccttgtaattatatccctttgtagctgcaaatcataactgtatgttctat

SEQ ID NO: 121451 - DNA, 369 bp, Glycine max
actgcctagagcagctcacatccacatatatttatattgttgcaggctggagcagctctgtgtaaaagactaggtgtgtgagaccattatctgactttgtaaacctggccacttttcttctttttctcacagattgctgtcttcatctctcctactcagatctcttactctttcaaacaccacacttgatatggtcaagtagcatgctagaacactgtttctttctcactcccatatataaacaccctggttgatccttttgcagggcccccccttgcccctacctgtggtttaacattatacatactcctctttgctagactgttgaattgcaccactctatcccttgattgtatttgtaaaaaaact

SEQ ID NO: 121452 - DNA, 212 bp, Glycine max
aactagctgctagtgcaagaactgaatattgtggtagtggccgatatagaggggggataattgtggctgctataaattatctgtatgacaattatagttactcagtagagtagacgatgactactagtaacattaaaaccacgaataaggtgggaaaaaacttatttctggtgacccggctctcgccagcactggctggatttactgaacct

SEQ ID NO: 121453 - DNA, 117 bp, Glycine max
  unsure (1)..(117): unsure at all n locations
cactatccatgttcacatattatngcagcttgtgggtacgtgagcctgaactactagcaatatatagatgttgtttatcaaatgagcacatcttataagcttactccccacaatggt

SEQ ID NO: 121454 - DNA, 291 bp, Glycine max
actcgaatgtcgcacttctgagcttgtttctaagcttgcgatgattttcgaccgcacctcacgtgtcgcatacttctggagtgctcactcttaactgatcttcttcggctaatttgtgaacttatggacaaaactgatgcatttgccttcggccccatagcatcatgttacttgcttttacggtcagctagatttgtactgattggccaacctcagaagaactctctcgcgctccttgggccaggtatcaggggtgataacactgtctcacgagtgttcccaaagactttc

SEQ ID NO: 121455 - DNA, 364 bp, Glycine max
ctttttactgagaagttctgcctaataatttgtcataatcacaaaccatctttctttttatgagttatttgattagtgtggtgaacaaatactgtgtgggtatgaactctatagttacgcaattttatattttatcaatctagtagtatcgtttagtagatgattagtagtatgttgagttgatttttactaattcatcagtattatagatgaattatattaatattaatagaatttttaaaaaattagtattcgaaatataatgttttaaggttatctcaacttaaggaaaaacatgttttatttaatgataaaatgtctgttaatgatagaaggttaaaaaaaaattaaggggtattctttt

SEQ ID NO: 121456 - DNA, 227 bp, Glycine max
ttgttctgctgtcatttgtaccattaagtttttattataaactgtggtgtcgatgttagaagtagaacacttagcgaagaatgtgtgcataaggatcctgtcaggaactatgtgagtatgccaacaccgagttacttgtaattttgcttatcgatgaacagccttaacttttactaattccttaagatgaaagagctttcacttgcttaactaggcatctaacagaa

SEQ ID NO: 121457 - DNA, 190 bp, Glycine max
aaatataaattacaaacttcaccaatatataaaagtcaattatcttataaatatatctaagtacgatgcactatgacaatattaatgcatggtgtataccagtgtgaatcattttatctgtaaactattcctaccaattaaaagtaggaagaaatatgctgattgctaagctcctaaaatgttcatatta

SEQ ID NO: 121458 - DNA, 176 bp, Glycine max
aaatgctttattttactgagcaaatgactttatgattgtggtgaccacatatgtggtgactacatatccacatcttgtgattattgacatacgcttaaccatctaaaacaagagaatggtacccactctcctgtgacaaccaagactatattacttctttttgtatcacttctttt

SEQ ID NO: 121459 - DNA, 139 bp, Glycine max
tctaagcgctaattcgataagtttttctacactatcaatgacatacttttactcttacgtcaatctcaacatactaaataataataaaagtgtaaagcataaccgcacattatataacaccttcttaaatgccaatgtg

SEQ ID NO: 121460 - DNA, 143 bp, Glycine max
tctgaacactaccacaatacttgtgctgaacgcacgacacataatcatgaaatctccggtcatgggctgcaggactacacctgtactcttgttatctatcatgacgcaccattgccaatgggacgcttgatcacctaaatcta

SEQ ID NO: 121461 - DNA, 91 bp, Glycine max
ttactgttagcaatgatcttaaacaactgataaggaatttagatgtattaatgctgatctttatatctgaagatatctacatgcatatatg

SEQ ID NO: 121462 - DNA, 157 bp, Glycine max
  unsure (1)..(157): unsure at all n locations
ttttccatgctgattcatgtggctgngacgctacaattcctttagctactacgctacccaatacaattgcaagcaaggctgacccacacttttataaacacacatggtccttatgttatttttcactggggcctggctcagtctcatgtggatctct

SEQ ID NO: 121463 - DNA, 327 bp, Glycine max
  unsure (1)..(327): unsure at all n locations
actcagctgcgccgagttcacatcttggtggacactcaanggaacagaatgaacaggtgtctggcggataaaacatagagcgatggccgtgtctcagactgaataactcaaactaccagcacaggggtgagagattcagaaggagtctctatcacaatttgaaaatagagaacttgtcattctaaggtgctagaatcataatgtactgagattgtaatgtattgttcaagtcatcttctattccaattcattgaccgaacttaaataaggctacttactgagcatagctatttaactaatacagaattacataatgcatttctagca

SEQ ID NO: 121464 - DNA, 213 bp, Glycine max
  unsure (1)..(213): unsure at all n locations
tgtgagaatgaaagttgaatgactcgacagttgctctgaacataatggatttcagaagggcctctgtcttactgactaccttcgatgtagttgcattattgtgatattacattgaagaaatatatgcacgtaccactgcttctcatgacgcatgcactcacattgatgtgatntaggctgtctattactatatatgccactctatactggcat

SEQ ID NO: 121465 - DNA, 219 bp, Glycine max
  unsure (1)..(219): unsure at all n locations
tttcacttcggagtggtgctaaagggttgaattcctgaaaatgtttgttgacacaaaattcgtctgtcggacgggatatgttctgcgcnatgttgtgagagctgaagatggctcctgatgctgatgtgggatgaaataagatgctatctgtagtttgttacaatgctgcaggaatattttgccacctgatattgctttcgaccaagtaaaaagatccct

SEQ ID NO: 121466 - DNA, 168 bp, Glycine max
  unsure (1)..(168): unsure at all n locations
atcaattcttatcattataatgtaattaaaacacgacaagnttatgcgcgtccatttctgtctccagcacaagatgatgaaattgacaactttctcgtgctagatgtcanaacaatttgactgtctcaaccacgcaacctttctttcaccagctactatactaactat

SEQ ID NO: 121467 - DNA, 157 bp, Glycine max
  unsure (1)..(157): unsure at all n locations
cgtatatcttattgacgcctattattttaattacgtgacaatatttatgttgtcaatctactttnntagtatcaatacaccttaatatttatttaagatgactcacgtagctcgagtgattttttgtactttgtatactcgggagacatttttcaaa

SEQ ID NO: 121468 - DNA, 60 bp, Glycine max
  unsure (1)..(60): unsure at all n locations
tattctgacananattcacgtataacaagcaagaattcgctgctcttcttatgcattacc

SEQ ID NO: 121469 - DNA, 308 bp, Glycine max
  unsure (1)..(308): unsure at all n locations
ctggacactgattttaccagtatcctttaatnttttatctaccaactattctattccaatataacataccatcctatactattcttagtggaattgagcccagctcaatcacccttttttttttttaacttttgatcctcattgaataaaacctacccaattaagagtttttttgtttgtgcccttacatacatttatttgtgtccttaaatataccaccaattaactttgtgtatatatgtgattgattttatattaaactaattgttaaaaaatacaatattaatttggccatacatgaaaatata

SEQ ID NO: 121470 - DNA, 333 bp, Glycine max
ctcttttgtgtttttcgacgtagaacttacgaattgtacatactgttcttcgtatgcacgacctatgatatgattatccttttggcttcggaagtacgaactacaatgtgcacatgttctttgactcgctgtcaaactacgatggcacatcttcttgactcgctgacgactataatgtcacatgttttttatcgctgtcgactacgatggacaggttttgctcgctgtcaacatacgtgcacatgtgcaactcacgcaacaatgtgtggacaccttggcacagagtacggcctcagagacagcacccactattgaatgaacagacgctaattc

SEQ ID NO: 121471 - DNA, 218 bp, Glycine max
tctagtcaccggcctgcaaatgacggtctgcccctctgacacctactgttgacgtgtattatacatttgccggacacatgcatctccctgaatgatcgtggcttgcgcatactagtagattcatggtcatattatgagctctatgtgtgaatccccaccacgccgtggccgaaagtcatagactgggttcacttggtcggcttgtatctctgggccgt

SEQ ID NO: 121472 - DNA, 83 bp, Glycine max
  unsure (1)..(83): unsure at all n locations
attatatattaagtatcaactattaagtaagtgagatgctatnnggtactcgtattngagacnntgaatatatntttctatct

SEQ ID NO: 121473 - DNA, 73 bp, Glycine max
ccccctctctgctttgtactctgaaatccttctgacgttgtggaggtacttcgtgtgattgaagttatgtcat

SEQ ID NO: 121474 - DNA, 365 bp, Glycine max
ggctactctttgattctgacttggggattttattctttagtacagctcctgccaaaccaggttgatagaaaggagctttagttagtggcccacatgacaggtttcttgagctagaaccagccgtaaataacaggcatggaggagctataggtttaactatatatcctctactagagccttacatgtgattgaatttgtgataaatgacatgcattatgatggtcctgctaccgggatcaacgagttatctgcttagaagactgggtttatactatgtgctaagcgcttacggtctaaagatgtcactagatgccagagtttgacaggagtgtgtagaactctcttcggctgcactaattttgaac

SEQ ID NO: 121475 - DNA, 130 bp, Glycine max
cttcaatttgctccagaatggccagactgctaagagcagaagacagcgcgagaaagtcgtcgaatacagcacgttagacctgcaccacccttaacataggagatttcgacacctcactaggcacagatct

SEQ ID NO: 121476 - DNA, 82 bp, Glycine max
aacggatcagtgtaatgacgtaagtgagaatctattgaatgcttttgactataaaacttgctggcagaagaaacaatgacaa

SEQ ID NO: 121477 - DNA, 217 bp, Glycine max
  unsure (1)..(217): unsure at all n locations
tctcagagcttcagttntcaatttcgagcgtctcgatatactgcnggacacaatcggacatccgagtcaaaagttattggcgggtggaattgctcagagcttctgtttcaatatcgagcgtctcgatatattatggggctctatctgacatccgagttaaaaagtattgtcgttcgattttctagagcttccttttaattacagcgttcatatacta

SEQ ID NO: 121478 - DNA, 348 bp, Glycine max
ctgctgccccaaacatatagccgatacattttatattacgatatattgttgaccctataattaatatggaaactatattacatgaaatgaagatatattcaataactttttactggaatatatggatgagacactctttatttatatgtagttttaaatattttcactattatagctaggtgtcactatctaaatatctaatagaaatattataacactataacaacaagaaactccttatttctacgctacaaagaaaatggcaaaattatttaattaagactatatatttcctaacttgaataagatgctcaaccaagtgtgaaaaaattaaaaattattatatgt

SEQ ID NO: 121479 - DNA, 232 bp, Glycine max
  unsure (1)..(232): unsure at all n locations
accctctaaccttggaagcgttgctcatgggagaccctgtgaaaccaagccaagcgactcgatatggtacttgcattgagagnagattaagtatccaccttatatgtgcataactttgtacaaccacctgacctacttaaaatcatccgntctctatttgcaccatgcaacatggccacattgcgaggacgtcagatgcttagggggggcgattttactatattacttctat

SEQ ID NO: 121480 - DNA, 312 bp, Glycine max
  unsure (1)..(312): unsure at all n locations
tattagactcgatattctacttcactatgttaggctgattcttctactactatatgccatatgcttaaatagatttttaagtattatgtttttctgaaaatanatgcaaattatgtataaatttaaaatctgctcacaaattaatgcgtatttttttcaacaagtggacttaatcttgctaatttatatattgtaagagaaatcattttcattccttattttaaaacggcgagtggttactcctttgccaaaaaaaaccttatttaaactaacataaatctgcgattaattactatagtttaaaatttttta

SEQ ID NO: 121481 - DNA, 113 bp, Glycine max
ctgctgctcaaatgagatgtttattatcctttaaaacaaatgagtccgcgtttttaaagtatgagttgacgagaactcacttaatagggcacttactctataggtagttcgtc

SEQ ID NO: 121482 - DNA, 156 bp, Glycine max
ttatcatggatctatttaatctattatagattaatattattataaatgaaattataattaattacaccataattaccctaattctcaaattatatacgtattgctaaagaagagtataattgtacgctttgtacatattatttataactttcttta

SEQ ID NO: 121483 - DNA, 243 bp, Glycine max
tatatataaccgtggaaatgtaatgttatagctaacaatgacgtaaaaaagatgacgtagggcataatagtaaacgtatgatttttctataatgaaacgatgacagaaacttctctgccaaattttaaatggattattgaacgtgcacaggaaatatcgtttcttactcccccaataactctctatttgttaaaaaaatcaaatttatattgatctgatgtataggtatatcccagaattttc

SEQ ID NO: 121484 - DNA, 181 bp, Glycine max
cttgggtatctatgagaactctgaccatactaaaagcttgtgcggatctgtgtgtctgtatgtaaaattaagaaatgaagaatgtgctggttattctcatacaaacactagaatttaggaacatgtcatatgttgctgaaattatgggttggtgttcctgactggttgttgttcaaaagga

SEQ ID NO: 121485 - DNA, 80 bp, Glycine max
tagctctcaagcgctcgttatactctgactggccatgtcatagacattgctcatcatgatctactttagcgcacatgtga

SEQ ID NO: 121486 - DNA, 163 bp, Glycine max
gcataagtgacgttataaaggtaaaactatttatttaaaaaaataaatttaccctcaaagatcgctctaacagcacctatctctatacatatgagcataagaatgtatatccatatatactcatacacacagatgattcttcatgctctcactcccatgtact

SEQ ID NO: 121487 - DNA, 191 bp, Glycine max
acaataagcgctgtggtttagacaatgctctgagagcatgtattgacactataaaacggcacgcgcctgagtcgtgcgacgaccactttgactgcccatctctcactaagtgggaggccctggcgtgacctccggacaccacgtaccttgtgtgcaaatacactgctgagaagcgcctgcttcgctgaaac

SEQ ID NO: 121488 - DNA, 261 bp, Glycine max
tatcatgaaaaaaaaatttttttcgacgcaactattttaaaatttcatccgtaagtgacatccggggcattcaattcgtacgtgactatttgcgggattcaaaaagtatgaactcttcctagttaatttgcggggaaagctactgtaattcagcacgtcaacaatgtctaagagttgaaaggtgaaatgaaacctcgttcccagcaatcttttttattttaaactttcgtataattttaatttttccacttatactttttc

SEQ ID NO: 121489 - DNA, 400 bp, Glycine max
  unsure (1)..(400): unsure at all n locations
gctgtcagactaccgtgaatcagacatagacatagacgcatacgtgacttcaatctacgaacgtcgaacttcgagccccgctaatttttacgaacatgttcaagcaatcnaagagaagaaggccaaggggctgaccctatcttctcacttctccctattatacaaataggagtgttgcgccagtctccagcacctgttcttctcagagcacagctttgagaattctgaggcccatggctggtgattgacccctcttatagccccccttgtgtttgggattttttgaattcggactcaatccacatctgtgttgcatttcgaccgcgtcgataacctttctcgagtcgactcttttcaccctcttttcggtcgactcgtgctattttgtttgttcgattca

SEQ ID NO: 121490 - DNA, 125 bp, Glycine max
tataatacctacttcaccaatatattaaaagtcaattatcttataaatgatatctcaagtctgatgtcctatgcagcaatattaactgcatggtgtaataccatggctgaatcaattttatgctg

SEQ ID NO: 121491 - DNA, 256 bp, Glycine max
gctgtaagcttataatagctatgccaacagtgtttacactgattacaaacctggactgcactatgcatggcaccaccactctttgttgctgtactggtgaccattggctatgctatagatatgcaatgtatctcactgaagaaacactcacaaattcatatatggggataacagcacacggatctaatgagatttatgcttcacaggtctttatcacaagatatgagaccacctgcaccaatacaagacaaatgac

SEQ ID NO: 121492 - DNA, 253 bp, Glycine max
tactatcagcgagtcggcactctgcagtggctcatcgagaaggctgaatcagtacagcctccataaattctttatgccccaccgatcttaaagactctacaatgtatgttctatgataacgcccatagctcagagaaaggctcatactgttgcacctgcctcttagcccagactgtgaaggccttttgaatcttcagactgacccgggcaccttcttgttttatttttcaaaaacctccctttatcctttaaa

SEQ ID NO: 121493 - DNA, 279 bp, Glycine max
gacactttcattgcatgtcattctactctggactgggaactgtgcgagtgttgatagggtcacgctatggacgggtatgatcaaatctactggaatagttcaaacatatcaataaagaactactgattgcaagtcactcctgttgtttctagctgcaagaaatctatcttctatcttctgaccacggggtcagctatttctcttgtcacacacaccgaatttatttctgcacccccccactatgtgtatctctctatacgcatctctctcacattccct

SEQ ID NO: 121494 - DNA, 133 bp, Glycine max
atgctcctgatatctgtaccttggcctgtcttctgttgactctcacctaggaactgttccttctagattgactgatgttggaaaggggttgtatgcactgtgtgcatctcgagattggctctgagcatgttgt

SEQ ID NO: 121495 - DNA, 236 bp, Glycine max
ctgcatgatataccatggacctgaaatcgtctgctgcagaatacacccctcttttatgcagctcgattccattgtctgaactgtgtgtctacactgcttatggtttaaaaatgatccactctctgaattggtagaagctccctagcattgattaataaactaaaagagatgaatgagtcttactatctaaactgatatattatggattgttccattgcgaaaataggacctcacat

SEQ ID NO: 121496 - DNA, 340 bp, Glycine max
  unsure (1)..(340): unsure at all n locations
aattatctatctgtctataagatgatngagtgttagtcattgacaatcaaacaaacaaatcttctgatttatgttagagccaacaatggcttggtcagataaagagtattggttgtaacaagcttgatgtagagcttgagtngataaaccagaagtcacaacaataaatactcgtaacttngtgaagttagtacaacttggtgtgctgccaagaactggacatagtctcggtggttgagatggaccagtataacattattgtgtcttancgctagttatttttcttctactctttaaactgacttanggtttgaatttgatctttgcttttgaaaatctc

SEQ ID NO: 121497 - DNA, 139 bp, Glycine max
ctcaatactcttataatagtataataacatatattagcacaggataaatattattaatccacatgtatttcatatccaagagatgattgatcgaaccttatagagatacataatcttttaaatcctatagatacgaccg

SEQ ID NO: 121498 - DNA, 373 bp, Glycine max
  unsure (1)..(373): unsure at all n locations
aaaactcaatatctactcattaaattannnaaatatanattattttaatctagtattgttaaaaaatatttattagtataatactctcgtttctctctaattgttattaatatatnattttttaataaaaatatttctaatccaaaaataattaataaaaaaaatattatagattgaatcttataaaaataaataaacatttaaatcttataaatagtaccgaatagagtattaaaattaaaatctaaaaagtgatctatatatntatgacattgattgtccttttctcaattgttcctgactatgtaaatngtgttaatatataattttgtgatctacatttaaagatgtgtaatttttaagaaataacaca

SEQ ID NO: 121499 - DNA, 347 bp, Glycine max
  unsure (1)..(347): unsure at all n locations
cccttcaagctggacacttncaatagtacgggtggtttcgtggctgtgtctaccgacataatgaagtacaccagtgtgtatccggacaagcccgaactcaatgtgattntggcggacgagcctgctccttggaagaacttgttatactattttgagatttacgtcaaagacgctgactntaagggcaagatcgccattggcttcactctcgcattatttttaatgaatatagagccatggtcagtgttacacgtactagcttgagtcttaattcatatttaattgttntttattaaaatatgcattaataagtaaaaaacctgaagtaattgaatcttaataatttt

SEQ ID NO: 121500 - DNA, 85 bp, Glycine max
tagtgagtttgcaacctcattgcaatcatgaactctcacctccacttgacgtagctcgctcgaaactggagaatgggacatggat

SEQ ID NO: 121501 - DNA, 321 bp, Glycine max
  unsure (1)..(321): unsure at all n locations
caacgtgcagtatttgtacatgtncaattttaagatctggctgaaatctaattacatgacctgttntgtataaaacttattaatgttgagaggctataaatagacctttaaagaaacctatctctttttttgtttgtttcgctcgtctgtaatattgatgtaaggcaaggtaatatttttctgagttacgcaaggtaattttataacttatcaaacgatttaattttgaaacgtaccacttattgaaatcagttttatcaagtactgagatgaagccagttaacctgtttttccacagatattctataattagtattcatg

SEQ ID NO: 121502 - DNA, 399 bp, Glycine max
  unsure (1)..(399): unsure at all n locations
ttggaaatcttttcatctncgctaaccatcgttaaatttttttacctccgttaatgtttatgatgatgtgacacattaaaaaagacaagttttttccaccttcgttttaacatttatgatgatgtgacacattaaagaagacgtgacacatagtgagagtagaagctatgcacaggataagtatgtgcaaggtatattttatgtcagccgacaatattttggactagatatcagtgaattttcttattntaaattttgattttaaaatttacaaaaaggtaacaattatgttgagaaggtttttctttctaatttgtaataattctttcatctatagtgataaaattattcccgaccaatataacttaataacaagtttgtctatgacaatttaataca

SEQ ID NO: 121503 - DNA, 315 bp, Glycine max
  unsure (1)..(315): unsure at all n locations
gctcagaaggctatccatggctgtatacattgacaagagatcttgagggtcgtgcttaagaagacgaccgagaactatgacaacaagtgtgaagcctatgcaccctgcaagctggacacttacgatagaccaggcggtatcgtggctgtttctaccgacataatgaagaacaccaagagtgaatccgtgacacacctcatactacttgtgatatgacgcggaccatcctgctccgagcagaaactngaggaactataatccaatttactaatcagacgcttactctaagggcgagatatacatcggctagcctct

SEQ ID NO: 121504 - DNA, 402 bp, Glycine max
  unsure (1)..(402): unsure at all n locations
tggccatatattactgtaacacatgatagatttaatggcccatataattagaaaccgtaggttctgttgaacacttttgaaaatcttggctagatgaaagcttttgttcctttnttataaaaagagaagttctgaaactcatcacattgtctaaaaaggccttgaggtggatctaagtgctctgatcattcattagcatattcatgatttggtggcatgctcaccactgtttgtttctttagggaactcaccataactaaaaaagcgcaaaggcacccctataacacccgatccaaaagtaagatggataacaaagagggagtgcaagaacagatgaaggccgacatgtcggccttaanagatcagatggcttctatcacgaaagccatgcctaaaaatcaa

SEQ ID NO: 121505 - DNA, 262 bp, Glycine max
aaatgcttctcacatcctgggtgatataattcgctctacgcttaacataatcatatctgaaccacatgaatcagaatcatctgtttaaatacactgatacacataaagtgctgacttgcattaatcacttcgcatcagagcattaatcgaccctcagacataacaatctcgtgatatacatgccatgttgaattctgaacgctaaacatccagaaatatattccagtttgattctctgaggatccctacgcctgttcattct

SEQ ID NO: 121506 - DNA, 311 bp, Glycine max
actcagccatgagaccaaacaaacaaagaacgtggctcacaatttattttttcatgctaatctagtaaatctggtgcaaaacacaaacgaattatacataaatgcttctcacaacatgggtgataaaattcctcaaacaatgtaacataatcatatcaaaatcaaaggaatcaaaatcataggttcaaaaacacgaaaacacaaagagctctgaatggtatttatcaatccgcatcagagcattaatagaccctcaaacataacaatctcgtgattataatggtaaaggtagaattacaatacactaaata

SEQ ID NO: 121507 - DNA, 335 bp, Glycine max
  unsure (1)..(335): unsure at all n locations
cttagcgggacagcacgtctttttagctcctggagttaaaatggacactaacgacagtaaccatcaggtgaaatttgaatagtgtttcttctaggtaagtatgtatgtgactgaaaatatgccaaaatggcactagtatacaactgtaatgaaaattgcgctgaaaacataagtttttgagttgatttatgattataacattcacctaaccaacttttttgtccttaatgcttactagacgacaaaccaaatgactctctttctctctaatctgttntatacaagtccaaatcacttaattaattcttaataaacaagtaatctgaatataaact

SEQ ID NO: 121508 - DNA, 359 bp, Glycine max
  unsure (1)..(359): unsure at all n locations
gtcttttagatgagactgctggtgtgcttcagatccgacaagagattgcccatgataagcactggtcgcacactgatgagtgagtggcccatataattagagacacgacaacgtatctgtttgtaacacgtattgtagcatgaatggcttgatgaaagctctggatgcttgattataangagaaagaatgtcatgctcgtcacgtgagctcacttagccttgaggcggatctcagggctctgagcattctttatcgcactcatgatgagctggcatgctcaccgccgtgtggttctctanggctctccccatatctctcctggcgccttggctcccgtatgacgcccgatcctccactg

SEQ ID NO: 121509 - DNA, 287 bp, Glycine max
  unsure (1)..(287): unsure at all n locations
gtaaaagctttgatgacctganactcactcaaagaggatctcatacagcttgaagtaagataaccggcccacaagaaaaatatgagcaaacataaggatcattgcttgctgctatgagacaaaaagattattaaagtaggctggatggtggcaatttaagatcgcccaaaccacaaagataaaacccgcaagaacaacatctttagctggcgagcaaacaactaatttgccaacaaccaggataagatccataggagaagcaagattagaaccatgaccagttaagt

SEQ ID NO: 121510 - DNA, 324 bp, Glycine max
actcaacgataatactttcactcgatgtttgacgagcccgtcatacatccagacgctcagaaatggatgttggagctgctgtccaaatccaacgacgatatcttttcactccgatgtctgacaggagtccgtcatatatccagacgctcagaatttggtgttggagctgtgagcgaactcaaacgacaatatacttgtgcttcgatgtctgatggagccccgtgacatatcgagacactcgaatattgatgtgtgaagctctgagagaattcacacgacaataactgtgtactcggatgtctgagtgagcctcgcacatatcga

SEQ ID NO: 121511 - DNA, 353 bp, Glycine max
  unsure (1)..(353): unsure at all n locations
cgtagaatggctagacatgatacatgtcagggtttggtttcgttcaaggataaaagggatgccccacattatttccatgacacaaatgcaaaaatgatgatttggaaattttatgcaaaattggtcatgcatgcacctatgcggatgctcaagtgtcaaattttacggtcatgtgatgctgggctcangataatttcttatttagtcacccaatgttcaaaatgtctttataattggcttatcgatcattggcgtcggaattaaccttccttaggtccctttttaaactttatacggatttaaaagtgagatttttaactgtgttactacatattctctatgcttttttcttt

SEQ ID NO: 121512 - DNA, 424 bp, Glycine max
  unsure (1)..(424): unsure at all n locations
tcatggccttgcaggtgaagacccgcacaaacatttgaaagaatttcacattgtctgctccaccatgaaacccccagatgtccaagaggatcacatatttctgaaggcttttcctcattcattagagggagtggcaaaggactggctgtattaccttgctccaagatccatcagagctgggatgaccttaagagagtattcttagaaaaaattttccctgcttccaggaccacagccatcaggaaggatatctcaggtattagacaactcagtggagagagcctgtatgagtactgngagagatttaagaaactatgtgccagttgcccccaccatcagatttcagaacagcttcttctccaatatntttatgaaggactcagtaatatggagagaagtatgatagatgctgccagtggtggag

SEQ ID NO: 121513 - DNA, 299 bp, Glycine max
ccctatatacctgccttctggctgcttgcaacaatggaccagtatgggtcaccacctatcacgagccatcagctaaacacagaccatatgcctgttgggcttggggtaccatccacctatgcgagcttgaagcctgcatgtttatgaggatgcaagcaccaccacgcggccatggttaggagactgggcagttcgtgagataggtgacccccctctagatctgtgactttgatgagaccctgtatcgaggatggccgaggactgcgctcatcgacactactaggaatgtggaatgcgta

SEQ ID NO: 121514 - DNA, 312 bp, Glycine max
  unsure (1)..(312): unsure at all n locations
acaccattcttggtcttgaaagcttgggttaagtttcttgatggccactacaattgcagtccctggttttgttggagtgcatgtgttttgatttgtctatgtaaatttttcctttaagatgctgttgatatctctatgatgatactagttcatacacctgcttgtgcacgatntgaccttgtgcatgtattgattaacaattgattgaaattgtagtttagtacattagaaggattagatattattgttatgcttacaccatctttggttatgaatatctatagggtatcgcttgatacactgctcgcctac

SEQ ID NO: 121515 - DNA, 295 bp, Glycine max
  unsure (1)..(295): unsure at all n locations
ctgtgccacatcactatctacncactccacgtagccttatgactcgtcctctcaacgccgggtccccatcaatccttccaagcttncacaacatccacatagttccacatccaatcatcatgaactaacanaaccaagcanaacagggcanaggcagaanactctgcccaaaacacaacccagagtcacagctnttcacatacaaataccccagtaacattntcttcgttccaattcgttaaccgttggatcgactcgaaaattttactggaagtctctagtacataagtctaca

SEQ ID NO: 121516 - DNA, 235 bp, Glycine max
cttgatactcacagctgatgcaataaccactgtctgcccgacttttatgtatttattccagcatgtatatagatggaatttgtgcaacaaacagccaagagccccatatatagttatacatccatcctgcccataaacaagaaaaataggaatctacaggatagaatactctcagttatgacataagtcactaagtggagctagaagactatctacatatctttgatatcagtgt

SEQ ID NO: 121517 - DNA, 316 bp, Glycine max
tgaacggcaggggaggatcttcatgacatatgatgccggcattatgacatgctcgagatgctcagtgactgaaagtgcatattgtgcacagttggacgtgcatgcacctatgcagctgctgatatgaaataatatacggcatgtgaagctaagactcaggataaatttgctgtattgtaggccacccaatggattcaaaatatgtacatgtatcaatgagtgcattcatcctagtccatgcctggcggactgagaaaatacgcacgatgcactctacagagtacacacatctctttagaacactaagccatgatca

SEQ ID NO: 121518 - DNA, 274 bp, Glycine max
gtcacttataaagcttgcctcgacgctgatacctgtcacatccataactggatgaccttaaaagtatttcgaaaaagttcttgctcgctaccacatacgttgagcgaattctgtatatacactcatgaacaagcctgttgagtactgtgagagataaagaaactatgtgccaggtgccctcaccatcagatttcagaacagcttcttctccaatattttcatgatagactcagtattatggagagaagtatgatagattcttgccatcggtgga

SEQ ID NO: 121519 - DNA, 171 bp, Glycine max
  unsure (1)..(171): unsure at all n locations
cgttacaaggagtggtctaagactggttgcattacctggctacaatatccatcatagctgggatgaccttacgagagtattaccagcaaaagctattcctgcttgcagtggctcagacttccggaaggatgtctggaggcttanacaactctctggacagagcctgctaga

SEQ ID NO: 121520 - DNA, 291 bp, Glycine max
acattaacaatgtccatttaacaatgatgctttacacgtatatatatcccgaatctagcatgacgcgcacagctgtggaacggagaggacgtgcctttattgtattattactattacacgcttatataattacacgcgtctgtgagacatatatcgctctaccggggatacttctctgaaaccattaagaatatctggtgatcatgtggccgcatcatcatcagagaatccaatctcactgattatacgcgagaccttgtcgtcctggttcacgccttagggctacatcac

SEQ ID NO: 121521 - DNA, 298 bp, Glycine max
  unsure (1)..(298): unsure at all n locations
atcatttntaatgtttatntaacaattattcttttcatgttaaaatatcaagaatcacgcatgacgcgcacaacgcaagagcggggatgaccttctgtaaatcttattagtaagattacacgtgtataagattacacgctatttgtcatcaaatntccctctcccgtgtcttcttctctaaaaccaaaaaccctaacttctgaacctttcaccgcatcgccatcgattcccaatctccactaatcaaaggcgagcccctgtcatccaattacacaccttatttgctcntactctaact

SEQ ID NO: 121522 - DNA, 242 bp, Glycine max
acatatattgcaagctcccaacgaccacgatcttatgagtgtgctgcagtgaggacatatgtgccgaataaccgtgcatgttgagcaatgagagaaaaagggttagcacaatttcacacaattacaattaccctgtgttgatgcatgcatactgatttttataggttcaatgctaaataaaatcctacattgaaaacgtttttaaatcaattacaaagttcaatgctaataaaatcctgaat

SEQ ID NO: 121523 - DNA, 157 bp, Glycine max
ataatactcgccctcacattctaaatcctctaggagttggtgagaaccctacttacctactttttcgctgataggattctttttgctctcttacttattgactgccaaatatgatgttgagtatgacttatggctctgagcaggtgtatggaggggg

SEQ ID NO: 121524 - DNA, 410 bp, Glycine max
  unsure (1)..(410): unsure at all n locations
agctgctggtgtgcttcagatccgacaggtagattgcccatgataagcactggtcgcatcctgatgagtgagtggtccatataattagagacacgcaacgatctgttgaaacacgattgtagcatgaatggcttgatgaatgctctggatgcttgattataangataaagaatgtgatgctcgtctcgtagtctcacttagccttgaggcggacctcagggctctgagcattcttcatcgtacccatgatgagctggcttgctcaccgccgtgtggatctctaaggctctccccatatctctcctggcgccttggctcccgtattacgcccgatcctccagtgggatgcgtggctaagacggagtgcgccaacatatgaaggactacatgtcagngttaatatatcacat

SEQ ID NO: 121525 - DNA, 342 bp, Glycine max
  unsure (1)..(342): unsure at all n locations
actgtcaacacatgatagatttaatggcccatataattagaaaccgttaggttctgttgtaacacttttgtaaaatcttggctagatgaaagcttttgttcctttnttataaaaagagaagttctgaaactcatcacattgtctaaaaaggccttgaggtggatctaagtgctctgatcattcattagcatattcatgatttggtggcatgctcaccactgtttgtttctttagggaactcaccataactaanaaagcgcaaaggcacccctataacacccgatccaaaagtaagatggataacacagagggagtgcaagaacagatgaaggccgacatgtc

SEQ ID NO: 121526 - DNA, 231 bp, Glycine max
  unsure (1)..(231): unsure at all n locations
tgatcgatgcatatggcttcaggacttatgattaggaagatttgaataacttagtatatatagtctttgtgtaccaatttatatctaggttcattgtctgcatttcaactaaataaatcatgagattaattaatgattttttaatacaaagtataanatntaactaattaaaggaaacgactaacatcattntaatcataattataaaatataataaatatttaattttga

SEQ ID NO: 121527 - DNA, 203 bp, Glycine max
  unsure (1)..(203): unsure at all n locations
gcgaggatgtgcaatgagactagtctgtgcgttaagtgagttgtccctttaaatntttttcaaaactttttctttacgtttagcatcaattnttttcanaacacttgaaattatcttctnttgaatcctgctggtcacaaaatgtaatgatattaaattcttcattatttcattaaatacaatactaaagaaaaaattataat

SEQ ID NO: 121528 - DNA, 386 bp, Glycine max
  unsure (1)..(386): unsure at all n locations
gtctgcccaggtatttgttgatcacagcaggggagaatctaacacactttcctctgacaaatactttntgatactcatcactctttctgtttgttatgtcagagggaatgttgacaataaattccctgactagactctcatagcagtctcccaacttggtgacagtcttcagcagtccagtagccttgatgaggtccatggtctccttacaatccaaggcatctcttcccaattctctttcaaccgcaagtctgcgttgatacacatatttccacttttcaacattgccaattgagtggaaagagatgttgtccagtggtgcatcaggaacatttccaggcacctttcttncagatttcttggccctcttggatgtcgagacatct

SEQ ID NO: 121529 - DNA, 426 bp, Glycine max
  unsure (1)..(426): unsure at all n locations
cgcttctgaccttctgctacttgacaacaaagcccgttacacacagagacttacattgtcttctgcacctttgtcatcccgaggcggcgagcccgatgacatgcngnggtactgtatgggtatccacacctttnttcatcccgaggcggcaagcccgatgacatgcggnggtatcgtatggttatccngcacctttgttatccagagacgtcaagtctgatgatatgcgacggtaccgtatgngttatcgcacctttgtcatcccgaggcggcaagaccgatgacatgtggnggtaccgtatggttatccgcacctttcgtcaaccggnggcaaacaagcncgttgacgcgcagagactaacgtcatcttctgcaccttccgtcaacctggcaaacaaagcccgttgatgcgtagagacttacgtc

SEQ ID NO: 121530 - DNA, 245 bp, Glycine max
  unsure (1)..(245): unsure at all n locations
cgacctctaatacgagtactctgcctgttactatgactctgacgttcatagttcaccatatttgtggatagagaaagtaaagcaataatctactgnggatctctcatgttatctgctaccgcctacgggaatactcgaacgatcacacttgcttggtgagtaatgctaactgtttgctgaaaacgcccaagtaattcattacatatttacatcacttgacaaggagtctcggatctctgtggttt

SEQ ID NO: 121531 - DNA, 104 bp, Glycine max
atcaaagatcagacaaagtatagaacaagtccacttctctttctgctagctatcatgtccacagaaaggcatatatgtcaatagagattgtaaagccaccatca

SEQ ID NO: 121532 - DNA, 349 bp, Glycine max
  unsure (1)..(349): unsure at all n locations
ctcacaaacatcctacatcatatcgngtgtcctcctccgttgatcaacatttgagcttggaaaatctttatatgntgaacaagatctttgttatcgtcatagccagtgaccatgggaaacaaatatttttgagggatttactccgccacaatcacctttgcaaagggttgaaaatccattgtgggttcaactatgacttctcccttcaatcttcttagtgctgcttaagcaacatccattctcctcctggactcccttgtctgagcatgcaatgatngtttngccctcaaggctctgagggcgactcacctcaagtcctcatgctactccctcattgtttgtcactctt

SEQ ID NO: 121533 - DNA, 239 bp, Glycine max
aaggaaccccttcagaagatatctgaaaactacgccatagatgcatgatagagctggatgaagatagatatgaatgatgggatatggataaaacaactcgagcttgtgagctccttatgagctctgaagatctgaagctcatattttcaatgatccaagttgactagcatgcacacacgtgacctgtatttatgggctaggtgtcgcacaaaattggtgggaaaatggggtttcacttg

SEQ ID NO: 121534 - DNA, 140 bp, Glycine max
tgccatcatcacgctggccacacgctgtttagatctgtgccatcaatcttctctcatcacagctcgcatgccgctcatcctcttgagcttcgactcttgactggagaagattcaactctttaccaacgactctcggtact

SEQ ID NO: 121535 - DNA, 231 bp, Glycine max
tttaaaaaaaaggggtttggtcctacttataccaatttccaactttttaacctttgtggaaaaaattttccggttaaacttttcccgcaaataataaccacgattggatctttctattaatacccctgattaattaagggtattattatcataaaccatttttgatgaaataaaacctattgcttcctttcccataagccaatcttttatattaagatgcacgtatactct

SEQ ID NO: 121536 - DNA, 383 bp, Glycine max
gttcagaacggttgttacccgatattgaatcccaaacagccccatatgtcagaaccatatacagtggtatataccaactttcgctgcattacaaccaacaagatgagtaccacttggtacagaatatccctcctgctcccacaagcagattcttaatgacaaatatgccccctaagacgcccatgagcgccgaccttctttacatgagtgcttccatcacttgaggaattcatcatacaggagcgagtgttacatataaaaagcgtggggtcagacatatggaaatatattgcagaacagaactctctgttcctaccgtgtgaattccaccataagcagaatatcagccacacatgtgagtcgaccatccagtgttacaggtg

SEQ ID NO: 121537 - DNA, 122 bp, Glycine max
ccaattacagtggtatataccaactttcgctgcaaaacaacccacaaaatgaaaaccaagggttcgaatatcctcccccccacaagcgttttatgtaaatctctagagcattagcactttta

SEQ ID NO: 121538 - DNA, 254 bp, Glycine max
tttcatcataacttaaaaaacacccaggcacccctataacactcaatccagaaaaatggataatgaagagggtgtgcaagaacacatgacagccgatctatcggtcttaaaagatcagatggcttccatctcgtaagtcatgttaaaactccagataaccatagaggacaaagccacagcaaccgtctccagtacggttaaggaagcggagctggtgctgcaacccgcattaaatcccggccgagacagaaaca

SEQ ID NO: 121539 - DNA, 117 bp, Glycine max
  unsure (1)..(117): unsure at all n locations
atgttcatggagagtatgatgcacactatgcctaactaatctatgaaatgttctatctatttcangaatcaaagggtgtagtcagatggattgctctagtatacactacattaccat

SEQ ID NO: 121540 - DNA, 281 bp, Glycine max
acttggcttctacgctcctaaaccatcgtcatcatcctcataatcttgcctagcctctttgatctaatgaacatattatgatcaatgcccaaagaaatgcgtgatatatatacttggaagacgagatgccatgcgctttaccaagacactgagactacgaatgagaacatagcccaacagactcgtgagctttttatccataaccatatgatgtgatgatactgactactcgctccagctgatggacactttgctacaccgaaatgctaaaatgatgagga

SEQ ID NO: 121541 - DNA, 447 bp, Glycine max
  unsure (1)..(447): unsure at all n locations
tcttacacccagtgggttattgataggaccaagagctttggcctaccctaccgcttacctagatacctatcgtccaccatcccaccatcatccttgcctatcccctttgatactaaggaagagtttcatgaacaattaaccaaagaaaggcaagaaaaagaaacttggaagaggagatgccaggagctcgagcaagagaatgagactntgaaggggaagatagcccaacagagccgtgagctntntatccagaaccagaggatggttgagaaggacgacttgcttcgtcgganagacgctntgctccaccgagatgctagaaggaagaggaggtttatggatntgttctcccgtgcacattcagattccgaggatccatctactccgggagtttgagtctgaagttcttaggaccttatgtttagatattagctcccgaaatctctt

SEQ ID NO: 121542 - DNA, 385 bp, Glycine max
gagaagactcgtatagaagatagagcttagctacacatctcttataagagctgagcatacgctcaggaaagaatacatgaagaggcgtatgacttactactacatagactagctataatgcctcgagacacaacgctaaagccctatactacgagaatggccataatacaatgtccatacaaatgattaacctattctaatatctacaaatataatagagctcatacttagcccatgagctcgaaatctaccctaatgctgatgagagacctagggctataccttggatgtctaggccaatctaataggagacatttatccaacgccatcgcgggagaggactgtatgagatattttctacgtaacaatgctaatgtgaactatg

SEQ ID NO: 121543 - DNA, 281 bp, Glycine max
gatccacactactccctctacgctacagtgaacattcgttgctaatacagaatttgccttgaaattgagacaaaccgacacaaatgcacaagtcagggctctcacaacacgatgcaaggcctgggccgtaacttacatacatatgggagagtaatgcttctataagctagaagagaggagccgcaacggtagcacatgactcagcagctatcgacgataatcagagagaccgaggaagccccttaactgctgtagagacatacgcattggcccatactgaa

SEQ ID NO: 121544 - DNA, 314 bp, Glycine max
taagtaatagcatagaattccgaagtatatgcagattgtttctgtattctaccagacaactctttgagaaataagcaataggatgcttgttttggcttaacacaacaccaactccactccctgaagcatccgtttctaatataaaaacttcattgaaattaggaatagcccagacaagtgcagaagtcatggctatcttaagttgctggaaagcctgagcagtagcttgaatccatttgacagagtcattcttcaataaatcagttagaggtgctgcaatggtagcacatgacctaacacatctctacaataat

SEQ ID NO: 121545 - DNA, 392 bp, Glycine max
tatgctatatacatgctaggtgggttttcatattattgcttgctccacatgctcagtatgagcatcagacacatgtattattatgcccgctatgaactctgctactccagaaccttatatgactatgttgtgcattcatactacccctcacaaagcacagctggaaacaacccatgcgtaagcacaccactgaattgttttataatgtaacactcgtatgcaatcacatgccttatatgatgtgagacatgcgatatgtaagtacgacattcagccaactccgaagatacgatcagatgatgtctcacaggctggcatgcacggccgcattctacctcgtgcatgatattgttgcctaacatgctgctacaatgttcaaccacagtatgcta

SEQ ID NO: 121546 - DNA, 495 bp, Glycine max
  unsure (1)..(495): unsure at all n locations
nnttaaaagaatgggcatcaatttatntacagtactaataaaatttaaaattatagcttgtcctacatgcaaagtatgaacaacaaacgcatgaattataaggtccgctttgaagtcggcaacttttgtcctttctaaaactatgtcgtgcatttagaaaacaaaacacaaagcacagttgtcagcaacccatgcgtaagcacaccatatctttttttctaatctaacatcttagtattttcacattccttatataatatgttccaagcttcatgtttgaacgacattttgtcagctcctaagtagctatagtatgatgtatcacaggttggcatgcacgggtgcatcctctctcgtgcatgtattgtttgttaatcatgttgctctaatattcaacaacagtatcctataacctcaaacatatccacacaaagggaaggttcctttggacaaactagtaccttagctggtaccactattctcaattccgtacct

SEQ ID NO: 121547 - DNA, 223 bp, Glycine max
cacatacgtatgtgcatgagcttttaacctgatgagagacttgcaaggacgcaaatttactcgagtcgtaggccctgatgtgaacctctatgaaaggactttgcgataacgacatacttttaactagatgttcgttagaggcacgtatatatcgagacgctcgaagttgaaaacggaagttctatggcaaattcaaacgacattaactttttactcggaagtc

SEQ ID NO: 121548 - DNA, 365 bp, Glycine max
  unsure (1)..(365): unsure at all n locations
ctcttctacagaataatcctctaggttactcttcttggctcttcatccgtgattggatcttcaacatattctatatgagaatgccttgcaatangaaaactagaagatgcctcggaagatcgaggttcttcttcaggagttgctgctgcttctaaatcttgcaaaaattttctaattctctttgaatatgccttctataggggcgtaatctccaatcaagggaacaatccctgagtaacttcttgctcagaaaaaacccattatcgccaaaaacagatgacgactaattgacaaaaacatgacaaagaaattaacatgcgaaatgactactttctaactatcctgcacggcctaaacttgtgatt

SEQ ID NO: 121549 - DNA, 420 bp, Glycine max
  unsure (1)..(420): unsure at all n locations
ntctcataagtcctanatgacatttcanactaggattaactcactttaacctccaaataccactaaatccagatttggccttccaactctcaaagactcactctttttccactcataacaccatattctcactttctaaccctaggttaactctacccttcatccctagcagttttccataagcaatttcagcacaccaacatcaaaagcatcaacataaaaaccctaaaactgaataggtaagcttaactcactcaaacataacaagtttagcatgctttcgtcaaatcccttcacaaataactatcacaaagcattaaccaagcaaaactgcccatcatatctcccanagccccatacccacgaaaattaagcgagaaagaagtctacccaaacctganatttcgaggtcccacacgt

SEQ ID NO: 121550 - DNA, 57 bp, Glycine max
cccccagtcgcgcttatcttatgctgaccttacttaaagcatggcccatagccacca

SEQ ID NO: 121551 - DNA, 387 bp, Glycine max
  unsure (1)..(387): unsure at all n locations
caaaaggcttaacccaaagaaggaaaccggatacgggatgaggggggaaaagaataaccattgaaaacccttgaaagaatgcaaacatttaaatcaagacctgataacaactaaagtttcggtcgtactgagtgagtcgcctgacccaaatgatcatagtatttgttgccgtgattatgagctctttagactcttaacattcccgtcctttccacccttaatcctacgctctacaggatngtagttcctattaaacaaaagtggaaaggatttgataaaatatactcacaataacattgtatgcatggccagcatggcttaatattgcatatccaaatatcagtaaaaatatgctttgtttaaataatttgaatgatgatcttatta

SEQ ID NO: 121552 - DNA, 251 bp, Glycine max
agggggaggcttttattttctcacatcacacaagctgatgtgaccacatatatttgcatagctgctgtaaaaaccacttttcctctgtggcactattcctgcgagatcctctacgtagcttactttatgtgaggatatactctcctgtcttgacctgtccaactaatcaatgctacagattacttactgtctaatgctcttttatacctacgacatctgggcttccagccactgtattcttgcactaatac

SEQ ID NO: 121553 - DNA, 253 bp, Glycine max
  unsure (1)..(253): unsure at all n locations
tggattaaagaatatattctattccttaacctggttggtaaaaaaaacccaccattctacccaccggtggcaatttaataacctgcgtttatagttttacataaaagttagttaaatctgttgaatatactcatcatgtctctcacatgcttgatctgactaatttgctacatagtcctggctcatctcgatcatcatttaatntaaactgacatcgggtgcttcgaaacccatgaaattcttaacataagac

SEQ ID NO: 121554 - DNA, 303 bp, Glycine max
gtaacccatatctgtcacatatgtaataagacatatgattctaactacgtgcgtacgcgctatatagatatgcttaactatggattaatatctagccggattctgagcccctccaacgtaattcacatacccaccgtaaccttgataggagcatgccctgtattgccggccagatgactcctcgacgtgccaaggggatactaaacttatatctcagggcgcttaagtgcgaggcgtgtactgcactaccacattcctatcagctggtgttctatatatacatgtgtgatgcacatatactat

SEQ ID NO: 121555 - DNA, 278 bp, Glycine max
  unsure (1)..(278): unsure at all n locations
aaataaatttaatatcttgatggaatgatnggactctaaaaaanaaacccaaattcacctaaatattagatggaaaatgccctcaattaatggaaataggacgccttgacgtgcaaggcatagattagacttatattctcaagcccattaggccgacgacatctactgatctaccacattnttattngctggggtttatatatatatatatatatatatatatatatatatgaacggcacgtctatttcaagatacaatatcatagctntaagaataa

SEQ ID NO: 121556 - DNA, 163 bp, Glycine max
tatggactatgcagtcattatctcactatacacatactcttgttgtggcacaatgacaattatcatgacatggccctaatggtcgcacggacatagaccccctctctctctactgcagagaggggaactatagatgagttctgccatctcatacttttcgatc

SEQ ID NO: 121557 - DNA, 305 bp, Glycine max
  unsure (1)..(305): unsure at all n locations
tcacacttcacacataaacatgttgtgacacaagcacaaatataaagacatggcccanaaggccaaagggttntagatcccatatctctctattgtcagagatgggaactagaagtgtgttctgccatctcatccttttcgctagaaanntttttgtggccgaaggtcactttagttgtgtaaactaaacataactaatcaattcttcataccagaatacaatctctnttctttgataacatacatngtaacataagaaaatcaaggtagtggatcatcatatatccatgatcccgtaatggtat

SEQ ID NO: 121558 - DNA, 208 bp, Glycine max
ctcacagacgatgtgtcttcctccactgttatgaaatgatcccacgatcccagaatgactaggactatagatactgtatccacataccactcatgttgctaggtgcccattctgaatactcgacggaacatctgaatgctcattctgagtccatacacattgacctatgcgatatggtctcacacggaactcacattccatatgacga

SEQ ID NO: 121559 - DNA, 256 bp, Glycine max
  unsure (1)..(256): unsure at all n locations
atatgattactagaaggaacaaatgaaagctcattttgagtccattcacatngacctatgggatatggtagcaaatggaaatcacattccatatgacgatgagttaaacgaaattcttagaagccaatagatggaggagtaaaaactcaaatttttgctcaactccaacgctcgaaatggtatgttatgcgccctatctgaagaagaacacaccanagtacatagctccaagagtgccaagaaaatgtgggttact

SEQ ID NO: 121560 - DNA, 242 bp, Glycine max
ctatgatgatgtgacgtcctacactttctggatgcaatatggttctgccatcaattaaggggtctccattacctattctgtaacgacctacatggtgttggggatggattgtgaatgcgatcttacctacataggattgtcacactgcttctgcagcagatgacagacatgagagtcatatggggcttttttgtttattctgacctgatgtaccacaactatacctacgtatactggcactg

SEQ ID NO: 121561 - DNA, 421 bp, Glycine max
  unsure (1)..(421): unsure at all n locations
cgacgcttanagtgatgacaaggattcatctatccatattggtatccaatacctatcagcacccacttacagacacatacatgatttcctaaataacattntaaaaaattgtaatgctaagagctaggatgatatgacatcctacactttatggaaacaatatggtttcaaaaccaatttagggggtctccattacctattcttcaagtttacatggtgttggcatcgattggaaaggacaaacatacatggattgcacatgctcggacgatgacagaggtgagtattgggcttttattatttacttattatgacaaaaactctatctgcatgtgcttggatgactactacgtgtgatatacagataaacatgagtaaatagtgacaggtaactggaaacatttaagtcaattcatgacac

SEQ ID NO: 121562 - DNA, 161 bp, Glycine max
  unsure (1)..(161): unsure at all n locations
atatggcatctggtgagaactcaatcttctaggacgtgaaccgagtcatcacgggacataagcatgatcttgaatgacgagctgaatgcttgtcttanggcgaccagaactatgtcccttctgctaagcgagactgagtggaatatgtggtccatcatcta

SEQ ID NO: 121563 - DNA, 386 bp, Glycine max
tagtcgaagagaagttcaagtccatagccatcaaagtctgaaaagagtatgataaactaagggacgtcaatatggccaccgctgaagccttggaacgagaaaccaataaggcctgataggaagaacacaaccaaagcaaagttttgaggggctttatagggcagcaatagtgagctcaagcttcgaagaggtgaaaggaatcatcactggtcaaaggcatgatcttgaaggacgagctaaaggcttgccttatgtcgaaaagaaatatgtcccaacagttaatcgagactgaagggaatatgtgggccatcatcgatgagtgcaaagagaagctaaatctatcggcgactcacgagcaaatgctagaggatgagtacgccaagata

SEQ ID NO: 121564 - DNA, 120 bp, Glycine max
gcgagctgtgaccaacgctctatcttaccgcgatgcttcctctcatgtacgtctgagtgcgcctataaccgaaaggatgctctcccgcgaatgccctgcgtatctatcaagctacacatg

SEQ ID NO: 121565 - DNA, 423 bp, Glycine max
  unsure (1)..(423): unsure at all n locations
gctttgaccactgttcttccttcccgcgatgcttcttttcatgtccgcctgagtgggcttatagcctaaaccatacttcccacgatttccttgngtatttatcaggctagttatgccgcccgtgtctttgcctaaacccatcccgggttcataaccgttccccaacataactcgggccatcattactgctgcatcggatagacaaggttgcccagagagggagtccacggaggaaatgctgaccacctcaaaagactggaaagcggtttctaacgattcttctgtggcttccacataaggcatagaggatgggcagcttaccaagatgtcttcctcgcctgacacgatgaccaagtgcccttccactatgaatntcaactntnggtggagcgtagagggcacactcccactgagtggatccac

SEQ ID NO: 121566 - DNA, 408 bp, Glycine max
caagcattctatgctcattaacttgcgtacgactgattaattacatattggctgatgctactgaacacgactaatcctttatggatacccatgacacagtggatttggatgcatccggtgaactactatctctttacgatgctgcgggggcccacattgctcacaattctgctatggaagtgacctagcaacatagctatggaactaacgaggcgatctatatgacagttctagaccagcatcagtgcctctgataccattccctgacaattactggacctactaactattattatatctacaacgatccaaagaatctacgaaactaaaatatctgacgctctatgagaaactcatatgcgccaacagacatataacagtcggacggctagcttcatgtatgaaaga

SEQ ID NO: 121567 - DNA, 481 bp, Glycine max
  unsure (1)..(481): unsure at all n locations
tacattaagaagcattccattctcattaactngcatacttcacattaattacatattggctgatcctactgcagaagaagaatccattatggaaacccatgtaacagtagttttggatacatccggtcaactaatatctctttacaagcctggtgggccagttcttgcctacacttctgctatccaggttagtttgcacattgcaatggaactaacgaggtgaaccatatgacagttatagattaacattaatgcatcagtgagcaatttttgaaaattactgtaaatacttttaaaattntaactcaatcctccaaatttaaacgaatataagatatctgaggtcctatgagaccttcatatgccccaactgatattcaaagccggacggcttgcttctgtctgatcgaggttcanatntatntattanaatcatctttcaatgggttaacattgatagtggaaattcaattagtgtaca

SEQ ID NO: 121568 - DNA, 74 bp, Glycine max
cttaatagcgcgtccccttgtgatatggcgacttctttttttagcgcttattcccctgtcccaggatgaaccta

SEQ ID NO: 121569 - DNA, 424 bp, Glycine max
  unsure (1)..(424): unsure at all n locations
atccccaaagatacaccagggagtcaaaaccattaatatcaacagaaaaacaagagtcaaaaccaatcagggatcgaatttatgctactttatgagattttactggggtttcaaagagaaaaataacatccaaaagataagttcaaatgaggtcacgaagggcttcaattgcactcaagtttcccaagccccaataattccaaatgagcagacttatcttccctggcaggcctatttgctagggccttccattaaaaaaggtttgttaagtttagagtgaggagaagagaagatggaaggcggtgttagggttatgatcattgngagtanggagaggagatggaggtttggtcttgtatggttttttggacttgatggttgaggtgggaagagatacgggtggacgtgttgggttctggtcttt

SEQ ID NO: 121570 - DNA, 416 bp, Glycine max
tgtggaggaccctagatatcatgaatgacacgtcgtctatattgtctatgagatcgtgaagaccaagagaaagcttacttcatgtttcattgtccatgtattgcgttaggcaaataatacaataaaccgtcttgtctaagatgacataaccattaataaggacgtatgttatgatgatagattactgaatgttattcgtacttccataacgatgaatataaatgctgaccccttgattctgagtaatatataattcttgtcttcagacttattgcctcaacaacaaaaaataaaatgatagctatttagcttacgtgtacgcataaggcccttcataagaaatgttggaacacctatgcatatgtgaatgtatatcacttaagactcacgccattaatatcatacatgcctcttca

SEQ ID NO: 121571 - DNA, 288 bp, Glycine max
gtcaacaaaggtttgagcactgtatgacttcgcgatgactcgtaagtataagatatgctgatggatccaagaccgtatgagttttgtgagactctctatgccaacagctgatcgggttatgtatggcccttggaaatctcctattccaccttacgtcttttatacatttccatctacatgtgctctaaataatgggtcctgttatcatacagactactgtctgtttgacacccatatcacttcttttgtaccaagagatgcactcatcttcctcctactatataactt

SEQ ID NO: 121572 - DNA, 349 bp, Glycine max
  unsure (1)..(349): unsure at all n locations
cactgtttcaatttcatgatgacttgtaattataagatatgctgatgggtcagaatagagttatttgcttcttgtgatgctctcagtatgcagtcagctgtttgggttttggttgtccattggaaatatcctcttccaccttccgtcttttatacatttccatctacaattccaataaattttgggtcctgttacaatacatttcctgtctgtttgacacaataatcaatccttcagtttcaagagatgctttntctttcctactagtattaacttaaaattgacatatttgagcactggatattatctgatctctttttgtgatgatatgattggctgtacaactttt

SEQ ID NO: 121573 - DNA, 237 bp, Glycine max
tgagtcaaaaaaaatagaacgactcatccgctcgactacctgtatttacgatattcacataaaaaatgcaggtacctcttgctctcctatatacaaaggagtgtgcgccactcgcagcagcagtgtctcaagcacgcttgagatatcagagccaagggcctgggtattgcaccccttttatagacacccccttgtgctttgggatcttctcgtaagtacgaaacttacaattcggac

SEQ ID NO: 121574 - DNA, 155 bp, Glycine max
tcgtatggatataccaattatagtggatgcataggatatttgtgcgtatgttaatttcgttaaagctaatgtattagatctagatattgactatgaattatttgtaaatgacaaagagactgagagacatgatgaggagtattatacctatagtg

SEQ ID NO: 121575 - DNA, 323 bp, Glycine max
atctttacctatatgccgaacacagctcttcgacatctgctgaacactactgaactccacagcttctgtgaacgataacgtgtacatggcctcttacaccgccacatctcacatctccacggcatcacaggcatgatgagccgtctatcctgcagacagtcaccacacacttacggaacctcaccacatgacaattaccactgtcgaataccatcaggcttcatctagactcaaatacatgatccctgctgtccacttgtggctcaggccattgtcttcataatgctgctccaacacattgtatgacacacgcaagccgtgtg

SEQ ID NO: 121576 - DNA, 122 bp, Glycine max
catcatttacactctttcatcatcttcagctgaattttgactcttttttttttttatccgagcttctaagtgttggtttcaacctgaaactggctacatctttatctctctccttgccaaaa

SEQ ID NO: 121577 - DNA, 485 bp, Glycine max
  unsure (1)..(485): unsure at all n locations
tactcaagctctcttagctttcattggtgtantttgatcttctatgtgtgctctatagtgtgggaatgtgctcaaatatgtggggcaattatggtttgttttcttgcttgaatgggttggattgggggtttgtatgggatggccctacgcctataatgcatttttgaacaatgggacatgccacattgtccccgttctcttgctattgatgcctaaacgcgcgcccaccaagtgttcggtgaaatgcctcaatggcattagcgcgtgatttttataacgaaacaacccgtggggcattctggtctacacatattttctacttnttttgggacatgcattcgttcccgaaaaggttagagtaattgccccacatatattctangcctaggaaccaaagttttatgcataagaaacacagaggaggtgcatattgngtaaagttaccctttttggccagcaatcagctatgggccacgctacaataa

SEQ ID NO: 121578 - DNA, 311 bp, Glycine max
  unsure (1)..(311): unsure at all n locations
tgttcgcacatcgttcgtgtgtatgatatccactcgacattgtttgaagtanaggaaaccttcaatcctataacgcaacgtggcggacaaaagtgggcagctaacttgaatggtcattattggcaatgcggaaagtattttgcgcttcactatccatgttcacacattattgcaccaatatatagatgttgttacacaaatgagcacatcttanaagcttactccgcacaatggtggcctctngggaatgaagcggctattcctccttctaatgacgcatggacacttatccctgacccaactacaattcg

SEQ ID NO: 121579 - DNA, 443 bp, Glycine max
  unsure (1)..(443): unsure at all n locations
gcgagacagtggatgctanggattgaaggcaggtgtgtatgaagaatatcgccagagtgagagagagaagtctgagttcttacatattaagccaataaggcatgcttgcccccaacgttatggcattctgattccatctttggacattgagattgtgaaaatgagaatgcccagagattgttanggcattccatcaaacatacaactcccaactgatctggcaaaagaaatagtgagatcaaaatggaacttcctacaactaactaattaaaaccgatgactgtctcttatcattcgcacagaacaaatattgacgagacacactgcctacagatctttacattccttatgtgacagtatactaactatgaaaatgtatccgttaattaatgctttatagatgcgaaatgcaataatataataggaatatgggctttatggtg

SEQ ID NO: 121580 - DNA, 422 bp, Glycine max
  unsure (1)..(422): unsure at all n locations
ctcagctgtctcggagactagaggctagtatttaataatgtgggtatgaaaaattcaccanatggatagagaanaatctaaaatcatacatcttatgcaaataaggcatgctagcccccaacattattggcatttgattccatctttggacattgtgaatttgaaaattagaanacccaaagtttattanggcatttcatcaaacatacaactcccaactgatctggcaaaagaaatagtgagtagaaaatggaacttgcagacaaaaaacaaataaaagaaagatgattttctctttatcattcgcagaanagaaaaattgaggaaacacactgcaaacaaatttttagatttccttatgtgacattatactaactagtgaaaatttagcagttaatttaaagttaatagagatgcagaat

SEQ ID NO: 121581 - DNA, 374 bp, Glycine max
cgtgcaacttttgttatttcatcacctatatctgttatgactgagtgacataacgatcatgtgacctcatattcttactccgacaacttagccttatccttacagaagcacatatccctaattagacgctcgacccttggccttagttatcctcacagggctggtcgctttagtatccacctactcttccgcgggagggccatgcactatttgtttgtgcatgaaccatgcaccgtttacacgcgtgactcccaccactgttcattatgagcttctcttcagaaaaatatgaaatgacgttgtctatgagctgtatatgggaagagaggaatgcgtacttgctctctgctggtgcgatcacttctcgcgccttc

SEQ ID NO: 121582 - DNA, 436 bp, Glycine max
  unsure (1)..(436): unsure at all n locations
gactgtgttttcaagacgttcatgtgacctcattntatcattccgaanagtttgttttttttagagagaagtagttatcaagaataggatgttggacaaatggcctcagttatcttaagaaggggggttgaattaagatacaaagactattccccaattaaaactttcactctctctttntggattaacaatgcacccttaacatgaattactcaaaagacaattcaaaataaacttctttaaagaaaaagataaaatagcaataaataaaagaagtttaagggaagagaggaatgcaaacttgatttatactggttcgatcacttctcgtgccttcgtccagtcctcaagcaacccacttgagattttccactctctttgtaaaactccttttacaaagtctgaaccacacanggacaacccttcccttgtgttc

SEQ ID NO: 121583 - DNA, 154 bp, Glycine max
  unsure (1)..(154): unsure at all n locations
accggctganagcgcaccagcgcaattcgctgactgtcttcgttgagcgatacatgtgaatatccatgcatatctgctgaatactcgcttcccgtcacggtatctagtgctcgaagaccagtgttcaacgttgaggccggggtaactatattga

SEQ ID NO: 121584 - DNA, 188 bp, Glycine max
  unsure (1)..(188): unsure at all n locations
atcatcatggcgaggcatcgttgattgttttcagctgtgcagaacaagcaactgatatttgaaattcaattcaagagaaatggccacacagagaccccttctttcaatggcaataaacgagtcatcgtatgagcatatagcanataacgtgaaggggaatggatgaattgatggataagataattgaa

SEQ ID NO: 121585 - DNA, 142 bp, Glycine max
  unsure (1)..(142): unsure at all n locations
gctgaaaccgatgctgggcatgtcttnaccaacctggtcgcgttccattggttagacgctgacgctggagagcgaggaatgtgcatgtttcctggccgcctttctgacctttgaccttacatgctgtatggtgcagcacctt

SEQ ID NO: 121586 - DNA, 400 bp, Glycine max
  unsure (1)..(400): unsure at all n locations
ctcagcttgtccataaatacttanaaccgtttaagggccaatgccttatacgatcctctntgcattntattggttaaacgtagactttggagagcaaaaaatcaacatgtaaccttgtcgctactttaaaaaaaaacaagagatcattaatggtccaacaccttaatgttcctctcctttcaaaagaatcgaaagatcgtttaaatggtccaacgccttaaaaatgacttttgtttggtaaaaacatatctcggaaaaaagggataaaaataacttaaccaacgttcagttctcaaagaactacgtaggtctgatttccttatgacaattgaggaatacgtangagcaagggaaacaccccttgttgaccacaaaaagataagaaaatacaaaaaacatg

SEQ ID NO: 121587 - DNA, 383 bp, Glycine max
  unsure (1)..(383): unsure at all n locations
catcaattggttgaatgttgaacgttgaaatttgaaattgaagagtattttgacgatctcaggtaatgtctctgtgtgctggcccgcatgcatgtgtatcgagaacaaaggaggcggtcaattttcaacttcgttcaatatttctttattggattggatagtataatatttttattttatttacaactaaattattattattcttatcgctactatatatccatatttctattgtactatctcgttcttaaacgttaaaattgatatatttttaaattntcctaattataaaactcggtttcaaaactatctttatcactaatatgttaatagttcacattnttaaaaatcttaatatataaaataatatttatagagataga

SEQ ID NO: 121588 - DNA, 252 bp, Glycine max
gaaagatggatgagcgccttctgccaacggtcatcttatacagcatgggatggcgctacataatacttcattcttgatatgatgacgagacgattggtgaacttcctgctagtattatctgaccgacctgtcgtagctgaacacatgtcgtgtctgtcgcgatacattggagaataccgcttgcgctaatcccgaaacaccgctgacagtattgccccataggcgtgatggtcttccaactcgatgtaatga

SEQ ID NO: 121589 - DNA, 69 bp, Glycine max
tctttctgtcaccggcgcggttggtacctccctgctatgcttcgtagtacgcaaaaactctctggcctg

SEQ ID NO: 121590 - DNA, 408 bp, Glycine max
  unsure (1)..(408): unsure at all n locations
ttgcaagctgtcttcaagagagagagcgtgttattcggcaggggggccaagtacattggcaagttgatactcggagggttggtcttcctgcacttcangtttgttcaaattgattgcaatggtgcatatcatatatttggaaatgattggctttatttgtttcttccatgtgcattttatgaaattggaatttgagctcattttttcttctaaatcatcatcatttttgttgttagttaattcaaatgacagttaatactgttattagtcagttagttacgtaaatcacttgctgtcattgtgtgtgcaatataaaaggacacatgtacaagtgtaaatcagagtgtgtgtgtctacctgagtattcaataacaaactacatttccttttctcatctatcttttcttc

SEQ ID NO: 121591 - DNA, 81 bp, Glycine max
  unsure (1)..(81): unsure at all n locations
tcttcttgaaaaatatgatggttctcaataaaacaagaaggggggggggggacggctctnctccctcctgactgtcccttt

SEQ ID NO: 121592 - DNA, 168 bp, Glycine max
  unsure (1)..(168): unsure at all n locations
cctaactcgcacagagatctttgcctcctaatccctactcacactaccttcgctcccccgaaattgtcttcgaataggaaatgagcctgaaagagtgagagcatcgagcctcgcaatacccttctggattagcggatntatgtctcgtgcccaacatcgtcatccctc

SEQ ID NO: 121593 - DNA, 304 bp, Glycine max
gttatgatataaatagatcgtgtatttctaaagtgataacagtcgtgacattcacactaaataagataatggtatcttattcactttaacattgttatgttctataaataagtatagataccctagcccctcatacaatatggtgagtggtctggaaacaaagacaatatggatggtaggagaggtgttaacaacaagctggtgatacggatcttgtgctagatgcaccacgattgctaagaacgcactggtctatctgatgattggtgatatcatcgatcataccctatgcacgcccgcgcgg

SEQ ID NO: 121594 - DNA, 362 bp, Glycine max
  unsure (1)..(362): unsure at all n locations
aacaacacctaaaaaatanaataattattttattaaataagtattttttaataaataagtntagataccctagcccctcaaacaataaagttagtggtcggaaaagaaaaccaaaatgtattgttggagagttgtttagtttaggcttgttagacggctcttttgctaaatacaccagatttgctaagtacacctcatctctttgttttctttttttatcatcaattatacccttttaacccccccccccccccttccccctttttttttcttcaacctctctcttccttcacacatgctccattgcatccacttttcgaaaaacatattctgcaaccctcaccatgtaaatttgatgaaac

SEQ ID NO: 121595 - DNA, 340 bp, Glycine max
gacagatcaactcttgtcatgtgtgagcagatatatgtcatgaggacaccacattactattactctgtgatgaagacaacaacgctctatctaccatacccggcctgtgctactcccggatatgaccatacactcctagagatctatgccctgacaaaccagagctctcgcctacatgcatgtgctgttgcctcctactaccaggattgcagcgtctacttagtctccgtggcggggactgtttgagctaattgcgcgcacgacttctacatgatatcccatattccttgatctagtggccgacgaatgaatcacagcaacatctctgtgaatgacttct

SEQ ID NO: 121596 - DNA, 444 bp, Glycine max
  unsure (1)..(444): unsure at all n locations
tggatcccccattgaagatcacttttctcatgtggagcagcttatgtcaggggacgtcccttcctatttatctatgttgaagtcaatttggctctctttagcaaaattggccaaggctctcacagtttttgatttgtcacttctagatttctaggccctgacgaagcagagttctcgcctacatgcatctgctcttgcctccaactccttggattgttgcatctcatttggcaccatgggtttgactatttcagctaattgtgcaaacaactaatacatgatatcccatattcctagatctagttgttgtcgaatgaataacgtagtcatcactgtgaatgtttccttaagtgtactagcaacaataggcattgtagttgaggtaatgccaatngaagtagtaggcaatgtgtctaccactggactcgtcattatggaaacatg

SEQ ID NO: 121597 - DNA, 169 bp, Glycine max
gacttcgatgcctaccgaaagaggggggtgcagaaagatataactaccggctctccctcaatcccaacatatttaatatcattctcatctagagggagctatcccaacatcgcttctccttcatcattaaggatatgaaaatcttctctttcctcacacttgaagctct

SEQ ID NO: 121598 - DNA, 421 bp, Glycine max
  unsure (1)..(421): unsure at all n locations
tgcaagttccataaaacacctcgttcaagactgcnganatatctatcttatgataacaaacaaataattgaatggcgaccaacatattaatggcctgaatttctaatcttctggctcttcctcaatcccaacatatttaatttcattcttatctaanggggtatatcgctcctactcttctccttcatattcaaagttaaataattcgtctctttcctcagacttatagctctcaattctgttcttcataacttgacctctttgctttcctcttctcttacgttgaagtgccctgacttgacctttctgatgctgttggcactccatataaactcacttgaggcttttcttttttgctgtatctcctgatcatcttgtctcactctgacttatacagaccagtacgtgatcgagaaacact

SEQ ID NO: 121599 - DNA, 401 bp, Glycine max
gctgcactttcctcacctcttaactcggcgaaagtaacccagcagagtctttgaccttgcaccatctattatccctgagggagaataccctaacctcgaaaggaccccctcaggcgcatccacaagcgtctgcgtctttctttcaaaatggtgctggcccaagcataccatacattcctgcaccaattcatcaacaactactacctcataaacagtcaacaggtgaggcccctccacaaccttccctcgaagaacttgtgatgcacatgactatgcacaacatgcagcatgagcaagagaccacagcctccatttatagcttaacccatcagatgggacgattagctacccaattgaatcacaactagcccagaatactgacaagctgccttctcaagctg

SEQ ID NO: 121600 - DNA, 390 bp, Glycine max
  unsure (1)..(390): unsure at all n locations
agcagagcaattatgacctttccagcaacagatacaaccctggatggaggaatcaccctaacctcagatggtccagccctcagcaacaacaacagcagcctggtccttcctttcaaaatgctgctggcccaagcagaccatacattccttcaccaatccaacaacaacaacaaccccagaaacagccaacagttgaggcccctccacaaccttccctcgaagaacttgtgaggcaaatgactatgcagaacatgcagttntagcaagagaccagagcctncatntagagcttaaccaatcagatgggacaattagctacccaattgaatcaacaacagtcccagaattctgacaagctgccttctcaagctgccaaatcccaaaatgtag

SEQ ID NO: 121601 - DNA, 451 bp, Glycine max
  unsure (1)..(451): unsure at all n locations
ctcagcttattggatatgggggcacccgtcatatgtggtactatgtggctatcgggcgatggcacanatcaactatcccatttccacaagccaggcataagcacaccatccccagttgctcacctttaaatntagctcacgtgcacgcacgtagccttctcctcgttcctctcagcctgggtccccatcagccccgccaagctttcacaatatccaaacaattcaattccatttgtcatgaaactaccctaaaccaagaggaacagagtggaggcagaaatctttgcacaagattcattcgaattccacagtttttcctactcacatacctcagtaacatcctctttgttccgattcgtaaaccattggatcgccttgagaatttaactgagggttcctaatacataaatctaagttntgaccgttgggatctacaacacgagatatgcta

SEQ ID NO: 121602 - DNA, 354 bp, Glycine max
agctgcaactcagcggaagatatatagtcagactcaaacggacgtgcgacatagagttatcgttgatgaatgaagctcatagcatacgcactccatagcgaccgtctcgatgcattaagggacctaaaatgacatgcgaccaccgcgctatttgtgttcgtacattgaagcatcatcgacaagctacttatagcatgctcatataggaggagacgcacagggaaacatggcttatacgttaatggagggcgcatcctctcacatcttctactttctatttcgatcggtttacatgagtggaagaacaccatcaaacgaccgcattgaaacttatagatgcaggcatcgtataag

SEQ ID NO: 121603 - DNA, 474 bp, Glycine max
  unsure (1)..(474): unsure at all n locations
tcgagcgtctcgatatattatcggactcaatcggacttccgattaaaaagttattgttgtttcaatttgctcaaagcttctggtatcaatttcgagcgtctcgatgtattaagggactcaatcggacatccgagtaaagtgttactgtcgtttgaatttgctacgagtattgattnttaatttcgagcattgttatatattacaagactcagagggaaatctaagtaaaatgttattgcggcttgaattntctcagagcttctattttcaatttcaagcgtctcaaaatattaaggaactcaatcaaacatccgagtcaaaacttattgttgtttgaattggcttcgagcttgattttcaatttcgagtgcctcgatatattacaggactcaatcaaacatccgagtaaagagttattgtcgcttgaatttgctcagagcttatgtttccaatatcgagcagctcgatatatta

SEQ ID NO: 121604 - DNA, 107 bp, Glycine max
gtgcttcctaccgactgaaaccactcgtctgatactgcctacgagaacatctacgctcctactatccactcacatatgatgcccctacacaacctctcctctaccta

SEQ ID NO: 121605 - DNA, 311 bp, Glycine max
  unsure (1)..(311): unsure at all n locations
tgagccttggataagaagcttggagaggatgcttcaatggaggaaaagaaagagggagagaaagagagaggggggagcatgagaatgaaggaagaaaaagggagagaagttgaactctgagttgtgtctcacaagactctcattcatcanagttacaacaagtgctacacatgcttctatttatagactaggtagcttccttgagaagctttcttgagaaaacttccttgagaagcttctntgagaaaaacttcttgagaagctagagcttagctacacacacccgtctcataactaagcttcacctcttg

SEQ ID NO: 121606 - DNA, 158 bp, Glycine max
tgagatccgtgaataaggcaactcaattatctgaacggctgctctgtctgacaccgatcaagaacagatgccattggtcctttaatcttatacacttatcgctcaaggtgggtctactgaggaatgggattcgcaatgccgttattgtttggaaactt

SEQ ID NO: 121607 - DNA, 356 bp, Glycine max
gggggggtgaaataaaatattcccaactaccttccccattaaaaatctatttcactttctattcaagttattaaattcctctaacaatgaacctcttaatattaattcaaataaaaccagttgaatatgaatataaagcaataataaacaaaggagtttaaggaaagagaaagtgcaaactcagatttatactggttcggccacacccttgtgcctacgtccagtccccaagcaacccgcttgagagttccactatcttggtaattccttttacaagttctaaacacacaaggacaatccttcctttgtgtctagaatttcttcacaacaagagatcctcggtctcttaatccctt

SEQ ID NO: 121608 - DNA, 391 bp, Glycine max
  unsure (1)..(391): unsure at all n locations
taaatcatttcccaatatgcatgtgaattaggaagcatcagctagaatcaagccaaggctattgtgcaagcaatcattggggcaaaacacaccaaatgattatgatgatggctcanattctcacaaaggtaaacttatcacttccaaattgagctttcaaaactatcataagcgactnttattttcaaaacaattactcattacttgaacatatcctataattcagagaaaaatatgcanagttgtacaagcaaacagaattgacctaaaatattatactatanacccaacaaaactaacaacattaacaaatttaacacaactaacaaaatgtaaaaaactaacaaaactagcanaaccaaagaacactccttccatacttaaacaacac

SEQ ID NO: 121609 - DNA, 260 bp, Glycine max
  unsure (1)..(260): unsure at all n locations
atccattttgtaagcagagaatagacagtttccacaatttatttgaaagatagacatgttattgagggcttttgtgcaaatacaaagaataatgcagataccatcttgctcctcttagcctcttcatcgctgtcattaccatcatcaccaatagctttcctggaaaagacatggcatttntaaatgtcagtcatcaatacaatatcatatcagagatgatacacaaacaacagttctgacttaaaccttttttgaatgac

SEQ ID NO: 121610 - DNA, 368 bp, Glycine max
actctctagactcacgcgccgcgcgcgcgcgctcttggtgctcataagatcccgcccactaacgcctcttattactagctgtacaggatactataggaccggattgtacaacctccacatgagagctcatccccctctgactttattgcataaaagaaaatcgtctgctgtcttcacgtgcatgaccacctccgaataccagctctctagcttacatggctgctatcactatttaaagcaccactacctgtctgtcggcccctatgataaactgcttctctacttgcaggtgggggcttgcagataatcaaagtgtgctgccttgcttaagaaacttgtcactaatcctcctctcattaatccaattc

SEQ ID NO: 121611 - DNA, 306 bp, Glycine max
  unsure (1)..(306): unsure at all n locations
tcttgcgtagccgctcttggtgctcagaannacccaaaacaaatccctcttattactagctattgtgaattctttaattcctgaatgtcaaccttaaatggtgctcattcccctcttttttttgcaaaagaaataaatgctgcaaaatgataagcctaaaaacattcaaaaacatgtaatcattaaaccactccttttaaccttgtatgttgtctagggggttgaaattttttgttcaaatatatctttttaccatgtttgaaaatgttactgtcttttctttttgagantgaattccttagtttc

SEQ ID NO: 121612 - DNA, 170 bp, Glycine max
ctatctgagatcagttgatagcatctgataaagctgtagcgatctattagcagattaggtggtccacgagccttccttggcttcctgtcagtcttctttttttgcctgatcttcgcacaatacctcactcgactcgagaacccttgccatcatatgccgttgatatacta

SEQ ID NO: 121613 - DNA, 434 bp, Glycine max
  unsure (1)..(434): unsure at all n locations
tttctgagagttatttatggcctggacagagaacaatgtggagtctaatgatggctgtgattaaacattggagatctcanaagagactgttttcaagaagagtccacaatgttgcaaaaagtcctttaaactttgcgacctangaaaggccaatatctgattcagttgatgatctgttaaaagctgttgcgtactattagcaaaatagtaaaaagccaagtcttccttggtttcctggaagtcttaattttttccctgaaatttccacaatgaatcagtctactcangaacagttganaacaaaggaagtgaatatactataaaaagannagaagcgtaacttcgaattcaaataataaattcttggtagaaactttccanagtgaaatagtaagtgattagcagagcacatgcatgttgcatagcataacatt

SEQ ID NO: 121614 - DNA, 261 bp, Glycine max
cgcattcatatgatgcatcgcataagcatctcttcataacattataatggacatatcctgcatttgttcgatatcatattccagcctcacattttgcatggtcatggcatcatcatgcatatgcgttcaacaaactatatggtctgcacaattgcataccatgcgttttcatgtatgctcattcttgcgttttcctctacgaaacaaatacaatgaaaggcgggagcgtgaaacttcacactacattcttaggttcatgtg

SEQ ID NO: 121615 - DNA, 472 bp, Glycine max
  unsure (1)..(472): unsure at all n locations
nnttgctgcanaattccttncttggttggtggtttggttcgtgctaaatgtggtgtttancattgagtgtgtggaaggtgggttatgtggttgatttaaggatggcctttgtggataactgggtggtaggtaaggagaagggttgttactggctaagtaatgacattgttgggttggtgggaaacttggccatatatgaatggcaatcacagcatgggtttcttcctcatcctcaccctctacatttgccccaattttctcattcgtccaagcaagatgattaaattngcctctctccatactcgcttcgatcctttcatcggcgaaaactaaatcatcaaagcttgaaggtgcgtaccccaccatttttcatattaaaacactggtaatgtgtctactattatggtgatcatctctttctccatcattgtacgtgccactagagttgcaagtctctccatctttgggcgta

SEQ ID NO: 121616 - DNA, 82 bp, Glycine max
gctgccgctataggtaactacgcctgtgcaacactagttagcgcgactacccgtccgtctcttatcttcgcagatggactac

SEQ ID NO: 121617 - DNA, 148 bp, Glycine max
  unsure (1)..(148): unsure at all n locations
tgtgctggacatcgaacacgcaacctacgccctttgccaaaccttgttatgcgctgacgaacgggccgaatactncctgcgtagctcgagttccttatcgcaaacaaccaaagactcaccaactgagttcctgtgagactctctcctg

SEQ ID NO: 121618 - DNA, 309 bp, Glycine max
cccacgacgcaccaggttaaggatctctactgtaagccctaggcgaactagcatgtacacttcttcatagagctctctcctgaaaaaagcgttatatactatctatatgtcgctattgccatagatgaatatctgctaaagctagtaaaagacgagcagtgttgagctgcacgactggagagaatgtgtaacgtaatgtcatacttccattagcgtataaccctatgcatctaaacgtgctttgtgccctcctgtgggcccatcaccatgatattagatcatatgaatccaacggcaaccaatatctat

SEQ ID NO: 121619 - DNA, 222 bp, Glycine max
  unsure (1)..(222): unsure at all n locations
ccgacggaaaatggtcaggaatctaatccttcattgcgtataccctttgaactaagcgtgctttgtacctttctatggacccatcaacatgatatttgattttatatatccaacggcaaccaataatagttttgtgaggaggaagaatggtgagagtgcaagtattgttcacttggagagcatgtaactcancctgcattgccttaatccagcagtcatggc

SEQ ID NO: 121620 - DNA, 387 bp, Glycine max
  unsure (1)..(387): unsure at all n locations
tgccacctagctcgcccggcgagctcagctaggttgcttcctctataaggcaccgccttctataggaactttctggaaggcccaagtgggcctggttgctatttgcacccccttgtttactaaatacacccccatgccttttttttgctgattctttttccgtgacggtacggattttacgaatttcgcaacgatactcgttttctttccgtaatgttacagaaccttacggattatgtaatcatcccatttttggcttccggaatgttatggaacttcaagaattgtgcattaatacttccttttgacttccggcatgtcacggaactntacggattgtgcaacaatgctntcttttgtcttccagcatgtcacagaacttcacag

SEQ ID NO: 121621 - DNA, 254 bp, Glycine max
cttgtgcgtttgcgtactatcacaatcaagacccaactcttaccggccatgagtaacgcatggctctcacaatctatctgacacactgactagcactttcatacgtaaaactcagatcatgtacgcattgtcctcatgactgcatgcgtgttcgagacgaaacacctatcaacctcacttggataacttcatacggttgcttgcttcatcctatcataacacatcattgcgatgaaactaaaccctgaatacat

SEQ ID NO: 121622 - DNA, 413 bp, Glycine max
  unsure (1)..(413): unsure at all n locations
cttgtggctaagtggctatntacaatcaaaacatggtcttcatcattctcagattcatgcattcattccataattcatagatttatgcaaaagtcattaccttatgctagtcgtttctctcacaattaagatcaaactcttaccgggttatggttaacgcattccttcacaatcaatctgacaaactgactaacattntcagtcataatcctaatttcatgttctttctcttctaatgactgcatgcttgttcaagacaaaagatctatgaattccacttcactcaattcatacaattgcttcattcaattcaatcaaaaacacaaaattcacatcanaattcanaccactgaataacattcaattcactgttcaatcatgcttttcacaagctacaaacaactacaaacata

SEQ ID NO: 121623 - DNA, 383 bp, Glycine max
  unsure (1)..(383): unsure at all n locations
gaataacagaagctctcgagaaattcgaatggtcataacttttcacaccgatgtcctgatacggcgcataatatgtcgagacgctcgaaattgaacaaccgaagctctcgagaaattgcaatggtcataacttttcacttcgaggaccgattcaggcgcataatatatcgagacgctcgaaattgaacaacggaagctctcgagatattcatatggncataactcttaactcagaggtccgattcaggcgcatcatatatcgagacgctcgaaattgaacatcgaaagctctctagaaatcaaatggtcataactgtatacttggaggtccgatataggcgcatcatatatcgagacggtcgaaattgaacaaccgaagctct

SEQ ID NO: 121624 - DNA, 243 bp, Glycine max
agcttctcaaggaagatttcatttagttagtgatctagggtataaatagaagtatgtgtaaaacttatcataactttgatgaatgtgaaacttatgagacacacttcaaagttcaacttctcttcctctttttctccttcaattttgtgccccccttctctctctctctctctctctctttctctcattctctttctccattgaagcttcctctctaagcttcttatccaagtcactctcttg

SEQ ID NO: 121625 - DNA, 246 bp, Glycine max
agcttgtagaatggctagacatgatacatgtcatggtttggtttggttcaaggataaaagggatgccccacattatttccatgacacaaatgcaaaaatgatgatttggaaacttcatgcaaaactggtcatgcatgcacctatgcagacactcaagtgtcaaatttttatggtcatgtgatgctagggctcaggattcatttcctctattttagtcaacccaatgtttccaaaatatgttctttt

SEQ ID NO: 121626 - DNA, 234 bp, Glycine max
agcttgtcttatgtacaggaaattagcagaattatgaatcttttttgttccatttcaagtcagaaagccaacctatgcaaatctagatcattcttactaccaattgcatgcattcaccctcagggcttgactgaaagtcatgggcttgactcttttccttctgctctactctttcatactccaaattctaactcaagaaccaaatatcaccgctaatgtggatggaccctattt

SEQ ID NO: 121627 - DNA, 237 bp, Glycine max
agcttttgaatttgattaaaaactataaaactgattaaaaaggtaactagcataattttgaaataaggatgaataattaaaaattcaacatgaaaacataactgataatgttacataatactctatctttacatatatatataactcaatctgttaaaaaaaaaacatagtatatataactcaatgacccaaagtaaacttaactgaatcattttaaagaacaaaagaaactaggaa

SEQ ID NO: 121628 - DNA, 243 bp, Glycine max
agcttgttgatctgagtgagaaacatgtgttcattggctatgatgcaagctcaaaaggctacaaattgtacaatccaaacaatggaaagacaattgtgagctgagatgtcgagttctatgaagaaggcacatggaattgggaggagaaagaagacacttatgattttttcccgtattttgaagaaatagatgaataagccttgactccaaatgattcaactccagcactttcaccaactcctt

SEQ ID NO: 121629 - DNA, 235 bp, Glycine max
tcaagcttgtagtcagaacgaaaacaatttctcaccccaaaagaatactacaaataaaaaattgttcttttattattcaggaatatagacaagtaaaacaccttagctaagagtcaagatagtgtaatgaacttcattacccatatccacaagatatatgttatttggaacgcattctgcaagtgtaagaaaatcaattagtcgctaacttttaataattgataaaataaaaaaa

SEQ ID NO: 121630 - DNA, 119 bp, Glycine max
actaagcttcttgcagctactctgtgaaaatttaacatctctgaactgtagagcgtgccccagccgaagactacatattgagaatcctcagccattttgataaataatattaccgccca

SEQ ID NO: 121631 - DNA, 235 bp, Glycine max
tttcaagcttatatactttgaacattttgaacataatagaatgaaagacctactgaatctgataaagtctcctccttttgtggaagttcaaagcatgatcatatactgcaaatttcaggtgtgtataaggactgttttttgtcaactttaaagtacaggatgttttatgatttcttaaactcaactgttattggattgcaatatattcttgcttctaactcaaaacatttgatat

SEQ ID NO: 121632 - DNA, 235 bp, Glycine max
tcttgcttcctgcaacttagcaatttattgtgccttttcctcttccaaattcagtctgtaacaagttaaaataagacaagtttatggtattaaaagttgcatctttaatagcagcgattaacatggcaattaaaattcaagtaagtatatgataatgaagttactctcaaacgtttctcaatttgcaaacgccaagtaaggtcttcaacacgcttttctagtttgaccttagctt

SEQ ID NO: 121633 - DNA, 235 bp, Glycine max
tcaagcttgattagcactgtgtttttactatttaaaatggcttcaccttgtgttatgcagaattggtaaattaatttcacccaattccaaatcccaatggttttaagctataataaacttataaagaaaaaagaaagaaatgcaccatgaacaacagacatcacattctatataagcatggtatttgtaaatcattagatgatttaatttaatttataaatccctgaagaaaaga

SEQ ID NO: 121634 - DNA, 241 bp, Glycine max
tcaagctttattagtatattaagaatgatattattattgttgtaacaatagtttatggcaaaccgaaaaaattattggctgagtcgtggacaatgtcgctttctctaagacgtttcgtggcactgccaaaaaattgtgcaagcagacaatcaaccacgaagtccccaggataaaacagtccagatcattgtataagattccccctgcactgagggaaccttttctagaattacaccctctt

SEQ ID NO: 121635 - DNA, 233 bp, Glycine max
agctttgacaagacaagacacactgctggcttgtacaacaagataaaacagagaaatctattctaaagatacgtataattataacccataattataatactccccttcaagctggagcatataaatcgtatgcaccaagcttggaacatataaactggatcctacgcccccttaaaggtttagtcaaaatatctactggctgatcattacagttaatgaattcagtgacaatc

SEQ ID NO: 121636 - DNA, 225 bp, Glycine max
agcttggtgaagtttgttgaaaaccgtggaaggttcagtctaggttacgagcctatgcatgccaacaagagaagggccgccttagaaaggaaagaaagaggtatagcccatttacaagggcggggaccatagatggagagggcccctatctgtcacattagcaagagctttgtcagcatgggatggatgcatgaggatcaagttgttgtgctagacaaagaaacc

SEQ ID NO: 121637 - DNA, 172 bp, Glycine max
  unsure (1)..(172): unsure at all n locations
atgagaaaataggaaaaaaagcgacataatgagataaaagaagatgacttgattgttcagattatctaagtcacaggtacacgctttttatatngactctgaacttctaaacttttaactcttaaaatctgaactttaaactctgactaactcacccccttaacactctcta

SEQ ID NO: 121638 - DNA, 246 bp, Glycine max
agcttttttacaaagttcaaacaagaaggcatgttgctctcattgttgctttatgcaaaaaaattatttaatcaaatcttctttgaagttgcttagtttggctttgcaaaacccacaacccacataacccgctttgcaaagcctgcaatttaaacatgttatcctttaatgatcctacaattgcatcgttcagaccctaagctaaacaggctagccagcgtccctaagaaaataaaattttaaaaa

SEQ ID NO: 121639 - DNA, 247 bp, Glycine max
agctttgtaattgtacacattgcaaaaaatatcctggacatgcatatataactttctggaaccgcatttaaagttttgaacactgaaacagtgacagtaattcaaaattcacactattggctactgacaaaataattctgtagatgcttatcatgatagagcgctcaggatatgggggtatctttgaaaggtaaaaaattttatgggatccatttttatgcttaaatttttgattgaaaactgtatt

SEQ ID NO: 121640 - DNA, 85 bp, Glycine max
aaaccttttccaaaattaagaaaggtgtaaaacaccaagattttcttaccataatcacaatatttgtttaacaatataaatgggg

SEQ ID NO: 121641 - DNA, 235 bp, Glycine max
agcttctagccaaatggacttaccttgaattaattcctttgatagcccttttgagccttgtttccctttccttgttttgaagctcactacaagccttaagtgaaaaaccatgatattaccatatccttaaggaattttggagctttggaattgttttgggaataagtgtggggggtttttgtttcattggacaacttgttttgttggctatgcttcatgatgtattttgggccat

SEQ ID NO: 121642 - DNA, 236 bp, Glycine max
agctttaagcttcagcctaccactttggaagcatctgtatgaggtacgttttagaacgcgacatgcatccaagttgacctagtttgactgttggtgaaggggagcgaatcttttgctcaacaatgcatttacttgacagtaatacttgcttgatttctttaagattttgattttgagctttgcgtataaaaataaattctactagaaaatttgataccattagattataaattatt

SEQ ID NO: 121643 - DNA, 241 bp, Glycine max
agcttggagatggtgcttcaatggacgaaaagaaagagggagagaaagagagaggagggagcatgaaattgaaggaagaaaaagggagagaagttgaactttgagtggtgtctcacaagactctcattcattaaagttacaacaagtgttacacatgcttctatttacagactaggtagctttcttaagaagctttcttgagaaaactttcttgagaagcttttttgagaaaactttcttg

SEQ ID NO: 121644 - DNA, 285 bp, Glycine max
  unsure (1)..(285): unsure at all n locations
ttttcttttaaatagtaatcagtatccatttgttgtacttgattaactgacaaggtgtaaatgcttcttctaagataatgaaagactctgacactagaggtcagaactaaagaacatgttcaatgaaaagctttgatgacaactcangatggtagaatctctctctacaatctgtttagacatcatattgtttgcaaaatcagacatttcacttgtttgaagaactgttggcaataaatacacggactacactcttttttcaattgtacaagccaactaaggggg

SEQ ID NO: 121645 - DNA, 244 bp, Glycine max
cattgctgcttttgcatattcataatgcatcttttaacagaaggtactccattttaagaattaatgacttgaacttgatcaacattagtaaatgattctaaattaggccaagacgaagaattcccatatgctgggccatagttacagactcacagcacagtccatgaccttttttgaattcagcgaatggtaatggtcttgattgagtgactctacaccaacattctaacctaaaaaccggaag

SEQ ID NO: 121646 - DNA, 242 bp, Glycine max
tcaagcttgtccttggtttagacatgattgatacatgatttgggacttgtaggattcaatttgggcaaaattggatgagggaaagtgtgatttcgaaaatctgcactttatgcagaactttgctgtcaaataggtgcagcaaaattttggctttgtgcagaaaatgttgtgtatttgctggttgtggaaagagtagtacagattgggctctggaagtgttctagcagatcccaacggtcata

SEQ ID NO: 121647 - DNA, 233 bp, Glycine max
tcaagcttgaggttgagggcactcgagaaatattagttatagttatgaaaaattaagaatagctttgtgttcaatttaagagaatacatgcaaaagtatatgttggaagtttatccttttgtgctttcctggatatcactggtagcactgtcatccaacatgtaaacacatttttttgtcttgacacaaaccataactctaattaagttgaaacaaccactcatcagatgatc

SEQ ID NO: 121648 - DNA, 118 bp, Glycine max
atgatagtcctacacacatatagctttatattacatcaaaatatttaactctattttataccataaattaaatcatgtcaaataccgcgcagacacatggtcaacattacgcaattac

SEQ ID NO: 121649 - DNA, 234 bp, Glycine max
tcaagcttttccttcatggtagggattttgatcttgaatcttattaatatctttaagaaagaattgaagcttacttttggagctcaataaataaagttaggtttgtctttatgtcttctccctgcatcactgcatgtatgattctttaagaaatggatggttaacatctgtcttcaattattgaatatgacaatatgtaaaatgggttacgcaaattaaacatcaacatcacta

SEQ ID NO: 121650 - DNA, 238 bp, Glycine max
agcttcaattatggaataacaaaaaatctaaatctatcatggactaaaaggttgaggaagaagatcaccaacttccaacaagatgtcgaatcaatatatgaagcataagagcaatacaaaggttacttggaagaatgtcaacaacatgggttgagtgaaccattgacaatccattttttctttgaaggattgaatcatcaaagtgtgtcaacacaaaactaacaacaaccctaaggct

SEQ ID NO: 121651 - DNA, 353 bp, Glycine max
tactactgctaataaactgtttactgtcttgcagactgggcatgtcttgtgatactcaatttgtctcttgagaattagagcatgacacctgagctagctgaacttatataaccctcctgaaacacactcgatatagacttaacacaatcatcacgtggagatatcaatctgtatggcaatctcatacacacatacacacaacatctcttcaatgtatgtcagcagcatagtctctcatggcgaaacagacaagactgagcctttacttctaagataggagaatacatcaaattgattcacaagacaactcatcagctcaataatggaatgtctatgacaatatccaattcaat

SEQ ID NO: 121652 - DNA, 232 bp, Glycine max
agctttagaccatgaattgcacaagggtgacactcgctgccttgatcccgtgacctcagagcgttacctgtacaaacgacgggatagtcaggacaccatcaagactgatagtggagaactattgactaaaactcaatgtgaccaacccccacccgcgccggacatctatgccttaagcagaacctgtatatatcctaaacatgcaagcttctggaccactgcggaaaaaagg

SEQ ID NO: 121653 - DNA, 204 bp, Glycine max
gtccgggatccttaagcacctgcagctgcagctttggcaagggcttgttctgtattcttgcatgatctctaggatccatgcattaataaagcttctgcaggtccctgatctttaattatttctttggattttgacatctacctgcaaattgatctttattgatagtaaaaaaatactgcttttgaattcaatatgcatcagtga

SEQ ID NO: 121654 - DNA, 164 bp, Glycine max
tagctgacatattatttacaatccgttaaactattatattaagtggggaataattcatgaccctttatggaagttctcgacagtcaataactcactaacaaccactgaatactagtatttgtagggagattttaggaggtttactgctttctcatcaagtgccc

SEQ ID NO: 121655 - DNA, 243 bp, Glycine max
agcttgagcttctcaaataggaaaatccctttctagagccatgtcttcccttcttctccatccctattcttcttccatccccatcaacccctaaagtgtaaatgagccctcattgttgggaacctagcagccaaactcttgtaatgtaattttcccactactatctctttaatgtaatttcaatttttattgttccttttctgtgtttcttattattgattgtggtttgatcatccatactca

SEQ ID NO: 121656 - DNA, 242 bp, Glycine max
agcttttccttcaccacatggggtcttttcctgcaacgaagtccctccctttaaaatgatgagctggtcactttaaatcctaaaaattgtagcactttagtgaaaatttgcttaaaccgaaaatttcaaactcaagcaaattctaaatctctttagctctgcgctctattctatttttgcttaagccaaaactgtttgggcttaagccaaatttactataactttttactttaagctttctc

SEQ ID NO: 121657 - DNA, 111 bp, Glycine max
taaggattggggtagcgggaagagagctgtgtgtaaaggaagcttttataaaaaaacccttccaccgtgtgcgctattttattaaaagtcgtgtacgtttaagattcagcc

SEQ ID NO: 121658 - DNA, 236 bp, Glycine max
agcttcaacaatgacaacatgggagtgagaccacgactgaggagaggaggggtcaggtctatagggtgcgagactgaggagagggaatgaaaatctgtaggacgtgagagtgaaaacaaaaaatgatggccctttacatgatggttttaataaaaccaatgttgagtatctcatttcaacaatggttttgacaaaaaacatctttgaaaagatgttttaaagatgattttctgaaa

SEQ ID NO: 121659 - DNA, 236 bp, Glycine max
agcttccagattggtgtaccatgctacagctgctccggccaagctgtcttgaaagaaatggaccaacaacttttcgtccgcaaaatacgcccccatttttcggcaatacatccggagatgcccttttggacatgtcgtcccttgtacttatcaaagtctggtactttgaacttgggaggaatgacgatattctgtactagacataagtccgctagatcaaagaatgggtaattgcc

SEQ ID NO: 121660 - DNA, 136 bp, Glycine max
tcttttctattctcatcctatcatctatctttccaaactattttctaacaatcacaacacaatttcacaagtaagatacatatacatatacacatacacatcttttatttcttaaacattttatagaactctggag

SEQ ID NO: 121661 - DNA, 377 bp, Glycine max
  unsure (1)..(377): unsure at all n locations
ttatatagtactctgacctcttgaatctggaatctaaaacaactactccacacctctatactagcttactcatgagatgagaagtagagctaactcacacaacgctatatagctaactcactcgtgcaaagtctgaaatcaaaaatcctctcaagatctcaatgccgaatcaggtaatctatcttaatgcaatacagcaanaggaaactattatttcaacaagtgaccactggcatggtaaaattactgattatggacccggctcttgagttaccatcttgagctttcaatctggagatgcttaggcaatgacacgattactgacaatagttgtgtagtgtagcatggttttgatgtgtacataaagtaatttgtca

SEQ ID NO: 121662 - DNA, 75 bp, Glycine max
aaaaagttacgtacggtcatatcaaacttgtatccgtaaattagaagtatcggagggtctataaacgtttgggta

SEQ ID NO: 121663 - DNA, 239 bp, Glycine max
agctttaatacgacaaggcaacagagctttaaaggtaaggcacgagagtgtttcagatttaggcgtgagaactcgagtgcttcttcactcagcaaattcaaaaccatctttaaacttgttcaatctggtgattttcattcaaaccgttgtcgtactatacaatgattttacctaaaatggtcgttaacgcgtccacttatttggtaataacgatttttcgtagaactcgttatttcacg

SEQ ID NO: 121664 - DNA, 232 bp, Glycine max
agcttgtagaatggctagacatgatacatgtcagggcttggtttggttcaaggataaaagggatgccccacattatttccatgacacaaatgcaaaaaatgatgatttggaaattttatgcaaaactggtcatgcatgcgcctatgcggacgctcaagtgtcaaatttttatggtcatgtgatgctagggctcaggattcatttcctctattttaaatcaacccaatgtttc

SEQ ID NO: 121665 - DNA, 243 bp, Glycine max
tcaagcttgcaagggtagtccctcacgcagccaatacgaggtccaactcccgttgtccatttgcaagacaactttttccccagttggtatgatttcatttctttatgtgaggcaatccttttaagtgttgacttttttggaatagttcctacgtgactgtcatcgtcaaagaagttttgctttgtgattgtgttatctagctctgatgcaaaagcttgttctgtttcttgatcacctgttgga

SEQ ID NO: 121666 - DNA, 309 bp, Glycine max
ttgtatcacttcttatctatattatatactgacatgcttttaataacacaatcttctcgcataaaattatagagatcttatatctggttataacacacactaggatgttatgtatgacatattaaaactgtgatagatgactttttatgcttagaaaggttatttatgtgccacacaataatcctacaacgcctcatgtaagcacttcatgaaaatgctgtgtgtggtaattagaaaccgcgattaattatcgttaacgtgcgcaaatatgaacactctatagattctgatatatactacttttattac

SEQ ID NO: 121667 - DNA, 231 bp, Glycine max
agcttgttgttttcttttcctgtgagtgattactgacaaaaccagttttattatacggaaatgagttttggtaagtaagaaggataactcaatcaaatttggaaaactctgaacacagattaattagaagtaatggacacaatggtggtaaaattgaaaaataaatacctaatagttatcacaaagcacactaaaactttaggaaacaaagacagaggaaaaaacaaagct

SEQ ID NO: 121668 - DNA, 224 bp, Glycine max
agcttgtaatcaattacacacatactgtaatcgattaccagaggagattttcagaaaacattctcaacagtcacatctttttgtgtggttcttgaatttctatcaaaggcctatatatatgtgacttgagacacgaatttgacaagagtttttcagaacaaaaaggtcttatcctcttaaaaagtaaaatcgttttatcctcttacaaattgcttggccaaaac

SEQ ID NO: 121669 - DNA, 242 bp, Glycine max
agcttgcatttggaattgcgaaagccccactccatcattaggattagtacctgacatctcaaacaaacaaatcaaacgtaacaagacaattatagttgctgtttgaatacctcacccactcaagtgtatcacacaattatggcttttctctaatgaaacactcttgccttttaccactctaattccccttgagttcttaggcaattcaagagattatggccacaacaaagaacaattcacca

SEQ ID NO: 121670 - DNA, 243 bp, Glycine max
agcttagccctattgctgcattttgcaattcaaaaattagcctcttttcacttgaaaatgcacagatttcatcattaaattcgatggaaatgttctagagacatcattaaccataaaacaagatttatttaccaaatttacttcaaaattaccataaattggggaactatacaagctttggaaaatgatttctatacaaaagttagtcgtataaagcgactaacagtgtgttacattatggca

SEQ ID NO: 121671 - DNA, 238 bp, Glycine max
agcttagcgcaacagccgtgctaagcgcacttccaagaattcaaaaatagtaaaagattggcacttagcgcttcctgccccactaagcccagctcaaaagctcaaattacagaatggatctggggcttagctcaggatagcgcgcttagcgctgctacaatcaaatttttccagagaagaagtggcgcttagcgcatcatccacgctaagcccactgattaagattcaattacattga

SEQ ID NO: 121672 - DNA, 239 bp, Glycine max
agcttatcattcccagggattttgaaaaaaaatacatgctcgaaaaaaacattgtttaaaacaattgggttctaaatcatattcgcattttctaaataaagataactaaggccccttgaggatgccttcaaaaagattagccagacatagtgagactcatacttacaggttaacataggagtaacatctttcttcgtctttgatatccccagaacagaagatgtcggatgagtcttcca

SEQ ID NO: 121673 - DNA, 246 bp, Glycine max
agcttagcgcaacagccgtgctaagcgcacttccaagaattcaaaaatagtaaaagattggcacttagcgcttcctgccccactaagcccagctcaaaagctcaaattacagaatggatctggggcttagctcaggatagcgcgcttagcgctgctacaatcaaatttttccagagaagaagtggcgcttagcgcatcatccacgctaagcccactgattaagattcaattacattgaagatattg

SEQ ID NO: 121674 - DNA, 265 bp, Glycine max
atcttatcttacactacttccaacttccacgttaacactaatgtagctcagccttacggagctatcagggacatcaggcaacattcttgcataactatctgatacatctaaaacggcgtgttctaattacctttcacaataacatcatttcacttcatactaatgtctgatagacaatacttgtttacattaatgaatggaaggaatcctacttgataaattcccccatattatgagtgatatctaataacattcttctctctct

SEQ ID NO: 121675 - DNA, 236 bp, Glycine max
agcttgtcaagacaacgcactcatcctctttttttaggtcctttaacttttgactatatatcgtttgtccaattagtagaatcttgggtgctttgtaaattttgtgaactctctgcttgaaccattttcttttttagttcattttacataaatacaccttataaattatcatcatgcatcatcaatactttaatgtcactaaacaaatctcatctccttattagttactcttcctc

SEQ ID NO: 121676 - DNA, 232 bp, Glycine max
tcaagtttatcttacctatctatctcccaaatgtctttcgctaagactgcatggatagaaacacatgatagttcctaattcacgatgttactctttgtcgcatgggcattaagcaatcactctatgtctagcattgattttattaaaatgttcccacctttgggttatcctcacaagcattctttttcaagccactcacccctactactggtgcaaagaaacccctccaatg

SEQ ID NO: 121677 - DNA, 232 bp, Glycine max
agctttagcttctttaggaatcttcttaaggaagcttctcaaggaggtgggcttagttatcacaggggtgtgtgtagctaagctctagcttctcaaggaagttttctcaaagaagcttctcaaggaagttttctcaaagaagcttctcaaggaagttttctcaagaaagcttcttaaggaagctacctaatctataaatagaagcatgtgtaacacttgttgtaactttgat

SEQ ID NO: 121678 - DNA, 232 bp, Glycine max
agcttgtgggattttgtgataacatttttgccgaagatgttgatgatagaaaaagtactaccggatttgtattttttatgggtgattgtgtttttacatggagttctaagaagaaaggcattgtgacactttctacttgtgaagccgagtatgtagctgcaacttcttgcacatgtcatgccatttggctaagaagattgttggaggaacttcagttgttgcaaaaggaaag

SEQ ID NO: 121679 - DNA, 209 bp, Glycine max
gtgttgcaagtaacttctcaggtaaatgaatctaaattcaacaattgtttaccttgtttacttccattataaaatgtcatagcagtggatagttttgtagataccatctgaatcaactaactttttttattacactggtgtgcagagtactgtcaacaacatattataggcatactgtttttttggcaataacttatatgtgacggata

SEQ ID NO: 121680 - DNA, 179 bp, Glycine max
tagcttgtatagttccccaatttatggttcttttggagtaaactgtgtaaataaatcttgcattatacctaatgctgcccttataacattttcattggatttaatgatgaaatcttcgctcttttcggtgaaaaatcaccctagttttgcatttgcaacaacgttcccccccgctaaac

SEQ ID NO: 121681 - DNA, 230 bp, Glycine max
agcttcatgatgatgaatcaagttgattcaagatgttttgatgataacaaaagatgatgacaaaatgcccaagagaatgatttcaagattgagtcaacaattcaataatcaagagaagtttgatttcaagattcaagaaaagatgaattcaagttccaagagaagaaatcaaaaagacttcacaaaggaagtattgaaaagatttttttttaaaaaaaaaacaaaaatag

SEQ ID NO: 121682 - DNA, 193 bp, Glycine max
tccagtcactcaaacatgacgtgtatcaccacagactcctcagcattcgatacccctcagagacaaacttgatctatgcatattgtgttactccgaagtctaaccctttcatgatacctccactgagcctggggccagcttcttaaagctgctaaacagcacttatgtctatgtgttcaagacgcatgaaaca

SEQ ID NO: 121683 - DNA, 226 bp, Glycine max
agcttctagccaaatgcacttaccttgacttaattcctttgatagcccttttgagccttgtttccctttccttgttttgaagctcactacaagccttaagtgaaaaaccatgatatcatcatatccttaaggaattttggagctttggaattgttttgggaataagtgtgggggtttttgtttcattggataacatgttttgttggccatgcttcatgatatattt

SEQ ID NO: 121684 - DNA, 203 bp, Glycine max
  unsure (1)..(203): unsure at all n locations
tgtaatgataattcttttcctagctatcatcatgatgagagagagttatactccacatccatatatatatctaatattatccgtaaaactataatgaaaatgatatattccaatattttcatataatattttatttgacaattcatatattgagattactgaaanaatatgtctatgtatgttaaaaaatcttatcatatatg

SEQ ID NO: 121685 - DNA, 242 bp, Glycine max
agctttgtgtcttctagatagcaaaagtatttttaaagtgcgtgacgaaatggttgccgcatgtcatcgggcccgccgcctctggatgacaaaaagcacagaagacgatgttagtctctgcgtgctatcaagctttgagtcttatagatagcaaaaaggtgtaggaccaaatggttcccacatgtcatcgggccctgagtattatagatagcaaaaatattttaaaagtgcgggaccaaatg

SEQ ID NO: 121686 - DNA, 240 bp, Glycine max
agcttgaatggagcttacaccatgtggtatctagagcatcttcatctaggtcatgttcttttgcttcctctatgtttttgtttagtcaattcacattaattccttgttattcatcttattctccatgtatatcctccattgtcttgtggtttggtgctgtttagagtagattcaaaaaataaaccgattaaatcttagatctacacttgttcttgcatttcaatggttcaaattttatag

SEQ ID NO: 121687 - DNA, 237 bp, Glycine max
agcttatgactcagtttcttggggattcctaaactatatgatgatgaggatgggattttgtgaaagatggagaaaatggatccatggatgcctttctagtgcaactatatcaattttgatcaatggcagcactactagagaatttgtgcctgagaggggactgaagcaaggagatccccttgcacctttcctatttaatatagcagttaagggactcactaatttgatgaggacagc

SEQ ID NO: 121688 - DNA, 233 bp, Glycine max
agcttatccttttaaccacttcaagaatacttatgatctgcatgacccatcaatctcctgaaatttatccaatctacttgattggatcacccatgccagggcacaatcctgctcaacctggtatctcattcaaagcatggagagaaggtacacttcacccccccccccccgtaaaaaaaaaacaacaaaaaaagggaccatcattgacctctataaataggagtgacctcacc

SEQ ID NO: 121689 - DNA, 310 bp, Glycine max
attaaaaaaggttgttttacccattgaacagaaaagatcagaaatattatgtccgagaaaattacattctataaaccaaccagaatctacataatatgggcccacgtaaatataattattactaaacatcctcaaactcctcactgctaatttttttaaaaatcatgtgtgcatgcacagaagccgctctgagagaaggccaatacgtgaaaagttgatcataaagagtgaagaacaagattttaatacttaccttcaacaaaagtaaacaatttttaagcgttaaaacaagataactctttaaactaaa

SEQ ID NO: 121690 - DNA, 243 bp, Glycine max
agcttatcgcttacagccgtgctaagcgcacttccaagaattcaaaaatagtaaaagattggcacttagcgcttcctgccccactaagcccagctcaaaagctcaaattacagaatggatctggggcttagctcaggatagcgcgcttagcgctgctacaatcaaatttttccagagaagaagtggcgcttagcgcatcatccacgctaagcccactgattaaaattcaattacattgaaaat

SEQ ID NO: 121691 - DNA, 240 bp, Glycine max
tcaagcttaagaaagccacttctatgaagaagaaaggagatggatgctgctgcatgagcagctgtgaatgaggctgcagccaagaaaaaagagaagacataatcagcaacgacagtatcgtggataattcaatagaattagttcttaagtttagttggactagatagtatatgttgttgaaattttggaatgtctactttccctttccatatcgtgattttgtcccttttcgttgatatg

SEQ ID NO: 121692 - DNA, 233 bp, Glycine max
agcttgggaggacagatatagagtgaaattggaggaaatgcgtggagtagagttcaagtggcttcggaaagccctctattctcaggctttcataactttcatattctggagctcccctatatttgtttcggcggtcacttttgctacttccatattgttgggtggtcagctgactgctggtggtgtactttctgctctggctactttcaggatcctgcaagaacctttgagga

SEQ ID NO: 121693 - DNA, 289 bp, Glycine max
tgttggtctttcaaggtatgaggaatgaggttcagttcttgtacatcctaacaaattgaatatggattctttcagaacacctaacattgctagaatgatgaaggttgactgttaactaatagatccttgttaactattgaggttgttgaacccatgagtggtgcattgttggctatttagtttgaatattccctagaaaagacttattcaaagaatcattataattggaaaacaatataatgtgaagtgaagaattaattaaaaatactttaagtatatgaaaaagtaa

SEQ ID NO: 121694 - DNA, 237 bp, Glycine max
tcaagcttatcacatgcctccttagcagatgttgcatcagaaatcttcttaaacgcataatcatctaatgcttgatagataaggaagagagttttcttgtttttctttcttgaatccttaaaagtctcatttttgcttgggataatgaagtctcatcttgcggcccttatagccttttcaaccatttcctaaacatcatgtgctccaagaagggccttcattttgatgctccaattg

SEQ ID NO: 121695 - DNA, 234 bp, Glycine max
agctttgagcaaattgaaatgacaataactttatacacggatgtccggttgagtcccgtaagatatcgagacgctcaaaatttagatccgaagctctgagaaaattgaattgacaataactttatacacggatgtccggttgagtcctgtaatatatcgagacgctgcaaattgaaaacggaagctcgtatgaaattcaaacgacaataactttttactcggatgttcgattga

SEQ ID NO: 121696 - DNA, 111 bp, Glycine max
tcaagcttgcaatgatgatggacgatgtgagtataaaatgtttttgaagaaaagcgggtcttgggtatgggtgggctttcggcccaatctgtttaatgtaaaattgttggg

SEQ ID NO: 121697 - DNA, 300 bp, Glycine max
atcaattttatataggatccgaacacgctacgtgcggtcactgacgccgcttgctgtccatgatgcagacgatctcctctggcggagctagctgagccgtcgcctattcagtccagacgtgtactcacacgccgagaattacatcacctacacgcatgctctctggcatactgtaatagagccgatccggatagctcgctttttcgagacactcagtcaagaagtgtacgccggatcacctccccactatcaccaattactcaccaggcagtttacctatggaaggccaacagcttctga

SEQ ID NO: 121698 - DNA, 228 bp, Glycine max
agcttggtagcttcgttgtcattcaatattctaatcactattgttctagtcgaccaaaacctcacgtatggaatgtgtcttctgctattaatgatacccttacactacgacacattatgaagggtttattcccttctttttatggtacgagagactaactagtcatcgttttagatgtttgattgcatgaatctactaacaaattaatgtcgtcctttcagtaatgca

SEQ ID NO: 121699 - DNA, 228 bp, Glycine max
agcttgcctaattaacctgaaattgagagaaaatgattattaaacacacaaaatgaaaatactaagtatttattacctatacttaacaaaaaatacttataaaactacaaaataaccataaattgggagagtttgatataatgtatacaagttttatacacaaaagttagtcgttttcactaactaacaactaccccaaatttacagttttgcttgtcctcaagcaaa

SEQ ID NO: 121700 - DNA, 240 bp, Glycine max
agcttataagaacaaaattgcctaaatcatttccaaatatgcatgtgaattaggaagcatcaacaagaatcaagccaaggctattgtgcaagcaatcaatggggcaaaacacaccaaaagattatgatgatggatggctcaaattctcagaaaggtaaacttatcactttcaaattgagctttcaaaattatcatgacatgtagaggaaaaagaaggatttcaaatcacaaaatgtcaag

SEQ ID NO: 121701 - DNA, 239 bp, Glycine max
agcttaatagttcaagtgattcattttagaatatttatattcctatcacatagtgtgtctcactcatatccttcatttcaaagttactagagagaaacttttttatcccatgaagaagaccaagaccattagttgcaagcaagatatcatcgacatacaaaataaaaaatataaccttattcccacacttttaaatatatacattgatcaatagtgttttccttaaatccaaaggaaac

SEQ ID NO: 121702 - DNA, 239 bp, Glycine max
agcttctcaagcaagcttccatcaagattctactattcgcattgcatggttatcgaactttggtgcgtacttctactggggcaaccctattctctttggtgtatgagatggaagttgtgctcccttttaaggtagagattccttctttgagaattctagcagaatcagggttgggagaagcagaatgggccagacatgttttgactagttgaatcttatcgagggaaaaagaatggctg

SEQ ID NO: 121703 - DNA, 238 bp, Glycine max
agcttcatcctttgcccccctcttagtttctgggaagacataccgatcaattttgaatttccccaccaactttctgatagaggcccatttaatgcctctacctagccctctaatgttggatgataggatattcatcgaaaaatatttctattccccaactccatagcctctttcctgtccctagacttcatattaacaaagctgggaataccattttcttgtgccgtatcagcagctt

SEQ ID NO: 121704 - DNA, 241 bp, Glycine max
agcttatgggtctgggaaatggatgaggtgacttttttgacatcattaatagttactaggataattattaaggagggttaatttccatatacctattaaatgaccaataaattgcagacacatggcaggcaacatttttcactaacagtcaacatccaatttttgcaccggggacttaaatagtcaatttgaagaaaaaaaaggactttgacactgaattaaaaaaattggaagactgatt

SEQ ID NO: 121705 - DNA, 235 bp, Glycine max
aagctttggatttcctttgttccggaaacctttcttttttcatgtgcacccaaacccaaatctccgggttcgaagacaaccttccttccccctttgggggcttggctaccatagctattatttttcctctcaatttgatctttgactctctcatgaagcttcttcacatagtccgcctttgcttgaccttctttatgcttaaaaacagaaacattaggcataggcaaaagatcaa

SEQ ID NO: 121706 - DNA, 234 bp, Glycine max
agcttgtagaatggctagacatgatacatgtcagggtttggtttggttcaaggataaaagggatgccccacattatttccatgacacaaatgcaaaaatgatgatttggaaattttatgcaaaactggttatgcatgcacctatgcggacgctcaagtgtcaaattttatggtcatgtgatgctagggctcaggattcatttcctctattttaaatcaacccaatgtttccaaa

SEQ ID NO: 121707 - DNA, 235 bp, Glycine max
agctttagccttaggttgtttcatgttgttgcttccattatctctaacaaaccttcccttacaaagatgttcgaacccggcaagtgcaccggatcgcataagtactataaaacggtaagaaccgagtatcgaactcttggggaacttgtgttacttggtaaagctatattcagtgaataagtgtctagtatgaaaagagatgtgtcaactatgcacaggtatgtacacaaactat

SEQ ID NO: 121708 - DNA, 218 bp, Glycine max
ttaacttaagtttactattacacttaatatcctaaatcgtaacccacacctacttctaatttggcaacccaaatattataggggagtacccgaaccacctataagggtctcgacctagttcggcattaatccagtgactccgtagtgtagaaccttgggaaaaattcggtgtttcaaactttgtcggacccctaaacttcgaacaattcttaacaatg

SEQ ID NO: 121709 - DNA, 234 bp, Glycine max
agcttttttccaactttaaaggatagctgattttatattataactctctacggattaaaaaagtctattctaaacagtagaataactttacctgaaattttgaaccacttcacttatttttaaatattccatctccgacctgctggagatacgcattcagggtaaccctcttctttaagataaagcttgatgcctttgatcaaacttattcttgtattgagaatgaatttgctt

SEQ ID NO: 121710 - DNA, 234 bp, Glycine max
tagctttgaacagaataggacaatggtccgaaaaatttctgtccaaaatgaaatacgtgctgccaggccataaggatatccattcatgtgaaacaaaaaatctgtccaacttgctctttacggttctatttagtctataccaagtaaatcttctccctacgcactgggcttcatccacttctagatccgctaaccaattattgaactctgaaatggagttgctgtctgcctccg

SEQ ID NO: 121711 - DNA, 227 bp, Glycine max
agcttaacaaggtgtgttttaggcttgagaagccttggtctacatgcagtcaaccatagtcaaccaatcaaagtaattaagataaaactattttgagcattgataatattagtttatttgtaattaagaattttcatgcttttagttcaaggaaaattttaatatgcattaagaattaatttattgagcataattagtgttgtattcatagaagattcatttaaaac

SEQ ID NO: 121712 - DNA, 225 bp, Glycine max
agcttcaagaaaaggccaaactcttctccaaaatctgatttcaggcttaaattggtggcttttttcgtgctcatgcgcttagcgcaattttgaaccgcttagcgtgaattagtgaatttcggcttagcgcgtgcttttctcgctcagcagatggactaaagcggtgcgcttagaaagatgaccctttgctcagtgaacatgcacaactcatccttcttccagatt

SEQ ID NO: 121713 - DNA, 263 bp, Glycine max
acctatctgtacccgttccaaaatgtaatctggtacgtactctaccagtgtacagagtatgtctctaagatactctaccctactaccgagccctacattctcaagctttcagaatggactgtaccactgtctacagtatcgttcataccgaactattgtctgcttgacttaaacttaactcaggctatctttcgtcactttgctactaaattcaactaaactataatcatgagtttcaatacaaaaaaagacagatctgtggt

SEQ ID NO: 121714 - DNA, 239 bp, Glycine max
agcttggctattagtaagacttcattcttgaattcatttgcaccttgcttagaacttcttgaaagtctctttactgctatttgttgcccatcaggtaatatcccctgaaattaaaccattattcatgtgaaaaacaaaaatatgaaaataacttttctcacatttactcaccttgtaaacttctccaaatccacctttgccaatacagttctcattggagaagttgttagtcgccgctt

SEQ ID NO: 121715 - DNA, 238 bp, Glycine max
agcttgctaatgatgttctctgtatactcatcttgaatatataacatcggagagaactattgtaaaaaagaaaagaatcgaaggagagctacaactccattaacatgtataaatctccgacggacaataaaataaaatgaccttgttgtaaataagaaatgagactccacacgaatcgcatgaatgtctacgtctttggcagccatcatgtaactttcttagctccctgcaatgctct

SEQ ID NO: 121716 - DNA, 241 bp, Glycine max
agctttttctatgaagtgggtttcatcccaatttatatgtttccaagggtcaaaacaaattgttgaagccaaatgcaaaatatatgtaaatcaacattgtaaggttcgtctttttcacaacatgcttcaaaagtctcattcttaccaaaagaaaagcctgcatcaataacatacataaataaagtttaagataagaacagatcatgataaagttgtccatcccatataagaaaataaaaag

SEQ ID NO: 121717 - DNA, 240 bp, Glycine max
agcttggttttgggcaatagcaccccacctgacgtccccaaggtctcctgacccccgcgacatatctccaggtaccactctgtggtcaacgaataaaagcaggaagtttcatccttttacacttcctcatctcaagcttgtaggattatggggtatccatcacatgtggtactaggtggcggtcgggcgatggtgcacaacaagttttccacatccacaaatcgcgcataaatccaccat

SEQ ID NO: 121718 - DNA, 293 bp, Glycine max
atcgtacttcgtaatgatcgacgtcgcggccgaccgtgaatcaagagtaaatattatatcaaaacttttataataacgaaacatcgcgttctttggatctatctatcatgatatactaggaataggtaatcctcctatcagctgccaaaagcttgagtgctttatctactgaaatgaattttagcacctaatgacctataaaatctgcaagaactctgtgatcatggtctgacaccgttgtacccaaattatgcagctactttcttaaaaactatgccctacttcttaaaaac

SEQ ID NO: 121719 - DNA, 241 bp, Glycine max
ggctttttggttaataaataaaatggagatgctacacactttataaagattaactttattttcttaaaagctttacaatgaaagaaatagagagcgaagaaaatagagagaaacataaaatgtgattcgaactcaattttattcacattaatgatttgttggcatcataatattaatataatttcatattaaaaaagataaaggatcaatttattccaagactaactggtaaagaactatt

SEQ ID NO: 121720 - DNA, 262 bp, Glycine max
tcagtgcttcatcttttgttgtgaactatctatgacaccagatattgctccttacaaaaggattggactcgctactactttgcatgacttgaacacttgacaagtatcttgtcagcaggtgtcgcttaactctactcacttattcttcttgacaagtggagactcttaggctggagcgtaccgtgcattattcactcagcacactcgcatatcaacacctgaactctttcgaatgtcacactgtgacgctgtggataaccta

SEQ ID NO: 121721 - DNA, 234 bp, Glycine max
tcaagctttggggctgaggacctatataacagcaccatggtttttagtttagagagtttttggaagaggagaataattctagggtcttagaattctaatttttactgttcatgtgcactgttcacataaaataaaattcattttctacaattttgtttttgcttcaatatgcaatttcgttttctactgattaatggaaggctaattctctagcgttgttttctcttgacgatc

SEQ ID NO: 121722 - DNA, 299 bp, Glycine max
gctaggttcctttttcgaatagtaagggagaccctccttgattcctgaaagattccccaaaggcttgtaaactaaagacttatgagaaaaaaaaaggggggctaatgagagaaagagatgcttatggtccaattttctagtcacggtcctattttttctgtatctaaacttgaaatctgagtctgagtactatccacctttacactccctgactctgaatctgactctaaatctaactactttcccctttctacctctttaactactatcccctttctctcctgatctgatcaaaccct

SEQ ID NO: 121723 - DNA, 232 bp, Glycine max
agcttctagccaaatggacttaccttgacttaattcctttgatagcccttttgagccttgtttccctttccttgttttgaagctcactacaagccttaaatgaaaaaccatgatatcaccatatccttaaggaattttggagctttggaattgttttgggaataagtgtggggggtttttgtttcattggataacttgttttgttggctatgcttcatgatgtattttgggc

SEQ ID NO: 121724 - DNA, 234 bp, Glycine max
agcttggcaaacatagttgacacggaagggatatctcctctagatagaagcataacatcatatgcaaaagccaaatgagatagttgaatacctgcacagttgggatgaaatttaaaattggcatcatccttgaggctgctcatatctctggaaaagtgctccaaacagagcacaaacagataaggggagagaggattcccttgtctaagaccccgctatcctttgaagtgacca

SEQ ID NO: 121725 - DNA, 233 bp, Glycine max
agcttgggcagagcaaatgagaaaaatgagtgacaaatgtgaaagaaaagagccatttttagggtaaattgggtgttgagaggtcaaattttgaataggtggagttttcaccttagaaccagtttgagcaagtctaaatcaatgttatagacttgattgagatgagagtttaccccaaaattacccaattcttatttttcacctttcaaaccttgaaaattcactaaattggt

SEQ ID NO: 121726 - DNA, 230 bp, Glycine max
agctttcgccaaactcatatgggcatagcttttcactcagatgtccgattcaggcgcatagtgtatcaagatgctcgaaattaaacatcaaagtgcaaggcaaattcaaacggtcataacctttgactcggaagttcgattcaggtaaataatatatcaagtcgctcgaaaattaaacaacggaaagtctcaagaaatttaaatggttgtagcttttcacttggatgccc

SEQ ID NO: 121727 - DNA, 223 bp, Glycine max
agctttttgctgcaaaattcctttttgttggtgttttttttttggtttgtgctaaaggtggtgtttgtcattggaagtgtggtaaacagactttgtggtttatttagggatggcctttttggacaactgggcggtgggtaaagagaagggttgagtaatgacattgttgggttggtgggaaacttggccgtacaggaatggcagtcacagcatgggtttctcc

SEQ ID NO: 121728 - DNA, 223 bp, Glycine max
agtttttgcttttcacccagatgacctatttttgcttttgggtacttcccccactttttttgatgctgtggcactgctattgatgtctttagggaattcctctaatgggccttttgagggattatgatgataggtttaacaggatagttcagtcgcatataatttaagctaaattgtttacatatagatgtgggattcgagttcttctggcatatcacatgat

SEQ ID NO: 121729 - DNA, 237 bp, Glycine max
agcttgcctgtccgatgcagcagtaatgatggcccgagttatgtttgggaacggttacgaacccggaatgggtttaggcaaagacaacggcggcataactagcctgataaatgccaaaggaaatcgtgggaagtatggtttaggctataagcccactcaggcggatatgaagagaagcatcgcgggaaggaagagcggtggtcaaagctcgcgttggagacaagaaagtgaaggaag

SEQ ID NO: 121730 - DNA, 233 bp, Glycine max
agcttgcatcttattttccaattcagattgggaatcatcttcctccacttggttgaagcctctcttcataatcctttgttcccctaagttgttataggggttagagcacatatcttcaatgatcttgatggcattaccaaggggttttaacatgaggttatccccacaagcagcatctaaacttgtcctattgtgtgaggacactccaccatagaaaatgtgaactagccttt

SEQ ID NO: 121731 - DNA, 238 bp, Glycine max
agcttgtaaagttatatctccatctaccttgtcttaggttgtaggagagcattgtggttcaaagcaaatttgtcccaaatttgggggagattattgggtgaagataagaatggtaagacaaataacagccacacaaaaaattgtaaagaagcagcaaataaaagcttctaaaataaaataaaataaaaagaaagaagaagaaagttcaagaataaaggttgcgtgggttgttatttga

SEQ ID NO: 121732 - DNA, 241 bp, Glycine max
agcttgtgtaaagttaaaagaaatttttgtaagctttctacttcttgttgtgtgtattgttggatcaagtggcctcgaaataattaaaaagagggggggggtgaattaattattaacgaacctttactaattaaaaatttatccttcttaatgttaccaaaagtaaaagcaataattaaagtgcatagcggaaattaaagagtgtcgggaagaagaagacaaacacaagagttttatactg

SEQ ID NO: 121733 - DNA, 232 bp, Glycine max
agcttgcctcttttgtgacttattgctacaatggcatgtcggcatggcatccctacatcaaagttgtaaaatcagcacacatgtaggttacaaatgaaaaaaagaaaaaatatacagaacacaacctgttagttgccaaactctacaagtgcatgtccattcagctaaattgacctcaactttttccccccacatgtggacctcatatctcacgcccatgttatcactacac

SEQ ID NO: 121734 - DNA, 232 bp, Glycine max
agctttttatccaaggcacattcttggtggtgcctcccctctcctcttctcctttgctttccgctaaaagcaaaatagagagaaaaagcacataggctaaggaataagaatgaggaaaggaaaagtggagccgaggagctgtagagttgtgactgtggatcacatccttcgtcatttctcttgttagtcttgtgctctgtgcaatgatcggttagtttttcttaaggactgg

SEQ ID NO: 121735 - DNA, 224 bp, Glycine max
agcttgtgcaaatcagatcactcctacatttaatttttagcatgcattgtatgttggtctcatgctttgtcacgggaagccggaaggtccatctgaccttcttaattgtacacctggggcactgcgccccccatatgcgcatgtaaaaagaaataattttccaggctatcgagtccgtaaagtgcattcatatcatgcatcgcatctgcatctctttataacat

SEQ ID NO: 121736 - DNA, 53 bp, Glycine max
atctacttggcatctctgtggtgtgctagggtactgtgtgagtcttcgtccag

SEQ ID NO: 121737 - DNA, 236 bp, Glycine max
agcttgtggctcccctctctcattcgacctaaatggactgtgaactcctccatcccattttgcagatttgctctccttagctcgtgttaggtttcaaatgaaatctttaagctacacgaaattttataagttgggtgataaaatttgaaaaatcttaaaagaattggaaacaaaatttgcaatcatgcttttattattttcttttgttattactggatctgggttgagaaattggg

SEQ ID NO: 121738 - DNA, 237 bp, Glycine max
agcttgcaaatcttttgattgaactgagattcaaaaccaggaggtgagtccatgtagacttcctcctctaagtccccatttaaaaagacattctttacgtcaagttgctgtaatgaccaatctaaatttgcagccaatgataagaggactctaatggtgttaagttttgcaacaggagcaaaagtttctgagtaatcaataccataggtttgggtgaagcctttggcaactagcctg

SEQ ID NO: 121739 - DNA, 233 bp, Glycine max
agcttgcagacgtcttctctatcttctgtttctcaagatattataacaaataatgaaaatgcgcaggatacgaagcctacagtgtcaatgctgccccttcgtccagtgaatcctgctcaagcaaatgtgaacattttgaacaatctctctatagcacggcaggtgatgaactctgctgccttaagtggtggaacctctatgggacttccgtcaatgagtcagactcctgttgg

SEQ ID NO: 121740 - DNA, 225 bp, Glycine max
agctttaacaaatctttctttatgggaaatcaaccatatttgtttgacatagtcaacaaacattggccatggtgagcaagcaatttcaaacttcttaaggcactaatcgaactcttgctctgaaggacaatccaccaaactccctcaagtttccatgacataatcccatgcattttttaccaaccaggattttacattttgtcttcacattcttatcaatgtgaa

SEQ ID NO: 121741 - DNA, 229 bp, Glycine max
agctttactgcctcatcattgctgaagaagtcaaataaaccatcactccctactataacaaattgatcggaatttgaaattctatggacattcaatgatggttgcgtggatatgtatggtgggcttttaagatcccgaacctcaaggattcccatcaaagcatcattcaaatttttctgccggagaataaaataagaaaattaaatctatgttcggtacttggtaggac

SEQ ID NO: 121742 - DNA, 415 bp, Glycine max
  unsure (1)..(415): unsure at all n locations
cagcttagagntttcttgtagagaaacaacttcttacttgagttctagggtctaagttacaacccaatattaacctttacgatgcaacanaattcgtcataaaacatacgattagtggtgaatccaggaaatttttctattgtagacaaataaataatttataatattttcataaaaaaagcgttaaatgtttttacaaatatgagaaaaaaatacttagatttctagaaattacaataattctctatatatttcaaatttttaaaaaaaattatgattttttattgtcaacattataaagataatagaatagtaaaatgataaaattattatgaattgattctctcctttatctttataactcttatgttaattcattttaaaatttgtcttatgggttaaaaccaatttttta

SEQ ID NO: 121743 - DNA, 412 bp, Glycine max
agcttggttgaaatgccatgtttgggtgatttatacatacccattctgttttagtgttttgtgatgatgtttgtgatgtttgtatgctgaaattgcccatggaaaactgttagagatgaaatatagagttaacctatggttggaaagtgagaatgtggtgttatgagtggaaaaagagtgaggctttgagagttggaaggctaagtctgaattctgtggtaaatggaggttaaagtgagttaatactagcttgaaatgtcatttaagaattgggagaaagcttggactgtgctagagagaaaaacaaatgatcaaagtgaataaagagccatttctagggcaaaattgggtgttgaagagacaaattttgattcggtggaattttaggtgtaaattcagtttgagcaacgtt

SEQ ID NO: 121744 - DNA, 409 bp, Glycine max
  unsure (1)..(409): unsure at all n locations
agcttgaatcggacatccgtgtgaaaagttatgaccatntgaatttcacgagagcttccgttgttcaatttcgagtgtcactatatgtgatgcgccaaaattggacattcgagtgaaatgttatgaccatttaaatttctcaagagcttccgttgttcaattctgagcgtctcgttatgtgattttcctgaattggacatccgtgtgaaaagttatgaccatttgaatttctcaagagcttgcgtgtttaatttcgagcctctcgacatattatgcgcccgaatcggacatctgtgtgaaacgttatgaccatttgaatttgacgagagcttccggtgttcaatttcgagcgtctctatatgtgatgcgcctgaatcggacattctaggaaaagtatgaccatttgatt

SEQ ID NO: 121745 - DNA, 391 bp, Glycine max
agcttagacttacttctgaagtaattggctcgcccaagtgagctggtttcttcacactgaagtaactagctcgtagagagattttagtttaagtttaatctattaccagttaaccgtaatccattacataattcagttgagaccatgtctggtttttcatgaatttccactttaatcgattaccaagtgatcataatcaattacttcattcttaaaggtgttcctagaagtgatcaagaatagtttaatcgattacatcaagaatctaatcgattacattgttcttgaatgttttccagaagttaggaagaacactttaatcgattgaaatgataatataatcaattacttcttcgaaataatcgattacatttgatatttaatcgattac

SEQ ID NO: 121746 - DNA, 410 bp, Glycine max
  unsure (1)..(410): unsure at all n locations
agcttgngctgcaattaatttgtgatagatatatgttgctaatatatatgtattgggaggctatgatggtggcagaagtctttattgttttgaattagggttttatatgcattaatatatatgttataattgttatctttaccataaaacgcgtaaatcaattgatattgtttcagtttaatcagatttaagtatctttctgtgttagatacttgagagtaactagttaacaaaaattatttttgataaaaaatacatgtgatcgataaaaaaaattcactctatattttatataatcaatttatgatataatgaattatntcttctctatttgtggactctattttgttaagaatggttcacattaaatatgtgtggtcattcttctatatttgtttgttgcctattct

SEQ ID NO: 121747 - DNA, 388 bp, Glycine max
  unsure (1)..(388): unsure at all n locations
agcttatgaagtgaagcatatacgtnaaattgttgtttctattcaaatacctaaagagaacaataatgaggatggctgcaaaaaacctcctttaaataagaatatgaaatcagaaaagataaactaaataattcaagatttagatatgataatcctaatttgtggtcatatcatcactctctccttgactttgagcatgtctttaagctcaaattcagatttgaataataggncttctgcggtcatcctcatggatgtcctctccaagtatatttgaatccaaaacaaccttttacatttatgcttcacatcataagctcattatctcatttgtacacatgcccttaactcttttttaaccattacaccatgttaatttttggtaatt

SEQ ID NO: 121748 - DNA, 319 bp, Glycine max
  unsure (1)..(319): unsure at all n locations
actcgaagcaaagtattggatgaaactgtacgagtccatattctaaaaaacgccctacaagctggngagatatggggggccgacaagcatcctttcaatagaaaatacatctgggggaagacttcatcagaactatgacttacttatttgccatacgcatcacaatgttggtgaggagcagatggttacaaagcctaacccctttcgctctgcctggcgtcagaactgagaacccaatacgggtgctatgaatgagaaagcaatgcttcatgtggctggccctctctttataggcgagtgtggacctgaaaatatatat

SEQ ID NO: 121749 - DNA, 423 bp, Glycine max
atccttaagtcacctgcagctgcagctgagtgggatctaatcaagttttggcaaggtatcctttgggttgacaactaagtgaattctaaagcaatcgatatgacacgcacacatgccaacataagcaactattttttttttctgattaatcagtaaaagggttacaccggtttatataataatatgtttctataacatattaaattgttaataagtaataattgttgaatagtatataaaatacttttataataatttttatattgataacattatacaatagctaattattattattatcttcatcttatatagatataaatatgatttatatttatgtgtttcatataccttcattaaacttgttcatgatcctctagtaacttgtgtcttatgcttccctgcaaaaacaacaaaaatttc

SEQ ID NO: 121750 - DNA, 339 bp, Glycine max
agctttcaatcgtgagccaatgttatgtattgtgtttcaacatcatcactgccgatattccctgtacaaactaaaatcagtcgactgctctgcttaacacatatctccgactaatggcagacaagctttttctatcacctaataagatagtgtctaccatcttttatgaccaatgggaaaggattagcacaacactgatggtgaaaagattgtgttttaaactgaaatcacatttgagacaagaaaataatgaaatagtctgaagcattagccttctactgatgcaaaaccagattaactgcacaattttcaaaaacgatagctatgcatctgttgcaa

SEQ ID NO: 121751 - DNA, 393 bp, Glycine max
  unsure (1)..(393): unsure at all n locations
agcttcttatccaatgcaattcttggtgtgtgatactccttcttccttggcttattccctagtggatggtgcctcccctatcctcttcttctttgccttccgctgcatctccatggtgaaaaatcaccattgaaggacctcattgaagctcaaagatccagcctccatagaagctccacaagcaagcttccatcacctagcatgatcacagattcacctccactccttatgttcccatgaacccgggtatagggtcctttttcaactcacagtgtgtgcaaatagtgttggtgtttgtgtgcatcaaatgaataaatatttacctcatgcatacattttaaaacgcactaaaagccacaaagagtttatattcacaagaacatataanataaa

SEQ ID NO: 121752 - DNA, 387 bp, Glycine max
  unsure (1)..(387): unsure at all n locations
tcagcttggaagttttacaaacttggtgaactttgatcttnacatgaatggccatgtgactgaaagagagaatctttagntggagacagacttttgaaacctcgatccgtcgactcttttcattttaattaattcattttactaagcctggtattataaaaatttaaaactaaaactcttacaagttcaatataaaccttctctagtttactttgaagtggtnatgctctatcattcaacccctttactttcattctcggcctttagtgcatcattttgcttagggaaattcctgcttagatgatattagtcactggattaaaattgcatgccttcaaagatcatatttattactcccgtggctagataaaacaatctcggtgacat

SEQ ID NO: 121753 - DNA, 424 bp, Glycine max
  unsure (1)..(424): unsure at all n locations
catgcaagcttaaagatgatgtcagaanntgaacattgtaaaatccatttttataatcaaggcggatccatgattggaaatgcanagcaccaagaaccggcgggatgtggatgttaccaggaaagtggatttgtggtttaacaaacacagttggtgttgtcacagcattttattgctgaactctggggactgcttaaaggcttacgtttggcaaaagttgaaagtggaaggttgtgcgagtaatgtccgtcatgggaagaacgtggaggatacattatgctttgtaagtcttaagtcttatcttccttctccttgtcattagaattatatgaatggaatatcatttcttccttctctctaatgaccgcatgacgaaattggagggattgaacaatttaagattttatatattccacattaaatg

SEQ ID NO: 121754 - DNA, 411 bp, Glycine max
  unsure (1)..(411): unsure at all n locations
agcttctttgaganaacttccttgagaagctagagcttagctacacacatccctctcataactaagctcacctccttgagaagcttccttaagaagattcctaaagaagctagagcttagctacacacacatctctaatagctaagctcacctccttgagatgagaagctagagcttagctacaaaccccctataatagctaagctcagccccataacaaaatacaaaaaattccctactacaaagactactcaaaatacctcgaaatacaaggcaaaaaccctataatactagaatggccaaaatacaaggcccaaacgaaggaaaaacctattctaatatttacaaagataagcgggctcatactttgcccatgggctcgaaatctaccctaaggatcatgagaaccct

SEQ ID NO: 121755 - DNA, 418 bp, Glycine max
  unsure (1)..(418): unsure at all n locations
agcttaaccaaatagacccttaactgttgtttgagttctatcgagtctttcctccatatcaatattgccataatttctgcaggcacaccaagctatatagattggaattattattttgttgttttgatttggtaacttagcaactctgcctcttccaacagtctgactcgaccaagaaggccaattaaacacccatagtactaaaaaatatggctcagatccatatataattgatatggattcatggaatgatcataagttgtgcgattcttcaaacaatcctgcatgaccacaagcactgaaaacaacaataaaggtaacatcatcatgttttaagccacatgtttgcattgctttaaactacttaagtgctttacctatnttaccattcatggcaacccacaaattattgatgtcc

SEQ ID NO: 121756 - DNA, 396 bp, Glycine max
  unsure (1)..(396): unsure at all n locations
tgcaagcttcatacatnttttttatatnncatttatgatttttaggattntcagcaanccgataaaatctatatattttcataacatttaatctttgaatcaaatataaaattaattttcaatccaaaatatagtgggtcttaaagcttcatccaaatatatgattatatgtaaattcgaatacaaggcacagttgaatgagtactacaatattactatttctccatctatttctcacaatttacatagacctatcaattggcctctgacaaaatttcacgaacccgttaattgtgtttgactcgtcaattcaattaatgttagggccttataatttctttcctagcaccgataaattgatgcttgccttttaacattggccctccccaccaaaaa

SEQ ID NO: 121757 - DNA, 401 bp, Glycine max
  unsure (1)..(401): unsure at all n locations
agcttgtgggatttngngattttgattttgttctgagatgtgacgaaagaaaaagtactacccgatttgtattttttatgggtgaatgtggctttacatggagttcaagaaacaggcattgtgacactttctacttgtgaagccgagtatgagctgcaacttcttgcacatgtcatgccatttggctaaaaaattgctggaggaactttcattgttgcaaaatgaaagcacaaagatctatgttgataatagatctgcacacgagcttgcccagaattcggtgttccatgaacgaacgaagcatatagatacaaggtatcatttcattagagagtgccttaccaagacagaagtagaattgactcatgtgaaaactcaagatcaagttgccgatattttca

SEQ ID NO: 121758 - DNA, 371 bp, Glycine max
agctttagcttctcaaggaagttttcttattaagcttctcaaggaagttttctcaagaaagcttctcaaggaagctacttagtctataaatagatgtatatgtaacacttgttgtaactttgatgaatgagagtcttgtgagacacaactcaaagttcaacttctctgcctttttcatccttcaatttcgtgctcccccctctctctttctctccctctttcttttcctccattgaagcatcctctccaagcttcttattcaaggctcatcttggtggtgaagctccttcttccatggcttattccctagtggatggcgcctcctctcacctcttcttctttgtcttccactgcatctccatggtggaaaa

SEQ ID NO: 121759 - DNA, 329 bp, Glycine max
agcttcttcgtgaaggaaggtatctcgtttcttaatcttatgaatatctacgagaaagcacagtggctttcttttgcagctttataaattaaattgggaccgtgtttatgtcgtctacctccatcactgaatgaatgagctcctgagaaatggatgcgacacatctgtcttcaattaccggatatgacaaaatgtttgatgggctacgcttgttaaacatccacgtgccttgcaatttctgagaactcaatgctaccctattgccgcgcaacatttcgcttgtggccacatcacatgtctatgaacttggtatctcgtaactttgtttt

SEQ ID NO: 121760 - DNA, 248 bp, Glycine max
agcttaatgccccagcaggtttttctactgtctcttacatggaagaagtagacctgtgcaagtatatatcttagcctgacagatgaaaaatgggggagcataggatcatggctccattgacatagcacatgtacagggaggatatgggacccttgcattctcaggtttggacaaaagtccgaagtttataaactgcagaacggtgagccacataccacaaaggtggaacatgagcttagaaccaacgc

SEQ ID NO: 121761 - DNA, 346 bp, Glycine max
  unsure (1)..(346): unsure at all n locations
agctngcaacattgaatatatttgcggtttctgcagtgggggtnctgccatacaccgagcaacaccatcgggtgagtggaccataagatgatggatcccctgaagtacatcctttgggattcgaccttccctatcatgatatgcgcatgatgcttatagaaagaacctttttatagatttgtggtccacaaacaatatatttatatattgtgatcattatgactccactcctgtaacattcacttttctcagataaaatttccttctgactgctctagttaatccgtacccttatatctatccctatatcagagatgaggatcatggtgttgtgactccgcctcat

SEQ ID NO: 121762 - DNA, 402 bp, Glycine max
agcttggtcgcttaagcaagacatggttttgactaagcgacaaggtataaagcatgacactcccaagggtattacttaagcaagccttgtctttagctttagagagactactctttagtggaaactaatggctttcaaatttatttcaagttttgaattttatgacttatgagagttgagaagatgcccacaaatgttctagttctatgttaggaaattcacatttgtataaaggttgatgagagtaggggtttagagtgtgagaatgccttattgggcttattaaactactagatgggttcataagcaaaattttacaaaaaatggcgatatataacataaagggaactttggaatcaagatttgttggttgtgtgcatgacattgcatatgagtaggtat

SEQ ID NO: 121763 - DNA, 408 bp, Glycine max
  unsure (1)..(408): unsure at all n locations
tgcaagctgctctaaatntacattgatgtttgtatttatgggaggaggttgtatgtcatttttgttttaagagtagtgtcccactggtaaaactaactttccaaatgtttgccttcgcaagaaatggccccgaggaagcttgcctcaaagaggtccaggaaggacaaggcagccgaaggaactatttccgctccggagtatgatagtcaccgctttaggagtgctgtacaccagcagcgcttcgaggccatcaagggatggtcgtttctccgggagcgacgcgtccagctcagggacgacgagtatactgattttcaggaggaaatagggcgccggcggtgggcatcactggttactcccatggccaagtttgatccagaaatagtccttgagttttatgccaatgct

SEQ ID NO: 121764 - DNA, 408 bp, Glycine max
  unsure (1)..(408): unsure at all n locations
agctntntgatctgcaaaattgcataccatttgtttttatgtttgctcatccttgcgttttcctctacaaaacaaaaacaaaaaaggggaagcgtgaaacttcacactacattcttagttgcatgtgttaggcaccatgagccaaccatgatgggatcataaacccatttctaaaaaaaaaaaaaacataccacaacaaaacaaaataattgaacatggtacctaatgcatggttaactaggaaatggtgtttcttcgggcatctcaatttcataattacattttccgtgcataagcttaaagtatgcctgagtcattcatccctatgagatgttgttgaagtattggcgatcagaattgccattccttggattatagggtttaaccaagctcattgttttacaaaaa

SEQ ID NO: 121765 - DNA, 427 bp, Glycine max
  unsure (1)..(427): unsure at all n locations
tcagagtcacctgaggcatgcaagctntggaaaatgatatctatacaaaagttattcttttgaagcgactaacactcatgcctcttggcctttatcgtaagtcgatccttaactacctatgaagttgtttgaagatgcaacacaaatttactgctaagatgggtgaaggatatctcattcgttagggctttataaatgaagcttctatcaagttgccatgacctaccttaaagaatatgccctacctccatgggaactatatcatacataaatgcatgcttatatggcctaacggagaaaggtaccttcacttgttgggtaactatcattacccctttctcactgagccatcaaagtttataacgtttttatgtggggaatgataatgagagtcaactttgtaaactaatcttgtgctgcaacaatt

SEQ ID NO: 121766 - DNA, 376 bp, Glycine max
agcttagccttccaattggatatgattgatgaagttttttatctgctcaaattcaagaagaaacatgtgacatgaaagcaactcagaaacatgagtcaaagttgaagaaataagaattctcagagtgcgatctggtctggaaaatgagagaaaaagctagcaaggatcatgctatagggaaacttgctccaaaatgagaaagacccttcagaatcaatgacattccataatagtgcatacagacttgaaaagcttgttggaaaggtcatcccaatgacctggaatgcaacacacttgaaggcatacttcaattataaaccaggtgtcggactctttttcctactttaataatttattccacataaaaaaataatgt

SEQ ID NO: 121767 - DNA, 411 bp, Glycine max
agcttcttgagaaatggaaatagtccaatgtaaggcaaatgttggcaagattgacagttgtccaactctaaggacaccacatttgataaagaattaacggataaccaatttgggaattgtttaccaccatagttcctgattgacaacttctccaagtgtttggaaggttgtagattctcaattacaattacatccctttctttggcaaaatcatcagggttccggtgcgaattccatccaaactctagttccacaaggcatgttttatttttcaaatctgcagctaatgcatctgaggggttctcaatattctgcagctcccaaaatgatagtcttccatgaagattgagctctcctaattgctgaatagtgaactcgctacttttaccaacatcaaacgaactcatcaaa

SEQ ID NO: 121768 - DNA, 405 bp, Glycine max
agcttgtccgtcggttaaacctatataatttaccaaagtgagggtttactcatactttgctagagaactcaatttgggtgcagcggtcttacgccataattagtcaatgaacatatttattattcattattgtaaattgaaatatgacaaaagaaacaaggaaggagcgagtcaaatgagaacaactagcacacaatgaaagaaacacctttgagagcaatatgagagcgaaggagattaatcgcggaagctcggttcttgtgctgggagcggtcttttgaagcctaaacaacaataacaacaacaacattcgagttatacagctgacgggagaaggaaaaagggagaggttgcgtggtttaaactaacatcctaacaaaaactaaaaactagcatttgccgata

SEQ ID NO: 121769 - DNA, 304 bp, Glycine max
agcttgcttgagaagcttctatggaggtttgatctctgagccacactaaggtccttcaatggttgatttcagccatggagttgcagcaaaagataaaggagaagaggcgagaggaggcaccatctacttgagataagccatggaaggagaagcttcaccaccaagattgccttggataaaagcttatagaggaagcttcaatggaggaaaagaatgatagaaaggggggggggggggttcaaacttgattgttaaatttttcaaaaaaacttaacttctcttcctttataaatacacttgattc

SEQ ID NO: 121770 - DNA, 145 bp, Glycine max
  unsure (1)..(145): unsure at all n locations
gaccctaagngacctgaggcatgcaagctgagggtaaagagttacaacgtttttcctcatgcaaaaacgatagcactggtttttcgatacatcttgcgccacccagattacgataacaataactcgcgctgtgctcttttctcca

SEQ ID NO: 121771 - DNA, 389 bp, Glycine max
  unsure (1)..(389): unsure at all n locations
agcttctagtattcaaagaccttcttcttttagtgtttgntggctctaagcgaatagaattcttcacttgagctctgtcgcaagctacccttttgcgggcgagcgaagcaaggctcacaggtgcgtcttccatatgaagaaaatgcgcggagtctccaccaacgtttattgaaaggaaaacgttagaaaaatcaaaggaaaccggtcatgaagaatattccagattcgggagttatctttacgtttgaggaaggtattagcacctctcacgtttgtcctcacaggacaacagccttagattagaattgtgtgaaattatgtatctaaacttctatttcttttttattttttgaggtcgacaaaagcggggctcttgctcctacgtaccc

SEQ ID NO: 121772 - DNA, 384 bp, Glycine max
agcttgatcaaaacaattatctaatcattccaatccactcaaatcatacaattgctcattcaaatcattctcaaacactcatttcatgcaaaacaatccactacatatcattttcaatcaattcattgttcaaacacgcttttggtacaaacaaacaactcaaagtgctgaaatttatataattgaaatttaaaaaaattgaaatataaaatctgaaattaaaatgactgaacataaatcataaaataattgaaaataaactaaaatgttcgagatgcacaaatttaaatgtcctgctcctgtggttgctcctatgcatgctcattaaggtccaacacctgagcagcctgtgcagatggtgtggcataatcaagtatgggtgct

SEQ ID NO: 121773 - DNA, 362 bp, Glycine max
  unsure (1)..(362): unsure at all n locations
agcttcggaagaaagtgatgaggtacaatccctaaaggcagagcttgaaggagcctgngtagtcgaagagaagttcaagtccatagccatcaaagtctgaaaagagtatgatgaactaagggatgtcaatatggccaccgatgaagccttggaatgagaaaccaagaaggccccaaaggaagaacacgaccagagcaaagttttgaggggctttatagggcagcaatagtaagctcaagctccgaagagaggaaaggaatcatcacgggtcaaaggcatgatcttgaaggacgagctaaaggcttaccttanngttgaaagaaatttgtcccaacagttaaacgagactgaagggaatatgt

SEQ ID NO: 121774 - DNA, 441 bp, Glycine max
  unsure (1)..(441): unsure at all n locations
tagagacacccgcggcatgcaagcttatgcgcatgtttncttacgaacgttcacttgcggaagacatcctattaaccgaaaaaatgcacccatatacaatcaaggcagctttgttacctagattatttacacgtacttccaaggtgtatttgttacttacatcacacacatctgcttggctaaattcacatacatgcatactccaagcatttgggggtaccaaaaattgcacatgtgcacatcttggtatttctaatacctatacatacacaaacttcatgatgaatcttgactatctacacaataaggtgctacatttcatgcccttttataagtttttgctacctaaagccgcatgcaaattcaaacatattttcctttgctgactaacatngtatacaaattaaaaggtatactttttctgtatatgttctcttcaca

SEQ ID NO: 121775 - DNA, 356 bp, Glycine max
acattagcgtattatgcctcaattctcttgaatattcgattctcaatgactgctcaaaactgtatgataatcagttatttaatgaaccaagggatgcataacaagataacaccttcttactccagagaacataaaagttcattagctatttattgccttcctcgccaattttcccatgtatctacaaacttgatctaagtttctgtaatttacttcaaatccctgatgctatcggaaatttgtgttgcttagaaagcctaaatttaagtggaaacaattttgctggactgctcaacctcaaagagctttccatactgttccatttaaacttacagcactgcaagcagttgaaacat

SEQ ID NO: 121776 - DNA, 390 bp, Glycine max
agctttatcacgattgtgaaatgaaattattcttattttatcatttaaactcaatgaccatcgatcatttctatatttccctccttttaatctaccaaaatggtacttgtattttttatttacccagtctgggatttgtgcgcgataacattacgtttgtgaatttgaatacaaaaattacattgggatatatgcttaatcgtattcatatgccttctaccaaccagctctgtcttggacttgggcttaattctgatggaaccattaaggtcaacgactcattgattctgatgaaattaattaggtaaagaatattattttggaaaatgctaatatttgaaacattaaagatatttttttatgaaaaaagtttttcaacatccccttatc

SEQ ID NO: 121777 - DNA, 297 bp, Glycine max
  unsure (1)..(297): unsure at all n locations
agaaaaggagaaaggacaatgtaacgcatttgttggccacatagacaggnngccaactctaatgacaccacattagataaagaattaacggatgaccaaattgggaattgtttaccaccatagcacctgaatgacaacatctccaagagtatggaaagttgtagaatcataaatacacatacatgcctatctttggcaaaatcaacacggctccggtgcgaaatacatccaaactctagttccacaaggcaagttttattcatcaaaactgcagctaatgcatctgagggggtctca

SEQ ID NO: 121778 - DNA, 410 bp, Glycine max
agcttcttatccaaggctcatcttggtgttgaagctccttcttccatggcttattgatgaggacatgaccaagagcaagggcaaggatccacttgaaggacttggaggacctattgatgaggacatgaccaaaagcaagggcaaggatccacttgaatgacttggatgacctatgacaatggctatagcaaggaaagccatggaagctcttcaacaagtgctgtccatactatttgaatacaagcccaagtttcaaggagaaaagtccaaggttgagagttgtatcatggcccaaatggaggactaaatgacaccactttatattaattttagagtggttactttgtctaaataatggcccaatccttgtaaagatggctgactaaaaatatgttttcggttaatcaact

SEQ ID NO: 121779 - DNA, 252 bp, Glycine max
tggattctcaattatggagccgaagcccctaatgtaaaaccctttcccccctacagaattgaaaataaaccttgtagtcgaacctatggctattatttaccaagggggatgatacttgggtaccccctaaaacaatggagttaagcaatggcatggtcttcctcttgagacactacttgggaagactaaaacatgctctgtcaaatttaccaccttgattgacaagaggatttgttaccgggggtattgata

SEQ ID NO: 121780 - DNA, 391 bp, Glycine max
agcttattctactaaggactttatacaactattttttcacattaatggtagcaacacatctagagtataccttaacatcaggatgcaaatacagtaataactctttaaacctcctatgttcaacaaaagagaatggaagaccatgctcaataatcatcatagatgtcatctcacataccacactttgatcaagtcttttagttcttaaattcccaacatgatcaggaataatttttccaacatcaccattagaacatgtcttctaatatacgccacatttccttgtatggcgttgtaagggtgaagtctcattcttattgtcatcacccacataatctttcaaacaatatttgcatttacacctcactttcccatcactatgtaaaacaag

SEQ ID NO: 121781 - DNA, 403 bp, Glycine max
  unsure (1)..(403): unsure at all n locations
agcttntggcaaaggaagaagaagaaggtgttctaagtgattcagaaatcaattggcaaaaagtttgttgtctaaagaatgaatgaataaaatgcaaatcaaagccttgcttttatagactcttcaagtctagtcaagagaccattagaagagttataacctttagaaaaacttaaaaaccatttggaaaagttataacttttagaaaaacttgaaaactattggaagagttacatcttttgattttgttcagaaactattaccaaatcagtgtaatcgattacacaaagcctttttgtgaaaggatgtgactcctcacaattaaatttgaattccaacgttcaaacatactagtaatcgattacccaatcaatgtaatcgattacaatatttgaaataattg

SEQ ID NO: 121782 - DNA, 397 bp, Glycine max
agctcgtgaataacctaactgtgatggcttctgtgattcataccaattgagggggcaatgtgccccttggtgttttttttaagagaatttaatgtaatatcatctatttgtctgccattatgtggtatgcttaccttggacaagagggcagaggaacctagaaaattccctatcctgcttccattttcttacgctgcttcaacatcttgcatgtttgcctgggacaagaaggttgaggatcccataaaattccccattccgcttccattatctgaggctagttcgacatctggcatgtcatactcctgctccatgtatacagagttatttaataacaactttttttacgtttcaaatatgacagagaggaaaaaccaaaccctccgtgttagtcata

SEQ ID NO: 121783 - DNA, 397 bp, Glycine max
  unsure (1)..(397): unsure at all n locations
gaagctttggcctctgcccttattgctctttctagncgagacatgaggacttaaatatttttcttatgtatctaaaaaaatttgacaaagcattacaaaacaaaatccctctggaaaaatactgggattctgcgcacattttttaaagactaaacattttcaggccagaattgtagaagaagcaaccatttgaacattcgcataagttgacagttattgttgaaaacattgtttggaaatttctatgacatcatattatatgattttgctgtatcctcagtctatctccaaatcagcgagcaatgatggatattgagtctattagttagctgatttctaatttcatggcatctctcccacttaagttaattatatctcaggccaatttgtatgaatc

SEQ ID NO: 121784 - DNA, 419 bp, Glycine max
  unsure (1)..(419): unsure at all n locations
agctntagatgattctcatgaagcaaggaacactgctgctgttgttaacgagctgtccaaggaaataacaaaaattttggtttctcatcctgtgaatgctaaacgtgctgcagaagggaagaacatagcaaatgtagtccttttaagaggctgtggcattcgaattgaggtctgttttttcagtttatttcttaattgatacatttatgtttcaagcagtgaagtgatgcttaaaggaaaaaccaaactttgatacttcttaacccatttatgtattctgctacttaaaaggaaaacacatcaaatatatagcaatcatttaagaatcattagaaataaaataatataaacttgtatcttttgcagttgagtttcctatctttttagtatcaccagatgttgctgttttattttttaat

SEQ ID NO: 121785 - DNA, 415 bp, Glycine max
  unsure (1)..(415): unsure at all n locations
agcttatagctttgtttgatgagtgggattaaattttatttatgtagcagagattgattaaaatatactgtaacccctattgcttggatgtntggtattggagggggtaaatttttacccattcaaaataaagtgttttggtagacagttttatataaaaaattggtttctatttttatgtatgcattgatctaaataattatatgtacaaactaaaaataattgaaattttaagtaagctaaacccttgtcaaaatctgtttgtccgggaataaacaaatgcaataattttataaaaccaagattcttctaaactaattgattgcttcctcgcattcatttttctcccgttagtatccaaccccactccaccaacaccaatataaaaaacagaaataaaccttctttctttttc

SEQ ID NO: 121786 - DNA, 413 bp, Glycine max
  unsure (1)..(413): unsure at all n locations
agcttatgtttagtcagtgtatttaattgcttcctccatgtgatatcggtacatatgtaggggttaatttgtccctcttcctacatatttgcatctctaagatcagtaagatacaaaacaatntgttaatgaaaacaagataagaaaggggaaatataattttttttcctataaattgtgttgctgaaaatagattaatgaatttgattaaatgggttagttcttcaaattttctccaaaaggatgctcaactcagaattgaggaaggaaacaaatttttctatgcttcatattaagtaaagtatgaatgataaacacgggctaagaaattattacattgggttntagttgtgaaattatttttcttgcattgatgaatagctttgagcttttgtaactctaactaagtattc

SEQ ID NO: 121787 - DNA, 412 bp, Glycine max
tgcaagcttgagctagcttgtaggcgaaagactttgtcttatgtcaagggagattatcaagtgtcgagggtagtggccttgacaagtataaaggtcgcaagtttgttgagcccccaagcatggacaactattgtctgggttgttgttattaagttatccagggaggacatgcttttggttttgcaagtgaaatcagacgtgtcatgtgagtggagtccttgcatttgacaaatctaccattttctgactgttggagaacgtattaaagacaagcattttgtttgccttttttgctacaggcgagtgcagtgcatgcacgttactcatgcatatgtgtcacccatggagtggatacgtactggagacgcactacgtgggtgagtgtgactacattcgggtgcaaactttgggg

SEQ ID NO: 121788 - DNA, 410 bp, Glycine max
  unsure (1)..(410): unsure at all n locations
agcttcaaagacacaggaccacctcctattcttgtgcttcttatgtatgtncgatacaagatcgttgtaggcacgaattacacgtgcaacaatgcaagggcaagctcaccaaaaatgaacatactaaaataggataaaactaaacaattaaagcttgattcactatagaaattatacataaagcataagtcttagaatccacataacaaaggacatcatgacaataatcaattcatcaacatcatatcaagattcaatcttcatacaccatgatttatccatcaaacatcatgatcactagttcattaatcattgacaccaaagatagactcaaatccattgagatttcactntttgagcggctaacgtaagaacatcccttanaattgttgcactctgtgatatgaaca

SEQ ID NO: 121789 - DNA, 381 bp, Glycine max
  unsure (1)..(381): unsure at all n locations
agcttgtnttgaactcatcataacacttttatgtnttgctctntgtatatctttcattgtatcatttgtagatcttggatatctttcttgcatatgatgttctgctttgatatagctgtctaatgcaaatggaaggccattgaatgttattcttgtgggaatactttgatgagatggcatgacaaacttgcattccaaacattttaatgtcagcttgttatagcatgttgtgcttgctactatttttgagttctttgacccttcgaatggcctaactagcttttgttttctccataagagttgtatagaattctatcattgacattcaagcactggtctcatgtcatttggaccactacaacataaccaatctttaaagca

SEQ ID NO: 121790 - DNA, 390 bp, Glycine max
  unsure (1)..(390): unsure at all n locations
agcttataaataactaaatatttattnttattaattattngttcgataaattaaatttaaaaatataattgtcaatgatattttatatcattttatgttaaaagagataaaaatttacatgtaaattaagatattttttatttatcaatatatttataaggaatgttctaaaattagagattgaccactcaactaaagttgattaacatagagataaaagtaagtgttatgtgtacattttttaagagcaatataagaataaagtgaaattgacataatcaaatagccaaagaaatatatttaatgaaagaaaaatagtcaaccataatggttgaaaacataaaaatgatgcgaattacatactaagaattgttcatttaaatatacttt

SEQ ID NO: 121791 - DNA, 402 bp, Glycine max
agcttgagacttctcctttctattgtggtctcgacattttaattggtttctcctatgcccttttacacattactctaaaaagcttttattccttgcacacaaatgggaataataatcctttcctttcgatttgatggttgagcgccccacacctagtttccactacccgtcattcaaaccctaaaaaagttaattcaatcacacacacaccaatacaagttaatcgaacaccaatatatatcatctcaaacctgcaccaaaaccttgttttaagtatataataaattaagtacaccctataaatccacatactgtggaaagagaaccctgaaacagttccaatttattaaatgagcaaaagagagatgcataaataaaccaaggggttagaaaatggatcac

SEQ ID NO: 121792 - DNA, 351 bp, Glycine max
agcttcggtacactatggattatattcctatgttctaatatatgaacagagacattaacaataaaaaaattcatctaggtgaaagttacatggtgaagaatataaaatatcttgtataaaaattaacttgaagtatatactccattgtataaatttttaaaagttaagggactttctggttaaattgttataagagctatgtttctccaaattatacacgtaggcaactcattaattttaatccttcacgggtatcattgattctattttatggcaacggggattacaaataattgtcataataagacagactttccctttcttaaccaaattcaagcgcctacatgttac

SEQ ID NO: 121793 - DNA, 405 bp, Glycine max
  unsure (1)..(405): unsure at all n locations
agctttcaacntatgtcttcacaaataatcatcacacagcagaaaactaacaaaactacccatcatatcttccaaaaccccatacccacgaaaatcaaaggggaaagaagtccacccaaacctgaaatttcgaagtcccactcgtagccatgcacttcacgaccccgaaaatgccctcctttcgcgatttggggcagaaatgatggccaaaggttgaagctttgcttggagcttcaatggaaaatgaagaagaagaaaatggcaacgtgagggagagagagagctgtctgaaaagctctttggtcttaaataaaaggggtttctctctctctattatnttatttaagcaatgccacatgtctccatttgagtgggagcaaaagggcccactttccctttttgact

SEQ ID NO: 121794 - DNA, 354 bp, Glycine max
  unsure (1)..(354): unsure at all n locations
agcttggctntggtttagacatgtttgattcatgatttgggacttgtaggatttgatttgagcaagattggatgatgggaagtgtgattttccaaatctgcacttatgcagaattttgctgtcaaaataggtgcagcacgattttagcttggtgcaaaaaatgcttgtgtgtggttgactgtggaaagagtagtacattatgagttctatatgtttgctagtagatcccaacggtcacaatgtaggcttattcactatagacttccattaaaattttggagtcgatccaacggttaacgaattggatcgaaggaattgttactgtggtctttaagtgagaaaaactgcgatttt

SEQ ID NO: 121795 - DNA, 416 bp, Glycine max
ctgcaagctgtgatcgggacgaattgaacgttattggtgatatgtggattcaaatctgagcatgattcgattaaggcttactctgaggaaaaacaaatacaatttcggctttcatcaactggatcctcacatctatagcctggattgaaatcatcgctttttttttgcatgacctattatgacttgcaatttgagcctcccaaaagactccctcaaactagctcataaaatgttagatttcaactttaattttaacacgaataacattctgacctttttagcacaatttgggcttagctataaaaaaaaagtgcgaatgaaacttttacgaattggacctttcacgctccatctttttcaatctataagcatcttctcttctttgacatcaatggttatggtcatcttgcacttca

SEQ ID NO: 121796 - DNA, 415 bp, Glycine max
agcttcatccgcaaatccctcttgtaagactaggcctatactaaacagcattattgtaacaacataattaaaaccaaaacttaatccgcagatccctcttgtaagactaagtttcgatcctgcttcaatcaatttctaaggcaacagtacatttcccaatgctaaagtcacctaactatgctcataaatggatgaccagaccaaaagcatacaaacattaatcattgaaggaagcattgaacataaaaaacataatcaattagatattaagtatttacatcagttgttcattagaaatccccaactagggtgtttagccagtcattatagaagaaaccctaacaagaaaaataggcttacaaaacctaagttatctctgcaaaagttgctcctcttgctgcctccagtgctttat

SEQ ID NO: 121797 - DNA, 415 bp, Glycine max
agcttataaggtataactatttagtagattaaatgatatattaaatgtgatcttagaaccaccacaacataaaaaatatacaaatcaaaatttacatggctttttttacaataagatctgaggtatgaatgtaccatttcaacttggaatgttatttaaaagcctacaaataaaaattatttttttagaagtcattggttagtaatgcaattacacacaaaaaaaaaaacttggactaaagcaaaatctagtcacaaaataacttccaaaataattccaaattttctaattgcctttgctttagcacaagatttccttcccatcttttctgcaaaagaaaacataatgttaagtgctaccgaagaaatcatatttgttaaaacataatttgttatataaaatgagagatataaat

SEQ ID NO: 121798 - DNA, 414 bp, Glycine max
agcttctcctttatattcctataaatagggggagggttgaatgagaaaggggttcagcccttctagtacttcgtaatcacttaaaattagtgaggaaaattgttttcgtgaagaaaatccatgccgaggcactttcgtaacatttccgtgggtgatttcgcgaagatttcaaccgttcttcgtcgttctttggtcttcaaccggtaagttcctgaaatcgaacttttcaattcattctatgttcccttggtggtccccatttgtttcgcgtacttttatttttgtttcatttacttttcgtacccccttttgacgtgtttcattcatttacttaagtcattttctcgcctaatcaaagaataaaaaacatttccaccgatcatttgatttgtaatatccgttaatttctcttaa

SEQ ID NO: 121799 - DNA, 396 bp, Glycine max
  unsure (1)..(396): unsure at all n locations
agcttgagatgaggaagtgtagaagggtttaactttcttcttttattcgntgaccacagagtggtacctggagatatgtcgctggggtcaagagaccttggggacgtcaagtggggtgctattgcccaaaaccaagcttgaccaatcccgacccaacctgggcatagtcagtcagtgaaaacctgtgatgtacctaaacaggcgagctcctggcagtcaacagataaaaggaacaaggaccacaaagcaaggaggcttgtggtggctggccagctatgaacttgattgatatatgagatatggcctctggtaatcgattaccaagggtgggtaatcgattacaaagcttaaaaatgaagacaggaggctaagatagtctctagtaatcgattacca

SEQ ID NO: 121800 - DNA, 402 bp, Glycine max
  unsure (1)..(402): unsure at all n locations
agctntgaaaaggtcgtatttttaccttctcgctaagccaatntgctggcttagcgagcgtccgctaagcgtaacactcatggactatgtgcgaggaagactctggaagaagatgagttgtacatgttcgctaagcgcactgcttcatcttactaagcgcaccacttcagttcatccgctaagcgagaaggcacgcactaagccgaaattcactaatgtgtgctaagcagtccataagtgtgctaagcgcacgagcacgaacaaggccacctatttaagcctgaaatcagattttagagggagagtttggactgggattcagagctttgcatgtctagggtttctagagagagaaaggtccaagttccatggagttttgagatattttgctgtgtgaagatc

SEQ ID NO: 121801 - DNA, 409 bp, Glycine max
  unsure (1)..(409): unsure at all n locations
agcttgaagaggatgctntaatggaggattataaagagagaaggggggagcacgaaattgaaggaataaaagagggaaagaagtggaactttgaagtgtatcttataagactttcattcatcaaagttacaacaagtgttacacatgcttctatttatagactaggtagcttccttgagaagctttcttaagaaaacttccttgagaagctgtcttaagaaaacttccttgagaagcttctatgagaaaacttccttgagaagctagagtttagcttcacacattcatctaaaaactaagctcacctccttgagaagcttccttgagaagctagagctgagctacacacacccatctataaactaagctcacctcctgagaagctttcctgagaagctagagcttaact

SEQ ID NO: 121802 - DNA, 410 bp, Glycine max
agcttaccaccataggaggccatggatattagcttgtatgaaggagatgaatgaagggagaggaagaaaagagcacgaaattttgtgctctaagagagctctgaaatctaaagattaattttcaaatgatcaaagttggaaaaatgcacacacatagcctctatttatagcccaagtgtcacacaaaattggagggaaatttgaatttctattcaaatttcacttgaatatgaaatagaatttgtggagccaaattttggagccaaaatttcactaattatgattagcgaatttcagatatggttcagcccactaatccaagatcaaagccatgattctccactaagtgtgcttaggtgtcatgagaccatgtaagcatgaaaggcatgcacaaagtgtgactatttgat

SEQ ID NO: 121803 - DNA, 405 bp, Glycine max
  unsure (1)..(405): unsure at all n locations
agctttggtaagaagctcttaaatatcttcttttctactcatttcttcattttcttgcaaagcctttatgtttggttcaaaaatttgtttttcatcctttgaagattgagacttcaagatctgaacctttatgttagagatagggggagcaacatgaacaaaatggtgaataacctctcaaggaaaatcttgaaaaagttttgaagatgttttgacttttacatacctaactcccttgagtggcatttatattggttgaagtttctaagttagaaaagattcttcaagaggaaaaaactctctgttttaatcgattacagggtcatcgtaatcaactatgacatgttttttgaagtttgaagagttgagtcttgtatcggtttaatcaattatagntgtttcata

SEQ ID NO: 121804 - DNA, 365 bp, Glycine max
agcttgaagagattgcgatactcttctcttattatctgagtgcaggctgtaaatgggggcttttttcgtgctcatgcgcttagcgcaattttgaaccgcgtagcgtgaattagagatatgcggcttaacgcgtgcttttctcgctcagcagatggactaaagcggagcgcttagaaagatgaccctttgctgagtgagcatgcacaactcattcttgttccagattcttctttgcgctcaaccgaggagtgttgcactcagcgaatgactcgctaagaagacaggttggcttatcgagagggcaagaatctgcactatacagactgacctcattaacctgaattgagagaaaataatattttaca

SEQ ID NO: 121805 - DNA, 262 bp, Glycine max
tccctttacctgttcgtccccaaaggaaagccttatatccttccaacttcaaccagtttgaaaatgactaggatgtacagatataacttttcacatagcaatgttttcttgcaactgcagcagataaggcatcctcaaattttacttggaaacaatgtaatgtggaaacccagtgataatataggcacatctctgtactcatgtgtgggaaaaataaatgaaaatataagtttttttcatctaaagatagcgtcttaaattg

SEQ ID NO: 121806 - DNA, 414 bp, Glycine max
  unsure (1)..(414): unsure at all n locations
agcttctagccaaatggacttaccttgaattaatttctttgatagcccttntgagcctacgttaccctttctttgttttgaagctcattacaagccttaagtgaaataccatgatatcaccttacccttaaggaatttggagctttggaattgttttgggaataagtgtgtggggggtatgtttcattggaagatacaatttttggccatgcttaatgttttatttttgccatgcttgatgtatctgtatattgcctagttcttgctttaatcttcaaattcgcactgttaaaaaaaattgaaaaaaaaatcaattgctgcaaattctgcaaattcgtagtgttaaaaaaaaaaatataagaaaagaagttgatgcaagctccattggagcttgtaagcctaagatttttttca

SEQ ID NO: 121807 - DNA, 402 bp, Glycine max
  unsure (1)..(402): unsure at all n locations
agctntagaaataactcttaactaagatttctttattcttgttgcaacttctaaaataacagtgcaataagacaataataccttaatgctttcattcttatgatccgcctcctcaacaacctttgtcactgaaacttctgatatgactttnttctcttcttccatgttcgcttccttatattgactgctttacaagcaaagaagaaagaagaggcttttagatgtagttactgggatatagacttggttgttgctgtcgaggtacttaattcacaatcctccctttaatgtaccaaatgaaatgaaatacgcaaaatggagaacatatttatagcataagaaaaagaaaggtatggagggggacaagacactcttgttctgcatacttacacaattctttct

SEQ ID NO: 121808 - DNA, 408 bp, Glycine max
  unsure (1)..(408): unsure at all n locations
agcttgtccttggtttagacatgattgatacatgatttgggacttgtaggattcaatttgggcaaaattggatgagggaaagtgtgatttcnaaaatctgcactttatgcagaattttgctgtcaaataggtgcagcagaattttggctttgtgtagaaagtgttgtgtatttgctggttgtcgaaagagtagtacagagtgggttttggccgttttctagcagatcccaacggtcataatgtagatttatgtgctagagacttccagtaaaattttcgagtcgatccaacggctaatgaattggaacgaggagaatattactgtggtatttgagtgtgaaaagctgtgatgttggtgtgtgttttgggcanaactttctgcctctgccctgttttcttaggaatgtt

SEQ ID NO: 121809 - DNA, 403 bp, Glycine max
  unsure (1)..(403): unsure at all n locations
agctnggaatattgaaagagtatttctgtatcatacatagcctaattcaaaccctcctaggggaaaacactntgaccattattattgtaaatactctaattcaaaatatatagtactttaaacaccagacgaaatatcaaaggtacataacattntatgctaatttatcatttatgcaggcacctatgacattaaaaatttgagaaataccttctctttacttccagcacttccaacaacataacaaccagtccatttagcaaactgccccacaagttgactgataagaatagataaaaatgaaacagatttgaaaagatagaacaaaaatttatagataatttgagatattttattacacaggttttcgagagcctgtctctccacaattcagattctttct

SEQ ID NO: 121810 - DNA, 359 bp, Glycine max
  unsure (1)..(359): unsure at all n locations
agctngaaaggggttccacatattcctgctttgtttcttaaatagcaacaaattaaataaaccagaaaacattagcactccattggctccttgaatgatctgaattaagatgtatgtgtccagagcgcatttgtcaaatgtatttaacacaaatacatgtatagttctgatttttcaaaatagaaagaattctcacttgatatatatgtttcctatatatgaattttttttactacataggtattatactcttacatgagaatgtttaatggaagaccagatgaaatgaactctaatgcaaatattctaacagatatcattgaactatagtctaactccatagcattaaccttagcgtt

SEQ ID NO: 121811 - DNA, 398 bp, Glycine max
  unsure (1)..(398): unsure at all n locations
agctttgacaaacaccgattctagagtgttgtaaatcaatagcgtntcgaaaccatcaaaggatggtcattcctcagacaaagatgagggcagctaagggatgatgaatttccgcacttccttggacgaggcggagcgattcaaccgggatcaccaaacttgtgatttatccttcattaatgctttcagttcttctattattttgttatttcccttgtgatctaacattatctgcttccaattattatgtccattgcggttaaactgaacatgcagttatctgtcacattgcgagtaatctatcgctttaggcatatggtcatacttaatctacgatgaattgtctgaaacacaaaaaaaaagtgtatgtcttgcgcactttctttcgcatgcctttt

SEQ ID NO: 121812 - DNA, 408 bp, Glycine max
  unsure (1)..(408): unsure at all n locations
agcttgcgggctataccttctaccaaactctgccgtgtttctgtctcggcccggatttaaggcaggctgcagcaccggctccgcttccctaactgtactggaggcgtttgccgtggctttatcctctatagttttctggagttttaacatgacctccgagatggaagccatttgatcttttaaggccgatagatcggccttcatctgttcctgcatgccctcttcattatccatttttctggatcgagtgttataggggtgccttggtgttttattatttatgatgaaattcccaaagaaataaacaacggtgagtatgccaccaaaacatgaatatgcaaatgaatgatcggagcacttggatccaccccaagggtcntttagataacatgatgagttcagaacttc

SEQ ID NO: 121813 - DNA, 353 bp, Glycine max
agcttatgaacattttaggtgagacagttgaagaattttcaaccagattaggcaataatttggagcagttgattattgcttgctatgcaacttgtagatactatggcagaaatattacgataaaaaaagttgtttcactatatggccatgaattaattcagaaagggaacaattcctatctatgaatataccttcagattttataaattataataaagatgttccacttcattttactatatagcaatttttttcatctaaaatttaatgttggcacccttaatcaatgtatgatgtgtttggtttgtgaaaatattttttgtcttactaatattacaaaaagttacttagtt

SEQ ID NO: 121814 - DNA, 354 bp, Glycine max
agcttgagatgaggaagtgttgatggttatacttcctgcctttattgctgaccacagagtggtacctggagatatgtcgcggtggtcaggagaccttggggacgtcaggtggggtgctattgcccaaaaccaagcttgaccaatcccgacccaaccctggcatagtcggtcaatgagaacctgtgaagtacctaagcaggcgagctcctggcagtctacagataaaaggaacaaagaccaccaatcaacgaggcttgtggtggctggccagctgtgaaactagattgatatgtgaaatatggtctttggtaatcgattaccaaaggtgggtaatcgatttcaacgctttaaaat

SEQ ID NO: 121815 - DNA, 379 bp, Glycine max
agcttcaggctgctcaattgctccaggttgctgcatggaagggcaaaggtctgtatggtggtcagcaaaggagcacaaaccacaaacccttgcgacaggtacagatttctgattcaaggccagctgggttaccaagttgaccaacgcatccagtttgccttcaagcttcttagtttcagatgatgcagatgggtttgtagctacctcatgcactcctctaatgactatggcatcatttctggcgctaaactgctgggagttggaggccatcttctcaattaaatttctggcttcggcaggagtcatgtctccaaggctccaccactggcagcatctatcatacttctctccatattactgagtccttcataaaaatatt

SEQ ID NO: 121816 - DNA, 418 bp, Glycine max
gacacctgaggcatgcaagcttggcatgtgcgatgttgatcacgattggatcattattggagagcaactcacgggagcaaatgttgatcatatggaagaagaagctgaggaagaagctcaacaagagccaactcatcaatggaacccttctgagtccattatgattcaaaggatggatgctatccttcatcctccatcaagagcattaagccgaagttcatagctccttagataacatcacaactaggcttgagaacatagaaactaggttatcccttagtaaccttcttaacctagataaggaggaggcttacatatgtacgtgcgccttgttgtgatgttatatggattttctatcatgtcatgttatgtctttcttagctgatgaaagagctcatgttttttggctctcatttaa

SEQ ID NO: 121817 - DNA, 401 bp, Glycine max
atctcagagtcacctgcaggctgcaagcttgggatcgggtcgtcgccttcgtcttgctgtttctgttggtgctggcattggccttattggtcttcttcttcttcttcctcgccctcttcgtcctcctcttcttcttcttcctcttcgacctcttcctctacctcttcttcctcaacttcctgttcgacctcttctttgtattcctgagcggcattttcgggttttggttggagatgcttcagcgggggctcggcggatacagaagatttcggtgctacctatcgcttcctccccatcgctagtatccgattgatcggagtggagtggagtgcggcgcctccaactaccatattttttctgattagggtttcgggcatccaccccactcactataatatctt

SEQ ID NO: 121818 - DNA, 409 bp, Glycine max
  unsure (1)..(409): unsure at all n locations
agctcctgaatcaaatgggggtgttagtatgtgattctataaatttgaaagggggtgaatgcagtattcatttatgactgctnttatttttctgctcatacaaacgctgaatgttataaatagagagttagcagtgctatatgagaacaatttttcacaaatcaacaataagtttttttcctgctactttctctggtacactcttctttttctcccacatagtttaattacgaagttgaattgagatcattataatatgtgaagtggtgaaagtagaatttgttgtgatacccattcttatcggttatgtggcattttcggtgtatacgcagtacctcttaagaaagagggaaaactgtcttccaaattctatgtgaaatacaagcgataccgggtggctgtgtatgcc

SEQ ID NO: 121819 - DNA, 410 bp, Glycine max
  unsure (1)..(410): unsure at all n locations
agcttgcattncaaacaaataatattgagttagctcttctcaccccacatagtatgtgggtttatgggtcaatccaagtttaataaagaaaaatttcaaaaaatagaaaattaaatttaaaaaatgtgaaatttgttccattttaaatcatntaaaaaactaattgcgaagtatctaatacaaaaaattatttgtccaaaatgataatataatttacattttatgtcacctaaaaaaatatattcctacattatggttactttatttataattttatattaaatcacaatatggaatcatcatttactaatcattaaatcatatagaaactacttaagtgttaagtgtgtataaatccaaacaagggaagcgtgaatttttaatgcacacaattttttttatgttgatta

SEQ ID NO: 121820 - DNA, 202 bp, Glycine max
agactcggaggatctttacatggcttgaccaggatttcacgaagctctaaacaaggctgtccatctattcaatccacccatgtttaagacaaaagtccaagttgtagttattatggccaatggggacaaatgcacaccattatttaatttaaaggatatttgtcaacaaggccaatttgaaagtggttccaaaatttttgga

SEQ ID NO: 121821 - DNA, 365 bp, Glycine max
caagctggatttcctcttagttatgaatcttctctctcctacagaggaaccaaacccaatgcctctctataagaactagctcctctcttcctctatcgtctattgttgcatacaccattttttggctctctatttaggtcccaaccctctcgtgtaacttctctacaaactctgatctaaattcccccttctttatgtataaaaaaaagtgccatgtgggaggggacttatgtctaatggtgctagacgatcgaacccatagacaacctccaaaggggattgcttggtggttctatcatccccccctattgtatgcaaattatacgtgacgaagatactcatcccacgaattatcgtcgcgttta

SEQ ID NO: 121822 - DNA, 410 bp, Glycine max
  unsure (1)..(410): unsure at all n locations
agcttgcaatctatttaagtacctgcgtggttattaaaaaattatatcatactattctctaattntattattttgaattacctatattatttttatgttctaaacaaactaaattttttcttaaaaataaacacgttggcaattcgggttggcagggtctgaattctgaacggttttgttgcaaatattctcgaaaataacaatgtaaatttcgatcttctaacccgaatttacactttgaatagtaaacttgtatgtttgcgtaaataatgagaaaatatgtatgtttgaatatataatttttttataaatgtatgtttctcaaaaaatttctattctttgcaaataaattataaccataaattaatataactttttatacaatatacttattgtttacgataacatta

SEQ ID NO: 121823 - DNA, 397 bp, Glycine max
  unsure (1)..(397): unsure at all n locations
agcttgcagatnttgggctgtgtgaaaatatttagtttttaatattatacttttatatatagttgtatgattgatgtaagtaattagttatatatatacttaagtagatatataatatagctgttctgctgacttggttataaccacctcattcatcttatttgtttgtatggcttgcaacttttgcattattattgaagctagtgtctattacttctgtttctggtggtcttgctctctgaccaatctgattttttcagcttatggggaattcatatgatctttcttttaagggtaagtcttattggatggctccagaggtattttattgttcaaatcatctatattattttggatgggttgacatgccccctttgactataagtgtccatttgaa

SEQ ID NO: 121824 - DNA, 399 bp, Glycine max
agctttacgaaaagcttgtcgttggagcttacccatctactgccctaactctttcagactggtgactcctaggctcctgaccttgacttgatagaacctatttttaagcgaaggcacctgactagatcccatgttttactaaagtgaaacaaaacccagtgcgaatcaagactctgacatctatcatgggtggattggatgaatgcatgaagaaatgcatatgacacagatgcattttatgaatatgggagcccgggaaattgtccccttcttagatacaacattcaggcagcttggcgcccgacgtatgcatttaagaaggcaacacagaccctccatcggtttggcaaagtgaggggatcaagatgcaaccccgtgcatgatgcatatgtaaaaaaa

SEQ ID NO: 121825 - DNA, 375 bp, Glycine max
  unsure (1)..(375): unsure at all n locations
agctttngcaagctggaatcatttatcctatctccgacagccaatgggtgagtcccgtccaggtagtcccgaaaaagactggcctcacagtgatcagaaatgagaaggaggagctgattcctacttgggtgcagaacaagtggagagtctgcattgactataggaggctgaaccaggttaccaaaaaggaccatcttcccctgccattcattgaccagatgcttgaacgcctggcaagtaaatcccactactgtttccttgatggttnttctggttatatgcaaattactattgctcctgaggatcaggaaaagactacattcacctgccccttcggcacttttgcttataggaggatgccctttcggtctgtgc

SEQ ID NO: 121826 - DNA, 396 bp, Glycine max
agcttcgatctatgtctccataagcatcttatccaatatgtatcggtgaagtatatccaaagaggatcgttattgaatacataaaacaaattgaattatctgaccttcataaatcataggtttggatatttcatctatacatgttagtgatgtatccaaaagagattcagctacgtgaagtaaattaaattctccgcacttcatagattggtttcaataaaccatgacttatgtccaccttttctactttagcctgctattttatttttttttatctagtgagcctagcgcttaaaatcctcaaatttcttgaaatcttccatgcacttcctcatatatataattatctgacgcctactcttataaaattgaaagaagaaaataatgacctactac

SEQ ID NO: 121827 - DNA, 369 bp, Glycine max
agcttattgtgttttggccctatcaagtttattatcaatagcgcagaagcacttcttgtgctcttagcattagtcttcttggcatggggcaatgcacaaaatacccttgtgccaacaatcataacatatggtgactcagctgtggatattgggaacaatgatattctgcctacccttctcaaggctaactaccctccctatggaagggactttagcaaccatcaacctactgggaggttctgcaatgggaaactagctaccgattttactggtgaggaaataacatcaggcttggaacttaatttgcttggagagaaaaaggcacatatatttatatatttataattttcactcttgtgaaatgatgtt

SEQ ID NO: 121828 - DNA, 438 bp, Glycine max
  unsure (1)..(438): unsure at all n locations
gggctgcttgctgagcccaattggcttgataaccgacaacacccaaatggctttttgcatagttgattctcaagcccgataccatntcaaatcctctaagcatggatgtcaacacaagaatattatcccaagaggcctctccaacgaagaccgtgtcgtcagcatattgcaaaatgtttataggctcattntgcttcccactcaagaaacttcttgaaaggtatttattaacagcctctctcatcatgccggtaaggccctcagccactatattaaatagcataggagctcaaggatctccttgtcgcaatcctctagaggggactatntccttggtagggctcccatntactacaaatgagatagtagctgaatgaagacatgcagatatccattgtctccatttaaggcagaaacctatgcctttcatcatgtaat

SEQ ID NO: 121829 - DNA, 508 bp, Glycine max
  unsure (1)..(508): unsure at all n locations
tactcagcttttatccaggctcatcttggtggtgaagctccttcttccatggcttattccctagtggatggtgcctcctctcacctcttctcctttgtcttccactgcatctccatggtggaaaatcaccattaaaggacctcattgaagctcaaagatctagcctccatagaagccccacaagcaagcttccatcacatttggtttaacaaatgcccctagtactttcatgagattaatgaatcatgttttgagagagttcttatgaaaatttgtgggtgtgtactttgatgacattcttgtgtatagcaaaaatttagatgagcatttgtaacatttgaaatctgttttgcatgtgcttcgaaaacaaaggttgtatgctaatttggaaaagtgcacgttttgtaaaggtcatgttgtgttcttaggaattngtggtaactctagtggagtgcatgtagataaagagaaaataaaagcaattcaagagtggccaattcctaagaat

SEQ ID NO: 121830 - DNA, 488 bp, Glycine max
  unsure (1)..(488): unsure at all n locations
tactaagctactagggccctgttctagctcttcctgactnttctaagacttttgttctataatgtgatgcctctggagtgggagttggagctgttttgttgcaacgtgggcaccctattgcttattttagtgaaaaacttcatggtgccacccttaactaccccacctatgataaagagctctatgccttaataagagcactccgaacttgggaacattaccttgtttccaaggaatttgtcattcatagtgatcatcaatcacttaagttcattagagggcaaagcaagttaaacaaaaggcaagcaaaatgggtagagtacctagagcaatttccatatgttatcaaatacaaaaagggaaaaacaaatgtggtagctgatgccctgacacacattgttttgctccctangagctcaatatttaggattngataacattagggacttgtatgctntagatgaacatttctctcccatctacaagag

SEQ ID NO: 121831 - DNA, 465 bp, Glycine max
  unsure (1)..(465): unsure at all n locations
gagaaagtgaagtgaaaatggttcatccccttaggcacttctctctctttcgaatatgcttggaaaaattgtttctgtgaagaaaattcaagccgaggcgcttccgaaacgtttccgtaacgtttccgtgagaaatttcatgaaggtttcgaccgttcttcaagattcatcgttcgttctttgttttcttcagtcttcaacgggtaagtacctcaaaccaagcttttcaattcattctatgtacccatggtggtccacatttcgtttcatgtatttttattccccttttcatttactttntatacccncttttgacgtgcttaagccatttatttaagtcatttctcgcttaatgtaaaaataaaataaatntccaccgatcgtttgaattgtatcnatccggtaatttggtaaaatgaattcgaccgtcgatcgtgccgaccacgttggaataaaaaaagagga

SEQ ID NO: 121832 - DNA, 465 bp, Glycine max
  unsure (1)..(465): unsure at all n locations
tctgtggattcactttcgatctcaactataccatattgaataacattattcaccacanaaggaccaatccactttgacctcaacttaccactcatgagtccgagcctagagttatacaataaatttttttgtccaaccacaaagttcttcttagctatcaagctgtcatggaacttcttggtcttctcctagtagaatttggaattctcataggcttctaaacggatctcatctagctcacttagttgcaacttcctttcctctccagcctggtccataaagaagttgcaagtctttacagcccagtaggctttgtactctatctctacaggaagatggcatgtcttgccaaagacaacccgataaggagacgttcctatgggtgctttgtaggcagtcctatgcgcncaaaaagcatcatctagcctggtggctccaatccttttgttcggctgtacaatcttc

SEQ ID NO: 121833 - DNA, 487 bp, Glycine max
  unsure (1)..(487): unsure at all n locations
cgtgtatggtgcctgatatgaagatcacgttgagatttgaggttgtgaatatatgctctggcgaatctgatgatctggctcttcgacgatattttaaatctaagctgattgatttctttgatatgcatcctgaggtattttttttttaatttttagttgaaatccttgttgattgtatttgctacattcaaagcaacaaattatgccatcctgacaatttaacctaaatctttagctgtcatgtgttattatttgaagtgcttggagtcctcagtcctaactntaatgtggggatgttctggaatcattggtcgtgaaactcaaagattactagtgtgggcatttagattatctgcactgtactctatgatgtagatatactgtgtggtatcatgttatcctcatttaaaaatgggttgatggtaatatgagaggagctatacgacattctgtggttaggcttacctttgtatagctgcttttcctt

SEQ ID NO: 121834 - DNA, 495 bp, Glycine max
  unsure (1)..(495): unsure at all n locations
actaagctcttattgtaatcttganattcaggacaacactctgatntctaattattntgggataaaaatggtcattgactagtcccttttccatgacttaaccaaattacccagtgacggtgtaccatttgaaggtacactgaatgacaactggaaatttgatttctctgcccatgatgcccgccagttggtttgcaccaacaatgcggatatgaccggacgtcttcttgccgggtcattggcttttgaaagccgcatccttcactatttaatcgtgcatattntgcttccacggtcttccaaccttgcccaggtttctgaggaagatctaattatcatgtgggcctttcatacagggcgtcaacttgactgggcacacttagtcagatatcgcatgcataaggcattgcgattaaatgctccactaccatatccacagcttgtcactctctttttccgccattttcaaattcctcttgattctgaaccttatgt

SEQ ID NO: 121835 - DNA, 494 bp, Glycine max
  unsure (1)..(494): unsure at all n locations
ctaagcttaactcttagccncanactcctctacaaaatctgatttcatgcttaaataggaggccttgttagtgctcgtgcgcttagcgcaattctgcaccgcttagcgcacattagtngaatttggcttagcgcgtgcttttctcgcttaatggatggattgaagtggtgcacttagtgagatgaagcggtgcgctcagtgaacctgtacaactcatcttcttccagattcttcctcgcacttagcccatgagtgttgcgcttagaaggtgaaaatggcactnttcaaagtcgcctaattaacctaaaattaagagaaaatgattattaaacacacaaaatggaagtactaagtatttattacctatacttaacaaanagtaattataacactacaaaataaccatattcatcgactaacaacaggctgatggctaccccacccagctcttctccttctcctcttcctcctcctactgaggtagcatcacagtc

SEQ ID NO: 121836 - DNA, 223 bp, Glycine max
accagatccccatctcgaacgacgggtgatccacaagagacactcgcacaaaggagaggcctcatgtgcgctttgaaacatcatatcgccttcatgatggacgccctgatacgattgatgttgatcatggcgaaacatgtggtcggcgctgccactgtacaatgagctggccattattaacacactctattggctactgagcaccgatactcctggagatatt

SEQ ID NO: 121837 - DNA, 442 bp, Glycine max
  unsure (1)..(442): unsure at all n locations
aatcactcccgcatcttatctctagcatgtctctctcatctttctttacccactcctcacgtgtggtgttttagggagaaacaccataactaaacgcgccacaaggcatccctatcgcaccacatccaaatctagaacgatgggtgatcaagaagagacacacgaacaaatgaaagccgacatgtcggctttgaaagaacagatggcttccatgatggacgccatgttacgaatgacgcatctcatggagaaaaatgtggccaccgctgccactgtcagttcggctgccgaagcagacacaactntcttggcaactgctcaccatcctccctcaaacatagtaggatggtgaagggacacactggtgcacgatggctaccctcacctgggatacaactcgagcggcttagccttatggattgtcgcgcacatactaccaccc

SEQ ID NO: 121838 - DNA, 475 bp, Glycine max
  unsure (1)..(475): unsure at all n locations
tcagctggctgaagataggatgatactgaaactacccgtgtttacatcttcactngaaagagttaaggggagttaaaaatctgaatgcgttgatagtttaggtattttatagtgaaatgtcatgtatagtaatattggttttttttttttgtaacaatagttctaaaaggttatatttgagatgattttgtaaaaatccgtatagtaaattagtagtgtatataaaattaaaataaaaaatatgtggaggcatgatttaatttattttagttcattttaagcataatttattaaaataaaattttaagggcgaaattataatatataaattttagtgataccgaactcattcatgattntacagtcaagtatctaattaagttgtataccaaactcattcattcattcatgatttttgttggggttcaaatccacttttactaanaactcanaatgatatgctatatagtattat

SEQ ID NO: 121839 - DNA, 340 bp, Glycine max
aaaatagcttcgaggacgatggaaagcattgattgttttgctcaacggacccccagatactcacgtgcacagtgggaaatctgatctgtgaaccaatcaaacaacttggaacaattttgaccaactgtaagcatcaaactctgcgcaatacccatgcttccaacgcatggggatatgcgagtaacatccaaaattaaaaacaagacctgaacaagaagaatggcctgccctgatataactgttgacggaactgtccaacatgttcgactccggaagccgtgctcaaggtggccaagagcctgatagtgaccaagacactcacggcggaacaacatcaacc

SEQ ID NO: 121840 - DNA, 511 bp, Glycine max
  unsure (1)..(511): unsure at all n locations
tcaatctaagcttgtgatcgagtgagaacatgtgtcattggcatgatgcatgttcttatggtcaaattgtacaatccagacaatggaaggacaattgtgagccgagatgtctagttctatgaagaaggcacatggaattgggaggagaaagaagacacttatgantttntcccgtactttgaagaaatagatgaagaagccttgactccaaatgattcaacttcagcactttcaccaactccttcaaccaatgaagcctcatcatcttccgaagggagttcaagtgaaaggcccagaagaatgaganatattcaagaattatatgatgaaactgaagttataaatgatnntgtntgtctttttgttgacagtgaacccttaaactctgatgaagcaatgaaagacaaaaggtggagacaggccatggaagaagaaatcaaagccattgagaagaacaacacttgngagttatcaagcctttccaaaagtcatgaagcaattggagtcaaat

SEQ ID NO: 121841 - DNA, 483 bp, Glycine max
  unsure (1)..(483): unsure at all n locations
atttactattctgattgctgcttcggttatttattaaattcaagattatggaagatgattttaccgcttgtggtgaatgaaatataacacaaacagggcaattggaccagtgaatgataacaaattccttttttttttgttgaanaattaacaacacggaaatacattcccctctttgtatattgttactatacaaaacggaaacgcccctctctaaaaacaaaaaaatacaaaactaaatgtttcttcattttgtatattactataatacacaatgaaaatatatattttatttatatttttttacaaaatagaaatacatttttattntttagagaaagcacatcccattacaaattgaacacacattttcgttntgtaaaaatgctcaatgaaagtgcgtttccatcacggagagtttagtaaaaaaaaaaaagacatatggtaatgccaacaaaaaaaaaatgtgatgccaataacaaa

SEQ ID NO: 121842 - DNA, 473 bp, Glycine max
  unsure (1)..(473): unsure at all n locations
ggggtgatgttgcgcgtactgatgggtaccatgaggtgtttgctgtgtgttgatccatgcnggtgttgaagagacggcatgggcatctccttccttcctttttgcccctgttgccccgattctcttggcgttcacgtntgtggaggaaacgtaatcaaactttcctctcttcaatcccacctcaattctttccccggcaaacaccagatccgcaaagctggacggcatgtaacccactatcttctcatagtaaaacactggcagagtgtctaccatcatggtgatcatctctctctcaaccatgggaggagctacttgtgccgccaaatccctccatcgctgcgcatattctttaaaggtttcaccctctttcttgaacatattctgcagttgagtacggtccggagccatatcagaattgtactgatactggcttangaaggcggatatcagatccttccaagtacggatac

SEQ ID NO: 121843 - DNA, 491 bp, Glycine max
  unsure (1)..(491): unsure at all n locations
tactaagcttactattgttggagtctacttaggtaaagggatgaattatatgtctatgattganaacagtgggtcgacttgtgtccttttgtgtttagtgaaccctaacactaatgtttggtcttttgtaattgggtgctcttgtgaaaaatttggtcttcatttgttttttaaaacttgactctttatgtgtttgtgtcttgaacatgtcatgtattttttttttcttattcaagcaagatacatgtttttaaaattctctgagcatgaatattgatgctatgtctagctttttgtgatgaataaaatagcttatggcacacaatatgcatttttggacattcaaacatttcttgacggaagaaaagtgacgcatttggattcatgacccacttcataatagaattagtatccattaattcttatttatgatttacgtggtggaaaagtgatataagccttnatatacaagaatttgaaagagagaatat

SEQ ID NO: 121844 - DNA, 482 bp, Glycine max
tttgtgttgaaatcgctacaaatttctagaatattcttatttataatatgtatgaaaatagtagaatatcctagaactatagtgtgtatgaatatggtagaacaatctagaactataatgtgtatgaatatggtagaacaatctataactataagtgtatgtataagatagaagaatctagaactatcatgatactaatctatcatgaaaactctagaaagacctaaagtaatgtagaaacattcaccaccattgaaaggttggtgacttgagcctataaataggacattggtatgttgtaattgatcatccaagaaatcaatgacatagccttctttctaaaacaattctctaaaactatcaactatcatctaatagactaccaactgtggtatcagagctacgttcggtcatacattgggtgtagttatattacctgtagaagcaagcttcatgatgatgaatcacgttgattcaagtag

SEQ ID NO: 121845 - DNA, 366 bp, Glycine max
  unsure (1)..(366): unsure at all n locations
ttcttgtacaagctaaattttatttgtattactctgataaattagttgcaactcgagacacattgtagacatagctaacaagtgaaaatgatcatgtaggatgagaatgatggctctgaactgaatagtaggatttattaacttatagatggaggaaaagactatgtagatactgagaactatttccctctggatgatctcctttctaaacttactcttttttcctttattatgaatgttgttgttcctctgttcactactacaaaaccgatgttaagttaaatgcggtggcatatntgtaaataaaatatcattcttaacatcggttttccaaaaaaccgatgttaatgcatacacgttaacatc

SEQ ID NO: 121846 - DNA, 446 bp, Glycine max
  unsure (1)..(446): unsure at all n locations
cgtgagtggagccacgatggaggcataccctntaataaaatttttgattgatccctatgagaccaaggaaagcgcgtaatttcctgatcgtcgccggagttggctttttcaccatggcctgaatctttgatggttgataactgctaaataattgtgaattaatagtagttaaatagtcaaattttggcttaaaattaattatttagcatttatttataattaaaagttgaaaaaattaattaaattgaatttctggttgcagatacgaaaaatgagggtacattaagcaaaaatggccacagaaatgaagagaaagaaggaattctgaagtatgcctagcccaacagtggcgctaagcgcgcatcatgcgctaagcgagcaaccaactgcatgcgctaagcgtggcgttaagcacgaaggagcagaaaccgttacgcgcactaagc

SEQ ID NO: 121847 - DNA, 184 bp, Glycine max
  unsure (1)..(184): unsure at all n locations
atgatatacacacaatactgtnttcgtattgctttatgataagaacccacactgatctatactgctaaacactccataatcatacatcgaaactattaaatttattttatgactctaactatatatcacatccattctttcgagacatagtttctatgcactaatatcgacgactataccgcgc

SEQ ID NO: 121848 - DNA, 458 bp, Glycine max
  unsure (1)..(458): unsure at all n locations
ctgatctaccaccaccgccgccaccatcatcttagttntctattattttatttactagtactttgntttctagccgtgtatttggctatattatgacatctggataagttagtatttctttatttgcatgggttgattgaacaattatgaattatgttatatgactatgtgttttttatatatctattcatgtttcttgctncatgattggtttatattcttcaatgtatgtcttgcgaatgattaatagcatatgtttgtcttatacttgtgacgcactttggctttttgttgatgccaaagggggagagaaatatgaattaaatcaagaactcacataagtaattaacttaatgtcaagtgaagcataaactcaataacaaaggggagaatctaagtgagtgatcgactaggacaaagtgtgtgtatgagtttcttgatttcacgtttgtcatcat

SEQ ID NO: 121849 - DNA, 161 bp, Glycine max
tgttatatatcttctatatggtgctcccgaccacacatgaatagtccatcaatgcaacgctctgcctagcatctgatactcagctcattcttggggtgatattactcttgcatgcgatatcgcctatgcatgacacccctaaaccctttgaacttatgctt

SEQ ID NO: 121850 - DNA, 498 bp, Glycine max
  unsure (1)..(498): unsure at all n locations
cctataaaactcagcttcggaatcgatacacttatttggtaatcgattaccagtgactgtttctgataaatcaaaagatgtaactcttcanaaaggttttgactntttcaaattggttntaagttnttctaaatgttataaatcttctaaatggtcttcttgaccagacatgaagagtctataaatgcaaggctttgtttagcatttgaaattcaattcattctttcaatcttatatacttttgcaatcaatctcgttcaatcctttacaagccttaaatctctttgaacttattcttcttctttgtaccaaaagctttctgaagttttctggttttccaaaccttgaaaacttgtgttattcatcttttcatcccttctccctttgccaaaaagaattcgccaaggacctaaccgcctgaattcttttgtgtctctcttctcccttttccaaaagaacgaaggactaaccgcctgaattctttggtgtctcccttct

SEQ ID NO: 121851 - DNA, 489 bp, Glycine max
  unsure (1)..(489): unsure at all n locations
tggtaaggatggtatganaatatgtgtttaagaattttttaatgttaaacaaagccttgcttttatagactctccatgtctggtcaagaagaccattcagaagagttataacttttagaaaaacttaaaacccatttgaaaaagtcaaaacctttttgaagagttacatcttttgattttttcagaaacagtcactggtaatcgatcaccaaataagtgtaatcgattacacaaagcttttgagtgaaaggatgtgactcttcacatttaaatttgaatttcaacgttcaagggcactgataatcgattaccaaaacattgtaatcgattacagccttttgaaaataattggaacgttgtaaattcaatttgaaaactttntcaaactcatnttgctactggtaatcgattacaacaatatggtaatcgattaccagagagtaaaaactctttggaaagggtntatcananaaccatgtgctattcaac

SEQ ID NO: 121852 - DNA, 494 bp, Glycine max
  unsure (1)..(494): unsure at all n locations
cgcctcggccctngatatatntgagggactcatggtcactatgatatgacaaattccttgggataaaggtagtgttgccatgttttcaaagcccgtactaaggcatacaactccttatcataagttgaatagttaagggtaggaccacttaactcttcactaaaataagcaattggatggccttcttgcatcaacacagccccaatcccaacatttgaagcatcacactcaatttcaaaagaattttgaaagtttggcaacgcaagtatggggacattagttagcttttgcttaagaacattgaaagcttcttcttgtttctctccccatttgaaaccaacatttttcttgagcacttcattgagaggtgctgccaatgtgctaaaatccttcacaaatcgtctataaaaacttgctaagccatgaaaactcctcacctcggtcacagacttaggtgtaggccattcttgaatagccctaagccttctctcatc

SEQ ID NO: 121853 - DNA, 414 bp, Glycine max
  unsure (1)..(414): unsure at all n locations
cgcagtaaatttaaagaaaacaacacaggggcaaaatcatcattacatatgcattaaatattatnttatttctagttattattataaaatgaaatttatttttacttcacgttgttataaattataattatctttttattatatattaagttntgtaatacaaattaaatgttattatcataataaatattgtatattttttataaaatatacgaattaattaatttttatgatttaaattatactaaagtgtcacacaaattattatttacatttacatgcgcgtaaaanaagaattacaaatattactcataattatgttcactgataatttatgtataataatatnatttatgttattacgtaattttgtattaaaataaataatttgaaaataaaaagtaacagaataac

SEQ ID NO: 121854 - DNA, 439 bp, Glycine max
  unsure (1)..(439): unsure at all n locations
acactctttattgtacacgaatgctccaagaaaattcaaatggccatgacttctaacttcgtatccgattgcaacccataatatatttagacgctcaaaattgaacatgacagggtcgagcacattcaaatgaccataactcttactttcgtatccgattgcagactattaaatatcaagacacttgaaattgaacctggagtttgctggataattcaaactacaataacttttgactcggttgtccaattgaggctatcgagacgcacganatagaacatagaaactcggggcaaattcaaattgtcataacttctgactntgatatccgattacagcccataatatatcgagagttgaagtttaaatgtccacggtgggtgagttgaatatatctcttggactacaaataaaacaaaccacaaatggaatctttatt

SEQ ID NO: 121855 - DNA, 211 bp, Glycine max
caccactcgcgcattgctaggaatcacatgctccttatatttacctgatgatacacattatggctatgcgaagccacgctccgtgtatgataagcattgtacgtggggcatcctaaattctagcaatatctgtcacgagcgaatactagttctcatggctatctgcttctaataccaaatgtggattaccatccatcaccatgtttccttg

SEQ ID NO: 121856 - DNA, 499 bp, Glycine max
  unsure (1)..(499): unsure at all n locations
gcttacacctatntatatcctaagcatntgctatcacanactacttacatacattngaaatacaccatacaaatgtctactggttcactcctatttatttatatgcatattggaaagctaattacatcatgtacatatttgcattcaaaaggcattccgcactatcatacattcatttaggaagacaatcattcacacattgctaggaatttcatgctccttatatttacctatgtatacacattattgcaaggtgttttccacgctacgtctatgtaaagcatcaaacatggggcaacctaaattcgagcaaaaactctcacaagcaaatcctaattttcatgtntttctaattctaaaaccaaatttggattcctagccataagcatgtttccttgcattgaagctacaagttcgggttcctaagcttggaatntcatntgngcacctattttgaatctcctatgctgtacctacatataagaaacagtcccactct

SEQ ID NO: 121857 - DNA, 462 bp, Glycine max
  unsure (1)..(462): unsure at all n locations
gtatgtntattacaaggcgtatttttgtaatttataataatatactgggtgtactataagaacgctggtgcacgaagcaattgccattaaagtggcagcagcacagatagcccagaattgtttggacaaaaggaccacccgaacacttacatatgtttgtagtttgaccacctccctccaacccccacaaaaaaaaaaaaaaggatagtcacgtatattaaaactcaataaatagtgaaataggcacaatcatattttaatctgaagtagattttattgggtgatttttttctacaaaaatacagttctggtgttttaaaatattttgaaattgcctgtgttttttatgaanaaaaaaaatctaatccttataaagtttaattcattcttagtcttaagttaccaaaataatgtaatttagtcttttctaaaataaaatacgtttaatgtataatttaactt

SEQ ID NO: 121858 - DNA, 483 bp, Glycine max
  unsure (1)..(483): unsure at all n locations
actaagccttatcttntttattaatttagaaggtaattntaattttgaatatgaataacataatatttgcacgaatttaaacgtaaaatcattccaaacataaaataacattacattaacttaaacaatatattatcttcaacagagtggaaacaaattagcatcaaatactacaactaaggcatgctaattttgcaacaaggacacattatcttccctttctattacatgcttactaaaaacagctaaaatttctattggcccaaagtttttttagtagtttgaatgcactaacaccttcagcacgtcatcgttgattntaagttcaataatttcgaatgtgataatattatctgaatactcatagtgacttggttgtcgaaaaaacaatcgccttaccgtttgtatttcacgaataccataagggggaatcccttgaggcgcaacttacttgatcaaatccttcagttcatccatggtaca

SEQ ID NO: 121859 - DNA, 494 bp, Glycine max
  unsure (1)..(494): unsure at all n locations
ngatattcggatacaagagtgtgctatctttcacttcttacatctacatttccttcattagtgacttcaagaagtttccatattttctttgcacttttgcaccttgcagtatagaaaaatctatcagaagataaaccaaaagtcacaatgtttttagctttttgatcatctttcacttttcttttctcatctgttagacaagtggccttaataacttaaaaggggggggggaggtgaattaagtcttacaaaatttcctgctaacaaacttttaacccccttctaaatgataggctttagaatgcagaagaagcagcaacaatcaatttaataatgttctctaaacatgcatgacaaaattgattgcaataacataaatgagatatgggaagagagaaatgacaactcaatntatactggttcaaccacttcccgtgcctatgtccagtcctcaagcaacccacttgagattntcactaactttgtaaaaatgc

SEQ ID NO: 121860 - DNA, 200 bp, Glycine max
tcaaatgaaacaatggacattaaatgttcccttaatagagtcactctcattaagattctatctactgtcgagaatgtgagacagttgattccataaaactgaacgacgctccataggagatcaattgtttgtcatctctttctgtctaagaaccattatcacgtgaattttgctcattaataaccatcactctaaggagg

SEQ ID NO: 121861 - DNA, 489 bp, Glycine max
  unsure (1)..(489): unsure at all n locations
tatatccatntccataaccaaccatntctaaaccatgtnttgttgcttgccttatcccatgatggctaatatgtcccttctcaaacccatccatttctagccttggaacccaagtgtaaaatntctcatgcctctcctttctctcagctccttcaaatgaaacaatgttctttatttcttcccttagtagagtcctctccattaagattctctctaattgttgtgtatttgaaacagttgattccaagaaactaaacaatgcaccataaaagtccaatactttgtcaactctntctgtcaaagaaccattaacatttgatttttgctcattaatcaccatcactctacgttggagtntgcacatgccatttagaaaatgcataattntggttgaagtagcacatagaataagttgtaacaatgatgaatcagaactaaggttggtcttttgtttcctaagcatctcaacanattgatgtgatccttact

SEQ ID NO: 121862 - DNA, 224 bp, Glycine max
ggcaggaatgatggtcaagctgaaactactacttactaatgaacacacagaataaaagagtgcatgatgatgataacgctacgacatggcgtcatctaatacaaagtagcttatcatgcacacgctcggtctattacacttatcgatagacatgaaaagagttgcaccataccacacttggaagaagatgggaccattacattcgcacgtgcaagatatatgtt

SEQ ID NO: 121863 - DNA, 486 bp, Glycine max
  unsure (1)..(486): unsure at all n locations
ngcgtgaagggtgagatcagtaactgtacagcgcgcagttctttcttatacagaagaacatccatccattcacaatcgcacatcaggacttataacatattaactcaaccattgctctgtaagtgcaggtctggaaatgggttggaatggtgctgaacggaagtttagtacttttgaatgaacaaacggaatagtattgtgaatgatgatgaattgagtccaacatgggatcaattagacgtaactgtaattcatgcacaccatgagtcatttacatattccaaagtaaaggacaaaatntgaaacataccattcttggaggaggatttgaccataacattctgactcccagtattaatgttgggaaacgttgcttcttcgtcctcatcatcatgtaccgtaaacggttaatactaaattaatggatggattggagtcatcggatgatccaggattcttcttcataccctcatcctatacacaatc

SEQ ID NO: 121864 - DNA, 76 bp, Glycine max
tcgccttcatgggaatggccacaatgttttatgtctttcataggcacttactcgacatatgcgtccttggtactta

SEQ ID NO: 121865 - DNA, 495 bp, Glycine max
  unsure (1)..(495): unsure at all n locations
ntgatgttngtgttgaatgcattaaaggtaaacagaccataagtcttatattatgtgcatatagagctacgacttcttggaattgatacatacagacatttgtgggccatttcatacaccttcatggaatggtcaacagtattttatatcattcatagacaattactctagatatgcatacttgtttcttatacatgaaaagtcacaatctctggatgtgtttaaaacatttaaagttgaagttgaaaatcaactcaacaaaagaataaagtgtgtcagatctgaccatggtggtgaatactatggcagatatgacggttcaggtgaacaacatctggngccttttgccaagtacctagaggaatgtggaatcgtcccatagtacaccatgccagggtcacctagcatgaatggtgtggctganagatgaaacataactcttaaggatatggtatgaagtatgatttgttattctaacttaccagagtcactctg

SEQ ID NO: 121866 - DNA, 494 bp, Glycine max
  unsure (1)..(494): unsure at all n locations
tcttcaaatcgttctgccatggtctgcattttctttccagtgttatttattntcttgtgttgaccacttacctataaaaataagtagatttcgagtgaattaagtgctccaacatgtgtaccttcagtcataacagaggatgtccctaaagcttcttcaaatcgttctgccacggtctgcattttctttccagggatagtaattctcttgtgttgaccacttacctgtaaaaataagtagtaacacatataatgtatatagttatatacctctttgtcacttgatgatccactatccacaggttcaggggaatcttcactgttaatgactgtctcctacaagtgggatgttaggaaccaagaattgaaatgaggaagacaataaaagattctattgactagtaagaaaagaacagagnataggagagaaaactctcctccaagggtttccccttcacaaaggatttctcctttcacacagagctaatgctcaat

SEQ ID NO: 121867 - DNA, 143 bp, Glycine max
cttatctatagaaaaatcatgtggaactacccttgactcttctacgaatgataaggaggtgaaagcctcatcgagagcgcacgaaacatgacaacactatccttataccaatgactcgcgatccatattgaccatgatttcct

SEQ ID NO: 121868 - DNA, 453 bp, Glycine max
  unsure (1)..(453): unsure at all n locations
ctcaatgctcttaagcaaaagttaaccaatgcccccatacttgctttgctcaaattttcanaatctttcgaaattgaatgtgatgcttcaaatgttgggatttgggctgtattgttataagaaggtcatccaattgcttattttagtgaaaaattatgtggtcctacccttaactattctacttatgataaggagttgtatgccttagtgagagcgttgaaaacatgacaacactatctttatcccaaggagtttgtgatccatagtgaccatgagtccctaaaatacttaaaaggataaggtaaactaaataaaagacatgccaaatgggtggaatttcttgagcaatttccttatgttattaaacataaaaagggaaaaggaaatattgttgcagatgccttgtcaaggagacactttttgctctctatgcttganacanaaatgattgga

SEQ ID NO: 121869 - DNA, 494 bp, Glycine max
  unsure (1)..(494): unsure at all n locations
tcatgatgatggatgaatcaagatgattcaagttgttntgatgattacaaagatgatgacaaanagcccaagagaatgatttcaagattgagtcaagaacaattcccaagatagtgatttcaagattgagtcaagaacaattcaagaatcaagagaaatttgatttcaagattcaagaatcaagtttcaagattcaagactcaagattcaagaatcaagagaagactcaatcaagataagtactaaaagtttttcaaaacattgagtaggacatgaagttttcacaaaagcttttaccaaagagtttttactctctggtaatcgattaccagtttattgtaattgattaccagtagcaaagtttgttttcaaaagctttcanactgaatntacaacgttccaattaatttcaaaatggtgtaattgattacaagaatttggtaatcaattgccagtgtgttggaatgttgaaattcaaattcaattgtgaagag

SEQ ID NO: 121870 - DNA, 331 bp, Glycine max
  unsure (1)..(331): unsure at all n locations
atcgtgggatgtatgggttaggctataagcccactcaggcagatataaagagaagcatcgcgggaaggaagagcggtagtcaaaactcgcggttgagacaagaaggtgaaggaagcccaccctgccacataagtangagctntataagcgcgggtctgggggacgaaggtcaagtggtcgcgatatacgaagatggtgttctgagtacattggatntggtatgaccatgcnctcctgatttccagctgggaaattggcgagtggaagaacgcctcggcatttacgcgacgagcataatgtaaacctttacggttttaaaagctctatagtt

SEQ ID NO: 121871 - DNA, 501 bp, Glycine max
  unsure (1)..(501): unsure at all n locations
atcgggcatcacaacatgttgtcaagtcatttatcgngtcacgctctatctataaattatgtgttgtcaattatgataacgacgcatcatacatgcgtagatcattntagatgcacaaacaaatttagtccataacgcaacaattaattaatgtctaacgattcattattatacaacaaattacatttcataatcaagcagccataatactgaatgttcagtcttcatataggtccacatattctcttctaattgtcattaggctcatgtattgctgcatcctaccaatatatgcagttggccactactttgcctgaggaagacaatntcttgaccacaacaacgctacatgcggtaaaggacaatgctctttcagaataaacctgtttgtatgtgaacaaacattatcaactcanatgaacgacccaagccattgcataatngtaaaaattataataattatcttcaatgtatctgaacaaaatgaattcctgatacgtg

SEQ ID NO: 121872 - DNA, 483 bp, Glycine max
  unsure (1)..(483): unsure at all n locations
tactaagctgttctatgcaatatagattgtgannattttttggatctatgtttatcatgcangatggaattgttggaactatagaaacaattatgtgaatagatcactagaatagtctctttatatttgtatatattcctatgcatatttctacatggaacataaattccaactaaaattgcaagttttggttgtctatgtgatttaaatgatgcttctgttcttggctatttggaactctatgtcagtggatggcatcgtgaatatttagctagtgagataagactaaagtgaggattttggctctctttgaatcacatattacaatcttggttattcgatttaagcatgtctcgaatggattcaataagtgggctnttgtttttcatgtgttcgtttatttttaaagtcaaatgattttctttgttggggttggggaagttgttgttgggtaatcttggtaggtgattcatggtcctaatg

SEQ ID NO: 121873 - DNA, 492 bp, Glycine max
  unsure (1)..(492): unsure at all n locations
ctatcctctaacttaaacatggataacttgtggtctaatgttgtattttgcattngaaaaaaattatgaaatctaatgatcatggctgaatctcatctcattatacaattgagtttgaaaccttccataagagttagagattntactaaaaggcaattgcttatttccaacactagcttattgctccaaattgagcctttcaaaagcataacatccaccaaactaaaccatatatcatcatgactaacatttgaattttgacaagtcaaatatctaaggaattaaattaagaaaatcgaacagtcatgaagattgcacttcgcaagtaactacatacaattcccataaacaatttagtgaatggaagcaagtgtaattgaccaacaaattcacatgcaagacagtaatatcctaacttgtgttcaacctcatcagtacactanatctactgactgtttccacttcaacatcgctaaacagctgaattgaatc

SEQ ID NO: 121874 - DNA, 464 bp, Glycine max
  unsure (1)..(464): unsure at all n locations
ttcaaactcagctctcaggagctcctctctatgatgaagcatgtgtacacttgttgtatctntgatgaatgagagtcttgtgagacacaactcacagtngaactcctctccctttttcttcctccaatttctggctccccctctctctctctctccctctttcttttcctccattgaagcatcctctccaagcttcttatccaaggctcatcttggtggtgaagctccttcttccaaggcttattccttaatggatggcgcctcctctcacctatattcctttgtcttccgctgcatctccatggtggaaaatcaccattaaaggaccccattgaagctcaaagatgcagcctacatagaagccccacaagcaagcttccatcacanatgatgctgatctttatgaaaatacaattcattttatattaagggatagtggaggtacttcatccaattatcatcct

SEQ ID NO: 121875 - DNA, 474 bp, Glycine max
  unsure (1)..(474): unsure at all n locations
tgcatcaagtggtaatcagagcacaagagcttcaagtaggttctctcttatacctccattaattttttctgtaccttctcttccattgatgtttcttcattcttctccatgtatctcctcacatgtcttggtctaaatgttgttaacatgattctttagagtttccaccgattaaacttgctatagaaactagatntgattctctatggttcacatttcttgttcttgttcttgaaccatgaattgtgttgaagttatgttcctttgagttttgtcttggtatttnttgtggctganacctaaaccataaaattcttacaaaaatattatagtagaagacaagctcaaaaatctagagtgacttgttcacctattgtagttntgtcatagaagtcatgtctagtcatgatacttgtcacataagatctcttatgttgggctgaattctatattcttggttctctgtctaactca

SEQ ID NO: 121876 - DNA, 484 bp, Glycine max
  unsure (1)..(484): unsure at all n locations
ctcaccttgatgatatgtcccttttgacctttattatttatctctggctttcaattattgaacagaggtgtgggcattcngcgccaagtatggccacccaaagatgttaaatctcatggtacagcatccctggatcgggttttaggtggttttcttttccctttgctcatgccttggagaacagaacaacgctcgtacacttggtgcttcttactctagtgcactctttgctagcaggacacaacagggttcaagcctcaggattcaccccactagtcatatcttatcctatcctatatactattactggaatatcacctaaacgatctaattggacttcattattattacttgcagtaacgagcagtacctaacactattatgacaataccaataaaggataagacaagagtctgaagtaaatagtcatgagatgaaaaagactaaagatataaggagaccttggagtaataacgttcatatt

SEQ ID NO: 121877 - DNA, 306 bp, Glycine max
accatcgacgctggcataatgctactatggaggactaaacatgttacaacgtggctcctctcaagagctagcttttacattatgatgagccttcaccgattatggccccatatggagggtgatgaactatcttaccttagctaggtgacatgattcatataatgcatatcgcatcttttcacatcattctgatcaacatagacacaggggtaacgtctacatcattctaatatatacactgctggacgacgatatggaccatgatgaatctctcactgaccaccgtgatgttcaatattttgacta

SEQ ID NO: 121878 - DNA, 490 bp, Glycine max
  unsure (1)..(490): unsure at all n locations
tatgtttctagtgtgttagtgttctgtccaaggccagactattattatttcttcaatccttcaatttgatgcttcacataagtgcttctcatggataacttcatcattcaacaaccttgcctcttcttatgtagctagctcttcctttctgatgtgtcttcagtgattatggcaacatatggagggtgaagaactattagactctagtctgttgacattattcaagtgatgcatcttgagtctttntaaattattctgatgttcagaaacacaaagttaaggtcttcatcattctaatgtagactctgtgtagcttcattatgaaccatgatgaatcttctatgtaagaccttgttgttcagtatcttgccaagaactaagtactcagagggaaacaaaattcatcattctgatgaatttcaagaattcttctgagttctcaactctaacagtagttctttgaacctgtttgaacattattctgagtatc

SEQ ID NO: 121879 - DNA, 131 bp, Glycine max
tgaaagagacctcccctctttgaacagatacatcgttaaattgatcacaaaccaacgctgctagtcgaggaccaaatattgtgaatcgattacacaaagctgttgattgaaacaatgagactcttcacttg

SEQ ID NO: 121880 - DNA, 497 bp, Glycine max
  unsure (1)..(497): unsure at all n locations
ctttggtacanagaagaagaagaaattcaaagagattcacagagattcatggcttgtaaaggattgtatgagattgattggaaaagtattcaagattgttgttagaaagattgattaaaaatgtaaaacaaagccttgcttttatagactcttcatgtctggtcattcagaagagttataactttttagaaaaacttaaaacccatttgaaaaagtcaaaacctttttgaagagttacatctttagatttttcagaaacaaacactggtaatcgattaccaaatatgtgtaatcgattacacaaagcttttgagtgaaacaatgtgactcttcacttttaaatntgaatttcaacgttcaaggacactggtaatcgattaccaaaacattgtaatcaattacagccttttgaaaatattnggaacgttgtaaattcagtttgaaaacattnntcaaactcatttgctactggtaatcgatacaacaatatggtaatc

SEQ ID NO: 121881 - DNA, 494 bp, Glycine max
  unsure (1)..(494): unsure at all n locations
ctcganattagatggccatacctcttgtgccatagccaagtttctatttctgtggtggactacatacacttctgatcactaatctgaatttcaattctaaatgttctgttggccgagagtggagattttaggacactcttcttgtctttatcaaaaactttcagcatgttgtccttcatctccattgtataacccttttcaagcaattgtccaaggctgagtaaattgcttttcatcttgggagcatacaagacatttgagatgcaggctttctttccatcttttctttgaatcatcacgctccctatcccttctgctgtaattgagctgtgatctgcgaatttcactatgcttttggaagtctcatcaagtgttgtgaaccactctcttctccctgacatatggtttgagcaaccagtgtctatgtaccagaaattatcacactgaagatcattntttgtggtaaccatcagcagataatgatcatcttctgt

SEQ ID NO: 121882 - DNA, 271 bp, Glycine max
  unsure (1)..(271): unsure at all n locations
atcgtgtcctgtgatgacactcactgacttcacatgcatactacgttctctccatactatgaatgtgtgcgtgtatactccgcccatcatgngccgctagtttaactcacatgctctgttatacaggcctgcacaatgggtgtgctatgagaatatatgcatctgtgtactagcaggggcggctatgacgctcaggctatattctctgctgagactctcacacatcacatcttgcctgcgagtgttccgatgtgtgtcatggacctgacgc

SEQ ID NO: 121883 - DNA, 496 bp, Glycine max
  unsure (1)..(496): unsure at all n locations
tctaactaacanacaagcaaaactaagcatggtttgttttgtgtgagtataacattcatttattccagaatcaaatcttgttaagtctgttcactttgttaacactcatgattatgaatgtatacttgtatttctttatactattcatgaatgtatgtatactcctcccatcatagtctgtttgtttaactcacatgctttgttttacttgtttgcagaatttgtgtgcaatatgtttagatcctttgagttactagcaagggcaacagtccaggtcaagctatattcactggtgagtgctctcacacattccattttgcctgcatttcttccaatgtctgccatggtagtgtcacttgccccatttgtcgtgcccattggacccactgcatgtgatcttggaaatgtctgtaggctctctcctttttaaggcacgtagaagaagatcactctattaataattaataatgaatattcaaataataaagacaaagat

SEQ ID NO: 121884 - DNA, 498 bp, Glycine max
  unsure (1)..(498): unsure at all n locations
actcagcttttatccaggctcatcttggtggtgaagctccttcttccatggcttatttcctagtggatagcccctcctctcacctcttctcctttgtcttccgctgcatctccatggtggaaaatcaccattaaaggacctcattgaagctcaaagatccagcctccatagaagccccacaagcaagcttccatcaagtggtaatctgagcacaagagcttcaagtaggtgctccttaaacctccattaattntttgctttaccttctcttccattgttgtttcttcatttttctccatgtatctccccacatgtcttgtgataaatgttgttaacatgattctttagagtttccaccgattaaacttgctatagaagctagaatttattgtctatggttcaaatttcttgttcttgttcttgaaccatgaatngtgttgagtttaggttcctctgagttctgtcttggtattttctgtggatgacacctaaaccata

SEQ ID NO: 121885 - DNA, 443 bp, Glycine max
aacatatgaagatactttcaccaatgataagtcaaaatgcctaatcaatgtgacaacttacaagtgtccttagcatataagccatcttatataataataagaatctccataaactagtaggaggcaaatggaacagaaatggtttctcatgtaaaatagtgaaaaacttgtgaatagctctctcttcagacattttttgattccacctatttaatttatggagagatacacgcaaacttttaagatgaccttgtcatgagaaaatatcacatgagataatccattcttgatcagagtgatcattttcttcatgggataataggagtagcttgaccatgatctcatcaaacttaatgcacacacagtaaaggcattacgtaagtaatacatatatatagtcaacaagcacaatttgtcaatttcagttcatgtatataaatata

SEQ ID NO: 121886 - DNA, 485 bp, Glycine max
  unsure (1)..(485): unsure at all n locations
tcttgatcttgaacttgttgactcaatcttgaaatcatttctttggttttttcatcatctttggcatcatcaaaactacttgaatcaacttgattcatcatcatgaagcttggttctacacaggaagccttctttacaataaaaagaagaacaagatgaaagattgcttaaatacaagtggtgaggatgtcttcttcacctctaggatctcacaatcactcacaaactcatctcaagctctcaaaccggctcctgcttcaagctctagtctctgcagatcttcacataacaaaatctctcanaactctctggaacttggacctttctctctctagaatctctagacatgcanagctctgaatcccagttcaaactccctctctgaatcccagcccgtgatattgttgagttgcaggaagttgtttaaatggatggtttgcttacanagcaatccaagtagagcaacaattaataaggaaagaagt

SEQ ID NO: 121887 - DNA, 480 bp, Glycine max
  unsure (1)..(480): unsure at all n locations
gatttgattcanagatgttntgatgatatcaaagatgataaganaagatgagcccggtgcagacgttcatccatctggtgcagatgctggtgcagacgtacatccatctggtgcagaggctgatgcagatgagcctgagggatttccaagtggatcgaccaacccatcagtgtttaccgagtatgctgagcatgttgcagccagcgtatggaccaaagaggtatttataattttcaatttaagttatttgttaagtatgtgttattattgaagtttgtgttcctttaaaatattatgttaatgaattgtctattcctttatacttcaattcagaaacgtcctgaactgaagttatcctcccatgggaggaaggtgcagaaattaggtaggcttgtccctgccattgagggactagttgctggcacaggactaagtcctttgatcgtgtgtatagtagacactggcgatcggngacttata

SEQ ID NO: 121888 - DNA, 427 bp, Glycine max
  unsure (1)..(427): unsure at all n locations
atccgcaatctacgccaagttgctgggactcgagattattattactctgctntggctaggaagagnatcgatgtgcaggagaatgttacgaaccctcgctgtgttaggaaaacgcttagagtttatgtttacaacactttttcgaatcacgtgaaagtggagcctgcgaagaatggtgtggaggagccttcttgggcgcttatgataaccggaagggtgttggaagatggtaaggattctgtggcggaagggatttcgacgaacgaatatccaaaattctcggcttttttcaagaagattaccatatacttggatcacggtttgtaccaggataaccatgttgttgtgtgggatagtgcccgttctgcggctgcacagcagcgcgatggttttgaagtgaagaggataggagacaacgaattcactg

SEQ ID NO: 121889 - DNA, 503 bp, Glycine max
  unsure (1)..(503): unsure at all n locations
tactaagcttgctcactatgatgggcacattgcatctaagtagttgtagaatgtttctcataacaatattaatacgcactggtgtgtgatttgntttattagttgcacggtaacacttgcaattagcaaaaaacacacaccacccaaaattggttgacttcttgcttgcttaagataaatgaaataatggttgtgcgttttgtgcaaactaactttttatggatgtgtctttgcaggaaatggctccaaaaaagattctctctaagagggcaaggaagggtgccgcaaaagaatgatccagtgcaactccacaagcagacatagaatntgacgaacaccgtttccgaagtgaggaacatcaatgccattttgaagcgatcaagggttagtctctcctcatagagagatgggtccaactaagagagagggaatacatgaagttccaggaggaagttgccaggcggcaatggactcaactcacagggcccatggctgaatatgac

SEQ ID NO: 121890 - DNA, 465 bp, Glycine max
  unsure (1)..(465): unsure at all n locations
gatccaaatgtactctttatagttgtagctcgaatcccgcaacatttacttgcattcttttccttattagtggagactcaaaaaggacctatactttttagtgtgaagaggtatctactcagaatattcccaattaaaaaaataaataatgcaatttataattgaggtagggaaaagctgatcttacatgcaccatcgatctgcaagagtaataaggtgtggaactaaatgaaagaccctccaattattgcttctgcatgctagctcatcttccacaatctataattaagagtccccaacatcatatattatagagattgacacntctttattggagtgaacaattgtaaaactcctcatgcaattaattaactntcatcgtctgttataattaacttagttttcattttaatttattgttggtgcangtaatgacaatgtcaataatggttctttccttaatat

SEQ ID NO: 121891 - DNA, 456 bp, Glycine max
  unsure (1)..(456): unsure at all n locations
tgtttttccaaggctacacaaaaaataaggcttgcaacacttaagtgtttctgctctcgggaaaggaagtgtcttgaacacaccagaagtcatatcacagatagcaacagtcagatcatggaaagttgtcctgtgaacctccagaccaaatttcaagaagctccaatggttaacaaatgcaagagggcgcttntaccgagacgacttcaggcagcttcctcgagaagctntctcgtgaggcttccttgagaagctagagttntaactacccacacccctctaataactaaactaacctatttgaaaataaaacatggataaaataacacanaanataaaatcaaacatcaattataattactaataatattttagggtgttagacatttctagacttcaatgtcttttgtctttacanttcaagacttcaatgtcttctatctttacatttcaaga

SEQ ID NO: 121892 - DNA, 497 bp, Glycine max
  unsure (1)..(497): unsure at all n locations
catctccaacatagtctgcatcatagtaactcgtgagntttttgtatataccaaggtcagaagttccaataagatatctaaaaactgtgtttgacaacagataatggacttcccttggttcttttggtaaccttacacataagcaaacactgaacattatatcaggtctagacgttgtaaggtatagaagtgatcaatcattgctttgtattgagtctcatccacctttttagatttttcgtctagttcaaggtatgtggttggatgcataggtgttttcatcacttttgcatcgtccatgttgaacttctttagaagttctttcatatacaaggtttgatggctgtaaattccatttcttgtntgctntatctgcagtccaaggaaaaatttcagctctcccatcatactcatttcaaattctatttgcatcaacttagagaaatcttcacacagcatttcattagtagccctaaatataatgtcatcagcataaa

SEQ ID NO: 121893 - DNA, 392 bp, Glycine max
  unsure (1)..(392): unsure at all n locations
actaagctgctagcctattccnaaattgaaaataagagatattgtcttattttacgggccgctagcgcacacnaaccaaaaatctaagtgttagacacattactccctaacgcacagacgtgcttacgagttcataagcaattgaactttcaaccaagaaatgacgcgcttagcgggacatggcacgcttagcgagttcattggaatcagatgtcacgaaatgagactccttacgcacagacgctacgcctatcggatttcagaaaagcggggctttatccctcactagccctataagcattaacctatcaaacagccatgttcacataatcctgatcagttacgacaatacctataactagttaacaaatcaccacactactaatactcct

SEQ ID NO: 121894 - DNA, 488 bp, Glycine max
  unsure (1)..(488): unsure at all n locations
gggcgcagtatgaagaagaacaaagatcaaaagagctctcattgtattatctctccacagatatntaacaaacaaagcagcaacccttcgcaagaagtggaacctcctaaggttcagctcgaaaagaaagtgcacctgtggatgcctattacaagactattgtcagtgcatcctgcagatatccaactctctgataatgatcactcatcccttggcaagttacatgaacaaatgtacttgcaagatcaagacacaatatatcctcctattggatcaagtggcctcggaataattaagaaggggggttgaattaattattactgacactntactaattaanaatctacccttcttatgcttttacaataatgttaagaaagtgaataacagatatggaaacttaaccaaaagtaaaagcgataattaaaatgcacaaccgaaattaaagagtgtagggaagaagaagacaaacacaagaatttatacta

SEQ ID NO: 121895 - DNA, 203 bp, Glycine max
gcaggcatcttaataatctatgcttgcaagcatgatttatgtgaatcttgatggctacacgatatgaacttgatctttgcatactatacaaaatgatggacatatctgatggttgatggacatactctgctttttcttacccctatgagacaaatggctggtgcggtcctcatgcacaccaaccttgcccttatcggatccat

SEQ ID NO: 121896 - DNA, 407 bp, Glycine max
  unsure (1)..(407): unsure at all n locations
cttggctcaaanaaaaagaagcttatatcgattttcttatatcgccgctatgatttgaatttcttgaatcaaataataacaattgagtattattattcttttgtaaaaatttcgcaaggtattcttaatagagtctattcaatgcagaaaaagattcatatgtcagaacttgatggaaacagtataaggaactcgatctttgtttacaaacgaattaatgttcatatctcgttgcttatggactttctctcctttttcttacccctatgagcaaagggctggtgcggtctccagtaacagcaaccttgccacagataggttcgaggttgttgctggctttgggaatcttgtggagtttccctgtggttaagacaaacttgaactnnttttctttattttgcttcttc

SEQ ID NO: 121897 - DNA, 333 bp, Glycine max
  unsure (1)..(333): unsure at all n locations
cgagagcctctatgttaattttgagcgtctcgatatattatacgcctgaatcgaacctcagtgtgaaaaggtatgaccatttgaatatctttagagcatcccgtgatcattntcgagcgtctctatatgtgatgcaccttaatcggacctccgtgtgaaaagttatgaccatttgaatttctcgagagcttccgttgttcaatttcgagcgtctcgacatattatgcgcccgaatcggacatccgtgggaaaagctatgaccatttgaatttctcgagagcttccgttggttcaattcgagcgtctggacatattatgcgcccgaatcggaca

SEQ ID NO: 121898 - DNA, 439 bp, Glycine max
  unsure (1)..(439): unsure at all n locations
gtgactcttcacattgaatctgaatttcttctttcttaggcactgataatcgattaccaaaacattgtgatcgattacagggtttttgaaatccaatggaacgtcgtaaattcatttgaaaacttnttcannatcattttgctactggtaatcgattacaataatttggtaatcgattatcagagagtaaaaactctttggtaaacactgtttgagaaaatgcatgtgttacttagtttttgaaaaaaccttttcatacttatcttgattaagtcttctcttgattcttgaatcttgagtcttgaatcttgatcttgattcttggacacttgatccttgaatcttgattcttgaaatcaactttcttcttgaatcttgaaatgttcttgattctatcttgaacatctnttctcttctttatttcttcaagagtgaaagt

SEQ ID NO: 121899 - DNA, 495 bp, Glycine max
  unsure (1)..(495): unsure at all n locations
agctagacaacttgttgaattgatacaacaaagagtcttgccttctaaatattttttaacttagagaaaattttcttcacacaaaccatgatgatgcacaatgcacaacagatatcaaatgtactaagatgcatcaatcaaggtaacaaccaatacaaatgccactcgaaggaattgggcatgtaaaagccaaaacttcttcaagcttttccttgagcttcaagctttagccttggggtgttcaccatgttgctcccnctatctctaacaattaccatttgattcacaatttgatgatggtacatatgaagatttgggtgtagttcaattgtcttcttcacagttaagaacacacatcacaattgagtgactatccttcttggatgttctttgtaggatgttgaataaatataatggataaggtggattatgttacggaaatggatgttctntgcggtctanaaccaattatgaattatgcaacacagtgtgttc

SEQ ID NO: 121900 - DNA, 502 bp, Glycine max
  unsure (1)..(502): unsure at all n locations
atactaagctctccgatttagttntcgtcggcgaaaggatcaaagtgggtttgattttatgcacnattgattatcctgctttgatgaataggaagcctanggcaaatggagagaataagaaagaggaagaaacccatgtcgtggttgccgttcctacatggccaaatttcccattagcccaacaatatcaatacttggccaatatcattcattctcattacccactgttcgaactctacgacaatcccgaactttatcggaaagtgtaccgagtcgttaaagtaataataaaacggtaagagaccgagtatcgaactcacggaacttgtttcatttggcgatgtttcactcagaaagaagatattgatgtaaagccatgtaaacataaataaatcaaagatgtatgtgttgtaaatctaacagaactacaaatatgcttatcacaacacgagagaaaacatatgattaaaatgttgggtccttctactgaacgctcgatgta

SEQ ID NO: 121901 - DNA, 499 bp, Glycine max
  unsure (1)..(499): unsure at all n locations
tactcaagctagcacaagagacanatctcgaaccgatcagagccacatataattttttatataaataatgcggcttttggggaaggaaagcatgctgatagaattttctcataaccacaaatgagatttacgatattagcatttcgtttaaacgatcatttaaaggaaacactgggtctagctgaaatagaagacaatcactcaaattgtataaatctcacacaggcaagtgtttcatcctaattcacaaccatagatatgacatgacttgactttgcaaatcatttcctatcaaatcaaagattacatgcgtgatcatggatcaataggactgtttggagaatggtgtattggtaggaaatttggctctgagtgtntacagcctttcctttattgtctcctttgtggcacggcatgatagagatgtatgcacatagattcagttggtaaccaagaaggggactgcttcatgcgtctcaagtcatgggttcttatcttg

SEQ ID NO: 121902 - DNA, 407 bp, Glycine max
  unsure (1)..(407): unsure at all n locations
tggcacagagaaaatatatgtgagaaaaagctattagagctataatgaacctgagtaaagaacctgctgataggctattacataaagacataccatagcatacatgggctaggcacacatttgaccctcaatgcaagagtgacaatgtaacaaacaacttctgcgaagtgtttaatgctcgggttgggacgataggaaatagactgtcctatcaatgatgtaatctataatttgtccattaatgacactctctgacaataggagagacaatgctgcatcttaccaatctactattacccctatggtcaaaagtgtcttggaaaaaattgtggaagatgggaggtattgtagtgtcacacatggtggcaatgatgagtatcatgtnaagaatgagtttgctcattttg

SEQ ID NO: 121903 - DNA, 432 bp, Glycine max
  unsure (1)..(432): unsure at all n locations
tagactatntgcttgttgaagagaagttctcatctgttttattattcattacaatcaccagctgctatttatgctaaaaaattattctgaataaataattattctggtttctaagagtaaaccaatgataatttagttcttgaatgttatttatttatttagtccatgaatatataaaaaatgtaacaattaagtcttgttgttaaggttttacgggaccaatttttcattaaattataatgtccaaacaccaatttatcaaacaatgagctcacaagagacatccctaatgagttctcatgcatgccttcatgagctcacactcttgaacttgtcatcaataggttgcatggtgaaattccacctttcattgttaagctgcctaacttggaagtgttgaagctttggcagaacaacttcatatgtgccatt

SEQ ID NO: 121904 - DNA, 91 bp, Glycine max
tctatcatgggtggtatggatgaatgcacggagagctgcatcttacctagatgaccatgctgaatactggagcctacgaaaagactgcttc

SEQ ID NO: 121905 - DNA, 484 bp, Glycine max
  unsure (1)..(484): unsure at all n locations
cgccgttggagctgacccatcaactggccctaactctttatattgttgattcctangctcttgaccttgacttgatagaacctctttttaagcgaaggcatttgacttgatcccatgctttacggttgaacaaaatcggtgcgaatcaaaactccgacatctatcatgggtggaatggatgaatgcatgaagaaatgcatatgacaaggatgcaatttatgaataccggagcctaggaaattgtctccttcttagatacaacgtcatagtgcccaacgcatgtatttaagaaggtgatacggaacccgtgcatgatgcatatgcaaaaggcacaacacggngatgtacatagtatgacaatattcacaaacaaatataatcaaaagtgtacacaacatttgactacatgcatggcagtgtgaaaaaatggcacgcagcgtgtcgattacgtgcctctattcnagggacctatacgggagggagc

SEQ ID NO: 121906 - DNA, 434 bp, Glycine max
cggtgctattatgagagtcgacttcttggtggacaccattgtttgttatatcatatgcgcgagaaatattagtcttgtatattatcaatcgttttcattcatgagtgcgtggtcctctagaggtgagtcacgtcttccatcaataatattatttgcaccctcttggcatttgtattttaaatctacttgaagaatcaaaccactgaatcgctactactagcaggtgctatacatatttttagactactatggctcatttgattgggaccataactatgttagtatatggggtccaaaacccttatcatctcttccagaaattgctggtaagtgttgcaatgtgtaagaatatagatctacttacaatcttcagtccttgatagatcccacattgcttgttgcagagacaccataatgtgatcagggtgaattct

SEQ ID NO: 121907 - DNA, 493 bp, Glycine max
  unsure (1)..(493): unsure at all n locations
tatgatgaatttccatccaaaagggggactaagaacttatatatgcttttgctcttgattagaagtaagaagaagatctaaacaaaaaagaagcaaaataggcgttcatcagagggggagtaaacggaagattgaaggcatttaacttatgggaagtgtttatgctttttctgatatttattcttgtactcatcaaaacatcaccttgatgtaaaaatcttttgtgaataaaataagttgcctttagactttcactaaagactgtttcctctttatcctcatgttatgtgctctaatactctgcatctttcatgtattatctaatattcatatgctctgatatttctttctcatgctctatatatgctgcatctttttaacttatatttgtttgacatcattaanaagagaaagattgttgagtcataagacaaaatcatgaacctcaataattntgattagatgcaaataaatatcaagtntaaaaagttat

SEQ ID NO: 121908 - DNA, 224 bp, Glycine max
acatcaccgtctggtgaactgtctcacataccaacggaagcatatgaagctgcaacattggatttgacccagtcatatatgtcatgggtcgagccgtctatctacgaggatccacccacacatacagcccatcaagcatctatagattaactgtacgatatttctacacatccatgcactgtaacctcagatgggaacgcagtgtaattatcttgccctaaaaa

SEQ ID NO: 121909 - DNA, 411 bp, Glycine max
  unsure (1)..(411): unsure at all n locations
tcagaaccacttcagaatannagcattggcattcccagaccatctggtcctacaagatctgttagcatggacctctccaaggcaccactggaatcagcttcatctgttgatctttttcagttaccagcagcaccatctcaagctccaacattggatttgtttcaatcatctctttcatcggcagatccatctttcaacgagaatcaacttagtcaaacatcccatcttgcatctattgattttttttccgatttttctccgcagccttctactgtaacctcagatgggaaggcactggaattatctgtccctaanaatgaaggatgggcaacttttgatatgcctcagagaacctcctctactgcacaagtggaaattccaaccactgtaccctcaaatgctaaatcttta

SEQ ID NO: 121910 - DNA, 510 bp, Glycine max
  unsure (1)..(510): unsure at all n locations
acctattaaactaagccactctagctctaaaataactctagggatgagatatttagaagtaatgatgatgatgatgtatatataactntgttattggacccaacaattgtgaagcatgtgcaatgacaaaattggcagaccatgtgtggaacccaccattagtaaaacaaattaactaacaagataggtctatgattaatcctaagaagctcttttgattatgcctttatttgcatgacatgagaagttggcaaaagtatattgaacataaaagttggccgaaaagcttgacttagctgtcacaagcatgtcacatttctttgagtgcagtgcactccctacgcctgctggtggtggagaaagacctgcccctgtcgtgatcacaaattcacgaccaccaggcacacacatgtagccaccatgatacagataaagttccactcatcaccttaagccaattntcattaatttattccaaggacacaatcactagttagttcactacccatg

SEQ ID NO: 121911 - DNA, 485 bp, Glycine max
  unsure (1)..(485): unsure at all n locations
ggtcttcgccagtgaaaggatcaatgtgggtccataaatatgcttatttgatcatcctactaggacgactgagaaaactggggcaaataaagagggtgaggatganggagaaacccatgctgtgactgccattcctgtacggccaagtttgccaccaacccaacaatatctttactcagccaataacaaactttctccttacccaccacccagttatccacaaaggtcatccctaaatctaccacgaagtctgtctaccgcacttccaatgacaaacaccacctttagcacaaaccataaaacaccaaccaagaagtgaattttgcagcgagaaagcctgtagaattcaccccaattccagtgtcctatgctaacttgctcccatatctacttgataattcaatggtagccataaccctagccaaggttcatcaacctccatttcttcgagaatacgactcanacgcaacgtgtgcttgtcacgg

SEQ ID NO: 121912 - DNA, 485 bp, Glycine max
  unsure (1)..(485): unsure at all n locations
gcttctgtagttccacgccaaatattcatatcttattatgtgacntagctaaaagggccgccaccaattcatcaccacacatgcaattcccgaagccatttccataaacacagatgactaacctgtgtttcatagccatcangaagtttaatgatgaaggaatgagcattatcaaccctggcagcttcttcaatctcaacttggtctgcatcaggcctacccaacagtatattttctcgtattgtggtcgcaaacaatgcaggctcttggctcactagtcctatctgctgcctcaaccatctaagcttcaaagttttaatgtcatgcccatctaacagaacttgtcctgcacacacaatttgttcaacattataaaccacagctagcacaaaacttcaatctcaaagttcanacaaacaagtcaaacttttcatactatactaanaagatcttaactttcaaagtttacctcgaagtgggtcata

SEQ ID NO: 121913 - DNA, 167 bp, Glycine max
  unsure (1)..(167): unsure at all n locations
tagctacacggagatgggcatatacctccctgagcttcttacngactaggactctgctcagatgaatacccactacgatgctctatctatcatcataatgcagatggaacgaacgtcctttgactatatttcctgacttcaacagtgataatcactctcgtacctta

SEQ ID NO: 121914 - DNA, 432 bp, Glycine max
  unsure (1)..(432): unsure at all n locations
tgcgggaaaagagagagctttgggaggaatacaaggagacacgaaattgagaggaagaggatgatgataagctatcgtccgactgaatattgagctacgaattctctatccataagaaggcgtctcacagcccattatgaactctatctatgtatttttgttatttgatacaaacgaactctatgttattttctatcacatgactaaataagacatcctttctattttctctcaaaccatcattntaatgaataaagttattgctccttattcatttaagtctgatgatctcgtcatttntatagaactatttatttacaaataacaatactatcgaaattactgtacgacaaacgggatgttatattgctccttttgccgcatacacccataatctatccgagtaaaactaagagctcgaactccgtaacc

SEQ ID NO: 121915 - DNA, 444 bp, Glycine max
tgacacagagcccaccacaatgatgtcaagattgagtcatgaacaattcatgaatcgagagaaatttgatttcaagattcaagacaagatgaattcacgattcaagagaagaaatcaagaagacctcacaggggaagtattgaaaagatttttcaaaaaacaaacatagcacatttttgtttttcacaagaagttttcacaaaattttctaagttaccagagtttttactctctggtactcgattaccactgacaaaattgtgttttcaaaagctttcgatctgatttaccacattgcaattaatttcacaatggtgtaatcgattacaatatattggtaatcgattaccagtgtgtttgaacgttgaaattcagactcaattgtgaagagtcacatcctttcacacaaatgctttgtgtaatcgattacaatgatttggtaat

SEQ ID NO: 121916 - DNA, 352 bp, Glycine max
  unsure (1)..(352): unsure at all n locations
ttaattagantaagagctcttataactgtcagaacgagaaatggtgctctaatgagctcatttcatactatgtgcaagaagaggaaaggctgaagcataaaaagactgaaagtgcttacgttgtaagtacctctaaagacaagggctcaagacaaagaactgaggagcccacgaatgaagctactaatggtccagcacatatgaaacaaaatcaatgtgacaactatttcttctgagtcaacctgcacatttaaaaaagacatatacgcatatatcatgcatggcgtgcaaagaataggatgcctatgtatgttggagatggtacataatacaagtggaagctatagagcat

SEQ ID NO: 121917 - DNA, 206 bp, Glycine max
catcactcgatactcttcgactacgtttcatttgtgtcgactaacaaagggtatgaacaaggtgtagtccttatatgtgaaaacgaaattgcgcttccatcgcttataaagattcctcgaaggctctgttgtatccccacacccgtatgcgaacacacgtggcgacctcttgaagcttaaatttctaaacacaatggttccccttc

SEQ ID NO: 121918 - DNA, 305 bp, Glycine max
tatgaacaatggacttacttcccgcgatgattattaacatgcacggctgagtgggcttatacatcatggcatacttcccaaacgtcctggggtggatataacgctacttatgccgtcactgactatgcctaaacgcatactgggtttataatgtgctgaccacattactctggccatcattagcgacgtattagacaaactgaggtgcacggatacggaccacactgacgaaatgatctccgcctcttaagactggagcgacgtttctatagaatgttctgcaggtgcccataacgcatggacga

SEQ ID NO: 121919 - DNA, 469 bp, Glycine max
tctacttatgtggcagggcgggcttccttcactttcttttcttctctcgagctctgaccactgttcttccttcccgcgatgcttcttttcatgtccgcctgagtgggcttatagcctaaaccatacttcccacgatttccttgggtttttatcaagctagttatgccgccattgtctttgcctaaacccatcccgggttcataaccgttccccaacataactcgggccatcattaccgccgcatcggacagacaaggttgcccaaagagggagtccacggaggaaatgctgaccacctcaaaagactggaaagcggtttctaacgattcttctgcggcttccacataaggcatggaggatgggcagcttaccaagatatcttcctcgcctgacacgatgaccaagtgcccctccactacgaatttcagcttttggtggagtgtagaaggcacaactcccactgagtgga

SEQ ID NO: 121920 - DNA, 508 bp, Glycine max
  unsure (1)..(508): unsure at all n locations
gacctataaaactcagcttgttacattgaatntaaatataaatataananatctccttacttctttaaaaaatatggtatgatgtaatttgatttaagtaattattaattatataactattaatttacatattgattcaagttaatatttaatttaatatatcaatggaaatcttaaattaaatcggtacaaagaagaaaaagggtaaaaaatctaatttgaattcatatcaacttattaataaaaaaaaatattcatcaattgttcacatgatattaatttattagtaaaaattattttttttacaataaatagtggctcttttagaanaaatgattgaatatagtaataatgcttggtttacgatttagaaattgagtaaggttgtttataaaaatgatagagttcctgttctatttttaaaaaattctaagctcttcgtatcatttccaaatgtgtaaattgaaaaaaaagttaagaagtatagctttaatatcaaatgttgaat

SEQ ID NO: 121921 - DNA, 429 bp, Glycine max
  unsure (1)..(429): unsure at all n locations
ctanatggtgttcgactacttagggtctatgtgtactcttcttatctgtgtttagcattactcgaccaattatggtttatggttatattacaaattanggtctatgggtatattagtaattagggttgtgtggtatttgagagatcatggtttatgtttacttgacaagttggggtttaaggctatttgaaaaattaggttttatgggtactcgagtaatgaaggtttacaggtattggaccaattaggatttagggttacttgacaaagtacgaaataatggtatttgactaattattgtttaacggtacttgactcattcgggttactcgactaagtacggtttacgggtttttgaaaattanggatttagaggtacttaacacactgtggcttatgtgtctttgactcattatgattgatgtgtac

SEQ ID NO: 121922 - DNA, 214 bp, Glycine max
  unsure (1)..(214): unsure at all n locations
aagcaagatattgccttttacgcatgtagaaaaagaaaagaaaaaaaatttgatccctcaccaagatntaacacaaatgctatcgtgacactacatctctcgagactcgtccatatctattctgaggatcatcactgacatatcttgttatttgtataacagcacgcttcagaacacggatatgacgcatatgacttactctattacatttatg

SEQ ID NO: 121923 - DNA, 469 bp, Glycine max
  unsure (1)..(469): unsure at all n locations
cttaaaactaagctctcttgtagataaanaaaaatacatttagaaaacagtagctgatcatagagtttaataattatatgctaataatataaaataatttagtttttttagaataaaacaatttagttggaagcaaaatatttcctatttcgcattttataaaaagaaaagaaaaaaaatttgatccctcaccaactttaaacaaaaatgctttcttgccattacatctctcatgtctctttagatatatatttgagtaaactacattgacattcttaatnttttttaaaacagcactcttaaaaattctttaaattacatatatttcttttttctaaaacatttatgaaaatcttagtagaaaacattctttcatataggagtgttaaaacaatatttttcaaaaagtaangatattagtataatattcttcaacaattaaatagaggtgatggtagaagtaattaaa

SEQ ID NO: 121924 - DNA, 376 bp, Glycine max
  unsure (1)..(376): unsure at all n locations
gtccttaaattagatcacagcaganagtattgattcatctggcgagctgtgttgttatgcaggtacttatgttcatcctctgcgcctatcaatcacattcatctaggatgaagattacgcggaaaactatcacatagaaactactcatgcgggacgttatacatcatggaagattgattaccctagcgttctagaccgtccctaagaatatctttcgtaggccccatggtcactgatgattgcaagctacagatgtctgaagcagtgtctctaacatataacaggaggaagctgctgtgcaacttgaaaaactacagcgcatgtaaatctgatcctacactcatgttcgactacatagaagtacctgagaaccacc

SEQ ID NO: 121925 - DNA, 208 bp, Glycine max
cccccctcctctgatataacctaccctctcccccgcagcttgactgacctcccacaaccagacggcgacaacaagccgaaaattttattttacagtcatccataaccacggacgatccaaggcaaggcagcaccaccaagaagcaacaatcaaggctatgcgatgacaaagcctacaattgcgaccaaaacgacaacataaccagaca

SEQ ID NO: 121926 - DNA, 443 bp, Glycine max
  unsure (1)..(443): unsure at all n locations
cagatttctgagcaactccttcttcaatatttctatgagggacttaacaacatggataggaatatgattgatgctgcccatggtggagctcttggtgatatgacccctgctgaagctagggaattgattgagaagatggcttccaactcccaacaattcagtgcaagaaatgatgctattatccttagaggagtccatgaggtggccacagattcatcttcatctactaaaaataaaaagcttgagggaaaacttaatgccttggtcaacctagtaacccagcttgccatgaatcaganatctacacctgctgcaagagtctgtggtctatgttcttctgtggatcaccatacaaatctctgtctttctttgtagcaatctggagtcaatgagcaacttgaagcttatgctgcanacatttataatagaccttctcagtagca

SEQ ID NO: 121927 - DNA, 488 bp, Glycine max
  unsure (1)..(488): unsure at all n locations
tatggatgacacatgacagtcagggtcccctgattctcactatgtcatctcatgtgagatgcagtggccattgaagagtacaatctttgtagtcttggaatgagaggaaaataccacatntttaaatcaaaattntcttttcaatccccttccttgtgatagtcacgtatcgatcccttttataaacaaagcaatttgttacgctcttatctgaattttctttgtaatacaacatgcatccttttgagcaataatcaactttcaaacaacctagacccaatttctgtaccaacctcttaactttgtaaaaattaccgaacgtgtggttgtttttcggtaggatgttgcctacatattgagccactcaattaaaacaccgttttggcatattataattagaattgaagcttagagcttccaaagtggctgacaattctgtgtgattctcacatcctntccacagacgtgtntgagaaacatcaagcata

SEQ ID NO: 121928 - DNA, 486 bp, Glycine max
  unsure (1)..(486): unsure at all n locations
gatgtgaactatgcgttaacccaatcagagatatctctgatgacatcattntgttagatacttaaaatcagttttcaagttgatgttactattcttctctctctctttagttctacatatagcgaaagaaagaggagaagcattactaacacattatatttattattgttaccttcttcctttcttcctgtatcttttaatattttgcctcacaatatttgatgtttcaagaatattaaaccctaattaatacatgtttttttaatttatccttatttaatacctattttagtggcataaatattaaagatcaaaatattaaataaggtcattttagttcacatataataatttttaattttattaaatattttttaatctatatgcaatatcctgtaaacatcacagaatacaggaatgagatagtnattaanagaattaaattagaatatataatcataaattaccatgtataatatcataact

SEQ ID NO: 121929 - DNA, 401 bp, Glycine max
  unsure (1)..(401): unsure at all n locations
ctcagcttctatttccatgtggttctgttactnggctcttgttgttgtatgtttgccaaagaaaatctattgttcactgaagtaactgaaggtctcaattcttatggtgctacccaacatcgtcatggtcagtctaattttcttcttattagatctatgtatttcaaatcttacaacttcagcctaactaatgcatacgacatattttatcttcctgtctatacttttgtgatattttggaataaactataatgatataagtgaaagtgatattatcatactctatttactggttatcttgactcatggtttattgctttatcctgcttgtttcatggggttgtggaatgtgctatcttgattcatggcttattgctatattagtatactttttggttcat

SEQ ID NO: 121930 - DNA, 198 bp, Glycine max
  unsure (1)..(198): unsure at all n locations
ctagactcccgcgcgagacagtgcttaaaacgatcatggtcacacctgtngatggtatcatcttcctgctacaatcatcatagctttatttgtgaagttgactctatcatccactcgatatattacgactacgaggcccttgactggggcctgtgcttgtatatacgctaattgaataagtgcgccgagcatcaccta

SEQ ID NO: 121931 - DNA, 404 bp, Glycine max
  unsure (1)..(404): unsure at all n locations
gatgacgtgatagccgaggatgtcagtgagggccactagatagcaatggtggtatgacacgtgcttaatgacaaaatggtacacattgtggatggctaggagttaggggtgacaatcaacttgtaaatagttcgtaatttgattcgataatccactcgttaaattacgttcatgaatcaaatgactcgtacttgagctaacaataaagctcattaaataagtgagccgaacttgagctacatatagntcgattcatttggctcatgaactagctcaaaatatatatatatagattacgcttttctattatttatatatgcacggtggaatagtttctatttatgtacgagactctggttgtaacttatattttgtgtcataccttgtggctctacaaagctaat

SEQ ID NO: 121932 - DNA, 117 bp, Glycine max
gaattacttctctcgatatctctgaaactcacgctaggtgtccactaccacacgagcgctatcgattactcatagccgttatgcgatatgatgtgactctacgcccttgaacttgaa

SEQ ID NO: 121933 - DNA, 459 bp, Glycine max
  unsure (1)..(459): unsure at all n locations
cgcctctggtacaagaagaagatgaagttcctagagattcaaggcttgttatgaattgattggagaagtattcaagattgttgttagatagattgattaaaaatgcaaaacaaggccttgcttttatagactcttaatgtctggtcgagaaggccattcagaagagttataacttttatgaaaacttataacccatttgaaaaagtcaaagcctttctgaagaattacatctttagatctttcagaaacaaacactgggtatcgattaccaaataagtgtgatcgatacacaaagctttatgtgaaggatgtgactttccatttgatttaatttaacgttcaggacctggaatcgatacctaacattgtatcgatacagcttttanaatantggaacgctgtaatcaggttgaaaacttatccattcatattgctctggaatcgattcacaaatgatat

SEQ ID NO: 121934 - DNA, 441 bp, Glycine max
  unsure (1)..(441): unsure at all n locations
gacatctgtcaactatgtgtaaaatgcaatgactctgatccaatcagacatctaatcaagtcatgccactacatataacaaactcgacttatatatttatatcacatagctctaacgtgcatgtctgccatcatacagtgtgtcactattattaaaataaatatgagagctgctgtatgagtagtataagaggataaataagcctattgctctactaactctgagaactgtggtgagaacaatggtgcatgacacatatttctatacgcctagcgcgaaggctgcttgtgcggccaacttaacacagagcttaccttttacgcgccttgtcccgactctgacagctcggaccttctacatgctncgcccatcttaacgcaaaactttgttgctgccaacacaatagaaagaagctcacactntcaattacacatgtcacac

SEQ ID NO: 121935 - DNA, 491 bp, Glycine max
tactaagcttctcaagaagggtctcaagaagcttctcaagaagcttcttttctatatatagaagcatgtgtaacactcgttgtaactttgatgaatgacagtcttatgagacacatctcaaagttccacttttctccctcttttattccttcaatgtcatgctcccacctctctctatctctccctctatcttttcctccattgaagcatccttccaagcttcttatccaaggctcatcttggtggtgaagcatcttcttccatggcttataccctagtggatgacgcctcctgtcacctcttctcctttgtcttccgctgcatcttcatggtggataatcaccactaaaggacctcattgaagctcatagatccagcctccatagaagccccacaagcaagcctccatcaaatgtatgaatttaaaatccaatcctcagtttcttgaataattcaatcctttcattgcttctgaatttatgtatttcgac

SEQ ID NO: 121936 - DNA, 413 bp, Glycine max
  unsure (1)..(413): unsure at all n locations
ctgcttctacataggcaatccgtgaagtttcgcgacatgctttatgtcaaaaggaagcattgttgtgcaatctataaagtttcgcgacattacggaaagaaaacaagtatcgttacgtaatccataaagttccataacgttacggaaaaagaatccgcaaaagaaagcaaaagggggtgtttttagtaaaaagaggtgtgcaaatagcaaccaggcccacttggaccttccagggtgttccaacagaaggcgatgccttctagtggaagcaacccagcttgcctgtgcgagctgggcggcaaccacctcccttttttcccctataaataggggaaagaaggcagagcanattcgttcagcacttctggatttaggattcacttgaaattagtgagaaaaattgtttccgtgaa

SEQ ID NO: 121937 - DNA, 264 bp, Glycine max
tagatacttaggacaatggatacgacaaggactgaccagctccaaatgagtatgtctctctctaatggacatgccataacaccggatgacttactgaatgaatgatatggtggctcccctctcccttgtccttgaaatgcaacacacacatgaagaatcattatggaatgtgccttggcgagacagacgcttagagcgaccaaacagctgagatggacattgggccacgcaccacacgtgcactatagactaagcacacgtgca

SEQ ID NO: 121938 - DNA, 502 bp, Glycine max
  unsure (1)..(502): unsure at all n locations
ctcagcttccacaatgggtggttcaacctctcattgtcatgagagacttataattacaaaatgggtgaatgtagtggaagagaatataggacaatggagaggaaaagaaatgaaaagctccaaatgagtaggtctctctctaatggacatgccatagcctttgatgctctatggaatgaatgataagtctgttcccccctccttttcccttaaaatgcaacacaatcatgttttttcaatattgaatgtgcattgagtgagactgcacgctaagtgcagcacaaaaagttcagttggacaagtggccacgcaccaagcgtgcactatacgctaagcacacatgcacgtgacatctggcttcccatgtgatatctcatgataagcgcgggtggcacgctaagcgaggatggtgcactangcgagggtggcacgctaagcgagactttccagttcttaaactctcttccatgtcttctgttgtgtctgtaccaaatatatacca

SEQ ID NO: 121939 - DNA, 443 bp, Glycine max
ctccatgtagtaatgaaatcaatcgaaggaatagtttgtttctttcttattaccaagaactgaatgtagattaatgattagtagctgttcttcctcacagaatattcctctcttgatatcaagcctcaaataattactccaccttagcctgcaactcttcccacacctgttcaaccctgcaagtgttggaagtgctctccaactcccatgcccatgtttctgaatgtaatccaccaatattctatcctcttatggggtccaaggccccttcttcaaaccattatcatcactactgcatgcatatggtgttcttcccatcatcactcacgctatatagctgcataaacttgcatgctagaaattaaatactactagaattagtctgattcatggcgtagataacatgacgactaattacaagagagcgcgagaattcatacctt

SEQ ID NO: 121940 - DNA, 346 bp, Glycine max
cttaatttaaaatgggagggaacaaattttaattattcttttctgtatcatgccccgaattttcttgagatcctattcgatttcttcagagtccaacttccaatgttgcgtggtcctcagatgtcgccatttcgattcacgttgttatctgactattcccatttacccactctcttttcgataccgagttggtgccttcaattgaatcacgctctgaccatgaatactactaatactataatgattttatatttcttgataggcacgtagccggaaaaatcttgagttaccccagataataacaaaacatactgcatggcccatgtgtgaaccttgcacattgcac

SEQ ID NO: 121941 - DNA, 292 bp, Glycine max
gcatggattgcgaaaactggttatctctctccagggagatctaactcttttgtggcacgttatgcgaaagcttcatgtgctactcagagtgctgcaactaaattgaaaacggatgtcgcttgaggcttctcttgatactggactcttcaacttgagcattgccggcccttgaggcttgcaactcaaatctcctttctcgattgttgcatcttgagagtcaatatgctcttgattgtccacacggacttgactcggtctcgaacaccttctcttggactatgagacctcttct

SEQ ID NO: 121942 - DNA, 353 bp, Glycine max
ctttgaaaacaatctttgctactggtaatcgattactataaactggtaatcgattaccaaagagtaaaaactctttggtaaaaggttttgtgaaaaattcatgtgctactcaatgttttgaaaaaaaatttagtacttatcttgattgagtcttttcttgattcttgaatcttcaacttgattattcttgattcttgattcttgaaacttaaatcttgaaacttgattcttgaatcttgaaatcaaatttcctcttgattcttgaagtgttcttgactcaatcttgaactcattctcttggactttttgtcatcatctttgttatcatcaaaactccttgaatcaatcttgat

SEQ ID NO: 121943 - DNA, 366 bp, Glycine max
  unsure (1)..(366): unsure at all n locations
gactctatanaactcacccgcatgcatgcaatctatactgtaaacacttctcatcctaagctgcttagtcaacaacagcttgacaatcttgagctttcctgcacccgatactatcctggatgggggaatctccctgacactctatggtccaagccattcctcaacgaacactcagagcgtcatgctcctcttcttctaaattgctgctggccccacctgaccgtacatagatgctccaattcaactacacccacatctcctaaatcagccaacactcgtggcccctacacaatcttacctcgaagaacttgtgttgctaatgacactgctcaacatgcccctacatccagagatcagagcctatat

SEQ ID NO: 121944 - DNA, 353 bp, Glycine max
tatgcagcaaatatatacaatagacctctttatcctcagcagcaaaatcaaccacagcagagcaattatgacctttccagcaacagatacaaccctggatggaggaatcaccctaacctcagatggtccagccctcagcaacaacaacagcagcctgctccttccttccaaaatgctgctggcccaagcagaccatacattcctccaccaatccaacaacagcaacaaccccagaaacagccaacagttgaggcccctccacaaccttccctcgaagaacttgtgaggcaaatgactatgcagaacatgcagtttcagcaagagaccagaaccttcattcagagcttaaccaa

SEQ ID NO: 121945 - DNA, 349 bp, Glycine max
tcacccgtcggcatgacgaacttgtggagggacatacttccttgctttactacctgaccaccaaacggacctgccgatatttctttggggtaaggagacccctctgacatcacgtggggtgctgttgcccttaacccctcttgagcgctcacgacccaaccctggcatccttaatctgagttaacctgtgatgtaccttaaccagcgagctgatgtcctgcgaccttggggtgaacatagaccacaaatgcccgttgctctggtggcgtttattcaaacttgacacttttaatgagataccggacatggtctctgtgtaacgattaccttggggtgttaatcacaccac

SEQ ID NO: 121946 - DNA, 321 bp, Glycine max
tgccatgaggaagtgtagaatggtgactcttcttgcttttattcgctgaccacagactggtacctgtagatatgtcgcggtggtcaggtgaccttggggacctctggtggggttctatcgcccaaaaccatacttgagcaatccctacccaacccggtcatatttctatcactgagaacctgtgatgtacctcctcatgcgagctactggcagcctacctcttaaaggagcggggaccccaaagcttggacgcttgtgtggtggttggccagctgcctcactttgattggcttatgtgatatcgtctctggtggtcgatta

SEQ ID NO: 121947 - DNA, 323 bp, Glycine max
ttcagctaagcttattacccctctagttacaacacccgggctttctcatggcgcccacccagattgaaaactgaccatattcccacagccttcacaactcaccgggcccgtctttaccactttactgagagcccccctcggaggctgtagccggtatacacccctctccggatgagccactattatgttatgacgtgcctcaaatgaaattattaggagcgggcgacctccttattgcgcctcgaacctccttttccgtattagtacgtgcttactgcgacgagcatgtacaatgggggtgttcctttgcattttgggggggg

SEQ ID NO: 121948 - DNA, 343 bp, Glycine max
tcttatttccgatgaacttcgaactatatttgttgatccttttgttattactaaattttttcttatggtgcagttgagattaaaaatgaagttatttgcaaagtcttcaaagtgaacggtcgccaacttaagctttttcatgagagccccaagtggaggttgaatctgctgcaaacctctatttggtcttgccaattttatgtaatgatgtgccttgaatgaaacttaaagagtttccttccctttcttttacgtgttgtctctctgtttccatttcattacttgcttacattgaagacaatgtacatttcaagtgttttttttttttttggggggggggggg

SEQ ID NO: 121949 - DNA, 318 bp, Glycine max
ctatactaaatagtggttggtgggatacatcacaatgaaatgcccataatacacgcgggatggcatattttgctatgatgctggtagcataactagaaatacatactctaagtctacataagggagctaaattgcaacactaaacctctatactttcgagaatttaaaatggctactgatcttatgacgcgttctaataaggacaatcccaactggcgttggtaatctttcccaactcaccttaacttgtcttaaaaacaccttgatggtgccatacctccttcacgatgaaatcttatactataacagagcctattt

SEQ ID NO: 121950 - DNA, 332 bp, Glycine max
aaaactcaacttaattggaagcaatacaactaaaagggttgtggaatacatccaatcaaatgcccataatatctgggggatggtatatcttgcaatgatgctggaagcataactagaatcacatactcaaattctacataagggatttaatttgcaacactaaacctctctactttaagaatttaaaggctagagatcttagaagtgtactaagaggacaatcccactgacattggtaatcttccaactcaccttaattgctaaaataccttgaggtgccatacctcttacgagaaatcttatctttacagacctagtatattacacatcgt

SEQ ID NO: 121951 - DNA, 361 bp, Glycine max
acactctatagtactcacccgtcggcgtacgaacttgctaaggcgcgatacatttctacttttattacaatgaccacagagtgtgaacctcatatacttgtttacccgcgccaacatactcttgcgagacgcatagacggtgtgctctttcctcaaaaaacatacgaagatcaattaccgagcacacgcggcgccattatcaaggctcatgataaaccttgtgatatactctatcacaaagtgagactgactcgtcactcaacccgattcatagaacatatgacacacaaaatcaggggatgctatgagtggggcgcttgccataatataagatcgggggggagtttaagatattgcctct

SEQ ID NO: 121952 - DNA, 348 bp, Glycine max
cttgaagtgatgatatgttgaatggttttatcttcctacttttattcgttgaccacagactggttcctggagatttgttccccgtgtcaagaaaccttggggacgtcagggggggtgctattgcccaataccaagcttgaccaatcccgacccatccctggcatattcagtcagtgagaacctgtgatgtacctaaactggtgaactcctggcattctaccgataatagaacaatgaccacaaagcaaggaggcttgtgtggtggctggccctctatggatcttgagtgatatttgggatatggcctctggtaattgattaccacgggtgggtattcgattacaaggc

SEQ ID NO: 121953 - DNA, 355 bp, Glycine max
  unsure (1)..(355): unsure at all n locations
actctatantgctcacccgcgcgcaagcagtgcttgctattgcacattatattctggctggagaaatcgagtacactttgatgtttgatactatcgagtgatattgagcagagcgctctacttttatcaattaccgcttgatgtaatcaattacttttctattataaagtgttatcaaagtgatcacccactctttaagctatatcattgacaatctaagcgaatacactgggtcatgaaggcattctagaatgtgggaaaaacgctctagatgattgcaattgcaatatgatcgatgacttcttggaaaaaatagattccaagtggatatatacgggttctgtctataccgacg

SEQ ID NO: 121954 - DNA, 352 bp, Glycine max
tgcagaaaagtgtctcgtattggtttaatagattacaggcttatagtaatcgattacacaattctttttgagacgatgattgatatttcaagagtctctactttaatcaattaccagttgatataatcaattactctctctcttaaaaagtgttttagaagtgatcaaaaacactttaatcaattacattgagaatctaattgattacatggatcatgaaggttttctagtttttgggaagaacacttcaattgattgaaatagtaatatgatcgattacttctgcgaaataatcgattacaggtgggtataaatggattctctataaatagacaccctgtgttctcacttc

SEQ ID NO: 121955 - DNA, 306 bp, Glycine max
gcaccccctgtacaaggagcagcccaagaaaaacctggcctttagctgtggtgagaaacacgaaccagccttagcgttgctcagagacaagctacgatggcgcctgtcctaactctgcctgacttttctaaaactttagagcaaaatgcgatgcctctggggtgggaatcggagctgtattgatacaaggcgggcacctgatggcgtattatcatggaaaactccataacgcccccctcaacttccgcgcctatcatgacgagctttatgccttagtagaagccctccaaacttgagaacatcacc

SEQ ID NO: 121956 - DNA, 345 bp, Glycine max
tctatagaaggttcgttcctaatttctctacaattgcatcacctctcaatgagctggtgaagaagaatgtggcatttacctggggtgaaaaacaagagcaagcctttgctttgctcaaagaaaagcttactaaggcacctgttctagctcttcctgacttttctaaaacttttgagctagaatgtgatgcctctggagtgggagttggagctgtattgttacaaggtgggcaccttattgcttattttagtgaaaaacttcatagtgccaccctcaactaccccacctatcataaagagctttatgccttaataagagccctccaaacttgggaacattaccttg

SEQ ID NO: 121957 - DNA, 285 bp, Glycine max
tccatactgacttaattgtaaaagtgagctaccaatctacgaacctaatactgaactcatgcaggcttttttataatctactggaaatacaatgtgcaacgcctcatgcgcaagaaaatacctcactttggtacataccccactttgatttagaacataattgagaccttacctacattcaaacctatgagccattcctcattgagattcatcattgtttttttgactgcgacgtgtgctatataagatactgtaatggacataaatcttaattgatgtgaaata

SEQ ID NO: 121958 - DNA, 370 bp, Glycine max
  unsure (1)..(370): unsure at all n locations
acactatagaaccactaagcttttaattagctcactccatactcacaaatactaaatagngagcttcacaatttccgcaacttaatactaaacttataatgttttttttatcatcaactgaaatttcgttaagcagcacaagatgtgcgaaaaatcaatacaaagtcagacataccccactttcatttacaacataattgatacctcacctacattcaaacctatgacccattcctcattcagattcatcattttttttttcacggcgagttctgttatataaaatccctaattggataaatattttagttaaggtagaataaataactactgatttttaattatggcctccaacttacttgtatcaccc

SEQ ID NO: 121959 - DNA, 352 bp, Glycine max
actatataaaactcacgcgctggcatgcgaatctgggactaaatatactttgtgcttatggaaccaagcgggctgccattagtggtagataagtattgtcatatgagcggagcctacctgacaactgtatgtcataatatgaactggggccttagaaacttgactactttttgacctataaagacaatgcaatcaattgtaccttattcaatactaaggatgacaaaaaacgtttcatgaacttcaaacatcaactgttataactggccttcttaggatgattattaaatctgaagcaagacgtcttactaaaggactactaatatactgacttctaagaagatataaggcg

SEQ ID NO: 121960 - DNA, 280 bp, Glycine max
agttaattatttttatatgaacggggtctccctgagtcctttatttcataatatttcctttggccttaaagatttaacaacttttttaaatataaaaaaaaatcaattaattttatcttatttaatattattgtttttaaaatatctttcatttaattcaaatattaatttttaaaactttcttttttattcttattattaaatttaaaaaaggataacttaaaaaaatatttttaataaaaattgatataattaaataagattaactaaatttttaatt

SEQ ID NO: 121961 - DNA, 289 bp, Glycine max
tggatgcatccacatatatggatcgtgacccactatcaacaatgatgatttggaaatccaggcttaactggtcatgcaagcaccatatgaggacactcatagagagcatcataataatcgtcctgcgaagaatctgctcaagcaagcatttcctctattggtaaccaaccacatgagcttcaaatatgtgcttctttaaacttgagcaattattcgcattacatttcctgcgatcggggaaatttcacagtatttacacgtaacgtgtcaaaacatttgtgctaaatgg

SEQ ID NO: 121962 - DNA, 284 bp, Glycine max
aaataacacaagggggggtttgtttttgctcaaggatctaaaggatgctccacattatttccatgactcaaatgccctatatgatgattagggaattttatgccaaactggaaaagcatgcacctatgtggacactaaagtgtcatactccaatggtcatgacaatgctaatgcataagattcatttgctatatctataacaacccaatgtttccaaaacatgatcttttattcatttgcgcatccattcgatatcatcactgcgtgctaggaaatttaactac

SEQ ID NO: 121963 - DNA, 339 bp, Glycine max
gcggcgacatggggacgcattaccgtggacactaagacagccgtctgtctatggtgcacacacaagtaaagcacattcgcaaagcgcgcataaatccctaacccctgtggacgcaccttcaactgagcttaccctctatgcgcgtattggatattctacatgatctcaacaacggaagcccatcaatcctttcaagcttttccaacatgcacatcataagaacatgcacaccctccaaactatccaattctatcgaaacagagtaaaagcggaaaactctggcttaacaccaaccaaataacagcttttatcaattaaagacccgagagactattcctt

SEQ ID NO: 121964 - DNA, 255 bp, Glycine max
acttggagcttcacagtacctccccacggttgcgccactaatcctcggtttcttcttcgacacgcgggtgctcccatcaatgtcttcccaagctttttccaacaatcaaagtcgaaacaaccatttcaacaagcgcaagcctatcaccagccaatccaaacacagtagaggctgaaaactttgccataacaccaaccaaataacagcttttctcacttaaagaccccactaccattccttatttcagataattac

SEQ ID NO: 121965 - DNA, 336 bp, Glycine max
cgcggcatgcttctattgggaatctgtcctttctaagatggagccaaacccaaggtcccttactaagaactatctctttccttactctatagcctctacttgaatacaccttagcttggatggctatttggttcttaaccctctgatgcgtctattttacaggttccgacctacaatccccctcgttctgtataagccatgtgtccaccgggaagggaatcatgtctatcggagatgagggatcgcacccgttgaccacctcgattggggactgcttgaggggaatattaacccccactgctgtaggcgaatactacattacgaagacactcatac

SEQ ID NO: 121966 - DNA, 352 bp, Glycine max
tggatttccttttagtagggaatctatccttcctaagatggagccaaacccagtcaccctcattaagaactagctcttttcttcctctattgcctttagttgaatacacctttgtttggttctctatttggttcttaaccctctcatgcatcttctttacaaattctgacctagattccccttctttatgtataaaagaagtgtccagtgggaagggaatgaggtctaacggtgttaggggattgaacccatatacaacctcaaaaggggactgcttggtggttctatgaacccccctgttgtatgctaattctacatgatgaagatactcatcccaaacttattgttgcct

SEQ ID NO: 121967 - DNA, 328 bp, Glycine max
gcaagcttattccatgcctccatatctaacgtagcattagatgagtaccctaaggcttaataatcttgtgcatgaaacatgatgcttatagcctccttgtcgctctttcccgaatcctctaaaaaccctttttttgctccgcataccgtaaaaccattctgcgaataactacaatctctaacccccataccgcaggcatgatgtgcaaaaataaaagcctgtattcagcagctttactagcactctgagaatcgcgaattacgagatactgtgtgagctgccagaaacacgcttggcatagcaacctatatatttcccaccaaaaccc

SEQ ID NO: 121968 - DNA, 352 bp, Glycine max
ttttagaaaaaaataaatgaataaatgaatatttagcaaataataggctgagtaccctaggtataaatagttatgttaagtcagctgcctccttttggcctcattttcgtttttccccttctcctctcaaaaccctttctttttcccgcagcccatcaaaccagtctcagaaaaacgacgatctcgaacccgttcaccgttggattgttgtgaaattttagtatcatgttcgcaacacaattccgagcactctcaccattgggaatttcgatatcatgtctgaactgagagaaacacccttcgcattgtaggctttttctttcccgcagaaacccatagctgtcttggtaaa

SEQ ID NO: 121969 - DNA, 280 bp, Glycine max
acacgacttctctataattatactgtaaggaccatcttgcctggttgactatttgcaccccctgtatactctttacaccccctgcctttattgccaattgtttttacggcacatcatggtactgatcaaattttgtacctctactcgttttgtttccacactgtttcctaaccttactgactatacagaattgcctactttccaatttaagcatgtcgctgaacttcctggcttgtctaacgatgggcgccaaaatccctcaaaagcgctatcaagggcc

SEQ ID NO: 121970 - DNA, 347 bp, Glycine max
tgccacccagctcgcccaggcgagctcagttcacccatgcgagctaggttgcttcctccagaaggcaccgccttctggagaacttcctggaaggcccaagtgggcctggttgctatttgcaccccctgtttactaaatacaccccctgccttttttgttgattctttttccgtaacattatggaactttacgaattttgtaacgatacttgttttctttccgtaatgtcacggaaccttacggattatccaataatgcttcctttcgaatttcggcatgtcacggaacttcatggattgcctaatgatgggtgccaagtacctcgaagtggtcaaacgagggtcgca

SEQ ID NO: 121971 - DNA, 296 bp, Glycine max
tttgccacgcatcactgcttgggactgacatatacaatgaattggattaacatcctatagtggaaaaggatcgatcttcctttttcgtaaccgtatccggacgcttccatgacaagtgtgtcctccaagatctttgattctagcactgaagttcggatgattgagcgagagtttgtaactgcggctgacaagagtgaagacatttttgttcaccaactgaaaggagcttcaaaacctatcttagagaaggtaaatatatacttaaataggtattgacaagtacatatgatacatat

SEQ ID NO: 121972 - DNA, 353 bp, Glycine max
tgctcatatccaataacacaactgaaactatttaccaccatcatcttctcgaggacttagatatacaatgaattggattatttatccaataagtagataaaggatagatattcctttttcgaaaccgaagccggccgcttccatgataagtatgtcctcaaagatatatgaatatagcactgaagtttgttaatttgataagtaattttgctaactaaggtctgaaatgaataaatgacattttcattcaccaacaaaatgatatttaagaatatatattagtaaatttatatatatacttatataagtatttacaaatacatattatatatatgcttaaatatatatttttt

SEQ ID NO: 121973 - DNA, 304 bp, Glycine max
cgatgaagcggttcgctgagtttttatgagacgcttactgtgaaatggctcccttctctctcgagtcttgcttactctttcgaggggacataatggtggtacgggccctgatgctcctcccggtttgagcgccacaaccctcttcccaatggttgtgggtgtaacacgacatatttcgagcctaaccgcactcggttgagggttcctaacgtggagccttatcttttatagctgtgtcagattattaggcatggggtgctcgtgactaccctggcagaaaccattcttatccttgcggttgatc

SEQ ID NO: 121974 - DNA, 345 bp, Glycine max
tcgaattgacagtgcttttggctgaggtttcttgtttagattgctaacggttctcattgcttgtgttctcttcttgatgctttgtccgacctgcttccgcggagtcctccctggatacgagcttttaagctaccacctttttggcaatgatggctttgtcagctattgctgtcggtgctgaggacattttatctgtgccactgctctcgattgatggttcttattgtggctcctcaacttgggtggtggtgtacgtttgaggcgtataggtttgagttggatattctggtagaaattgatcatgacttccagctgaagcacaaagagtatgtgttgcatttgatc

SEQ ID NO: 121975 - DNA, 346 bp, Glycine max
ctatagagctcacccgtctgcttgccagcttatgtaaaggaattcatggtcaccttatgaactcctctttgaatactttcttcctctattgcgttgaattgatttatctgggaagccatctcactaatcaaatgacttgcctgcataggggtcacatttccctgatctccagcacgggcagcactaatcatactcgtttacatgttgctaagatccgcttgaagataatgataactgtggcgtttataaatctggaggtgagggcagctagcctacaatatttagaatatttccaagatctcatcccagcttattacactaagttggctgatgcctgaaatgaact

SEQ ID NO: 121976 - DNA, 346 bp, Glycine max
agctttattttcagtgagaaattttttttggccaccttatgaactcctctaagataatagcatcatttcttgcatgaattgttagaagttggaagccatcttctcaatcaaattcctagcctcaataggggtcatatcaccaagagctccaccactggcaggatcaatcatactcttctccatgttgctaaggccctcatagaaatattgaagaaggagttgctcaaaaatctggtggggagggcagcttgcagacaatttcttgaatctttccaagtactcatacaggctttctccactaagttggctgatgcctgaaatgtcttttctgatggcagtggtccta

SEQ ID NO: 121977 - DNA, 295 bp, Glycine max
taaccatctttgccaggaatgaaatttaatgtctcgttttgtggttggaaatcttccggatggtttttctttcccttgtatccgaatccagatcttgttcacctagaatctgcactattattgaatgtgcttgcaaaccatatggtcgatgccttataccaaagtgctcaaaatctcacactttgatccataccactgagaatggataggagcctcactcactgggcgactatatgccatgcttacgatatcctgtgacaacaggcatgtgatgaaatgataagacagacgcctt

SEQ ID NO: 121978 - DNA, 351 bp, Glycine max
tgcctcctaagattgatgagaggaatattagtctcatgccagaaccagctttgccaggtatgagatagaaagtcttgttatgttgttggaaatcttaaggatggttttccatttcatcatatccagtttccagttggtattgacctaaaatatgctcttctattgaatatttgaacagcactagttccaatgccttctaccaaattgcccaaaatttcaccagtaagccaagccactgaaaatggaagtttgcctcatagagagggtgaaaataatggtcacataccagagccaatttcaccaggcgtgtgatgaaagtaaaaatttgtcacctgatttcttacttttgaa

SEQ ID NO: 121979 - DNA, 318 bp, Glycine max
atgagttgtcctacctcatgcactcctatgctgactatggcattacccacggcgcttgactggtgatagagggaaaccctcttttactttacacgcctgactggatcccgattcatgtatacccaggcttcaacccaggcgggatctataatactctcctgcatataacagagcccttcattaagatattggagaacaaactgcttccatgcttgatggcgtgggcagctggaacctaattatgtagatgaatgccgatactgataccggctctattcactgtgtcgaataatacccgacatatttgtcctgatggct

SEQ ID NO: 121980 - DNA, 359 bp, Glycine max
tgagagacactatcacacactcatactccatattctcacaagacgcacccgttttttttgctacctcatgcactcctgtaatgactatggcatgcatactggcgctcaactgattaaagctggaagccctcttcttaatttaaccactgacttcagcaggagtcatgttgtcccgggctccaacccaggcggccactatcatacttttacccatggtactgagtccttcataaaaatattggacaagaaggtgctaccaaatatgatggtgagggccactggcacctaatttcctgagacactcccaaatctcatacgggcactcttcactgagggtctaatacctgagagatctctcc

SEQ ID NO: 121981 - DNA, 307 bp, Glycine max
acaaatgttactcggccccgatatgcggagatgatattcctactaccttgagcttggtacgaccatgctctactgattagcaactgggagatacgcgacattacgaacacccctgtgttatcgccacaagcctcctgccaacccttacggttataccagccttatactgactcctaacctgaagcgattttttctttttatatgaaggctctgtgtcttttagtttcaattcataatacgaggagcttggataaatatcaactgtgcattccccatactcataaggggaccgattacttcactcatc

SEQ ID NO: 121982 - DNA, 348 bp, Glycine max
ttataagcgccggttccggagactaatgtttagccttcgcgatatgccaaaatgatattcccagtactttggggttggtaccaccatgctctcctgatttccagctgggaaattggcgagtggaggaacgccccggcatttacgcaacaagcataatgtaaacctttacggttttaaaagctctatagttgggcctaggctttagagttttttttttcttttgttaaggctttgtgtcttttgttttgaatttataatacaaggatctttcttcatctgttcctggtctctacccattctcattcatttgcatgtttacttctttttctgaaacggcagatccgatga

SEQ ID NO: 121983 - DNA, 360 bp, Glycine max
agactatataaaactcacccgctgcatgccatctcgccaccaacaaagctctatgagaccaaagacttagtgcgtctactactcatttccatcattttttccctcgccgaaggaccacttggactgcccggctcagcacctttgggcgtaccctttgactggtccaagacaactctttggaccatctgccggagaagcattctaatccaagcctttctaccaaccctgacaaaccaaaggacccactgggtgctaccactaatggactccctaacagataatgaaaggagtccccgtcacaacaaccccagtcttaccacattggaaggaacgtattatcaagcactcatctatggcgca

SEQ ID NO: 121984 - DNA, 347 bp, Glycine max
ttgaaggtgcatagcccaccattttccttattagaataatgggaatgggtctactatcatttccatcatttttttcgtcattgaggtgccacttgagctgccaggttctccacctttgggcgtattctttgaaaggtccgtgcccccttttttgcacatattttgtagttgcatcctatccgaagccattataccgacactgcctaacgaaggcaaccattaggttctcccatgaatggactcgggaaggttccaagttagtgtaccaggtaacaactaccccagtaagactttcttggaaggaatgtatcaacaattcctcattttttgcgtatgctccaatcttc

SEQ ID NO: 121985 - DNA, 318 bp, Glycine max
taatgttgaacgaattttaaccacactgatcttgttagaggcactgatagtgagtgaaaaggaacagatcatcacctagctatgagtacggaggaggaaatatacgagttgtgatagatcttcttattgatgaaactcggtgaatatcgcgttgaagtactttatgtctaaaaatgaggctgaagaagaagaaacacaaaacaaaaaagtcactgtgtgtgaattttggattgaaatttgaatttgaatcttcacacggagaaaagagaaatctctgatccaatagagtaatcaatattgtgtcggttccaatccctt

SEQ ID NO: 121986 - DNA, 326 bp, Glycine max
tgctaaacatgtttcccgccgtgtcgagcgaacatctttccacattgatcatgtgcgaggcactgtttccgagtctataggatcagatcatcccttatctactaatatggaggaggaaatataggagttgagatacatcttcttattgatgaaacttgcttaatatcggcctgaactgctttatgagcacaattgatgggcctaagctttagagatttttctttcttttgatagtgctttaagtctgtagtgaagaatgaattatacatcgatcttggttcatatagacctgtgtgatccccattcgcaatcaatagcgtgttgac

SEQ ID NO: 121987 - DNA, 337 bp, Glycine max
acccgtctgcatgcgagctcgagagtgacagctcctccttgaaaccttgcatctaagtgtatcataactacaaaaaactgcggctaaagacagtgagggctcctgtggtgcggtgcgctggtcacgaggtgaagagggtgtatcctgggctgactggtgtgcgtcctgaactgttgtggaccaaaggtcccaaggtctctgcttcacctgcaagattgttttaaccgtcttatcccacttacctttgtatatcagacttttaagatatgtgtttattttccccatgacatgcttcttttggaaggattgaccaccaataatgctgatttatatatcc

SEQ ID NO: 121988 - DNA, 356 bp, Glycine max
ttaaaatttggtaactaaataaactgaatcatttactgaaattaaagcataatagtgtatcataaatagaaaaaattgcaaaaagatcttgtcagggctcctgtggtgcagtgggctggtccagaggtgaggagggagtatcttgggctggctggggtgtgtcctgaactgttgtggaccaagggtcccaagtactctgcgtcgcctgcatgtttgtgttagtcgtcttatacgactaacttttgtatagaaaacttttaaaaaatgtgtatattttccccaatttatggttctttttgtaggattgtaaataaattttaatttttttttaatctatgctcaatagaagccttgtg

SEQ ID NO: 121989 - DNA, 348 bp, Glycine max
gactatataaaactcaagcgccagcatgctgtctctagcaacagacattgttttgtgaaccactattaaaggtataaccaaaccctctgcgtgagtatatgaaccttaaataacccgtaatataaatgtaattgtcttaatataacctactgtgttaactgtaaggtacaccaattttagcgcaatcacctgatttggtatgcttaactagccaatagaggtggatgatcccagatacccttctaaactcaaaaatattccatccccataaatattatagcccacgcttgaggatattgacactagcacccacacgttatcgcgcatgataaccccaccctatgctta

SEQ ID NO: 121990 - DNA, 352 bp, Glycine max
tcacaatattgtcactagcaacagagcattatttcatttgagcattatttcagtagataaccaaaccctatgcttaactttaaataagccttaaataacccataatataaatgtcattgtctttttttaaccaacaatgtaaactgtaaggtaaaccaattttaccgcagccacatgaattaataactaaactagaaaatagaaatggatgatcccagttcagcattctaaactcaaaaatattccatacacataattttcaaagcacaagcttcacaatattgtcactagcaacagaacattatttcagtagataaccaaaccctatgcttaactttaaatgagccttaaa

SEQ ID NO: 121991 - DNA, 315 bp, Glycine max
gctgacccctacctacaggaatgtggtttttactatgctcactacgcgcatttggcatagagctccccaaaatcgattgtgatgagaaactgataaaccattcgtggagctccacttgaagttgcactcacatatagcatatggctttcctatctgcaccggcagagatcatacatgacaaggaatggggagagtatgtgaataatttgccaacatacttttacggatggctaaatgaaccggttgggccggatcaggcggaaacattgggtgctacctctaaaatggctctcccggagtctgatcatattgagt

SEQ ID NO: 121992 - DNA, 373 bp, Glycine max
acggatataatacacaagcttcattcaagtgagccctaattactatttatggtttttttataatagctcactacgcgcatttggcataaggtcccccaaaaatgaagttgtgaggtttattttaagccatccgtggagttcgagtagaagttgtacgcacatttggcatacggatctcctagctccaccgtcaaggttcaaatattgttaaggatttcaggcgtattatgtttaatagattatcccatactaagatattaaggttggcaaaaaggacgggttgggcctgcttatcccgaactattgtgtcaaacagtgaaaacggctcattcagactcgatccgtattatttccagctgaaatttctcatgcc

SEQ ID NO: 121993 - DNA, 292 bp, Glycine max
acttacttccctagggaaaccaagccctgtggttggcaatgggccatttctttacctttattacttggggtcatttttgcgaccccacatagctcccttaaatcttttccggcgatgttcctacttgtgagccctcttggtctgttgttcaagggcttttgctgacatggacatttattcccgtgagccggcacacttctttcgaacgtgtgtggcaccgcacttgaacttctccttggcgagctatgcctttcctaactcactactgagagcctggacttgggaatactct

SEQ ID NO: 121994 - DNA, 272 bp, Glycine max
gtgaatgaacatttaacagaacgctaacccgctgactgattaaccttacagaactcaactgcatcgacttggcatctcacaactttacaggttctatgacgtaacttggtatggccacaaaccttacccatataaacctgcctcatggggagatacctggcataattcacttacttcattatgaatgactgaacaagggtggtggtattgactcgagttatacatgcgatcctgggagcattcttctcaacctgcagccacttggacgaata

SEQ ID NO: 121995 - DNA, 333 bp, Glycine max
tactggggcatttacacactcgattgttttatgaagcactgatctgaattggatctttctgattggcgattaacggaacactttcgggtcatgtgagccttacagactcactacgggacttggatttacacctcctggcgcatgacttatctggtgtggacaaaagccttacccatttagacctttctcataatgatttaagaggcataatttcatacatctcattttgaaggactgcacaatcttgtcgatattgacttgacttataattctttcactgggagcattccttcatccttgtttccacttccactcctacaacagaatcaactt

SEQ ID NO: 121996 - DNA, 340 bp, Glycine max
acccgcatgcccgcttgcatgaccacaccgttggttatccatgtattgacggttgccttatgccatgatagctcatatggccgactctaaccccatccatttatatcctctgaaccctgacgtaaaaaatgatatgcctcttcttataatggactacttcaaatgaaacaatggacattaaatgttaccttaatagagtcctccccattaagatattcttttactgtcgagaacgtgagactcatgattccaaaaaactgaacgacgctccataggtgttcaattctttgacatctctttttgtctaagaaccattaacacttgaattttgctcattaat

SEQ ID NO: 121997 - DNA, 353 bp, Glycine max
tatatccatttccataaccaaccatttctaaaccatgttttgttgcttgccttatcccatgatggctaatatgtcccttctcaaacccatccatttctagccttggaacccaagtgtaaaatttctcatgcctctcctttctctcagctccttcaaatgaaacaatgttctttatttcttcccttagtagagtcctctccattaagattctctctaattgttgtgtatttgaaacagttgattccaagaaactaaacaatgcaccataaaagtccaatactttgtcaactctttctgtcaaagaaccattaacatttgatttttgctcattaatcaccatcactctaggttgg

SEQ ID NO: 121998 - DNA, 352 bp, Glycine max
agactctatagaactcacccgctagcgcgcctctggaaggaatggtcctgctgacacactccaggttttattcacctctttagcgaaatcaatgctgacaagggatacatccgtaaagtcccagcaccacctctccagaaaaatataaacacatgacatgcacccgggcacatcatttgaggaggaatcctttttatgcgaacaacccgagcttccgctgacgatatatacagcgaagactgtacttgccttaaccctatcgtgggagaaatgctgaacctctgtgccgtaaaacaagttaggagggttgcttcaacttaaaatctacaatgggcttgatttggagtcaaac

SEQ ID NO: 121999 - DNA, 351 bp, Glycine max
ttaatgctgctttggttaagattgtatcttttctggacaaactccaaagtttttattttttattttttacagagatcaattttgtgaggggaacattgtaaaagtcaaagcattattctgagataaatatatttttatgtcattctcccagtcaaatcatttgaggagtaattctttaaatacaacaaatgaaaataactgatgatatatacggtgaagtgtttccttgaataattttaatagtgggataattgttgaacctttgttttgttaaacaagtttggagtgttgtttcaacttaagattaagaatttgcttgctttggagtcaatttatttagagcagctcttg

SEQ ID NO: 122000 - DNA, 289 bp, Glycine max
aacttagcatctctatgtggcaccatggtcctaagcaaaccttggaggaccaccactccccttacaatgagctccgagatatgtgaaccataatccaccctgccgcctggtctatagtgtgccgcccggctaagcctatgctccactccttatatggagggtacacctctgtggtgaaacggagccccctggccttaccatacataggattgcgcctggcgcatacggaaatgctttggctgtctatagacccttatgcgtcacactctacttggcttgagctcaaacc

SEQ ID NO: 122001 - DNA, 340 bp, Glycine max
tcttcaaatcgttctgccatggtctgcattttctttccagggtaagtaattttcttgtgttgaccacttacctataaaaataattttatttcgagtgaattaagtgctccaacatgtgtaccttcagtcataacagaggatgtccctaaagcttcttcaaatcgttctgccacggtctgcattttctttccagggatagtaattttcttgtgttgaccacttacctgtaaaaataagtagtaacacatataatgtatatagttatatacctctttgtcacttgatgatccactatccacaggttcaggggaatcttcactgttaatgactgtctcctaca

SEQ ID NO: 122002 - DNA, 281 bp, Glycine max
ataacaaaaatgattacttaaaggccgagataatgatctcttgagcgtgtctcgaactatttccatgtgaatgtattctggattgtgttacgagctatgcatgacttaatagatattttgtttcatgattccagactcaagtttcatgattcaagactcatgatttctggatcgagatatgaactaaaaagtcttttcaaacattgggtcgcacatgtaactttgacagtagtgtttaccacatagtttttgctctctggttatctgataccacttctgtg

SEQ ID NO: 122003 - DNA, 347 bp, Glycine max
tcatgatgatgatgaatcaatattgattcatgttggtttgatgataacaaagatgatgacgaaaagcccaagagaatgatttcaagattgagtcaagaacaattcccaagagaatgatttcaagattgagtcatgaacaattcaagaatcaagagaaatttgatttcaagattcaagaatcaagtttcaagattcaagactcaagattcaagaatcaagataagaactaaaaagtttttcaaaacattgagtagcacatgaagttttcacaaaagtttttaccaaagagtttttactctctggtaatcgattaccagtttactgtaatcgattaccagtagcaaagt

SEQ ID NO: 122004 - DNA, 295 bp, Glycine max
acacaaactccttttctcttcaacatgcctaagcaacgaacgattactgtgaacggcctcactcatgacagaatccttataccaatccttatgctaaggacaccctttccttgataatgataaaaaacctcttactatactggtgctactccacactatgtgtatcttccattactcttaccacgtctaataaaggttattaacttaaataatattccacaaagttaataacattttgcttaataaaagtaaagcatgataatcctatttttatagatgaatggagagatacaca

SEQ ID NO: 122005 - DNA, 362 bp, Glycine max
acactatataatcccaagcttcgagaaaaagtacagaatcttaattgagctacaagatgctatgcaacaaattattaaggtaaacgttctgttctgaaaaaatccttattctaatccttatactaaggagacactttagttcataatttaattaaaccttttactttaatttttcaacttcacaaaaagcattacattatttactttaactttgtatcataaaggttatttaagtgaataatattttacaaaggttaaaagatttttgaaagttagaagttaaaaaggattatccaattttaagtgttaaaacgaagagtttaacactttcattaatggcactgcaggaaaccttatcttaa

SEQ ID NO: 122006 - DNA, 331 bp, Glycine max
catgacgaacttgtgataggagaaacatcttgcttttatagttgaccacacagtggtgcctgcagatatgtcgcgggggtcaggagaccttggggacaacaagaggggtgctattgccgcaaaccaatcttgaccagtaccgacccaaccctggcatagtcaggctgtgagaacctgtgatgtacctaagcaagcgagctcctggcagtccacatataaaaggaacagagaccactccgccatgcggcttgtggaggctggccctctgagaaacttgatagacatgcgagatatggtctctggtaatcgattaccaagggtgggtaatcga

SEQ ID NO: 122007 - DNA, 344 bp, Glycine max
tgagatgaggaagtgttgaagggcgaaacttcttgcttttattgttgaccacagagtggtacctggagatatgtctcgggggtcaggagaccttggggacgtcaggtggggtgctattgcccaaaaccaagcttgacctattccgacccaacccgggcatattctgtcagtgagaacctgtgatgtacctaagcaggcgagctcctggccgtcgacagataaaaggaacaaagaccacaaagcacggaggcttgtggtggctggccagctgcgaaacttgattgatatgtgagatatggtctctggtaatcgattgccaaaggtgggtaatctattacaaggct

SEQ ID NO: 122008 - DNA, 355 bp, Glycine max
tgtcaaacccaaggtccccccttagtgagtcttgacaaaatccaggacagatgtgtccttggtcaattctccaaaggctcgtcaaacccaaggtccgcccttggtgagtctctccaaaacccaagacaaacacgtccctggtggaatctccaaaggcttgtcaaacccaaggtccatccttggtgagcctcaccaaaatctaggacaaccacatccctagtcaattctccattggctcatcaaacctaaggttctcccttggtgagcttcaccaaaatccaagaccgacatatccctggtcgattctccaaaagctcgtcaaacctaaggtatgcccttgatgagcctcaccaaa

SEQ ID NO: 122009 - DNA, 277 bp, Glycine max
catatctaagatcacctacttgtgaatcttgattttgaagattcctaagggagctttagattagctacacgagttcttttgacacatctcagcttatgtgcctgagacagaaaaagctaccaggcttgactacacgacccggctatagatagactaagactgccccccccatgagccgcaaaggaagaacagagaacaatagcctcgaaaaaatacctccttgctggcaaaggactggctcaaaaatgcgcccggaatacagggtctttaaacccta

SEQ ID NO: 122010 - DNA, 354 bp, Glycine max
tctttgagaaaacttccttgagaagcttgagcttttctactctcacccctctcataactaagatcacctccttgagaagcttccttaagaagattcctaaagaagctagagattagctacacatacttttctaatagctaagctcatctccttgagatgaaaagctagagcttagctacacaccccctataatagctaagctcacccccatgacaaaaaaaaaacatgaaaatacattaaaaatagtccttactacaaagactactcgaaatgccccgaaatacaaggctaaaaccctatactactagaatggccaaaatacaaggcacaaacgaaggaaaaacctattctaat

SEQ ID NO: 122011 - DNA, 317 bp, Glycine max
gacaatcaacgtctactgtgagaccaatagaggactgcattatatctacgcgctcgaagttgtaggcggtagctctgagcctgagcttacaactataactttttactcggatgtctgtttgagggccttattatatctggacgctcgaaattgtaggcggaagctttgagtctgtggttacaacattaactttttgcgcggatgtatgatacaggactgaaatatatatacacgctcaaaattgttgttggaagctttgagtcaaatcttacgactttaactttttacgcgcatgtctgatagagtactgaattata

SEQ ID NO: 122012 - DNA, 339 bp, Glycine max
ttgagccaattctaatgataataacgttttactctgatgtccaattgagtcccgtaatatatcgacacgctcgaaattgaatgttgaagctctgagcccattcagacgacaataactttttactcggaggtgcgatcgagtgacttaatatatcgggacgctcgaaattgaatgttgaacctgggagcggattcaaacgacaataactttttactccgatgtttgattcagatccgccatatatcgagacgctcgaaattgaattttgaacgtctgagcccattcaaacgacgataacattgtactgcaatggactattgagtacacgcatatattgag

SEQ ID NO: 122013 - DNA, 265 bp, Glycine max
gtgactatggcgatacatcattgagctcaccttggaaatcagtatttgtgggaagctcttcacacgctggagaaaagtctctcccaggcgctttataataccctccctgcttctacaatatatttttcaacaataacgacactatactccttgcacttcttttactatagcgtgtgtaacatcaactgctctttttggagagaataccaaaattcaacctgtccctcattctaccacattatcacgtattagctatgctcataac

SEQ ID NO: 122014 - DNA, 347 bp, Glycine max
tctttggatttggagagagaacttgtgacaagggtgatacatcattcaactcaacttggaattgagtctttgtggaaagcccttcattatcttgagaaaagtccctccaaggagctttttaaaaatctccttgtttctaaaatttctttttaaaaaataaggtctttatatttttaagacttcttttcataaagcgggtttaactcaacttctctttttaaggagaagaagaaaaaaaaaactggaccaaatactactaaagtatgatgtattagctatgcttataacatttttgtattataggagtagttatttactatgagacactttctattatgttgaagaat

SEQ ID NO: 122015 - DNA, 250 bp, Glycine max
ctcacctaacacacgctatcactgacttttatcggtatttggcacgccaaccgctttgttttgcacagaagcatggcctctctatgatggaacaagggatgttaccaaatcccccattttagcgacacctagggtttggagaagatcacagctttttgtgccctctatgatctccctcttggtttgacagcccaagactagacactggtatgccatgctgctatcacatatggggtcataaacatttacc

SEQ ID NO: 122016 - DNA, 350 bp, Glycine max
  unsure (1)..(350): unsure at all n locations
tnttaaatttatttacgaaaaattgggttttttcagtccttgattggaggaactgttataatctttccagataatttccagtttatagataatagccagtagcttgttaataatgttagagataaattgtagcttatagataaaagctagaagataattgtaccttgtagataatgtgtggttttgtaaataattaactacctgccaatagataaagatttcaaatatattcaaatattaataaggtagagataacatgtcagttagggagcccaccagctaaggaccgagtgtcgcgctcctgttgtaggaatgatatggagggttgacatgtgtcatagagtgtcatg

SEQ ID NO: 122017 - DNA, 337 bp, Glycine max
atagagctcacgcgcaagcatgcaaccttcggcgcacttgattcttactggactcattgctacatgcgtaatagaagccaatgaggtaagaagacactctgaagtgaacgttgaaactctgagctattgatacaagactggacttttactcacatgcgtgataaaagccatgtgatatatgaagacgctcgaggtgaacgttaactctagcccattaaactaccggattttctacgtggagaagagtctggtcatatgagagacgctagaaattgaacgttgaatctctgacgcaattgtatcgaccgggactttttactacgatctctgaaagagt

SEQ ID NO: 122018 - DNA, 364 bp, Glycine max
ggacctataaacactcaagcttaacattcaacttcgagcgtctctttttttactggactcaatcaaacatccgagtaataagttattgtggtttgaattctctctgaggttcatcaatcaatttcgagcgtctcgatatatgactggacttaatcagacatccgagtaaaaagttattgccgtttgaatttgctcacaggttcaacattcaatttcgagcgtctcaatatattacgggactcaatcagacatccgagtaaaaagttattgtcgtttgaattggctcagagcttcaacattcaatttcaagcgtctcgatttattacgggacttcatcagacatccgagtaaaaagttattgtct

SEQ ID NO: 122019 - DNA, 342 bp, Glycine max
actcttaatctacccgtatgctgcaactttcaacgacctcttacctcaacccaaattcacacactacggattaactgggaactccttcactacacgtacaattccattggaagaaccttccaccttaaaggtcgacttcttaacttcagagtttacccctgcctcagcatccttttattccaaatggttctggcccatgcacaccatacgttcctcctcccccatgcaacgacaacaacatcgactatcgcacccacacccgcaaacctgggatgccccgacgcaaccttcccttgaaaaacttgtgaggcaaatgactatgcgaaacatgccccgagaaca

SEQ ID NO: 122020 - DNA, 351 bp, Glycine max
tatgctgcaaacatctacaacagaccttctcaacctcagcaccaaaatcagccacaacagaataactatgaactctccagcaacaggtacaatcccggatggaggaatcatcccaaccttagatggtcgaatccttcacaacagcagtagcaacaacaacaacaaccttattttcaaaatggttctggcccaagcacaccatacgttcctccaccaatcaagcagcaacaacaacaacaacaacagccccaaaaacagcaaacagttgaggccctggcgcaaccttcccttgaagaacttgtgaagcaaatgactatgcaaaacatgcagtttcaacaagagaccaaagcc

SEQ ID NO: 122021 - DNA, 353 bp, Glycine max
acttataaactacccgcgcgcggcggcttctatcgtgatggatctttgagcgggaaagagggcctataatggggattttcccccttgggcactcatctgtatacaaatggcagaaggagataagatgcgccataactcggaatcagctctgtacaagagcttccccgaccaaatgagccttgaatctcaaccgtgcataagaagccatcatgcaggattcgatatatggagacaacaatgaatgggggcccacgaccttgaatgacaaatcatggtaagaacccgagctgtgacacgtgtctcaccatactctcattcatcaaggttacaacaactgttactcccgcttttat

SEQ ID NO: 122022 - DNA, 346 bp, Glycine max
tgcttgtggggcttctattgaggatggatctttgagcttcaatgaggtcctttaatggtgattttccaccatggagatgcagcgggagacaaaggagaagaggtgagaggaggcgccatccactagggaataagccatggaagaaggagcttcaccaccaagatgagccttggataagaagcttggagaggatgcttcaatggaggaaaagaaagagggagagaaagagataggggggagcacgaaattgaaggaagaaaaagggagagaagttgaactttgagttgtgtctcacaagactctcattcatcaaagttacaacaagtgttacacatgcttctattta

SEQ ID NO: 122023 - DNA, 344 bp, Glycine max
tgtagctatgtcctaaaataaagtttgttttcctttagaagaggaaggcttgggtgtgagatcccttcgatcccttaatcatggggctatgttgaatcttggttggtacgtgtctgtgggaaattaaccttgggctagttttgtggatgtcatcccaaaatgattcaatactttgcgaacatatttcttctgacacacaaaaattttcttctagactcgatccctcttgattttcatgcccaaaatcttttcaacagctctgatgtcctgaatctcaaatgcactactaagtaatgacttcagcttctgaattgccaacaaattttgaaatgttataagcgtgc

SEQ ID NO: 122024 - DNA, 304 bp, Glycine max
ccactctccggagactcttaagctacccgcggccagcaagctggctgatgcatttgatgattgaatatataatcctcccgatgaactttgcttctgtcagtgccaaataccctggtgcccttggttattcttcaccaagacaggaactggcatatacaaatacaatgttatcattgtgtggcgagtcgcatatgagcgtgctcttattggaactgtccactattctaactgtgttcacccgtggtggggtatttgactttgctttaaaaatttctattggcgagtgtggatgcatcaatatctg

SEQ ID NO: 122025 - DNA, 347 bp, Glycine max
ctgttacaagataggccatgatactattgttgatcgaatatatgcacctcccaaaattatatttgcttctgtaagggcccaagattacaactgttattcttggtcatcttcaccaaaactggtactggcttatacaaatacaccgtcaacattgtggggcaagcctttaatgaacatgtgtaaaaagggaaaggtcctagattctataatgtttaaacactggaatgggtagttgtctttggttaaaaaatttctattggcaaaattgcatttaaagatgtctggtagttgctgtagttgggcatgctcccaacatttacaacaaggcaatgggatattcactctat

SEQ ID NO: 122026 - DNA, 73 bp, Glycine max
gcgtgagacttatatgagtcacggttaccgcgctccaatacccgtatatagagtgttactgcgataaactgtt

SEQ ID NO: 122027 - DNA, 325 bp, Glycine max
  unsure (1)..(325): unsure at all n locations
ggactcttaatctaccccgctgcggcggaccgatgacgttggataccttatcgactcataggggatatgtaactaatatgccgggatacaaaagtgactcttaatgaggagtagagacaccatccgatcaacataatacgaggtaggtatatnttgacttcacaggtgagtgccaaataagctgccacatgctattatcaaatacgcacagaaaggggaggacatgctcttacatatttcataatgccctgaatggctgcattgtatatccatataacactgcgctggtaataggaacattttaaccacagaacactatgatggt

SEQ ID NO: 122028 - DNA, 356 bp, Glycine max
tccatttttgggtggattggattggattggaatgatacgtatagaaagaaaaaaaatagagaaaaataataataaacataatatgccatgtgatacgaaaagtgaactataagatatagaaagtaagttataattatcctatcaatatatttgtggtaatatattgtttcacaggggtgccaattgtgtcacatgcattatcaagttgcagagaaatcggtgtacttccttttacatttttcataatcccctgttttgctgcattttatatccatataacactttgctgctagttggaattttttaaccacgggacactttgatggttttgcctatgatttgctgaagacacatgc

SEQ ID NO: 122029 - DNA, 225 bp, Glycine max
gtgtgacttgagactcgcattctgagcgagtcttcaagaacaaaaaggccttatcctctttaaaagacaaaattttttattctctaacacattacatatcccatacacttgtgactcaataagagaatcattcgattgctcaaattgatcactctatctatatctctagagaatactgcgatctagtgcgttattcacacaatggattaatagaccgacggcctc

SEQ ID NO: 122030 - DNA, 353 bp, Glycine max
tttaatcgattacacacatactgtaatctatttccagatgagtttttcaaaaaacattctcaacagtctcatctttttatctgtttcttaaatggccatcaaaggcttatatatatgtgacttgatacacgaatttgaaaagagttttcaagaacaaaaaggtcttatcctcttaaaaagaaaaatagttttatcctcttacaaattccttagccaatacacttgtgattcaataaggaattatttgagtgctcaaatagttcaatctatctctttcaagagagattgcttcttctctttttctttattctgaaaagggattaagagaccgagggtctcttgttgtgaaaaga

SEQ ID NO: 122031 - DNA, 349 bp, Glycine max
gctgatccacttacacaaatgctgcgatagtcattgagttcaaatggatagaagacactgaatcaacatttgctaaattgaaaaaggccttgaaatctgcttcgatattagctttaccagaatttggtcaacctttcacagtcaaaacagatgcttcaggagtaggtattggtgctgtacttcttcaaaaaggccacccaatagcctacattatcaaagccatgggcccaaagtatcaattactcttagcctatgagaaagaattctatgctatattatttgctgtgaagaaatggcaacactacttccttggataacacttcataatcaagactgataaaaaaaaatt

SEQ ID NO: 122032 - DNA, 347 bp, Glycine max
  unsure (1)..(347): unsure at all n locations
agagtctatanagctcacccgcgagcatgctgacaagacaatacgtagccttctttggaaaggcgacatgtgacttgtaatgagcgtgaaacgccctacgtatatatacggaggctacgctaccgattctcataggagttcgtatgaaacaccggaatagactggactacgagctaactaatggatgtactatagtgtcattaacacgcatacatagtatatttaccggatacctaatttaaaatggacgggtaacattaaccctaagatctaaaggaacttacagagaaatgccccctttttccgacataatctaccatatacccattgtttgggaaaaccaaaat

SEQ ID NO: 122033 - DNA, 290 bp, Glycine max
gaggcctctaatgacgatgagacgccctgcataagcatataaatacaacgcgacaaaggcacaaggatgttaccaccactcgggaaaaagccatggcagacggatctaacccaccgatatgagcctaggatcagaagacggaatacgatgccactttgacggaaaccatatatggaacaaaaggagaacgggggagctcgaatttagaggaataaacagggagaaaagttgaacctccgagagagactaacaataatctcatgcttcagagaaaccacaagggttacaca

SEQ ID NO: 122034 - DNA, 351 bp, Glycine max
ttctatagaactcacccgtcggcatgcactcttacacaattaacatcttacttgctagcacattaagccgcctgtatgatatccactccgcaaagtttgctggaaaacctaccctctgccctataacgcagcatggcagacaaacctgggctttttccttgcatggacactattgacgatgcggaatgaattattcgcttaactatccatgtataagcataatcgctacttgtagataccttagctttaactactgcccctacatataggtttactacacaaatgaccacatcttcaaacgttactccctacaagggaggccaaatgggaatgaaactacgatgactacgt

SEQ ID NO: 122035 - DNA, 353 bp, Glycine max
ctctagcctgttagagaacttagaaaaggtcttgtttgtactcgtttgcacatagaacgcgtgtataatatccactccacacggtttgagccatatgataccttcagccctctatcgcatcttggtagacaaaagtgggcatcctactagaatggtcgtcattgtcaatgcgaaaggaattatgcccttcgctatccatgcttactcattattgcaacttgtggttacacgatcatgaactactaccaatatatacatgttggttacactaatgatcacattttaaaagggttctccgcacgatggtggcctcttgggaacgaatcaactgtttctccttttgatgactcatg

SEQ ID NO: 122036 - DNA, 280 bp, Glycine max
ggactcttaatctacccgcggcacgcaagctatggttctgggggatatgtaatcaagagtgagttgtgtgtcctaggctacaccaaagatgatgacttgcaacccttagatgttgctgttctcatgaaagagagcttgacacaccagagtatatccagatagcccagatcaaactgggacgttgtcctgtgaaactccagacaaaacttcatgaagctacaatggataacagatgccaaagggttctgttacccaaaagactttcagcaacttatctcca

SEQ ID NO: 122037 - DNA, 351 bp, Glycine max
tggaacgtgggaaatggttctggggaatatgaaaagaaaggaaaggttgtttttccaaggctacacaaaaaataaggcttgcaacacttaagtgtttctgctctcgggaaaggaagtgtcttgaacacaccagaagtcatatcacagatagcaacagtcagatcatggaaaggtgtcctgtgaacctccagaccaaatttcaagaagctccaatggttaacaaatgcaagagggcgcttttaccgagacgacttcaggcagcttcctcgagaagctttctcgtgaggcttccttgagaagctagagttgtaactacccacacccctctaataactaaactaacctatttga

SEQ ID NO: 122038 - DNA, 350 bp, Glycine max
agactctatagaactcacccgcatgcttcccatcttaagacccactattatcttgtgagtatatagatacaccgggtcatataatccggaacattatggcaactgtgcatgactacacataatgtcactgtcctcgtttataatgggaccttacacatctgctaacactgaacattatatcggtctagacgttgtgaggtatataactgtactaatcattgcgcacaactgaggcggaggcacctcattagaacatcagtctaatgcaatgtgtgatatgggatgcataggtgggataatatctcttgcatgaaggatggagaaccacaataaaagtgctttcatacaca

SEQ ID NO: 122039 - DNA, 356 bp, Glycine max
ctcaagcttatctccaacatagatcagcatcatatttttttgtgagttttaaagtatagaccaaggtcagaagttccaataagatatctaaaaactgtgtttgacaacagataatggacttcccttggttcttttggtaaccttacacataagcaaacactgaacattatatcaggtctagacgttgtaaggtatagaagtgatcaatcattgctttgtattgagtctcatccacctttttagatttttcgtctagttcaaggtatgtggttggatgcataagtgttttcatcacttttgcatcgtccatgttgaacttctttagaagttctttcatatacaaggtttgatggctg

SEQ ID NO: 122040 - DNA, 343 bp, Glycine max
gcacgcgagcttttgatgtccaagagttctgatggatggagctaggctacttccactatttattgagaaactgtctggtgaagaggtccgaaagatattctgatatgttaatacacccatgatccagaaatctgtattgttcactgggaccgatcctatgtacttgtgagcatgctggtgaacattttcactttggtttacagagtggatgttctttatatggggcgtacgcctgcacatgattgtatataactttcacaactgtgacaaattttggatcttgagaatcatagacattttaagaggttttgtttgcctttaattgattaaatattttttgaat

SEQ ID NO: 122041 - DNA, 348 bp, Glycine max
tgacaacatgaatctttgagttcaaaatttaaatggtggatttggctactcaactaagattgagaaactgcctgctcaagatatttgaaagtgttctgatattttaatacacccatgaaccagaaatcaaaattgtcgactgagaccatctctatgtacttatgcgttggcttctgaacattttcactttggttcacacagttgatctttttcagtggaatgacaacctgcacatgattgaatataaatttcagaactttaacaaatattggatcttgagaaacaaagaaatattaacaagttttgtaggccaggaaaaaattacagaagttttgtagaagttaaatg

SEQ ID NO: 122042 - DNA, 328 bp, Glycine max
gctcacccgcatgcatgcaggcttttgctgtgaaatcgttatagcatcccctataagtgagccggtcacgaaagatcgctcattgacattcggggggaacctacacaccacctgtgttgtagagtctgaaacgcataggagggcgcctgctactcctttttctgacacttctataattacaggggatacatcgatggctcaggagcggggattatagatgttttgataccatgccggctcctggcggatgtttatctagaaaaactttaaagcgcgcacctcatttaacgtaggaataatgaagacctgcattgtttttttgaaggcc

SEQ ID NO: 122043 - DNA, 339 bp, Glycine max
tatatgaatgggacgttgctaagttctcttctattgcatccccgatcaatgagccggtgaataataatgatggattgaccctctttgttaccctgcaccccgcctgtgcgttgctcactgaaactcttactgccgctcctgttactcctcattctgacgctgccaaaactaatgagcgatactgtgatgcctcttgagcgggagctgtatctgttatgatacatggtgggctcctggttgctgattctatagaaatgatttttattgctacgctactcgaccgaccctatactctagagcaccatgcctcttaatagccctccaaactagtgaacatta

SEQ ID NO: 122044 - DNA, 288 bp, Glycine max
ttttttatggagggcccgccgccgacgatctacggcattatgatctttccctctagacactgttaagcgctaaaccctctgaagtctatctatgatccaaaacgcttaaaacctatctcgcaaaatacggggtggaggtgttgcctttactaaatttacaacgtgtgaaccaactgaacataaacgatcagcctaacacgaacctctgtaaacatggataacataatttgtcaaaacaaaaccaaaagagcgagcactgacatgtgaatcacccaacgcccatgaacg

SEQ ID NO: 122045 - DNA, 347 bp, Glycine max
tggtgaacttgtgagagatggtccttctacaatgaattgatcgttgttgttgttatctgccattaagatcttttcttctaaacactgttaggtgcttaaccctaagaggttaagctctgatacgaaactttaaagacaaatatcacaaaaaggggggttgagttgtgatcttagagatttttaaaacctttttcacaatcaaacaaagtctttcgtctgaagaagaaactttgcaaacatagataacatatctttcgaaaaacaaaatcaaatgatggaaaacaaacatgttaatcacaagatgcagtcaaatgtctaaaaacaaatttagaccctgggtcagttga

SEQ ID NO: 122046 - DNA, 173 bp, Glycine max
cacatttgacttatgaaacctaagccgcgagtagtgaagtcacattgtgcatcacaggcgacagccccctctcctcccacttagtgaacctggaggggttcaagggagattctcacccagcaacttgcccaattatacctgtgttcttggtgttgagaatctacggacactta

SEQ ID NO: 122047 - DNA, 325 bp, Glycine max
tgcacgagcgttgattactacatttcactcttaacatatagtcatcatgcatacactaatccaatcacttcatgctcaatatgatgcatgcgcctgacctaaacgtctaatatcaatgcggtaccatccctaatgaaatagactctagcatgtccacactacacttgtacttaagaaaactaggctttgagtacataagtctccttgtgttgcacaagcgactgccccccccccttccccacatggactagctaaagttttaaaggagtgccccaccgaacgacatgccccataatacatgttttcctgcgtagtataaactaca

SEQ ID NO: 122048 - DNA, 305 bp, Glycine max
ttcagagattagctgttccgactcgagatgaccctgatgatgatgagtcattaatacactgcgattaatacggattcacacctatcccagataatgaacttgctttacctttcatgttgggccttcaaataactttatcctgcattgatggactttgatgacctcttcccagaatggcaaactatatggtaaattgtactgaccgaaatcttatatactctgaaatgatttaatatcacatgcatgagctgtacaatgagtccctgcgaagaaagaaacgttttatatgggatattgacgaacac

SEQ ID NO: 122049 - DNA, 352 bp, Glycine max
tatgacttgggataatggggattatattttgagatttactgtactgacttgagttgacccaaattatgatgagtcattaaaacactgctatttttacggatccacactcatcccaaataatatcctttcttttcctttcatgttgtgcaatcagttaacattagcaggcagtacttactttgattagctcttcccaaatggaaatcttatttgctaaattgtcggaccaaaatcttattttggctgaattgagttaatatcatttggatgtgctgtaaaatgatacagtgagaagaatgatacttttcatattgtatcttgttgaactcgttaaagtgttgcatatctgcta

SEQ ID NO: 122050 - DNA, 346 bp, Glycine max
  unsure (1)..(346): unsure at all n locations
gactctatanagctcacgcgcgtgcttgctagcttgaaaggacagctcacacttgtggagctacttcaattgatcgatgaactagagggggaggaaatacttcttaccttggttgcatcattatggatgcctgaatacgaaaacataggaacaccctcgctttatgtttagctgcttcaccaggacattggcatacaacaattgaagtataccccttgagtgctgcatcgggtggcatgcaaactaatcgtgaatatactagatagtctatgtcatgttaagccatcatgaggtcacaaataagaacctgggtagacctctttagatgatatattgcactttctcg

SEQ ID NO: 122051 - DNA, 303 bp, Glycine max
ttcggtaaacaaccaagcagtgcacgcacttgcttgcccatatgatctgttgagctagctccaaatcctgtcttgcccgcctccataaaaaacagttggagtttttgtccacacgatagctaccttccatctgtacatcaacttgctctccattggaatttagtcgttgaataattttcattcactgagaactaagcgtgctactattacaccacacagtggttggatccactgcgtgaatgggctaaaaataataaatacatcttcaagcttgaatcatcgatgattaaatgtttgttttgg

SEQ ID NO: 122052 - DNA, 251 bp, Glycine max
ctttgtttcttaaaaacaagagatcgaggtgctctcgagcgagactgaatggtccatattatttaatggaacgcatctgacttgtaatccggcatgaggggcgaacattatgtgagcgaattaaaatggccacatttatcatgggtggaagggaacaaggcatgaagaattgaatctgacatggatggaactaacgaatgcgggacgctctgaaaaagatgtttcttagaagtcttaacggagtgcccaac

SEQ ID NO: 122053 - DNA, 337 bp, Glycine max
acactctatagaactcacccgctagcatcgcggcttctgcgagacaaacgccaagtggtcgagatctccgaagaggatgatccgaatccattgggcttgctacgagccttccttcctgattatcatcaaggacatagactactggcacaacgcccacattttctctccacattcattgtgttcacctatgcaaactttaaaacctctatagaagagcacaaactttaaactctttccttttgactaggctaaacgtcacttgcctaagaaaatatcatacaaggatctttgtacatccggaactactgcgttacccatccacattaatatgcatgta

SEQ ID NO: 122054 - DNA, 367 bp, Glycine max
  unsure (1)..(367): unsure at all n locations
ctatataatactcacgctntataagcgcgggtctgggagacaaaggtcatgtggtcgcgatatgcgaagatgatgttccgagtacattggatttggtacgaccatgccttcctgatttccatctgggaaattggcgagtggaggaacgccccggcatttacgcaacaagcataatgtaaacctttacagtttttaaaagctctatagttgggcccaggctttatagtttttccttttgttaaggctttgggtcttttgtttttgaatttataatacaaggatctttcttcatctgttcctacgtctctacccattctcattcatttgcatgtttacttctttttttgaaacggcagatccgatgacg

SEQ ID NO: 122055 - DNA, 213 bp, Glycine max
gaaaattaaaaaagttttttccccccttacccggattggacaatttggtccatttggaaccattggataccttggaaaatttactgggggtcctaaggggaacctaaattttgaccggtgggaactttctagaaatgtataacaccagattaccgtctgttctgtggaggagaaaattcgctggaaaacaattgttgtgatagatggagactg

SEQ ID NO: 122056 - DNA, 352 bp, Glycine max
ttcacaatatccaaacaattcaatcccatttgtcatgaaactaccttaaacaaagaaaaacagagtggaggcagaaatctttgcacaatattcattcaaattccacagagtttttcctacccacatacctcagtagcatcctctttgttccgattcgttaaccattggatcaccttgaaaaattaactaagggttcctaatacagaaatctaagttttgaccgttgggatctactagagaatttctagaacacgagatataccgcctttcctgtgacagcagaaactagcactgcacaaccattttttctgcatatttggcagttttgctgcacaatttgaccgcctttttt

SEQ ID NO: 122057 - DNA, 318 bp, Glycine max
atcttagatcctcaaccggtcaggttttaattttgaaacaaatccttcaggaccctgacccgattgaaaacactgacacaaaacttatcttacctctttcgggacaaaagttcacaagttgggggcacagatatcttctacccatcagaccttggaagcaatcgtgatcagtccccccacccatcttaatcttgacaggtgatcaaactaatacttaggtacgacccgaaatgataagggaacgtccccaatcatcactaccactatacatcatttctgcgacatagcgtaacattcaaaaacaatggtctaaacgtt

SEQ ID NO: 122058 - DNA, 334 bp, Glycine max
cccgctagcctcaagctgaccatagttcacatgttgcagcgccccctataccaaactcacatcacggtacattacctttgggtttcagcctatctctttcacaacctaagaataaaccgaagcgtggaagaaacatgactggagagaaaccatacccctaaaatgccttccaaaagaaaatggatcatgaactgcctagggcactaccgtctctgatctccataaagaaggaaacggttatataaaaaacctcaagtgttgtatgggtgacagagatgatcgctatgaaaactctgtactcgaaggatctaggacgaacactttttgggggctc

SEQ ID NO: 122059 - DNA, 333 bp, Glycine max
tggcgtggagctgggcgatcaactgctattgctgtttataactggtgatacataggctcttcaccttgacttgattcatcctcttcttcagctaaagcattcgactagagaccatgctatacggtggaacaaaatctgcgcgaatatgatcttcgacatctatcatgggtggaatggctgaatgcacgaagagctgcatattacatggatgcacttgctgaaactggagcctaagaaaatgactgcttcttagactcaacgtcttaatgcccgacacatgtattcactattgtgaatctgaacccgtgcatgatgcgtatgctcaatgctcat

SEQ ID NO: 122060 - DNA, 359 bp, Glycine max
tataacactcagcttgccttggagctgacccataactgccttaactcttttagactggtgatccctaggctcttgaccttgacttgatagaacctctttttaagcgaaggcatttgacttgatcccatgctttacggttgaacaaaatcggtgcgaatcaaaactccgacatctatcatgggtggaatggatgaatgcatgaagaaatgcatatgacaaggatgcaatttatgaatacgggagcctaggaaattgtctccttcttagatacaacgtcatagtgcccaacgcatgtatttaagaaggtgatacggaacccgtgcatgatgcatatgcaaaaggcacaacacggtgatgta

SEQ ID NO: 122061 - DNA, 340 bp, Glycine max
cggctccatcttggccagtatgatttggttggacaatgcttgaaataaaggatgacctctgactagtattacctcatgatggtaatacaaagagagggacctgacatagctagatgcgcggtgtgaatggggaaggtcttctgcgctcccctatgcgggttcacacagaaatggtaccagttggtacatgggcttgaacttcttcctatctgttgattaacactggacaaacgagcacttttaaaaagattactgcgaacaagggttgaccattgggaatgaagcatgtgttcctccatctgataatgcaaggacacttatacctgacccaggtggaatt

SEQ ID NO: 122062 - DNA, 342 bp, Glycine max
ggcttgcattgcttctatagaacgttaacatcctaatgaacaatactacatgatctccatttaactatctgtgggctaggagggcgcgctcaacatagggctataaacaccaactggacgttgatttgaccaaagatgagatgggaatggcgccagaattatctataaccgtattgattcatactgagaagctggaatgcgtggcctcttaagtgcgagcttgtgcttcataggccctcggccagctctcctttgataagcgaacaaaacatgttgctatggctacactcaactgaccaacctatgataaatagcgatctgcaatgtgatgaccccgagaga

SEQ ID NO: 122063 - DNA, 340 bp, Glycine max
tgttcttgatttttccttagttctttaacaagctttgaacaatatacatgtccttcatttaactatctttgggcttggcggccactctcaacaaagtactttcgacacctactgtacgttgatttgaccaatgctgttatgggaatgttgcgacaatcctttaaaaccttattgatacattctgagaggttggttatcatgtggccatatcgacgtccttctctatcataagccatcgtccatttttcctttgaaatgcgatcaatccatgttgctatggctagactcagttgacgaaatttttctaaattttgatcaaaaatgtgtttgcaaggagtgt

SEQ ID NO: 122064 - DNA, 295 bp, Glycine max
cctcaattgagcggaggtgaatgggttgacaagtgcaaatgagaatggggcactcactgagcagactcttatgttgaacaagtaaatatcattaatctagacttgctcaaactgatattacaaccattactccaccaaaacaaaattcgaccccttaacacccaagttaccctagaaatggcccttactttaactctggtacactcattttccttatttgctataaccaccctttccacaagggtcaaaagacattgtacactaagattaactcactttagcccacaattaccac

SEQ ID NO: 122065 - DNA, 346 bp, Glycine max
tcagaccaaagcaattcaaaatctaggtatctaaaacccctcaatttagtggattttcaaggtttgagaagtgaaaatgagaatggggtaattttggagcaaactctcatctcaaacaagtctataacattaatctaaacttgctcaaactgtttttacaacgaaaactccaccgaatcaaaatttgacccctcaacacccaatttaccctagaaatggcccttactttcactctggtcactcattttcctcatttgcttagcccagctttcccacaagtcttaaatgacattttaaactaggattaactcactttagcctccaattaccactaaatccagattta

SEQ ID NO: 122066 - DNA, 353 bp, Glycine max
actctataaagctcacgcgcctgcgagaaaactttcttgtaagctgatctgacatcacacgacccttctcctcactaaacggacctccttgagatgcttcccttataagaaacctaaagaagctagagctctgctacacatacctctattgtagctagagcgcacctccttgcgatgagattctacaccttagctactcgccccctatgacagctaaactctcccccatgacaattaaacatgggcctaccatcttttatactgactactaagactgctgagactacgtctcaatacatggctgtaaccctgtcctactagaatgggcactgttccaggcctgaacaaccgag

SEQ ID NO: 122067 - DNA, 344 bp, Glycine max
tctttgagaaaacttccttgagaagcttgtgcttagctacacacacccctctcataactaagctcacctccttgagaagcttccttaagaagattcctaaagaagctagagcttagctacacatacctctctaatagctaagctcacctccttgagatgagaagctagaacttagctacacaccccctataatagctaagctcacccccatgacaaaaaaacatgaaaatacaaaaaaaattccttactacaaagactactcaaaatacctcgaaatacaaggctaaaaccctatactactagaatggccaaaatacaaggcccaaacgaaggaaaaacctatt

SEQ ID NO: 122068 - DNA, 258 bp, Glycine max
cacttgctcctagccgctattcatacccccaatgttacgaaagacaaccggggctgagtgctctggacttgtttgctggaccattcgaaagggaacgacatgggtaaagaagctagtcatctttgcggggaggctcaagacctttccatggcttaagaatcccttctttgcctatccgagcaatacaaaacttgacggataacgcactatcacttgctgggaatttccagcatgtcacggaacttcacggattgtgct

SEQ ID NO: 122069 - DNA, 355 bp, Glycine max
tgccacccagctcgcccaagtgagctatgttgcttcctccagaagcaaccgccttctagaggaatattttggaaggcccaagtgggcctagttgctatttgcacccccatttttactaaatacaccccttgctcttttttggtgatttttttccgtaacgttacgaaattttacgaaattcgtaacgatgcttgttttctttccgtaatgttacgaaaccttacgattacgtaatcatcccttttttgccttccggaacgttacgaaactttacggattacgcactaacacttccttttaatttccagcatgtcacggaacttcacggattgtgctacaaatgccttcttttgcc

SEQ ID NO: 122070 - DNA, 347 bp, Glycine max
ggactcttaatctcagcgtagcatgcgatctttaccttataaaagctcttatttccagatgttctaataaaatggaaaaccgtgggaaaaaaaatggtaatcacgacaaaacaccgaaatggcatcacaatattgcgtgaacgcacacacaaatccaattattggtcatgaaagtatgtgcaacgaaccctattaagctttgccacctatacaacacatcgtggacgcattacacaaatccaattattgatcataataatctcttagagtaagcgaattaatactagctgagccaccataagtggattgagtatgagtttcaggttaataacaatacagacagcatg

SEQ ID NO: 122071 - DNA, 356 bp, Glycine max
taaaattggtataatttaacttatcaaagctcaatataaccagattttcttcatcaatttgaaaaaccggaagaaaaaaaatcagtttacacgacaaaacactgaaatggcatcacaataatacgtgaacgcagtacacaaatccaattattgttcataaaattatgtaagagtaagccaattaaactatgccaccttacaacaatacgtgaacgtagtacacaaatccaattattgttcataaaattatctaagagtaagccaattaaaactagctatgccaccttaagtggtttgattttgagtttcacattaataacaatacagacagcaagtccatttgaaagggcaatatt

SEQ ID NO: 122072 - DNA, 279 bp, Glycine max
  unsure (1)..(279): unsure at all n locations
gactctatantactcacccgcctgcatgcaaggaggtgagcgtatctatctagatagagagagctgctaaactctacctactatagagatctgttcaaggaagctggtcaaagaagagagcctaataactagaggggtgtgtagaaacttatctctaactgctccagactattacatcatagaagctcctcgggctatctctccaagatagcttatgcaggaaacctcctcatttgttcccccaaacatgtgtttcactggcttgacctgatccgaatg

SEQ ID NO: 122073 - DNA, 350 bp, Glycine max
tctcatctcaaggaggtgagcttagctattatatattgtgtgtatctaagctctagcttctttagaaatctttctcaaggaagcttctcatggaggtgagcttagttattagaggggtgtgtgtagctaatctctagcttctcaaggaagtttcctcaaagaagcttctcaaggaatttttctcaagaaagcttctcaaggaagctacctagtctataaatagaaacatgtgtaacacttgttgcaactttgatgaatgagagtcttgtgagacatacttcaaagttacacgaccttaaaacagtattcttaaacatactttaaagttccacgctgtattaccttgctcc

SEQ ID NO: 122074 - DNA, 264 bp, Glycine max
ctaattctttactccaatcaagatgactcgaataaaaaatgtcaatgctagtactgcgaaacgacagatccaactgtggcttgtgacatcactctatcactataggctgtctagtggcatctcgcgatgcccaacctggatactgtatcccccctacttggacaacttatcacgtacgcttcacattcttaaactagaccggtctataaacaacgagcgaagatatacgttccccgcatctcattttggaaccatacactatcg

SEQ ID NO: 122075 - DNA, 351 bp, Glycine max
  unsure (1)..(351): unsure at all n locations
tgtacatgcttcttagatagtggaggctatgtttatgtgcattagtgtcatgccatctgagaaggttagaacctactaatctaatgatcgaattaaagaagactggaataataaaagtgcgaagcttgtgctacgaaatgaaggagtagtctttgctttcagatttcacctatcccaagaggctgccttgaggcatatccagaggcccaagcttgatgatctttctcaagctacttaagacaaatttatagcaaacaaattaaattcttaacttgtccaatatataagaattgggctaaattatatgttgcgacgcaggntattatggtaccataaactatagtgactgct

SEQ ID NO: 122076 - DNA, 335 bp, Glycine max
tgctgactcgacataggggctgtcgtattgatgaatattgagaaggtgacgctttgcccaatagaacgattttatgactgagtctgcaccatttctatattcaggagaaattcgagctcaagattcacgaaaggatgatttcttaactctagagactaaatcaagaagactcttcatgggattgtttggaactattttttcaaaaacttacttaacgcacttttgtttttcaagagagagtctcaaaacctatttactgtaccacagtttttactctctggttctttgtgtcccacgaccaaaatttgttctcacaagctttcaagtgatgttgc

SEQ ID NO: 122077 - DNA, 351 bp, Glycine max
tgatgatgatgaatcaagattgattcatgttgttttgatgataataaagatgatgactaaaagcccaagagaatgatttcaagattgattcttgaacaattcatgaatcaagagaaatttgatttcaagattcaagaaaagatgaattcaagattcaagagaagaaatcaagaagacctcacaagggaagtattgaaaagatttttcaaaaaacaaacatagcacatttttgtttttcaaaagaagttttcacaaaattttctaagttaccagagtttttactctctggtactcgattaccagtgacaaaattttgttttcaaaagctttcaattgaatttacaacattcc

SEQ ID NO: 122078 - DNA, 301 bp, Glycine max
ctggactctgactgacatgcgcgaaagaggtccttgtcatatgaatatgctcagagctgaagatctcaatctctagcgttttatattacatggactttgactggcatgtgcgatagagtccattggtgtatgaagacgctcagagcttgaaatacttaaatctctgagcagtattgatataacactcgactctatctgacgcgcccgattgaggctattggcatatgaagacgctcatagctgatattggaaatctcgagcgtattgatacaacactggactttaactgacatgcgcgata

SEQ ID NO: 122079 - DNA, 350 bp, Glycine max
gaaataaaaacacgctgctctgtgttaattacgagcgctttttttattacgggactcaatcgtgacattccaataaaaagttatggacgctcgaatatgctctaagctcttgtttccaatcacgagcgtctagaaatattactggactcaatcagacatccgagtaaaaaatcattgctagatgaatcatatcagagcttacggcttgaatttctagcgtaacgatatactacccgacaacaacggacactccagtttaatagcatcgacgctggaatataatcatagcgtgtatgttcaattactatcgtttcgatatcttactggactcaatcggacatgcgagtcaa

SEQ ID NO: 122080 - DNA, 358 bp, Glycine max
ctctccggagactcttaatctacccgcggcatgcgggcttctacgattaacctcttttgctaggaaaaaaatatctgcttctttaaaaccccttgaactacttcccagtgaaccatatggtccctctataacttacgatatcccggtgcggacaacatacctaatggctttatattattttggcatgacgactcatggctcatacgcactttgttttaacacctaatgaagatgctcgtgctttttcaaggctcgccacggcgattcatagggaccatggtcgcaacaatgacccaattatacgtgctcataaacgagaatttgacaatgagtcgtttgcgcacttttagagggaaaa

SEQ ID NO: 122081 - DNA, 344 bp, Glycine max
tgcaaagagggaaccctgttaaaaactcttttttaagccaacaaattgcttctacttgataacccctttgaactactccacattgaactatttggtgcctttataacaatgagtcacggtggtaattactatggcttagctatattaaacgactactcaaggctcatatggactctgttttatcctaatatgaaacttttggtgcatcttaaatacttgccaaacgtgattcaaaaggaagagggtctcaacattgcttcacttaaaagtgatcatacacgtgaatttcacaatgagtcttatgaaaactattgtggagacaatggaagtcaccattatatttc

SEQ ID NO: 122082 - DNA, 293 bp, Glycine max
gcatgcgtgctacgattgcgcggctttgtttctcaacatccaacgcgcgctccgaccagtgttggtgcctcatactgagctgcacatgatgaccaggggagaccactctgatttgttgaactcctggccactatggcttcgctggacttgaatgcttaccatgcgaaactcttattggggtaaggagcaattgggcgtcataagatgggtaccaaaatactggatgcacccgctcctatctataagagagcggctgccgcttgggattggcctttaacgcgcccaaacctctt

SEQ ID NO: 122083 - DNA, 328 bp, Glycine max
tgtacaatagtggtacgactgggttgattttgttcacaacttccaacgtgcgcactgaattgtgtttgtgcatacctctgagcattttatgatcaccaccggagacatcttattttcgttcacattctgttccatatgaattcgcggaattatgatgctgcctatgcgaacattgtactggcgatgacccaaatcacaggcttttgcgatgtgcagcaaaactgcaggcatgcccccctactcccctatggtacagggtctgccgccataggacacggcttagagtgtgcccacaacctctttttacagggacgccgtttcttataaa

SEQ ID NO: 122084 - DNA, 330 bp, Glycine max
cgcatgctgcgtggggaacatttccttctggatgtacaaccaccatctttttccttgtgagcatggggatggagcctatgaactaccgttcgtgtggtgttcctttgtaagacagatgtatggttccttcatattgaagtgggggaggatgtacaacgtggacaatgagaggatcacgtacgtgcgagtttctgattgcttatgcgggctgtgtattaatagagcaatcctctggtcgttgaatacatttagataatggtttgcaccgtgttgcagaacgaacactattgtacaacccatgcctttctatgaaaggaccctaacatctgc

SEQ ID NO: 122085 - DNA, 346 bp, Glycine max
tatgcttgggtggaggtaacattttccttcatggtagcaacaaccaagacttcttctccttttgagcatcatggaggtgagccatatgatctaccatccgttttttgttcctttttaaagagattataggtcccttcatattgaatagggggaagatagagaaggtgttgaatgaaagattatgtacatgggagtttattattgcttttgaaaaactatgtattcatcgtaaattcctcttgtccttcgatgtattttgttacttttttgcaccctggtgcaataagaaactatcctactacccatgcctttctatgaagggtcgcaaagatatgccaatccttaa

SEQ ID NO: 122086 - DNA, 305 bp, Glycine max
tcaatactcacgatgcgatgaaaagaaggccctcgtctttatgagattacgctcgaggttgaacgttgaatctctggcgcctttctatcttccatgactttttactccgttgtctgattgagtcattggatatacgcatgaccctcgagcttgaacgttgaatttctgacgtctcgatatctaccgggactttatactacgttggcggatagagttctgtggtatagcatggccctcgagattgaacgttgaatttctggcgcatttatatctaccaggactttatactacgttgtctgattgag

SEQ ID NO: 122087 - DNA, 341 bp, Glycine max
taaacattcaacttcgagcgtcttgatatattacgagtctcaatcaaacatccgagaaaaaaggtattgtcatttgaatttgctcagaggttcaacattcaatttcgagcgtctcgttatattacaggactcaatcagacattcgagtaaaaagttattgtcgtttgaaatagctcaaagcttccacattcaatttcgagcgtctcgatatattacgggcctcaatcagacatccgagtaaaacgttattgtcgtttggattggctcagagattcaacattcaatttcgagcgtctcgatatatgacaggacttaatcaaacattccaggaaaaagttatt

SEQ ID NO: 122088 - DNA, 333 bp, Glycine max
acccgcggctatcgccgcttgaaatatccttattcgaaaccagacgctagatggttgaggtatgaaacagcacaacccatatcgtcattgcataaaagattcgatatattgacatcagatggcgtgagaaacattccttatgctgaccaacgggccttaaaaaaatgtgataacatgtctttgtttctacaacatcttagatgaattccactcaatggcacacgaccacctaagacggttgcgcaaaacggtgtgcccctaagaccaattctccacactctgctagtgcgaacgactgcatacccgatgtagcagacatacgttactatgggt

SEQ ID NO: 122089 - DNA, 347 bp, Glycine max
tgttatattgccgctgaagattatcatgttaggaaaccaaatgcttgtcgtttgatgtctgggaaggcattaccaatatcaacgtatcataagtggttggatagattgacgtctgatgttgtgtgttaaattccttatgttgaccaccgtgcaataagagaatttgagttgatctctttatttttcaaacatattagatgaagtccatcaattgtcatacaccaacctaagagggttgtgctacagtttgggtatgtttaaaccattcctccacaccctgctactccatccctatgtatagaagatattgatgatagatgtattcagttttctgaataccttgcact

SEQ ID NO: 122090 - DNA, 351 bp, Glycine max
agactctataaactaagcgctgcatacctcatgcagaaaagcttatcctataaagggaaaaccttctggggtaccctatcatgatgctagggaacacccccatatttaaccaaagtatgaacattcaggaagcgcaactcattgccaatatgctctactgtttgccagagaacactcctagaaaagaaaatacttactatatatacactatctttgtgaccaaaactttccctaagaatgaccacaatatctcctatagttgcattgtgagagcaagaggcgcctactaagagtaaaatatcatttacaaccgcttaacactcaaggggcggagcacccctacgcatctgg

SEQ ID NO: 122091 - DNA, 343 bp, Glycine max
ttccaagaacgcagcctttgagttatcttatctctcacaaattgataactttccttggataccctttcatgatgcacgggaacacccaagcattctcccaaattatgagtcttttggaagcccaaataattaccaatatgctctcttgtatgccaacgagcattcctagaaaagaaaattctagtggtttctacactaactttttgaccaaaactagtacaaaagatgtccagaatatgttcttatagtttcatcttgagagcaagatgcttctcctaggagtaaaatatcatctacaaatgctaaataataaagttggggaccacccctactaagttggata

SEQ ID NO: 122092 - DNA, 329 bp, Glycine max
gctacttgatcttatactatgatgttcgctacacatatttttgagaagcttgtggtcgtgttgccagttccccttgcatgctggactgctcaaagggactaccctgatgggcgaggaatagttccacagcagtatcaaagttataagggtttttgtcaacctaatttcaaaacatcgttctttgctggtatggacacaagagaggtctctttccccattattgcattacaccgcctaagatcacgactcttaagaataagagcctcgtggcaagcaatccactaattcgacaactgacgctattgccgctgcaataattcgcaacctgg

SEQ ID NO: 122093 - DNA, 352 bp, Glycine max
taatgacattcgtgacttgatcttaaactaatatgtttgcaggaacgattcacgagaatcttctagtcatgtttccaattcaacattgaatactgcatgcaaagaaatgactacccggaagggccaataattggtctaggcattatcaaagtcaaaagggaaatggtcatgacaaatatttcgaaaagacattatttgctggaattgtgacaagagaggtcactttaccacttagtgcatgacaccaaagaggaacaagactcttaaaaataagacgcacgattacgatgaattcaccaataccacaactgatgaatttgatgatgcatcaatttgcactttggataatact

SEQ ID NO: 122094 - DNA, 274 bp, Glycine max
gaacaaaaatgaatggcatgtgcccttttgcaaaaatgatatggctcggtccccgaaccccgttaacacaagcgggacctgattttccccgtaaataaaaagaaggatttgatcaaattgaaaatttttacccaataacgtatctattacccccattatccatagaagattggatattaggtctactacaatacgctagctatactgggactgcacgggcttgtcattgtctctccataccgtggggtgtgaactgaagatcaacggtatactt

SEQ ID NO: 122095 - DNA, 352 bp, Glycine max
tgaaaatgttaaatggatctctatagcttgcttttctttcacatttgctagttgtctgaacaaaaatgaatggcatatgcactaatccaagtctgatatgttttggtttatgtcaactgagaacccgtgtgtatcatgatcttaacagtagaaagagagaatgatatgattaatttgaaaattttcaaaccatcaatgaagtagttccccccattaccaagagaaaattaaatattaagtctattagtattagctagctagttagggttggcttggtcatgtcaaggtttaacaaaaccatgggtagtgaactagtgatcgatggtatccttggaataaaattctgaaaatt

SEQ ID NO: 122096 - DNA, 194 bp, Glycine max
cctgggatacacccccattattaaccaatgtattgaaccttcatgaagcgccacctcaatgccaatatggctctcctagctgcccagagtagcacttactaagaatataaaattacataactattatcaacactcatcttttgtgaacccaaaaccttgcgcctgtgaatagaacccccatatcctcctattag

SEQ ID NO: 122097 - DNA, 348 bp, Glycine max
tcaccatcatatggatgacacatgacattcttttccttctgaggctcactatgtcatcttatgtgagatgccgtggccattggagagtactatctttgaagtcttggaatgataggtatattccacattgttaaaataaaattttgttttcaatccccttccttgtgattgcctcgtatcgatcccttttattaacaaaaccattcgttacgctcttatctgaatctactttggaatccaacatgcattcttttgagcaatgattaactttcaaacaacctatacccaaattctgtacctacctattaactttgctaaaattaccgcacgattggtctgttttcagta

SEQ ID NO: 122098 - DNA, 318 bp, Glycine max
ttatgctcaatctatgcgagttatctgggagtcgagcaagagatcacgttttctctgctggaaagatggccgaccattcatggatgaaagacacactcttcagtcaataactttaaacagatacatcattcttgggattatgacttatgaactcaaaccctatggcccgatgtcacatctatcgcagcatttttgtatgacaggatttacctctacatatataacatggaactcgccatatgttggctgacctgaaacaccacggcaagctacccagacccaagctcctactaggagggagctgtcacatttctaaat

SEQ ID NO: 122099 - DNA, 351 bp, Glycine max
tatggcaccaaacatggaaatcaaaacttatgtcttattagagagagttatcttcttgttcgaataaaagataaaagtatctcggctcaaatcaaggccgcccattctgaatgaaaaaaaaacactcaagtcgaaaatataaaacaattatatcattcatgggattataacatatgaagtaaaaccctatgccccgatgtcacatttatcaaagcattttcctatcacaggctaagtctctccatctctaacatggaactcatcatatgacggctgacctgaaacaaaacggccatcaacccaaacacaaacgcatactaggagtgagttatcacattggtaaataaaata

SEQ ID NO: 122100 - DNA, 340 bp, Glycine max
gactcttaagctacccgcggcgggcgcctactggtggtcaccccaggagagatcgaagagggggcgcctaactgtgtgtttttcgaggccagaagaggaactttgaggcatggctcataacactttttttctttaaagatccaacagatggttcacgggcctctgtctatacactacgctgctttcttgacatgcttgatgggaaaacggtcctgcgacgcattctagttaagacttgcttgagaaggcttagctgaactaagacacccctctcatccactgagctcacctccttgagaagcttccgtatgaatattcctatcgaatctagagctcagct

SEQ ID NO: 122101 - DNA, 340 bp, Glycine max
tggaaggatgcttcaatggaggaaaagatagagggagagaaagagagaggggggagcacgaaattgaaggaataaaatatggatagaagtggaactttgaagtatgtctcacaagactctcattcatcaaagttacaacaagtgttacacatgcttctatttatagactaggtagcttccttgagaagctttcttgagaaaacttccttgagaagcttctttgagaaaacttccttgagaagctagagcttagctacagacacccctctcataactaagctcacctccttgagaagcttccttaagaagattcctacaaaagctagagcttagctacaca

SEQ ID NO: 122102 - DNA, 346 bp, Glycine max
  unsure (1)..(346): unsure at all n locations
acattctatanaactcacccgcgcgctagcgggcgtggctcacccgttataccccctgctgaattggaccaagacttcctgctcaggatgtcttctggggctacctcagacccgccgcgctatgacatgggcttaaaacgacatggttgacacctttgatgggatgttttccggcgccaatctactagctatttctgtgaatttgactctacatccactcgatatattactactcctaggcccttgactggggcctttgcttgtctattcccctcttgaataagtgccccggacatctcctacttataaggctgttcatatgggtccttagctagctcacaatctg

SEQ ID NO: 122103 - DNA, 341 bp, Glycine max
tgctagaggggggggggcacaaatgtcttaccccgagaggaattggaggatgacgtgatagcacaggatgtccgtgagggcgacaagagagcagtggtggtatgagaggtgcttaatgacaaaatggtacacattgtggatggcgaggagttaggggtgacaatcaacttgtaaatagttcgtaatttgattcgataatccactcgttaaattaggttcatgaatcaaatgacttgtacttgagctaaaaataaagctcattaaataagtgagccgaacttgagctacatatacttcgattcatttggttcatgaactatctcaaaatatatatatataca

SEQ ID NO: 122104 - DNA, 329 bp, Glycine max
gactgctttctatccctcatggcataatttgccccacactccaaggcattcttctcataggggtcatgctgggctgggctgaaactgatgctataacggagaatgcttgaagcgaaagagatggatactaatgcacaagacctgcatgtgggatacgaggcaaaccctgcccctactctttggacccagtccctacattgctgccactgatatacctcacctttctactcataccgcccaacagaaacactatcatttctttcgactctaacatctgtttttaaagagaagacaaccattaagcacttattgaaacactacctcaattt

SEQ ID NO: 122105 - DNA, 352 bp, Glycine max
tagattgacttttcatccctcatcacatagttatacacacacacaaaggcatcatcagataggggtcaggctgggctgggctgaaactgatgcaataagggataatgcttgatgcgaaagagtttcatcctaatgcacgatacctgttggtgggttaggtggcaaaccctgcccctcctcattggacccatcccctacattcctgccacttctatctttcacctttctcttcataccccccaacaaaaacactatcaattcttttgacctaacttctgtttttaaagagaagagaacctaaaaaaagttaagtgaaacactacctaaataaacacgcacacaatctaaaaaa

SEQ ID NO: 122106 - DNA, 320 bp, Glycine max
gcatgcatggtctaacctcactgcttatttccagattgagattctgtagccaaacctatcctctttaacggacacggttacccttactagtacacccgaataccccatttctttgtcgccttagacttatgtattttgtaaacgctacatactatgccttatatactcaccgcagtacactgacttacaatacactgtaacacatcgcgataaagcgtatcattctataaacctatagatctattgtcttaggaggatcaaacactattacggtgcagactggatgccaaataatacataccacttgccctgtgaatgag

SEQ ID NO: 122107 - DNA, 348 bp, Glycine max
tcaagaaaaatggcctcagcaaactctttatttccagaaggaaattctatcaatagacctccaatctttaatggagagggttaccattactggaaaacccgaatgcaaatttttattgaggcaatagacttaagtatttgggaagccatagaaatagggccatatatacccaccacagtagaaagaattacaatagatggtaacacatcaagtgaaagcataacaatagaaaaacctagagatagatggtctgaagaggatagaagacgagtacaatacaatctaaaagccaaaaaattaataacatctgccctgggaatggatgaatatttcaaggtttcaaattgt

SEQ ID NO: 122108 - DNA, 348 bp, Glycine max
tgttcgcacatcgttcgcgtgtatgatttccactcgaccaggtttgaagtacaggagaccttcaatcctatcacacaacgtggcagacaaaagtgggcagtaaacttgaatggccattattgccaatgcggaaagtattttgtgcttcactatccatgttcacacattattgcagcttgtggttacgtgagcatgagctactaccaatatatagatgttgtttacacaaatgagcatatcttaaaagcttactccgcacaatggtggccccttgggaatgaagcggcaattcctccttctaatgacgcatggacactttcaccggcaaaaatatagtacatgtggagt

SEQ ID NO: 122109 - DNA, 370 bp, Glycine max
  unsure (1)..(370): unsure at all n locations
agctacttacgtgagactctatanaactcacccgcctgttggacctcttacaagccactaagtactctctccaaaccatgccctgtactcgcgactgggccattatttcccctcacatcatgagttgattattgctaccccatataacgccacaacaccaaggccgggcatactactccttgcaagccctgttggctattcggtcaaaggctctctgctgtattgcctgccttttcctgctaccaccgcactcctatctaacgtgtgtaacagcaactagaactacttcttggcgaggctgcctttgctaacacggatatgagagcctggacatgataattctcttccggtgcttaaacattgtcttcaa

SEQ ID NO: 122110 - DNA, 295 bp, Glycine max
ccacttcttttggacaccggacaagccattaacttctctttcaaaaacatgccccgtgcccgcaactgggccatttcttccctttttaatattgagggcattaatgctaccccataaaaccccccgaaaatatggccggccatactcttccttgcgagccctcctggtctcttgttcaagggcccttgcggaaattggaatctcttcccggaacccggcgcactcctttcgaacgggggtagcagccaacttgaacatcttcttggcgagatatgcctttcctaactcgcttttg

SEQ ID NO: 122111 - DNA, 355 bp, Glycine max
agactatataaaactcacgcgcgagatgctagcttcaatctgttgcttttatatgacggagcatagactaccaattgctctccatcatccgctttgtgacattaagacaccctgcctcgtttaatgtaagcaacaaagattcggcttatattaatttagaggactgaaactatttggtttaggaggacattccttacccacaagggtatattgacatttatatatgacaaattgtcgtttaatttattgaaatcttacatcatacgatcaccttaggctcgcgccataccttctgcatacagcttaagacaatgcacactgtatgattaaaatcaactaaccatctacaaaagct

SEQ ID NO: 122112 - DNA, 347 bp, Glycine max
tgagatctttccaagcattccgtgcttattaatgacagattaatgtctacaaattgctttacaacatgccctaaaatgaattaggacaccttgcttggtttaattaagttacaaaatttggtataattaaatttaatggattgaagctagttggtgaaggaggacaaacctcaacaagaaggctatattgacatctacatatgagaaattgtggaagaattaattgaagtctaaaatcgtacgagcaaattagtttagagtaatttcttcttcattttgcttaaaagaatacacaatatatgataagaaagaactaaccaaaaacaaaaacaaactcatctccattg

SEQ ID NO: 122113 - DNA, 331 bp, Glycine max
aactttcctgataatctgagctgacagaacacgaccactctcctcactaagcggacctccttgagatgctttccttataagaaacctaaagaagctagagctctactacacatccctctattgtaggaaggctgacctccttgcgatgagattctacaccttagctactcgccccctctgactgctaaactttcccccatgacaattcaacatgggcctaccatatattttaggtactactaaagacggctgagactacgtctcaatacatggctgtaaccctgtcctactagaatgggcactgtgccaggcctgaacaaccgagaagcct

SEQ ID NO: 122114 - DNA, 345 bp, Glycine max
tctttgagaaaacttccttgagaagctatagcttagctacacacacccctctcataactaagctcacctccttgagaagcttccttaagaagattcctaaagaagctagagcttagctacacatacctctctaatagctaagctcacctccttgagatgagaagctagaacttagctacacaccccctataatagctaagctcacccccatgacaaaaaaacatgaaaatacaaaaaaaattccttactacaaagactactcaaaatacctcgaaatacaaggctaaaaccctatactactagaatggccaaaatacaaggcccaaacgaaggaaaaacctattc

SEQ ID NO: 122115 - DNA, 254 bp, Glycine max
ctcaaagaggttcaggaaggactaggcggccgaaggaacacatttggctccattggtttagaaaaaagcttaatcgaattttggatagcaatagtcccctaacaaaggatacaaggatccaccagctatttaatgaattctatttaatattttataaaccctacataaatatatccaaatagtagaacatgttaaaaaattatatgtgattgacgagtatattacttgcaatttctttaactattcatgcgtgg

SEQ ID NO: 122116 - DNA, 250 bp, Glycine max
agtttttacaaaacttgtattgctatctcttgacataaaaacctcactcacttagaagaaaaaatatacttaaatgggtcatattcatatacctccccacggaatggctctggcgacctgtaaatgtgactgtgcatttgtttccttttccatatggccattcctgagcatcaatgacagaaataaagttagtttatacaggagatggagtttcaaatgtgtatgatattcacatcgtttttcttttgca

SEQ ID NO: 122117 - DNA, 252 bp, Glycine max
aagttttgaagttttttccgcacctacacaaaagacagcagaaatcagaaccagttagaagacaaaaaataaaaaaaattgaacctttaaactaaaactcaaaaaggcaaacaaagaaatacatacttaaacaagacggggttggctagccttgactttctctgtctccagagcatgaagggccacttgtagctgcattctattactttcaaggtgatcaatatcctcaggctgactatcaagtggaaccct

SEQ ID NO: 122118 - DNA, 249 bp, Glycine max
agtttttttcaaatgcattttttatcattatgtgcaaatacattaaataaaaaggatttgattaacacccatgaatattccatggtttactactaaattcaaagtcgttagcaacccttttatgctccggtccttaaaatgttaactcgttctttttaatctagctagttgagtttttctttatttcttgcgtttccccctctgtttctattttatagcttgtagaaaattttgatcttgttttggcat

SEQ ID NO: 122119 - DNA, 234 bp, Glycine max
taaagtgagtctttttgtcattttttttggttggccaccttaagcacttcatggccgcacatatagcacctttttttgtgttgggtgatgaccaacaaacagctttttcataggctattaaaaaagttcagtgctttagccttacaaaaatatgttagcatcacattttttaacatgttgatactcttttggtattggtaacttacttaacatgctaacactcttttgtttttg

SEQ ID NO: 122120 - DNA, 245 bp, Glycine max
agcttgtgtagagcttgatttgtagagccgaaagtgatcataacgcaatacttataacttgtgagaagttagtagaacttggtgtttttccaagaactagatgtagtctcagtggtagagacgaaccaatataactcattatgtctgatattttcttgctttccttttgctttcaactgaccagggtttgaattggtttttattcttttgaaaacatcttgtgctttaagtgtttgtttttcatc

SEQ ID NO: 122121 - DNA, 237 bp, Glycine max
atgaaatcctctagcttaacgaggatggtttctgaattttatggtcacacaatattggtgcgggcgggcttgttagatatcacaatggtgacttttgagtgggttactctagctcacacggggtcgatgatgctttgaaagctgagattttggcggttcttcatggattggatcttacatggaataagggctttggaaaggtcctatgtgaaaaagatagcttggacgtgtacaatt

SEQ ID NO: 122122 - DNA, 248 bp, Glycine max
agtttgagattaaaaatgaaaatttcagcttaatgattagaccggcgttgctaaagttgtagaatttacagcaacaaaacatgaaatttgggtaattgaagttagctaagaagtttccgtgtgttataccaatttttatttatttatttatgggtgcccctacctgtcataatttcttgattaactgcaagatactacttcaagtcttaaccatccggttaaattaaacattacttgttaaattacat

SEQ ID NO: 122123 - DNA, 254 bp, Glycine max
tgtccctcaagttatcaagttctttccgcacctacacaaaaaacaacaaaaatcagaaccattaaaatacaaaaaaaaaaaaaaaaaaaaccgttaaactaaaactcaaaaatgcaatcaaataaatacatacttcaacaagacgggctttgctagcctggtctttctctttctccagagcatgaagttccacttctagctgcattctcttcctttcaaggttatcaatttcctcaggctgactatcaagttga

SEQ ID NO: 122124 - DNA, 247 bp, Glycine max
ttttttgcctcaaagaggtccaggaaggacaaggcggccgaaggaactagttccgccccggagtacgacagtcaccgctttaggagcgttgtacaccagcagcgcttcgaagccatcaagggatggtcgtttctccgggagcgacgcgtccagctcagggacgacgagtatactgatttccaggaggaaatagggcgccggcggtgggcaccactggttactcccatggccaagtttgatccagaaa

SEQ ID NO: 122125 - DNA, 251 bp, Glycine max
tgattaagttttttctttttacatgcccaactctttgagtggcatttgtattgattgttgcatcttagtctctatcttttcatgtgtacatcatgcatcatcatgtagaagtaagaagattgtttctaaatttagaaacttcttcaatgcataaaactttctgttttaatcgattacaaggctgattgtaatcgattacaagtgattatagcttgtagagagattctagttttggtttaatcgattaccag

SEQ ID NO: 122126 - DNA, 249 bp, Glycine max
ttcttgtttttacaatctccccctttttgatgatgacaactttgaaattaagaaacacacacacacacacacactttttcctagtcgatcactcacataaatttccattctccccctttgtttttgagtttatgcttcatttgaaattaagttaattacttgtgtgagttcttgattgattccctatttctctccccctttggcatcaacaaaaagccaaagggcgtaacaagtatgtaacatacaaat

SEQ ID NO: 122127 - DNA, 251 bp, Glycine max
tcaattggaagcttatactatactaaagagtggatggtggaatacatcacaatcaaatgcccataatatctgtgggatggtatatcttgcaatgatgctggaagcataactagaatcacatactcaaattctacataagggatttaatttgcaacactaaacctctctactttcaagaatttagaatggctagagatcttatgaagtgtactaagagggacaatcccaactgacattggtaatcttcccaa

SEQ ID NO: 122128 - DNA, 248 bp, Glycine max
tgctttcacaacatccaagaaattcaacatccaaacatcatgaactatcaaaaccaagaaaatagggcagaggcagaaaactctgcccaaaacacaaaccaataccacagctttccttactcaaataccccagtaacattctcttcgttccaatttgttcaccgttggatcgactcgaaaattttactggaggtccctagtacataagtctacattttgaccgttgggatctgctagaaattgtccag

SEQ ID NO: 122129 - DNA, 247 bp, Glycine max
tgcttaattaacttgaaattaagagaaaatgattattaatagaaaatacttataacattacaaaataaccataaattaggagagtttgatacaatttatacaagttttatacataaaagttagtcgttttcaccgactaacaggtacaaggctagcaagagaagcgatgtagggaataatcctcgattgcgatttaccagtgcctaggtttctcttttcttctttttccttcctctcccttcgtttt

SEQ ID NO: 122130 - DNA, 248 bp, Glycine max
tgtttggttcgaggtacttacccgttgaagatcgaagaacgatgaagaacgaatgaagaacgtcgaagaacggtcgaaaaccttcgcgaaattcctcacggaaaacgttacggaaacgtttcggaagcgcctcggcttagattttcttcacggaaacaatttttccaagcaaattcgaaagagagagaagtgccaaaggggctgaacctttttcttcttcacttcctcccctatttatagcaaaatag

SEQ ID NO: 122131 - DNA, 238 bp, Glycine max
ttgtatgtgattttcatatattttttctcattgaagatttgaatgagaaattatttataggtgtagcagctcaagtttttgaaattgtggtttctgacaaggtattacaatctttgtggtagtgtggtctaaggttctttgcctttaccaccattgttctttcttctaattgacaatttcatttcaacacaaggattgtaggggcgtgagctgctatgcatattccatagttaaagcc

SEQ ID NO: 122132 - DNA, 247 bp, Glycine max
tgttttgttgggcaacaatggtggatgagagaaaagaagaagaaggctgtgtgagagagagggagagcttctgaattttcttttggctgagtgaggagagagagaacagcttttggttttaaaaagggttttctcttttcctattattttatttaagctatgccacgtgtctccatttgagtggagcaaaagggcccactttctcttttgattgtgacccatactcagccgcaaaaagtgagaaaaa

SEQ ID NO: 122133 - DNA, 247 bp, Glycine max
tatcgcaacatgttttcgcttagctcagcctcaacagaaagatagtcaggcttagcgcacaagcgtgcttggctttattacaaaggtaaagaaacagagcctaagtggcgcttagctcagcaagctgggcttagcgcctgatctactctgagtatctcagtatactattgacgcttagcgcacaggcgcgcttagcgtttgcatcattttagttcaacaactatgatgaacgcgcttagcgcgacat

SEQ ID NO: 122134 - DNA, 244 bp, Glycine max
  unsure (1)..(244): unsure at all n locations
agtttgcattnggaattgcgaaagccccactccatcattaggattagtacctgacatctcaaacaaacaaatcaaacgtaacaagacaattatagttgttgtttgaatacctcaccaactcaagtgtatcacacaattatggcttttctctaatgaaacactctttccttttaccactctaattccccttgagttcttaggcaattcaagagattatggccacaacaaagaacaattcaccaat

SEQ ID NO: 122135 - DNA, 243 bp, Glycine max
tagcttgaatcggacacccgtgtgaaaagttatgacaatttgaatttcacgagaacttccgttgttcattttcgagtgtcactatatgtgatgcgccaaaattggacattcgagttaaatcttatgaccatttgaatttctcaagagcttccgtcgttcaattctgagcgtttagttatgtgatttgcctgaatcggacaattgcgtgaaaagttatgaccatttgaatttctcaagagctta

SEQ ID NO: 122136 - DNA, 228 bp, Glycine max
tttaaactttatttttgaatgaagctctgataccacttgttggacaagtggcctcacatatcttaagaagggggggttgaattaagatattaaaacttaattccccaattaaaattctatttcactttctattcaaggtataaattcccttaataatgaatttcttaaatattgattcaaataaaacaatttgaatatgaatttaaaaccataattaataaatgagtt

SEQ ID NO: 122137 - DNA, 250 bp, Glycine max
agcttatttactaagatcccaaatgtcttgtatgtccaaactagatgttagttctataaatgagaaattaacaatgatttttcttcctcgatctcaacctatttattggctttaaacacaaaacacattcttgcatcattatttatattttatactaaattacaagttcagtacaatgaaaacatagttttcttttataaaaaaaagtattgtgtacatcagtcctgccaccaccaaccatgtagcacat

SEQ ID NO: 122138 - DNA, 259 bp, Glycine max
tctacttatgtggtttggcggttctttcttcactgccttgtctccaacgcgagctttgaccaccgctcttacttcccgcgatgcttctcttcatatccgcctgagtgggcttataaccaaaaccatacttcccacgatttcctttggcatttatcaggctagttatgccgccggtgtctttgcctaaacccattccgggttcgtaaccgttccccaacataactcggtgatcgaggccgtacccgaatcaaataaacat

SEQ ID NO: 122139 - DNA, 244 bp, Glycine max
  unsure (1)..(244): unsure at all n locations
agttttattttttncagcctaccatcctcaaactgatggccaaactgaacggaccatacagtcgttggaggaccttttgagggcatgtgtcttaaagcaaaagggaagtcaggagagtttcctgccattgatagagttcacttacaacaacaattttcactctaccattggcatggctccctatgaagctttgtacggtagaaggtgtatgacacctctatgttggctagagcctgtagaaaac

SEQ ID NO: 122140 - DNA, 264 bp, Glycine max
atcctcacgcttctaaatccatattcatatcttacttgttcttataagtaagcgtccagtcacaagtgacaaattgtgtaaaaattgtttttattaaacttagtgtccaaagcattgttaagaaactcgcgttcactatttgcaaaaaccaatattgtcacactaagctccttttggttcgcatccatttagacttaatgacttacacttacatgttttatacattcacaaaagttacgttcagtccattccaaaagttattgt

SEQ ID NO: 122141 - DNA, 250 bp, Glycine max
agctattttaattatggggtacccatcacatgtggtactaggtggcggtcgggcgatggtgcacaacaagctttccacatccacaatgcgcgcataaacccaccatcccctgttgcccacctccaactgagctcacgtactcccacgtagcccatctcctcgtttctctcaacaccgggtccccatcaatcctctcaagcttccacaacatccaagcaaaacaacgttcaaacagcacaagctatcacag

SEQ ID NO: 122142 - DNA, 253 bp, Glycine max
tgaataaaatgattcttgctttctttgcaaagctaagattcacttaatttgttcaagtttcctttgtccagtggactgacagcattacaagacttgttcattttgtctaagaatattctcttttcatttgacttctttaacatgaacatattcaagctttatataagcttcagagcttcaatccattgagaaatcccaactagccgttgtttaatagctttggcgcttgacacgaggtctctactgtgtaaag

SEQ ID NO: 122143 - DNA, 250 bp, Glycine max
agctttttttttacactttagaaatgacccactaacctcaaaccaaaattacttaatgccattaacctatggaattaaaactaacttactggctgagggtaactgaaattgtggcaaccaaaagtctcccccaacagtcaacaagtcaccctccatttggactcccaaaaggctgatgcctaagttgccaattgggcccttattacagctcgaactaaacctaactaaagcccttctagatgagaaaccc

SEQ ID NO: 122144 - DNA, 257 bp, Glycine max
gcttggagcacatttttaccacattagtttatgatacccatgcgcgattgggtgctgtcttataacggcacggtcgtattggaaacctcaagcacggaccatattgacccgacagttacttgcgcctcgtgtgtactaaagacgcccgctgtctttcaggacgcttctattcgaaaacatatacgctcagaacatatactacgacactaaccttgtactcttatggccgattgagtcccccttactgtctatacact

SEQ ID NO: 122145 - DNA, 247 bp, Glycine max
ttttttgaaggcaaactggatgcgttggtcaacttggtaacccaactggccttgaatcagaaatctgtacctgtcgcaagggtttgtggtttgtgctcctctgctgaccaccatacagacctttgcccttccatgcagcaacctggagcaattgagcagcctgaaacttatgctgcaaatatttacaatagacctcctcaacctcagcagcaaaatcaaccacaggagagcaattatgacctttcca

SEQ ID NO: 122146 - DNA, 252 bp, Glycine max
tttttgagtagtttcatgggaccaactcattttatttcaaaaaggaagtcatatctagtcaaggtctaagagaccttacaagtttcctaacgatttctaattatgtgggccattaagtctatcatatgctgacaatagccgagaagcccgtgaatctcttcgggggcggaatatgtgtctgccattgctttggccttggctaacaatcggggaagttcttgactcccgttcaaggtaagagcaaaccgatcc

SEQ ID NO: 122147 - DNA, 245 bp, Glycine max
ttgtttgtttctaaaaatgaactgaatgcaatttgataatttcatatagcggatcatatttctttatcatatttcgcttgatatcaatccgaaaattagttctaacccatggagcaaaaagtaaaacttgcacaacaggaaacatgaagattaaggaaagaccttgagaacgaaaaggttgatcaaagaatctcatggcattgaatacacaatttgctttgatacaaaggtgttttgataggaat

SEQ ID NO: 122148 - DNA, 247 bp, Glycine max
ttgcttttgcaaatcaaatcactcccacatttcatctctagcatgcattttctttctttacccactcctcatgtttggttttttagggaaaaacaccataactaaacgcgccgcaagggatccctatcgcaccagatccaaatctagaacgatgggtgatcaagaggagacgcaggaacagatgaaagccgacatgtcggctctgaaagaacaaatggcctccatgctggaggccatgttaggtatg

SEQ ID NO: 122149 - DNA, 244 bp, Glycine max
tcttattctcatttatgcagctgagtttgtagctacctcatgcactcctctaatgactatggcatcatttctggcgctaaactgctgagagttggaagccatcttctcaattaaatttctgacttcagcaggagtcatgtctccaagggctccaccacaggcagcatctatcatacttttctccatattactgagtccttcataaaaatattggagaagaagctgctccgaaatctgatggtga

SEQ ID NO: 122150 - DNA, 245 bp, Glycine max
ttgcttgaggaaaagcttggtaaacactttgttttgaggaaaagcttggatgtcttggaaacactttgttttgaggaaaagcttgatcttgaattaatcttgaagcaatgcttgtttgttgaagcaaccttgtacaatgcttaacctttgaatgtttattgaagtaatcttgaatgcaaccttgtttgattattctttgccatcatcaaaatcatatattcatacattcacatatacctactcat

SEQ ID NO: 122151 - DNA, 245 bp, Glycine max
tataagaacaattttgcctaaatcatttccaaatatgcatgtgaattaggaagcatcaacaagaattaagccaaggctattgtgcaagcaatcaatggagcaaaacacaccaaaagattatgatgatggatggctcaaattctcacaaaggtaaacttatcactttcaaattgagctttcaaaactatcatgacatgtagaggaaaaacaaggatttcaaatcacacaaagtcaagagactttta

SEQ ID NO: 122152 - DNA, 256 bp, Glycine max
catccaatttttgatgcaacatttggagaggttaatgaaacaacgagatgatgcgctccatgagaggttggatcaaatggagaatagagatcataatgaagaagaaaggaggagaagagggaatgatggtgttcctagacaaaaccggattgatggtattaaactcaatattcctccctttaaaggaaagaatgatccggaggcctacttggagtgggagatgaaaatagagcatgttttctcatgcaacaactat

SEQ ID NO: 122153 - DNA, 275 bp, Glycine max
atttaatactcacgcttatgctgcaaacttcaacaatttatcttctcaacctcaacaacaaaatctgccacaacagaaaaattatgacctctccagcaataggtacaatcccaggtggaggaatcattccaaccttagatggtcgagtcctccacaacaacaacaacaacaacaacaaccttattttcagaatgctgctggccaaagcaggccatatgttcctccaccaatccaacagcaacaacaacaacagcaacagccccagaaatagcaaa

SEQ ID NO: 122154 - DNA, 249 bp, Glycine max
agctttttacatgatgatgtactagatgagagtgaccttcgacgaggtaggcttgtgatttctctttatatactcatttagttttcctgacttcactttttatttctgattatgtgtcttacttggctagtgcatgctataaagcaattttgaatttgctcatacaataaggttgttttgattttaagctgggataaccatgttacaatttatttgatcaagtatttcctttacacgtcatgtttggta

SEQ ID NO: 122155 - DNA, 258 bp, Glycine max
tcctgtaatgtgtttcctgttttaccgcaactaagctgtaaaaaatgactcctaaagtttttgggcaaaattacttgaacctttagtagaataatttccaaacagacaagacaaatgtgcatgaaagtatgaggtgacaagtagattgttcccactatttctatgcaaccatagattcttccaagcatatacttttgtaaacaacataggtttggtttataagcaacatgctctgcagtctgaatgtttttgcggtta

SEQ ID NO: 122156 - DNA, 249 bp, Glycine max
agcttttcagtattacaaatctcaatatatgttgccaagtgtgagtttggatcttcatttggtaaaccatgaaacaaattgctctatattagttgtatcaatgaaggtgggtaagttaagttttgtgcctgaacctctggccgcgcaacacttgagaaatattgtggcaccgaagtacttgagtaatcttccatggtcactcgttgaggtttctcttcagccatgacttcggcttcaaattctgctatt

SEQ ID NO: 122157 - DNA, 254 bp, Glycine max
tcgcgggccttcttcttgatcttgtcgtctttgttctcagagaaccttctgtgtttgcactcctgaagcacaccagctttgaggacctccttcttaaagtggttgatgattctgtcctcgagctcgtcctcgcccaccacgatctgcacattgaagtgaagaatgttggaaagggagagtgcatggtataatatactcttaactgaggaatcgttatcgattccaattgcacgcgcagatgtagatgctgatgc

SEQ ID NO: 122158 - DNA, 248 bp, Glycine max
agttttttcaaatcaaatcactcctacatttcatctctaccatgccttttctttctttaccccctcctcacgtttggttttttagggaaaaacaccataactaaacgcgccgcaaggtatccctatcgcaccagatctaaatctataacgatgggtgatcaagaggagacgcaggaacagatgaaagccgacatgtcggctctgaaagaacaaatggcctccatgatggaggccatgttaagtatgaa

SEQ ID NO: 122159 - DNA, 304 bp, Glycine max
ctcaagcttccctctgttctttttttgaattcattgccggagagtaaataaaaatggctttcgttgacagctaaaattccatctgggtgagaaatttctggggtcacaaagggaataaatgtttgctttctgatgaatagaatgattgtcttttggtctctaacaaaattgataaccttttactgcactattttgaacttactctaaaataatcatcgtggcaattatatggaatataaaactgattctataagcaggttgcgattttatgggtccctcatgggcgcgtaatttgaatttgcat

SEQ ID NO: 122160 - DNA, 250 bp, Glycine max
agtttttcaaggaagttttctcaagaaagcttctcaaggaagctacctagtctataaatagaagcatgtgtaacacttgtggtaactttgatgaatgagagtcttgtgagacacaactcaaagttcaacttctctccctttttcttccttcaatttcgtgctcccccctctctctttctctgcctctttcttttcctccattgaagcatccttccaagcttcttatccaaggctcatcttggtggtgaag

SEQ ID NO: 122161 - DNA, 251 bp, Glycine max
tagctccaaactttttgggtggagtggtgaatgaacagcgctaggcaatgacattcatggggctcccaatgaaagtggagaatggacaattggcgaacagcgctacgcaatgacattcgcgggcctccagactcgacggtggagaacacatgaacagcgctaggcaatgacattcatggggctcccaataaaagtggagaatggagaattggcgaacagagctagaccatgacattcgcggggctccaaac

SEQ ID NO: 122162 - DNA, 248 bp, Glycine max
ttttttgcctcaaagaggtccaggaaggacaaggcggccgaaggaactagttccgccccggagtacgacagtcaccgctttaggagcgctgtacaccagcagcgcttcgaagccatcaagggatggtcgtttctccgggagcgacgcgtccagctcagggacgacgagtatactgattttcaggaggaaatagggcgccggcggtgggcaccactggttactcctatggccaagtttgatccagaaat

SEQ ID NO: 122163 - DNA, 251 bp, Glycine max
ttttactgaattttcaacattccaaatgatttttaagtggtgtaatcgattacaatatattgctaatcaattaccagttgtcgcaacgtgcccttcgcgggcgagaagggcgaggctcacgggtgcgctttccaaaggaggaaagatgcgtggagtcgccaccaacgtttatttgtgggaaacgtcggaaaaaccgaaggaaaccgatcaaaatgaaaattctaagttcaggagttatatttacgcttgag

SEQ ID NO: 122164 - DNA, 246 bp, Glycine max
tttttgttttaaatttacattgatgtttgtatttaggggaggaggttatatgccatttttgctttaagagtaatgtcccactggtaaaactaactttccaaatgtttgccttcgcaggaatggccccgaggaagcttgcctcaaagaggtccaggaaggacaaggcggccgaaggaactagttccgccccggagtacgacagtcactgctttaggagcgttgtacaccagcagcgcttcgaagcca

SEQ ID NO: 122165 - DNA, 248 bp, Glycine max
tctttagaaggttttttcctaatttctctacaattgcctcacctctcaatgagctggtgaagaagaatgtggcatttacctggggtgaaaaacaagagcaagcctttgctttactcaaagaaaaccttactatgacacctgttctagctcttcctgactcttctaaaacttttgagctaaaatgtgatgcctctggagtgcgagttggagctgtattgttacaaggtggacaccctattgcttatttt

SEQ ID NO: 122166 - DNA, 248 bp, Glycine max
ttgtttggaaggtagatggaacattcatcagcccaaaaggaattacgaggtactcgtaatggccctcatgggttctaaacgttgttttaggtatgtctgcagtcctcatacgcacctggtgatatcttgaggtcaaatccagtttagaaaaatacttagctccctgtaactcttcgataacaggaattgggaatttgtcaagtattgtaaccctattcaatgccctgaaatccacacacatacgccac

SEQ ID NO: 122167 - DNA, 248 bp, Glycine max
tattatgttcaatatatcacatatgcaaatttatgataccttgtagataatagcctcaaaagttgattatcatgactcaaaattaaaggttgcaccattacattgtcataccatttaaccacaagagagaatttattacaaagtcacactaaacttgagttacacaacatttgcttaagacactaagtataaacattgcatgaagtatacatgcattcagtgtaaaactaaaaccttatggttgataa

SEQ ID NO: 122168 - DNA, 246 bp, Glycine max
tttcttgttaaaacccttcaggatcaagtagatggttcattggacgagttcgcttaagcatgtaaagcttgtgacactcctaaagaaaaaaagtccaagttgtgcattgagatagagacaaatgcccacgaaaaagttacccttcttaagaactttatggagttggaaaacaaaccaaaagatcttcaaaaggatctaaaggaacttaatgaactacgcattcataaaaatgaagaaagatatgat

SEQ ID NO: 122169 - DNA, 231 bp, Glycine max
  unsure (1)..(231): unsure at all n locations
tattgcttanctttattctctcgggccctttaaaaggcgcattgcaattacctcatacgtatatacacacacatataccatgtcattcggaatcgtgccactttgacgacacctcacatagcgcctatcaggattgcatcatactcttcttccatgaaacaatacacttgctctaagaaaccaaaactgatttaaccttaatttcccaacctaaccagggcactccctaag

SEQ ID NO: 122170 - DNA, 248 bp, Glycine max
tttttttaaggaaccatgtgctgaaggacgtcgggacacaacgctctgataggatgtggcattggagtatagggttttatagacggccttgtttgagttgaagtgaatttaatatttatttagaaaagttttatgattatgttagaaaggtgaatgtgagcctgctactctcttgaaaggctagtatttaaatatgttttaaaaacttgaattaagtttaattttttttaattattccttttattatt

SEQ ID NO: 122171 - DNA, 245 bp, Glycine max
ttaaaaagtaactcaaaacaaaatcaaccaagtcctcaaaccaattcaagtcttcaaaccaagacctcatttattcaacctcattctttttctatttttttattttttttaacgtgaacagtagcaattgaaagcatttgaaaaataaagcaacaattaggcaatatatgtatacatcatcaagcatggccaataaaaacatatcatccaatgaaacatacccccccccctccctcacacttatt

SEQ ID NO: 122172 - DNA, 236 bp, Glycine max
ttagcttgaaattaacaacggaagctctcgagaaattcaaatggtcataacttatcacacggaagtccgattcatacgcataatatatcgagacactcgaaattgaacaacgaatgctctcgataaattaatatggtcataacttgtcacacggaagtccaattcaggcgcataatatatcgagaagcttgaaattgaacaacagaagctctcgagaaattcaaatggtcataact

SEQ ID NO: 122173 - DNA, 245 bp, Glycine max
tctcgatatattttgcacctgaatcggacttccgtttgaagagttatgaccttttgaatttctcgagagcctccgttgtttaatttcaagcttctcgatatattatgcaccttaatcggacttccgtgtgacaagttatgaccattttaatttatcaagagctttcgttgttcaattccgagcttctagatatattatgcacctgaatcggacttccgtttgaaaagttttgaccatttgaattt

SEQ ID NO: 122174 - DNA, 244 bp, Glycine max
agtttgcccagagaaggagtccacgaaggaaatgcttaccacctcaaaagactggaaagtggtttctaatgactcctctgcggcctccacataaggcatagaggatgggtagctcaccaagatgtcttcctcgcctgatacgatgaccagatgcccttccactacgaatttcaacttttggtggagtgtagagggaacaactcccactgagtggatccacgcccgccccagcagacagctgtag

SEQ ID NO: 122175 - DNA, 244 bp, Glycine max
tcatgatgatgtttaatcaagattgattcaagttgttttgatgataacaaagatgatgacaaaaagcccaagagaatgatttcaagattgagtcaagaacaattcccaagatagtgatttcaagattgagtcaagaacaattcaagaatcaagagaaatttgatttcaagattcaagaatcaagtttcaagattcaagactcaagattcaagaatcaagagaagactcaatcaagataagtact

SEQ ID NO: 122176 - DNA, 246 bp, Glycine max
agttttttttttttcttttcattctgcctcttatatatctctttttctacagtcaaattcaatacacggttttttttttcttccactttactaaagcaggatcccttttcttaaaagagataaaaagacagaacaaacacaggtgtcttattaaaactcaatcctgattacagatatttctatctctggtcttcatatttacagttcaatcaagtcttgctcctgctctcttgacagtagtaatct

SEQ ID NO: 122177 - DNA, 258 bp, Glycine max
tgaaagttatatttttaaaagtattggtaagggattttgtttgtaccaccttggtatacctcacgaattgaggcgaatctcctgaattttggaccatgtacgtttcttatacactcttgtactcaaatctctaccgaattgcctgctattttaagcttgattgtgaaaattaaacagagtagggtatttattttcaaaatgtttgtaaagttttcgatctcaatttcgctaacacaatctaataggggactattgtgt

SEQ ID NO: 122178 - DNA, 248 bp, Glycine max
agttttttttgaagaaaaaatcataactaaaacatagaaaaccaataattaaatttagagaattattaagaaaaaaaaacaaggatttgaactctccagcattttcaaaagtcagaactcggaaggagagtgataaatggtttttttaactcaatcgttcatactgtgcactcaatgaagcactaaaaaactaaaatactgcaaaataaacagccacagcaaagaaatcaagtttacaattccatgta

SEQ ID NO: 122179 - DNA, 258 bp, Glycine max
tcagctttctgtttctggtattgcaaaatatcttcagggtattttctccatatgttttgaagtaaattacttttcttgctctatgtaacactgatattaagtgttctgaaaatctttttttgagtgaactagtttaagaatgaccttcaataaattatcatgttaatctacatggaaaacttagtttttttggcttgaatgtattccttgccttctctgatcttctcgtagtatatgatcattttatattacaaactg

SEQ ID NO: 122180 - DNA, 247 bp, Glycine max
agtttttgttttaaccgaaaggtgaacttgatgcattataaccataagaggaaagcttagtttttggttcaggacagtagaattaatcctaggtggacaaaacaaattagtaaacaacgtaaatggtttaattgaacataacatcacggcaatagggattaattctattaggcacatctttgtttcttgaaagagaaaggagattaccattgattcatttgccattgaaagagatttagaaataacc

SEQ ID NO: 122181 - DNA, 293 bp, Glycine max
atactcccgcttttcttctccctttcatgtattttttttttccacacatcttctccaccattgttgatccattgcaagcctccaaaattacctcgctcatttactactgccgaagccatattttcggagatcttgagatcaccacctactacattcgtgggggctttaagatttcaggctatggtggggactctcttctcacattgaaatatgtgggttgctgggttttttggggagactatggatggtgtaaaactacataagttatttgccttacggtactctatatgaga

SEQ ID NO: 122182 - DNA, 245 bp, Glycine max
agctttctttgtgcaccttttgtttcgtttttttattcctttgatcccacacaagtaagtgtcgtctccatccaaatttaccgcttccttatggtattttggtgcttcatttgttattttctttgcaatattggtaagatatattgtttgtgaatccatgactgaatgctttggttaggggctgcaatggctgcccctaggcttatctttgatcctattgtagatttgcatgtcatgttgttctc

SEQ ID NO: 122183 - DNA, 254 bp, Glycine max
tgtaaaatagatttcaagggttcaccggagaccggtttacaaatcccaggttttcataaacaaagaaaccgaagaggcggcagagctgcacaggatcggtaaagagagagaagagggatgaaaaatatatatttattgaaacttgaaagaagcgcttacaaaaatcttgtttcagagcacctcttttcagaaacctcaaaaatggccaaatgaaagggtgccttacaacatacttgaggactccttatatagcc

SEQ ID NO: 122184 - DNA, 248 bp, Glycine max
atttttattttattgcccgctatggtaggaataatcaagtgtttcatctatcctgtgggacaattaaaaccaggagataatggggtggtattgaagcatacagtggacttgccaaaataaattattttagccactttcattataagaatcagtgtacattgttacaccagactaattgcttatctattttccagtcttccaataatctaatctaatttctaacaacgttcattgacttaaaataacct

SEQ ID NO: 122185 - DNA, 265 bp, Glycine max
tataatactcacgcttcacaactagtttttatcttcactattttatacttgtttggttgctcaaattaaatgcattgttctaattttttgacattgctatatttctttgaaggggaaaacacacccaactcaattttttatgcttttgatgtccaccccaacccaattatgtgtgtttaagctgtattagcaatgtgatttgttatattttgtgaaaactgggaatttaattctggaattgtctgtttgagtactgggctggctt

SEQ ID NO: 122186 - DNA, 247 bp, Glycine max
tgcttgatgttttttccttttagaagtcaacaaccgagagattgttctatacatcgcgttaatgtattagtcatgtgtatgacaatcattttgttcaagtaaaatcatgttcatcttgtttgtgtattttttattataaaatatgttgtgatcatttgaatgtgtatgtgcctatgtaacaagtatttctaagagacagttgtcccttaccgttagcaactttgttatggtcaacacattgtcattg

SEQ ID NO: 122187 - DNA, 251 bp, Glycine max
ttgttaacatattttctatgtttagttctctcatgatgaacttgatcctaggctaaacaaattgcactcagactgtcacagaaaatgatagctttatcctgtggaaacccaagaatgctaataagaccttgtaaccaaataccttcctttgctgcttttgctaaagccatgtactctgcttctgtagtgcacaaggtaactgtgaactaaagtgtagccttccaactaacaagagaatttccacttgtgaa

SEQ ID NO: 122188 - DNA, 245 bp, Glycine max
ttgtttcctgagatcacagttgatgacacaacagccccctcatttctcaacttgatagcgtacgagatgtgtccagattttacgaacaactatgagatatgttctttcgtagccttcatagactcgcttattgacaacccagatgatgtgaaggagctgcgaaaagcagggattcttctcaacatgcttgggagtgacgaggaagtggctaatctcttcaatacaataagtgctgatttggtgcc

SEQ ID NO: 122189 - DNA, 248 bp, Glycine max
tctttcaagtggttatcagagcacaagagcttcaagtaggtgctccttaaacctccattattttttttttctttaccttctcttccattgttgtttcttcatttttctccatgtatctcctcacatgtcttgttctaaatgttgttaacatgattctttagagtttccaccgattaaacgtgctatagaaactagatttgattttctatggttcaaatttcttgttcttgttcttgaaccatgaattg

SEQ ID NO: 122190 - DNA, 246 bp, Glycine max
tgtttgtccgggctgcggcttccggtccttgtcatcttcctgttctacaaaggaaaaccaaaaatcaaacaaaacataagcaattaaaccaaaagcaacaaagaaacaaattataccaacaacaaaaaattgaaaaaccctagaaaatgaacgcctcaatcaaacgcaatgtcacaaaaaagaaaagcagaacctggcggagacgcttttgttgttcccggcgagtaagttcctgctggtagcggt

SEQ ID NO: 122191 - DNA, 246 bp, Glycine max
tctttcaatgctttttttttccataattattctaactccatgcaattgcaccttgaccatcaaaagttcccctaccagacaaggtaaagaaattaacataagtaaatttaacccattgagcatctccatttaggtggcttgggtcttgtggcactcgaattattctatcaacttaaacctcaataggaggcacacaaggccctttaagttctatttgttttaacttgtatatgcctctaggaatca

SEQ ID NO: 122192 - DNA, 243 bp, Glycine max
tgttttttacgcaccggtcaagtgtatggaccacgtggtaaccaaggtgctcatctgatatggttccagtttaaacgtgaggcccaagagcactttggagaaattaccattcaatgcttcccacctaaatccaaataccatgggggttcgtgcctttgactgcacccgtcgatagggtaggggagagattgaccttcctgtacacataggccctaacacctgtcaagttgccatccaaataat

SEQ ID NO: 122193 - DNA, 257 bp, Glycine max
gtgaactacgctactaagctgttttgaaaatttttttacaaagcaaaaggtgcgtggtctcacaagaaaccttaacccactcttgttgaaaccctccacaagatcctttgacaaacctacgctgggacaggaaacaatgctaaaaacgagattaatggattgagatcacctactgtgaggagctaaaaaggtctaacacacttagtgtcttataagaaattaatgttcaaatatttcttgagagatccactaaaatt

SEQ ID NO: 122194 - DNA, 248 bp, Glycine max
ttgtttttctttcaattacaataaatttcaagctttctttccatctctcttctccctcttgaatgatcctatgcatctctgtcactgcttcaacttcttctcttctctccccttacagattctgcttggctctgtcgtcgcttatgattctttttaatgatgttttccttttaattacttgcacactcaactattttcgttaatttaaatctgtctaaatttctatttatcattatgtgccattcttt

SEQ ID NO: 122195 - DNA, 253 bp, Glycine max
atactcaagctagcttaaaaatttatttgactacaatttggcagctaaagtcatggtagtcaaattcgatatgggaatgttgcccaaatgctattgagggtaaagagtttcaacttatttgaaaaaggtataattgattgggcagttacaatttctagtatggtatagagtttgacttacgatttcctacattaaagggtatacttgagcaatgaaaacaaaagactgcaccaactaaataagacaaggtgga

SEQ ID NO: 122196 - DNA, 244 bp, Glycine max
  unsure (1)..(244): unsure at all n locations
tatcttgtattnctctcctatggctaatatcaaatctatgatgttcatgtgatgggctgatggcaccttaatggcaggaatttgggggcaataaggtagcttttccataccattacaaataaccatgcatgacttgcaaaaaaataattgtttgattaagatattattcagtcatactccaaaagtattttatttttgacccttacacacacaggcaagtatttttgttactttcaatttaatt

SEQ ID NO: 122197 - DNA, 246 bp, Glycine max
tatattgtttctttcatatgatcttattctgccctcatattttattatatcatatcctattttgatcatcgaacgattccttaaaataccattatgaaatacaaattcaaaaatacatctgagtacgtttggatatagaattttaactgagaaaagtaatttatcagagaatttaaatttttgtaatctaaaattcattgtttgaattttttttatgaagaatttaaattttttaaattttaaaca

SEQ ID NO: 122198 - DNA, 242 bp, Glycine max
agctttactagacatgtggggttctaccagaggttcatcaaagatttttcaagatagcaagaccattgagtaatttgttgaacaaggatgttgttttcaaatttgatgagaagtgtttggtggcttttcacactcttaaagataagcttatttatgctcctattattattggcccaaattgaagttaagattttgaacttatgtgtgattctaccaattatgttgtgggagcggtgctagga

SEQ ID NO: 122199 - DNA, 243 bp, Glycine max
tgaatggagagattacacctttttgataatgaggtgcaagcgacagccaatttcttggatgatatctcacggggtcatattgatcgttagacatcagactgctgggtttggaaaccagaacctaatggccagttttctacaaggagcgcatactgtatgctactagaaggagcagcagatcagactgtggatgaggctttagaggacctatggcagctcaaaatccctttaaaaccaacaaca

SEQ ID NO: 122200 - DNA, 247 bp, Glycine max
agcttttcagctgtcccaaaacccaatgtttatgcgcaaccaagtgtcatgatttctatattaccaattttgctagctgttaatgttgaatcataattttgctctctcatctggcattcctctcatcttctaaacctatttcgtgtcatccagatttaaaacaaatttctcttactagatttcaaaatcatttttctgttttccttacaactcactcaactctatcattaccctttttcaatatgca

SEQ ID NO: 122201 - DNA, 248 bp, Glycine max
agcttttacgttatgttggagaaataaactttcttcccaaaattctctcaaacaaattaatagaattaaataattaattatttaagatgagttaactcaattacgcacagaatttattacgagcagaagcaacgtactgcttcttgtttaagcatctaatgtttacgtaccaaaagattactagtaccatttatgtcaaaggcttcacgtgatcgatcgatcacatggtctttggacagtgaatgaaa

SEQ ID NO: 122202 - DNA, 275 bp, Glycine max
accctatagaatcctcagcttataatgggctttaaagaatgaagctggataaaaagtggtcaatttttttttttttttttttaatattcgcaaaattgtcacggtaagtctaagataacaaataagctagattattacactttaaaaatctactttgcactatgactaattaaataagttaacagctatcaaagctaaacttacttattgactaatgaatttaaacatttaaatcacatacagagcaaatgtagcatggaagacttttttttttt

SEQ ID NO: 122203 - DNA, 249 bp, Glycine max
agtttttttatccccaagttggcactagtagtaccccccacaaggaaaaggagcaccaaacacacctttatcaccaccatgttgttcttcaaacccatcttcttctcttttttcttaatgtgaagagattacttaaaagagccactgaagtgggttatttatattaagaggatcatttgcatgcaaatggaaacgcgatgacttggttcttttctgagacatggagcaatagtgaataatgatatcttg

SEQ ID NO: 122204 - DNA, 250 bp, Glycine max
ttgcgtaatgcatttgctgtattatttttcatatactcttgaatgtgacttggaaaaaactcaaccctatcattaccatttttgaaaacttgatccattaatcaaagtaattaacttatcccttataagttggtgaatgtacaatatttgatgaacattcttgtctaatacccttacttagaacattcaaactttaaagaatatttcaaatttacctaacaattaatgacatctactgaattgtcataca

SEQ ID NO: 122205 - DNA, 248 bp, Glycine max
atttttatgctgctcaattgctccaggttgctgcatggaagggcaaaggtctgtatggtggtcagcagaggagcacaaaccacaaacccttgcgacaggtacagatttctgattcaaggccagctgggttaccaagttgaccaacgcatccagtttgccttcaagctttttagtttcagatgatgcaaatgggtttgtagctacctcatgcactcctctaatgactatggcatcatttctggcgctaa

SEQ ID NO: 122206 - DNA, 265 bp, Glycine max
ataaaatcctcaagcttcattaagaggtttcctctattagcttcattaagaggcttgctctagaagcttcattaagaggcttctagcacactccagatatcttctcagagatcccaatgggccaatcatggacccgtgtctttttgaaggtgcagacccaattttcgggaaaacccaccggtaatgaagacctaaaagccgtttttcccaaggcaggtggcaggaagtttttcttaaaacctggattgaaaggttccctcaaaaa

SEQ ID NO: 122207 - DNA, 249 bp, Glycine max
agctttttcacacaaacatataagatatatgtgcaaatctttagttaaccacgagaaacttgtgcacacaattagagacatatatcagcaagtgagtcaaactatgtattgtcgtaccctgatgccctgcatgtgttctctctgtggattctgccttgaactgatggactgagatggatcaatagtgccattcacaaataatatatatgagcgtgcttcttcaatggtttgagtcaatgcaagctcatt

SEQ ID NO: 122208 - DNA, 253 bp, Glycine max
tcaccattgcattatgctgatatatctcaagacttaagtaatcagaaagttttagtaggactatataactcaaagcttaccagggaaaaaaagaagtggatagagttaaagccaatgactgattcttggaatcatacctttagtatagtatgaattctgaaccgagtcacagtagcatctcattatgccggcacccaacaagaggaagcaaacaaaatgcggcccttccaaccttgaagcatccagttgttat

SEQ ID NO: 122209 - DNA, 247 bp, Glycine max
ttttttccacatcaagcaagttcatctcaaagctcttaagcaaacaatagaattcaaaagttggagaatttgcttgaaaaccttgtcgttgtgcttaaagtgtgatttgcaaaagatccaaaaattaatcaagtcttagaagctatagatgaggaggtatgaatttataattcaacgatttaactatgatatgatactttacaaagaaaaaacattcttttaatttaggtacctacaaatggttcta

SEQ ID NO: 122210 - DNA, 250 bp, Glycine max
tgttttagaacttataaaaaatcaagaacaaacttgtttgcacatcgttcgcgtgtatgatatccactccacaaggtttgaagtagaggagaccttcaaccctataacgcaacatggtagacaaaagtgggcagttaacttgaatggtcatcattgtcaatgcgaaaggtattatgcgcttcactatccatgttcacgcattattgcagcttgtggttacatgagcatgaactactaccaatatatatat

SEQ ID NO: 122211 - DNA, 246 bp, Glycine max
ttgtttttttctcattaaaagcaggtctgcaatggcgtctcattgaaagcttgtggggatcctcatagacgtttgaaaccccaccaatccttgatcttggaaaacgtctatcctgccgactttgatgactttgacaagttggaaaatccaaactgacctcagagactcctaatataggatttgatctagcatatttcatggatggcattttacgccaagattttgtcaagggactaaatgcaagca

SEQ ID NO: 122212 - DNA, 258 bp, Glycine max
acttaatcttatgttttaagtttatttcttgacggcatttacacaggaaattgtaaaaccacatgaaaagcctgggactgttgattttccttatcttgctaaaacttacattttgtagggcttaaagctttttctgcagggcctcatgttcagcttgaatccgaaaaggaactccatgcttttgatacacattgctttgtgccaagtcctcatccaaatcagtagcagtggtagcaaatggatgattagccggaatcc

SEQ ID NO: 122213 - DNA, 247 bp, Glycine max
ttctttgctcacccttctccataatcctcctgatgatcctttagttctggacctcacaattctacatgtgacccatttgcaacaagacattaaggccttggaagacttttccaacaatggattgctccagcctatagctcctgatttaagttctcaaacctgaaaatcctctgctttttcagcgcatccagtgactggtccattttaaaaacagattgactgtgtttgggttaaaacttattttttg

SEQ ID NO: 122214 - DNA, 242 bp, Glycine max
tatttttaaaatttgcaagtcaagctcaaataaacgaatcaattttattaggaacaatataagtattagtttaaatgtccaagtcaaactcaaataaatcaataaattatatacaatttttatcaggaacacaaaataggtatatacacatagatttaagtaatctctaagactctaagtcaaactcaaaataaggaattcaattggggacaattttttattaccaagtatttaaataatat

SEQ ID NO: 122215 - DNA, 247 bp, Glycine max
agcttttaataacttgagtttgagtgatttgcaaattaatttctcatttcatttacagtcttactgtgaagggcccgaataataatcagcatgtgtaaataaccagcatagtgaaatctgtcttgatcgcaagttcggtacacgtgtttttgtgaacatattggtctaaataatttaataaaactaatgaatgcttgtactttatataggcatttgtaaatacataattcatatatatgtttcacta

SEQ ID NO: 122216 - DNA, 247 bp, Glycine max
tgacaacatgattctttgagttcaaaattcaaatggtggatttggctactcaactaagattgagaaactgcctgctcaagatatttgaaagttttctgatattttaatacacccatgaaccagaaatcaaaattgtcaactgtgaccatctctatgtacttctgtgttggcttctgaacattttcactttggttcacacagttgatcttcttcagtggaatgacaacctgcacatgattgaatataa

SEQ ID NO: 122217 - DNA, 246 bp, Glycine max
ttgtttctagccaaatggacttaccttgaattaattcctttgatagcccttttgagccttgtttccctttccttgttttgaagctcactacaagccttaagtgaaaaaccatgatattaccatatccttaaggaattttggagctttggaattgttttgggaataagtgtggggggtttttgtttcattggacaacttgttttgttggctatgcttcatgatgtattttgggccatacttgatgta

SEQ ID NO: 122218 - DNA, 244 bp, Glycine max
agcttctagccaaatggacttaccttgaattaattcctttgatagcccctttgagcctatgttcccctttctttgttttgaagctcattacaagccttaagtgaaaaaccatgatatcaccttacccttaaggaattttggagcttcggaattgttttgggaataagtgtgggggggtatgtttcattggaagatatgatttttggccatgcctaatgttttattttggccatgcttgatgtat

SEQ ID NO: 122219 - DNA, 247 bp, Glycine max
tagtgatacgattttccatcccatccaagcgagtatccatcgcatcaaaatgctcacccacaaatgctcgaagatcgctgagctttgtgaggactttagtcaacagagaagaagaagcatccctttgtggtggaggagatggggtacgttcatcaggaataggtggtggcaagtcttgtttgcgaactcactgaccattaacatccttccgataaccaaaggaggtaacaacaccggcaccaatgga

SEQ ID NO: 122220 - DNA, 244 bp, Glycine max
agcttgccatgatgttttatgtgttctctgtgctatcagtacgtcatttcagtgtgcttttgccttgatcacatagatgcatgctttgttaggatcattcaatagtggaaactggtctgattcttaaaacttgataggacagggctagtttatcgtattatcacgagggatcggggtatggtaacctagttgtttgtatgtttgtcttaatgcagctctggtcgagtttagtccaacaagaggg

SEQ ID NO: 122221 - DNA, 240 bp, Glycine max
tgcaccaacatttattagtccaatacacactcaacaaatagtcatcatccatccacaattccaatcattcatgctcaatatgatgcatgcacctgacctcaactctaatatgcaatgtggtaccatccctaaggaaatagccttagcatgtccacacgacactttcacttaggaaaactaggcagtaagtttcgaggtcaccttgtcgtgcacaggcaactgccccccccccccccccac

SEQ ID NO: 122222 - DNA, 247 bp, Glycine max
agttttagaagtatgtataaattcttttgaaactaaccttggatacaataatgatgtttacttaggcatttttaactactttttagttgaacatacagtaatataagacataattcattttgctattacttgactcaaataatttatttgcggggatagaataccgagacaggttctgcacaaggagcttacaacactgctccatagtttagagggtatgccatactagtacctttgggtaagaagc

SEQ ID NO: 122223 - DNA, 259 bp, Glycine max
actccccttgcggcatgttttttgagcaaaactttgattgggcctcttctagggtttcccaacacgctaatcgagctgtgcgcctcgcttagtggatgttactcgctacacgcataaggctcgcttagcgagacaccaactgcttgaaccttgtcttcttttaccctgaaattgaagtgttttcaacattaattcacaaaatgggagtatccactttataaaattaaactaaacatgagaagttgtacaattcctacaa

SEQ ID NO: 122224 - DNA, 246 bp, Glycine max
gtctcctctaccgtaaaaaaaatattatcggccagtgtttttaaaaagaattgcgcaatgtcggcagaaaaatatcagtcgtggctatataacgaccgatgtcaggtatttttgtttcaattcaatccctgaataatttttggatattgtccaataggaaatgttcgatcggcgtcatcaggtgatgcttgctttttattttagacctgctggatcggtcatctttcctggccgacatcgactatc

SEQ ID NO: 122225 - DNA, 269 bp, Glycine max
taatactcaagtcttgaaatagttgtttaaccatttcttggacatgaggtttaccaaagggtcagagacatataaactacctttggtaagacataaaaaaaggacttgtctgcgaaaaacatttggaaaaaaaaggtcaatattctttgatctttcatattggtgcaatctggatgttcgggattgtatgaacgttatgcatgtggagaaaaatgtgtgtgataatttgattggcacccttcttaacattaaggggaagacaaaggatg

SEQ ID NO: 122226 - DNA, 247 bp, Glycine max
agttttattttcgcgggttcgggagacaaaggtcaagcgttcgcgatatgcgaagatgatattccgagtactttggatttggtacgaccatgccctcctgatttccagctgggaaattggcgagtggaggaacgccccggcatttacgcaacaagcataatgtaaacctttacggttttaaaagctctatagttgggcctaggctttagagttttttccttttgttaaggctttgcgtcttttgttt

SEQ ID NO: 122227 - DNA, 267 bp, Glycine max
tttaatactcacgctttgcggatttggtctttgctagtgttaggatcgatgtgggtccgaaaagaggcaaatttgatcatcctactaggacgactgagaaaactggggcaaataaagagggtgaggatgagggagaaacccatgctgtgactgccattcctgtacggccaagtttcccaccaacccaacaatatctttactcagccaataacaaaccttctccttacccaccacccagttatccacaaaggccatccctaaatctac

SEQ ID NO: 122228 - DNA, 249 bp, Glycine max
agcttttgtctgttttttttagaaggggattttattttatttttgaatatgaataacataagatttgcacgaattcaaacataaaatcattccaaacataaaaataacattaaattaacttcagcagagtcgaaagaaatagaattagcatcaaatacgacaactaagtgatgctaattttgtgacaaggacatattatcttccatttcgatgacatgcttactaaaaacaggtaaaatttctattggc

SEQ ID NO: 122229 - DNA, 251 bp, Glycine max
tacgggtcaagttttggaaattctccccattactgtttgtagtctccactaaatttacaaggaagaatgagggattttatgttctagcttgcaaccttcaagagtgcaaaaattttatttgaatctacaagtgagaaagagcacgaaaatgaagtgaaaatccagcttacagttgaaaatggaggtcatttacctaagcttgatgacagaagggctcaacaacacttggaaaagcttggaagaagagtgga

SEQ ID NO: 122230 - DNA, 250 bp, Glycine max
agttttgttttgagtcatcaagagattataaatatgtgaccatggcatgagtttcaataatcatcaatcatctttgaatcatatatctttcaatctttacaacatcatctctcaacatctttcaatcaatctttcaatatctttctacataattttctgattcatttctcttcatctttctaaaagttttttatcaacactttctttttccaagaaaatttctttgttcaaaaacttgtgctattcatct

SEQ ID NO: 122231 - DNA, 272 bp, Glycine max
tctataaaaccctcaagctttgtccgcaaaattcactattaaccattgaaaggtccaacgccttaaacggtcccctttgcttttatcggttaacatggaccgttcaaaagcataaaatcaacatgtaactttaccacttttgcaactacataggtctgatttcctcattgcaattgaggatacgtaggagcaaaagcctcgcttttgtcgaccaccccaagagatcgttaatggtccaatgccttaacgtttctctcttttcaaaaacaaga

SEQ ID NO: 122232 - DNA, 247 bp, Glycine max
ttttttctagccaaatggacttaccttgaattaattcctttgatagcccctttgagcctatgttcccctttctttgttttgaagctcattacaagccttaagtgaaaaaccatgatatcagcttacccttaaggaattttggagctttggaattgttttgggaataagttgggaataagtgtggggggtatgtttcattggaagatataatttttggccatgcttaatgttttattttggccatgct

SEQ ID NO: 122233 - DNA, 254 bp, Glycine max
tctttgtttccaaaattttgactcaccagaaaccttgacccagggtgagaatgtcaatccttaccctcggaagcaaaaaaggagagaaggaaaatttccaatcaaagtaaaaaagagaggaaaggaaattcccaatcaaagagtgggagaaagcacaaagaaaagaaagaaaattcccaatcaaagagtgggagaaagaaaaaagagaaggagaagaaggaaagaaagctcctgatcaaggatcgaaagaaaaa

SEQ ID NO: 122234 - DNA, 247 bp, Glycine max
ttgttttttgtattacaattaagaaatatgaaacttggaccaccatccatgcaccgacgttaatattaaaggtgttggctaacgccattctctaggggaacaagaagtactgcgtaggatataagtgcgactgataaaaactattgccctaaacgaaatgccacaatgaaaaggatacacttcggggcggatcggcgacactttcaaatattcgaattgaaggcaaccgttgtatgactgaacttaa

SEQ ID NO: 122235 - DNA, 270 bp, Glycine max
gtgaactatacaaactcaagcttttttctatagttttttcatgatggacatgttgctgttatcccaatctcattctgtaatacagattccctatccataggattacaccctatttataaaaaattttaagaataattcgtctagaggatgaaacatggatggtgagaaaccttgccttagaaaaagcctttcaataacacttatgtgtataactacatgggtcacaaaagaataaggccaccttgagaactattatgatcatacataaga

SEQ ID NO: 122236 - DNA, 247 bp, Glycine max
ttgttttgaagacatgaagtatgaactgaagcactcattattcaaattctctatgtaaaaacctctataaattctggtaaggtttagaaaagatctcaaaacactttgttcatcttgagagtgttagtcaatatgtgcaatcaaaccaacaagtcttttgatttgtgttaggccaatagtggcttggtaggacaaagaatactggttgcaacaagcttagagtaaaacttgagttaaggagtcataa

SEQ ID NO: 122237 - DNA, 245 bp, Glycine max
tcttatccaaggttctctcttggtggtgaagctcttcattccatggcttattccctattgaatgacgcctcctctcacctcttctcctttatcttctactgcatctccatggttgaaaattaccattgaagaacctcattgaagctcaaagatccaacctccatagaagcttctcaagtaagcttccatcaagtggtatcagagcacaagaacttcaagtaggtgctttttaaacctccattaac

SEQ ID NO: 122238 - DNA, 245 bp, Glycine max
ttgtttgtgtcaatcccacatgggtggagcattcttgcaaaatagcatgaccctgactagtctccctatgattttacttagggagagtgacctgacatactcattgtgtggtgtgtcttgtaatgtactcctaagcaccccagggtggtttttcactgacatggaaccacattgcatataggcttgagttttatcataactgctgcataacacttgctaattgtttattatgaaattgacgagtg

SEQ ID NO: 122239 - DNA, 246 bp, Glycine max
tgttcgcacatttttcgtgtgtatgatatccactccacaaggtttgaagtagaggagagcttcaaccctataacgcaacgtggcagacaaaagtgggcagtaaacttgaatgatcgtcattgtcaatgcggaaggtattctgcgcttcactatccatgttcacacattattgcagcttgtggttacgtgagcatgaactacttccaatatatagatgttggttataccaacgagcacattttaaaa

SEQ ID NO: 122240 - DNA, 249 bp, Glycine max
ttgtttttttttctcgtacagttgggaagcctttgattgtggatgatcttgccttgatgaagtggccattaatgtgtcaaacacaatccgataccaacaggatatggcccttgctgttatgaaagcattacgaggaggtgccccactaatgtcattataactcgatggagatagcttggatggcctgtgacaacaaattggtattcctacatttagtgaaatgctgccacggcagggtgggaagcgatt

SEQ ID NO: 122241 - DNA, 246 bp, Glycine max
tgaactaaaattttattgctgaaatctaaaagttatgaacaatatacttcgcgtcatataaaatataaaccccttggtatatacatgaaactgaaacgacactccattaatactgatttttgatttctatcatgcgatccctataccatcatatcattatttcttatactctcctcagatatataatatgaaaccagtctcactgcgtattgtctaggatttattaaaaatatgccaaccctaaca

SEQ ID NO: 122242 - DNA, 210 bp, Glycine max
agttttggttagtgaggggaggtgcaatcctctccgtggcagtgctgacagcaggggcaggctgctttcatgttcttagcaccaacaactgtggctgtatggtcgcagtgcgcaacatgcttcgactgagcttgaccacactatacctaattcttttatgagatgagacatactatccgcagagcaagcgggtgtgtatcccatgagctg

SEQ ID NO: 122243 - DNA, 229 bp, Glycine max
ttagaactttatttttgaagatttatgctgtttgaaacccccctcattaatggatacctaaggacttgtgaagcgtaaaactacaatggcttattcgaagaccaaacctgtcatttgtgcacaaggtacatcacatgagattgctcttcctcaaactgttgggacatggtaacattgccattataagtggaacgcccctcatcacccaaaaagacgtataatgggccct

SEQ ID NO: 122244 - DNA, 244 bp, Glycine max
tagcttgagatgaggaagtgttgaagggtgaaacttcctgcttttattgttgaccacagagtggtacctggagatatgtcgcgggggtcaggagaccttggggacgtcaggtggggtgctattgcccaaaaccaagcttgaccaatcccgacccaacccgggcatagtcggtcagtgagaacctgtgatgtacctaagcaggcgagctcctggcagtcaacagataaaaggaacaaagaccaca

SEQ ID NO: 122245 - DNA, 240 bp, Glycine max
tgttcatcttgatataataggtggtcatcctcatttgaagttgatggtgcaacatatttctttggcctaacaggaactccaatatttttacagcttctaatgttatgattggtttggccacaccttccacatgtaaactcagccaatttcctctttagcttatgtcctgtgacattgtcctcatctacagatctccttctatttttctttggccttcctctttggacctttttatgtggg

SEQ ID NO: 122246 - DNA, 248 bp, Glycine max
agcttggtttaagaatctaagcatttctgagggtatgcttaggtgctttaattggtccatggtctttgtcacttgctttgggccacgttcatacgtcgtatgtagtgtatgttcatgggggtggagtgcactgaccttgtcggatggcccattcgtgggggacaagcgtggttagagaatctaagcatttctgaggggatgcttaggcactttacgtggttagagaatctaagcatttctgatacagg

SEQ ID NO: 122247 - DNA, 255 bp, Glycine max
tcttgccacccagctttcccaagtgagctaggttgcttcctccagaagcaaccgccttctagaggaatattttggaaggcccaagtgggcctagttgctatttgcacccccatttttactaaatacaccccttgctcttttttggtgatttttttccgtaacgttacgaaattttacgaaattcgtaacgatgcttgttttctttccggaatgttacgaaaccttacgattacgtaatcattccttttttgcctt

SEQ ID NO: 122248 - DNA, 248 bp, Glycine max
agcttttctctcgtagatccttataggtccacaaaatccaaggctcgtccttggtatgcctcagcacaactccataggcttgacaaaacacaaggcaaacatgtcaccagtccaaggctcgacaaatccaaggttcatcctttcttttactaagtctcgtctccataggaactaaaggtacgcaaggtctacccttgacaatcttctctattcctaacctttatctgttcatgaatacaagattatca

SEQ ID NO: 122249 - DNA, 248 bp, Glycine max
ttaaccaaggggttatggaccatttcaagtgcttgaaagaatcaatgaaaatgcttacaaagttgagctgcccggtgagtataatgttagttccaccttcaatgtctctgatttatctctttttgatgcagaaggagaatccgatttgaggacaaatccttctcaagagggagagaatgatgaggacatgaccaagagcaagggcaaggatccacttgaaggacttggaggacctatgacaagggcta

SEQ ID NO: 122250 - DNA, 281 bp, Glycine max
agctttttttttgattgataattcattgtccgaaagtgatgagcgtggtggcaaaagtagggcctgcaatctcacatatctagaatttccaatgttcctttaggtgttcaccagaagatctttgtcaaaccagctcattctattgtcactcaaacattaacacgctttcaggcctttttttcttgccttctttcattgaggggattgggaaggatcatttgagaactagcctcattgaaagttaagtgctttccccaaggccagtcctcttaataatcttt

SEQ ID NO: 122251 - DNA, 223 bp, Glycine max
tcatgatgatgattcaagaatttttgaagatgccaaaagcccaagtgattgattcaagacttccagaaccaggcttaagaatcccatccaagattcaatattcccgagaagaaatctataagccaccaggccaaaactccatatgggatacgtttaaaagggatttttcaaaacccaaaacgcccatgtgggttttaaaaaaaatttttcaaaaattttcaaa

SEQ ID NO: 122252 - DNA, 281 bp, Glycine max
  unsure (1)..(281): unsure at all n locations
agttacttttagnaatcaagctacacagatatacaacagtaaactgtgctgctatattacgatctgtaaaattcattttttcagtcgagagtttcaactaaaaggacgcactatgctcgtattttcataaatgttacaagtcagtttattgtctgattaccacaacatgcccagattcctttagtaatcgtcctatgttgatcaaacagccacacattttccaagtaaatatttaataatttaggggggcgcaggaaaccccacttatatgcatctaaact

SEQ ID NO: 122253 - DNA, 248 bp, Glycine max
atgaaatcctcaagcttgggacactttgtttgtaattttttgacatttaagaataaattcctgactcagaggtaacgcttgtatatatacttgcagataaagctttaaaaagggttcgagcttaatgacttgatattatagggaaatcttgggttacaaaattcatagataaatcattcctttctagattaaagatattactgcgaaatacgtatttatgaaaaagtgtcaatcatattctaaatttt

SEQ ID NO: 122254 - DNA, 142 bp, Glycine max
aatgatttctgacgagacagaacctgtccatatttatataacggtccggactctgaaacatgattaaaattccgagaaaagcattatacctccctgggaagcattgacaatttcttaaacaacgtgcactttttgtctttcc

SEQ ID NO: 122255 - DNA, 285 bp, Glycine max
ttttttttgacaccctgattctgttggagacttgtctgaacctctgcgactctttggcaatcaccaacaatatatcttgtgaagtccattgtccttccccaaaacggagaggtatatatcaacttaaccttggcaatatcacacaagtaaaactgtgtctacgcaaaatgatacaaacttctggaagtacctgtctttgctgccatcccacacatttgtatacgacgattgcatcacttggtcgaaattatctaaagaatttcttagacttagtgctcgaccacc

SEQ ID NO: 122256 - DNA, 250 bp, Glycine max
tgttttttcaatttcttgatgaggatgttccatatgttctcaagactggactaatacatttgctgcccaagtttcatggtcttgcaggtgaagatcctcataagcatcttaaggagttccatatttgttgttccaccatgaaaccccctgatgtcccggaatatcatatctttcttaaaggcttctcctcattctctggaaggagtggcaaaagattgggagtacttaatcatcccttatttgccttccg

SEQ ID NO: 122257 - DNA, 267 bp, Glycine max
tgctttattctagtaggctgtcgtatcctctgatatagttcatcctgttcttgatgaagcttagggtcaataagctttcaagatgaagctttatcgaaaacaaagcttatttcaattccccctcgagacacaacccaataagttataattcattgccttaaagaacttatggacatatgctcctaatgtaataagatctctattgaataaggcacttatttaaactggttcccatacttggcctaattgcatccatgcttgttaata

SEQ ID NO: 122258 - DNA, 248 bp, Glycine max
tgtttaaaagggttctagttaaaaactcttttgaaagtaaaaaaattgtttctacttcaaaaccccttgaactacttcacattgatctatttggtccctctagaacaatgagtttgggtggtaattactatggcttagttatagtagatgattactcaaggctcatatggactttgttttaaccaaaaatgaagcttttggtgctttttaaaaacttgccaaggtgattcaaaatgaaaaaggtctca

SEQ ID NO: 122259 - DNA, 247 bp, Glycine max
tgcttcaattcctcgagtaagctcatcatccatattgcttgacatgcaccaagtgatgctgccacatactcagcttcacaagtagacaaggccaccacatcctgctttcttgaactccaagctactagtgcatcataggacatgaatagataccctccagtactcttattctgttcttgatctcttttccaatcagaagctgtgtaaccaaatagatctgattcacctgatccaatttcacaaggaa

SEQ ID NO: 122260 - DNA, 245 bp, Glycine max
tgtttaatagtcttactatttggtggatttggttcataacttcaaatgtgcttacagtattgtgtttgtgcatatttctgagcagtttatgttcagcagtggagacatgtaatttttgttcagcatctgttccatatgaatcccctgaattaggtttctgccaaggtgaaaattctactggtgatgttaagaatcacaggttatagagatgtgttgctaatatgcaggtttgccccactactccc

SEQ ID NO: 122261 - DNA, 252 bp, Glycine max
tttctttttatgagtttgtgagtgattgtgtaaaatccttagagcgtgcacaggatacattcctcaccacttgtatttttgcaatctttcatcttgttcttctctttattgtaaagaaggcttcttggtatggaaagctaaatcctctattggatcttccctgcaggtacctgatgtaaatatatttctatctatttaatgatgttttgtgtattctctgtgctatctgctttacattccaatatgccttta

SEQ ID NO: 122262 - DNA, 245 bp, Glycine max
tgctgctggagttgattcatcaactgccctaactcttttagactggtgatccctaggctcttgaccttgacttgatagaacctctttttaagcgaaggcgattgacttgatcccatgttttacaaaagtgaaacaaaatctattgcgaattaaaactccgacatctatcatgggtggaatggatgaatgcatgaagaaatgcatatgacacatatgcaatttatgaatacgggaacccgggaaat

SEQ ID NO: 122263 - DNA, 246 bp, Glycine max
tttgtttttgagccaattcaaaccacaataactttttactcggatgtctgattgaggcccgtaatatatcgagatgctcgaaattgaatgtggaagctctgagccaatctcaaacgacaataactttttactcggatgtctgattgactcccgtaacatatcgagacgctcgaaattgaatgttgaagctctgagccaattcaaacgacaacaactttttactcggatgtctgattgagtcccgca

SEQ ID NO: 122264 - DNA, 244 bp, Glycine max
taaacattcaacttcgagcgtctcgatatattacgagtctcaatcaaacatccgagaaaaaagttattgtcatttgaatttgctcagaggttcaacattcaatttcgagcgtctcgttatattacaggactcaatcagacattcgagtaaaaagttattgtcgtttgaattagctcagagcttccacattcaatttcgagcgtctcgatatattacgggcctcaatcagacatccgagtaaaac

SEQ ID NO: 122265 - DNA, 244 bp, Glycine max
tagttttcgtaggtgaaattaggtgcagccaattcccttagagtcctctcacggggtggagggtgtgccatgttctcagaatattcaaaatcagaatgctcaaaactataatgctcaaaatcactaataacagaatgctcaggatgctcaaaaggtactaaatgatgtctaactaatctatgaaatgtcttatctatttcaggatcaaagggttgtaagtcagatggatttcctctagtcatac

SEQ ID NO: 122266 - DNA, 246 bp, Glycine max
tagcaagacaacttcttttgcaccttcataattttctcctttttacctgaaattgaggtgaaatttacattaaattcattaggaaggcttctaatgagcacatatgaaaactaagctagaaatatttacaatcctaccaaaaataaccataaattgggagatctatatacattttggaaaacttttctatacaaaagttagtcataaaagacgactaacacatatcttgagagaattctttgcaaa

SEQ ID NO: 122267 - DNA, 247 bp, Glycine max
ggcaataattttgacaacggctggacatgatatatgtcatagtgaatggcttggccaacggttcaaggtataaaggggaaataccacattatttccatgacacacatgcaacaatgatgattaggaaatctaatacaaaactggttatgcatgcacccatgtggacactcaaacatcaagtttttatggtcatgtgaaactatggcttatgattcatttttcctattaaagacaacccattgtttcc

SEQ ID NO: 122268 - DNA, 243 bp, Glycine max
ttaaaattttaatctaaacgttcaataactgctggtaatcgattaccatatatgcgtaatcgattacacagtgcaaattttgaattcaaattttaatagctgctgtaaatcatttttggccactggtaatcgattacatcctctggttatcgattaccataaagtaaatctcttgaaaagactttttaacttaaatttcttggccaaaccttttgctacttcaattaggaattcccttcctat

SEQ ID NO: 122269 - DNA, 246 bp, Glycine max
agcttttttgaggaagtgtggaagggtgagacttcctacttttattcgttgaccacagagtggtacctggagatatgtcgcgggggtcaggagaccttggggacgtcaggtggggtgctattgcccgaaaccaagcttgaccaatcccgacccaacccgggcatagtcagtcagtgagaacctgtgatgtacctaaacaggcgagctcctggcagtcaacagataaaagaacaaagaccacaaagc

SEQ ID NO: 122270 - DNA, 302 bp, Glycine max
cccatagaatactcccagcttttaacctcccttttaaatgattttgtctcagaatgcgatataaaagaaagtctgcaatacaatttgaataatgggtgctttataacggtggaaatgactaaaattggtatggcggatctaaattataataacgatacaggggaagtagagtacattgcaaaactttcaatttatccagggctctactgaccagatcctctgagcaattccacttgaagattttatcactaatcttctgtttaaatccagttacatgactttaggacacacccatggggatt

SEQ ID NO: 122271 - DNA, 247 bp, Glycine max
atttatatccgatcgttcaagccgttttctcgcctaataaatgatgaaatgaatttcaatcgattatttgtgttgtaatctcgtttaatcactgttaaaacataatctaaccgatcgtttacgttgtaacctcggttaaaccaaaaaagggcaaaataataataaaataatcaaaatatctttaaataaaataataaaaaaaaatcgatcagacgtctttctttggaagtttccatgaatgaatcga

SEQ ID NO: 122272 - DNA, 254 bp, Glycine max
tctggaaggccctttgggctttttgctatttacacccccctttttactaaatgcacccccctttctattttttgaaattcttttttcgtaacgttaccaaactttacgaatttcgtaacgatacttattttccttccgcaaggttacgaatacttacggattatgtatttactccttttttaccttttgaagaagtcacggaaacttacggattgcgcaaaaacacttcttttcgacttccgccacattatgga

SEQ ID NO: 122273 - DNA, 249 bp, Glycine max
agactgtttactatgagctcaccatcactagaaaagaatcctttaggttgtttcacgtaaatctattcctctagatcaccattgaggaacactattttcacatctatatgacataactctgtcaaaataaactgctaatgccatagttactcaaaaataatctttcttagttatgggagaaaggtctccctgtaattgattccttctctttgagtgaactctttggcagcaagtcttgccttatatttc

SEQ ID NO: 122274 - DNA, 252 bp, Glycine max
ttatgtaaattgtttcattgtttgaaaaagcgctcaataacaccttgagagaaaagactaagtgttgagccttgtatatctatttgggagacacttaacagttggtccttgagccaacaaacaacaaatcttttgatctgagtaaagcgcgcagtggctcggtaagacaatgaatatcggctgcaacttgtttggtataaagctagagttgcaacaaccagaagtgcctatgattaatacttggaacttgtt

SEQ ID NO: 122275 - DNA, 248 bp, Glycine max
agcttttgttcactacttcaagtagtgcacgatatgcctccaaaggaaaacacgttacctaaaagttactatcaagccaagaagatactatgtccgatgggtatggagtatcagaagattcatgcttgcccgaataattgcatactgtacagacatgaatttcaagaaattcccaaatgccctaggtgtagggtatcacgttacaaagtgaaggatgatgacgagtgttatagtgacgaaaactcaaa

SEQ ID NO: 122276 - DNA, 251 bp, Glycine max
tccatcaagtggttatcagatcacaagagctttaagtaggtgctccttaaacctccattaattttttgctttaccttctcttccattgttgtttcttcattttttttctctatgtatctcctcacatgtcttgtgctaaatgtttttaacatgattctttagagtttacaccaattaaacttgctataggagctagatttgattttctatggttcaaattttttgttcttgttcttgaaccatgaattgtg

SEQ ID NO: 122277 - DNA, 250 bp, Glycine max
tttctagttttttcttggagtatttaacatacttgtaggtatacctgacattcaaactcaagaccatgattaacagtggaacaatatcatatgtgctcgatggtaaattttatttacacttaaaatcaaactcaaaacacaatttaaaaaaaatataaaataataataacaataaatcataaataaattatccaaaattttattatatatatttattagtttttattaattataaatctactatgtaaat

SEQ ID NO: 122278 - DNA, 242 bp, Glycine max
tgagccacttttttagacaacacaagtgaaagtagtgtcgacactctggcatcatcctcagcatctccgaatccttgtactcgcacagacagatcgagcaggtgctgtcgtaatcaccttccttaacgtaaggaaacttggggtaggagtttattacggcctggtcgaggccggtgacggcgtcgttctggcgggtggcgtcatcgtcgtcgtcctcggcgacgaagatcacgcgcgggagg

SEQ ID NO: 122279 - DNA, 247 bp, Glycine max
tgttttttttggaccttgaacaggcaactaactcctctttcaaaaccatgccatgtgctcgcgactggtccctttcttcccttcgcaacttgagttcactattgctaccccatagagctccgcgaaatttgttccggccatactcttccttgcgagccctcttggtctcttgttcaagggctcttgcggtaattgcattctcttcccgtaacccggcacactccttccgaacgtgtgtagcggccaa

SEQ ID NO: 122280 - DNA, 249 bp, Glycine max
ttattcaagacttataaattaaagatattcaagatggatgatcaagacagtctctagagtcttagaaagggtatattaaataggaagggaattccaattgaagtagcaaaaggtttggccaagaaatttaagttaaaaagtctttttcaacaaatttactctctggtaatcgattaccagaggatgtaatcaattaccagtggccaaaactgatttacaacagctattaaaatttgaattcaaaatttg

SEQ ID NO: 122281 - DNA, 245 bp, Glycine max
ttttttttatcttttcattggtggattttgatctccttttggtgctctaaattgtgggagtgtgctcaaatatatggggcaattttggcttgttttcttgcttgattaggttgaattaagggtgggcatgggatggccctaggcctataatgcattttgaaacaatgggacatgccacattgtccccgttcccttgctattgacgcctaaacgcgcgcccaccaagtgttcggtgaaaagcctca

SEQ ID NO: 122282 - DNA, 248 bp, Glycine max
tatgctgcaaatttttattatagaccccctcagcagcaaaaccaataatcgcagaataattatgatctttcaagcaacagatacaatccaggttggaggaatcatccaaatctgagaagggcaagtcctccacaacaacaatagcttgtccctaccttccagaatgctgctggtccaagcaagccatatgttcctcctccaatgcaacagtagtagcagcagtcacaacaaagacaacaagtaactga

SEQ ID NO: 122283 - DNA, 227 bp, Glycine max
tttttttcacctcatggcttctcacagacttaacattagtaagccaacccaattattgcgggccgactcttgtacccttacgattgacgacagagataccagtactgcttcccatactgtcattgtcctttggtgacaccacataccatgcattgctaactccttgaaataccctgacgttgcaataactgaaccccagtgcaaagagaggcgagatgcttacatgc

SEQ ID NO: 122284 - DNA, 227 bp, Glycine max
tgtttaaacattttctgagcaaagaccctatttccctaagctaattccttatatctaccgcctatctttaatggcaagggtttccaatactggaaaaccctaatgcaaaattcaagctacgcaatgaccctaactatttgggacgccctaaaactaaggccatacatacccaccacactagaaatacactcttaacacggcaaccccatcagcgaccgcgtaccaaa

SEQ ID NO: 122285 - DNA, 240 bp, Glycine max
ttcttttaacgggcttattataagcgctaatggctgagcaaaaaagtgagatacactaactcctgaacagaacatcagaccctgtaacaaaaacatcctcctagcgagataattggaggaatagtctataattaagaactaataacaaagctaaaatttgctgtacgtttgaagtatcaccatctgaagataaacaatgacttggtctattgtgcaacatagtgttgccaggcaaactta

SEQ ID NO: 122286 - DNA, 220 bp, Glycine max
tgttaaagcatgttttttttgtatgaaatacactcgaccttcatggtaactaatgagaccctttatcatatcacccaacggggcagacgaatgtgggccttgtacaccaatggccgtcattgtcattgtggaaagaattgagagcgacactatacagattcacacatgatagtcacctgtggttacgtgaacattgatctacaaccatgttcatatgatg

SEQ ID NO: 122287 - DNA, 245 bp, Glycine max
ttgcttcgcaaagcaaaaggaagcatcaccagatgagtgacaagacatttaataaggttgaaatcaaacctaagatgatttcttgtcatctacttctctattttatgcaagaccaccaaggccttgcttcctacaccgtcaaggtcttgtttcctatgccgtcaaaagttcactctcatcttggcagcctattcatactaccacaagtaacagagcattgcatagataaaggcaaataatcaaga

SEQ ID NO: 122288 - DNA, 244 bp, Glycine max
tcttttggaccttgaacaggcaactaactcctctttcaaaaccatgccatgtgctcgcgactggtccatttcttcccttcgcaacttgagttcattattgctaccccatagagctccgcgaaatttgttccggccatactcttccttgcgagccctcttggtctcttgttcaagggctcttgcggtaattgcattctcttcccgtaacccggcgcactccttccgaacgtgtgtagcagccaac

SEQ ID NO: 122289 - DNA, 242 bp, Glycine max
agttttaatttcttggtctcacgtttggtgcatagaaaagcatgaaaacccattaaacggagattgtaacgataaaacaaacatgcacataactgttagcagattgcttcacttttcattttgtttgaggcctattagcatttttcttaaaaatggattgaatacacacagttgaaaatgaacaatgttatttcacggagtaacatttgtaattaaagaattgtacatgagattttagccag

SEQ ID NO: 122290 - DNA, 242 bp, Glycine max
tgagatctttcttttcattcggtgctaaaaaatgacagattaatgtctacaaattgctttacaacatgccctaaaatgaattaggacaccttgcttggtttaattaagttacaaaatttggtataattaaatttaatggattgaagctagttggtgaaggaggacaaacctcaacaagaaggctatattgacatctacatatgagaaattgtggaagaattaattgaagtctaaaatcgtac

SEQ ID NO: 122291 - DNA, 242 bp, Glycine max
tagcttgttattaccatctgtgcagtaaccaataagttcgaccatattttcatggtgaagctagcctatataattgacttctgcctgcaaacaaaaatggaagaaaattagtcaacacctagcaagaccaaacagttagaaaacagattaagagtttgtgttgggcttggacatacaagccattctctgtgtccttgaaagctttgtggtttaagtttcttgatggccactacaattgcagt

SEQ ID NO: 122292 - DNA, 243 bp, Glycine max
tgtgactcttggcaatttctataaaactagtcacttaaaaaagttgtgacttttgaaaaaatcttcagaaacaagtcacttaaagaattgtgacttttggaaatgtatttttcgaaatcagtcactggtaatcaattacactaatcgattacacatcaacagatgtgactcttcattttgaattttgaaaattaaaacgtttagaagctctggtaatcgattacaagtattgtgtaatcgatt

SEQ ID NO: 122293 - DNA, 296 bp, Glycine max
atctattcacttctatcagtataatccctataatgattctaatatgttcaataaacattgattgatttaacacattataatgagtagaagaaaatcaaccaatttatgtcgccacctgtcttgcatctactccgttgatcacttgtatcttaaattacccagcactcttgttatttcacaaactgctttcttaatgaaaaaagatttgaaaatgcatacctaatcttttcatatgccgattagtaaattttaagaacttgcaacctacatgagctttgctgtctaaccaaatcgga

SEQ ID NO: 122294 - DNA, 211 bp, Glycine max
ttgttatcagattaaactcgatgaagcgatctcttgcagttagaaataatgccaataataaatttgacacacatgcaaattttaattcactgatttgatatcaagctacatcgacccttgaagttaaggacatacaattgactgctcttagtcatttatactttttccaagttctcagtgacgaatattataaacactgaaatggactcca

SEQ ID NO: 122295 - DNA, 258 bp, Glycine max
gactgttactcttttagattaaaattgtttctcagtttgtgttcatgtttcatgcgacgaaaagcgggaaagacctaatgcatgattaaaatattttctataatatttcttcatacgcattatgtcaacataaccatttatgtagaacttcgatataccatgacgtcaaatatgatagaatactgtgctatattcataaagactttgagtattaaatgacaatttgttttccggcaattaacgtttgaaaaccatatc

SEQ ID NO: 122296 - DNA, 129 bp, Glycine max
tatctcctattttgaacctcacctaccacatgtattatcgaaagcattgggagggactcccagcaccaagttccggcatgatccaatatgatgtcacttctgtgttgtctctcacataactataatgtc

SEQ ID NO: 122297 - DNA, 265 bp, Glycine max
  unsure (1)..(265): unsure at all n locations
attctatatcaagtaaacttatacgttcctttctatatgttacttntctttcaacgttctattatgttctgttctattctatccagacnacaaaatatatattttactcagcttgaagaggaaactcaaacctgcatttgctgctatctttcttacatttcttattctttactccttgataaatatttctcgggaagccacaagcttctctttgaactgggtagctctaagcctgatgtctcttagttacatgcactcaacgcta

SEQ ID NO: 122298 - DNA, 237 bp, Glycine max
aaaatttctacatttattttatttctccccttgcccctaaacaatttgataagagaaaatgccccttccttgggaatatgtcccagcgttaactttcttttttccaaactgcctacctttaacctaaccttactaattcaaaatttatcacaccactccatttcttaaatcatcaatcatcatcattattataaccctcccattatccctcctcctctcattctatattcaccctat

SEQ ID NO: 122299 - DNA, 244 bp, Glycine max
tctgctattacgttgctgcgcacattaatcttacccaattggatgacacctgttgttggacatctcaactatatctctaagtgtgatgtgctatcacgctctttataacatgctttcttaatcacatcagtgttgtgacaatacgattcaattatcaattctgagatgaccgcaattttccactttattttaacaatcgacactagactacaattatttttttgctatatgatgatgtggggga

SEQ ID NO: 122300 - DNA, 54 bp, Glycine max
tatctatacaactactaacttctacaaaaaataataataattattgagttactt

SEQ ID NO: 122301 - DNA, 326 bp, Glycine max
tcactgatatatgtaatcatcactgtcaacacactttgtcagcacaccaagactaattaatatgaattaaaacgaacataactgaattaatactgactaatataaaattgaataaaaaatgtcaatgccaataatgctgtctggtgctatatacacaccacacgggaatcgaatagtgtctctaatctggcttcttgatatagatgggcagatcctggacgtcttaatctcatacattgcccgtaaaaatgtagagggacattcccttgtgtgtgtgtagtctgtgaaccacctcatgaagggtcgcacctgtaattctttatgtg

SEQ ID NO: 122302 - DNA, 139 bp, Glycine max
tgtttcagtgcagtggcattgtgtgactataatcggatgtttcctagaccaactaatactttggaatataagtaggtcagcaaggctatatgttcccttgtctatttatcacatgacatgaatctatctggaccataca

SEQ ID NO: 122303 - DNA, 218 bp, Glycine max
  unsure (1)..(218): unsure at all n locations
tataattaaatgtgcttctaagtgatacctacatcataatacataagctgatngcaatgtcaaaagtgcttatactcttagatataaggccatacactcttaatntctccttgtctttcaaatcttatgattaagagaacacattctcatatcaagataacaanatcatatgattgaattgaatacgtatcttctaatgatgtntctgctgtcacaaa

SEQ ID NO: 122304 - DNA, 323 bp, Glycine max
gggtgataaattcacgctccataaattttaatttcacaacatattctatacattttaaagtattatatcactgattaattgacatataataagaatagggaataatcaactacttatctgttctcaacctcgtctactcaatccaagcaacactgaattcacttcttaaatctctaaatttaaaacagaatctctttgttaacttacaaataacttatcttaatgaaaaaaaaatttttaaaatgtacgtgcctatatcttaatatatgagattaagaatattctagacttgcaacttcatcttaaaattaatggataactta

SEQ ID NO: 122305 - DNA, 166 bp, Glycine max
  unsure (1)..(166): unsure at all n locations
tctcttncattttgtgttcttcattnnttctccatgtatctcctacatgtctgtgctaatgtgtaacatgatcttaagttcacgataactgcttaaactaattgattcatggtcaattctgtctgtctgacctaatggtgagttgttcttgagttgctgtattttg

SEQ ID NO: 122306 - DNA, 153 bp, Glycine max
agataaaaggaaaatgacttaattgctataacttttctcaatcacaggtccatgcttttttacagactctgaaactctgaaatcttaactttgaaactctgactactatccccctttacacattctgactctaaatttaactactatcctctt

SEQ ID NO: 122307 - DNA, 85 bp, Glycine max
  unsure (1)..(85): unsure at all n locations
tcttaccttctctacatagntgcttcttcatttatctcatgtatctctcacatgtcttgtctgaatgtcttaacatgattcttta

SEQ ID NO: 122308 - DNA, 203 bp, Glycine max
cagaacacattctatatgggtaatgtaagattcaatcacacatacaggcacttacgggtactacatgccactactaaccgtgcatgtctttactgggtagggaatacgttatttaacacagccttttataactactaactgagattgctctcaaaatgaattcttgcacactaaccatataattttcgtttccttaatcgtat

SEQ ID NO: 122309 - DNA, 208 bp, Glycine max
ttctgtgcatgtgattcacgttccgaatccttatacaggatacaatacaggagaatggttaagttacgtaaagacctcaagatgaaatgaactaaccatgttgatttttatgaataagtcaattaaaccataatggatatgttatttacagataaagcttcccctgatcaaagttatactttgattctacaccattccttttacgaag

SEQ ID NO: 122310 - DNA, 251 bp, Glycine max
actgtggctttgggctgcttactatggctatgattactaatccgtaatgaaagaaggcctctagttctgtatactacccataccgtaactgagactatggaaaaagaaaaaaagggaccaatgagaaaagaaagtgattatggttcaattatataattccatgcctctttttaatgattctaacttttaaatctgaatttaaactcttactactatccccccttactacacctgactctaaatctaactac

SEQ ID NO: 122311 - DNA, 335 bp, Glycine max
  unsure (1)..(335): unsure at all n locations
tttcaagttatattattntaaaaatttaattntaaatatatatgcatgatatatcttgcttttattgaatatccaaaataagcattactcataatttgtttaatttatatggtaatttatgtaaataaatagtgcaaaataactgtcatgaaaaatagtgataatgtctagaatgaaatattaataataatatctaagaattactctcatgtaatctgatattattgaggtaattaacgaaaatgtaaaattggatttataatatgaatttaggaaagctaaataatataatataaatttcacattttattctttaactttgattgagcaaatag

SEQ ID NO: 122312 - DNA, 328 bp, Glycine max
tctttttgtaataaacagtgacgaagaatactccaacaattgatagtgattgatagtcgactctactgatattgttattcaagtttggctgatgacctcactagtgtaatttctggctgataataatcttggttatttatgagcccttctatgtgaaatacctgttactagtctatcttactcctcttcatgtttgcttaatgtatatgaatggagctagctcgtgtggataataattgattttgccatgtttcttgaaaagtaaatcattgtcttagtacttactcatctctgtgttgatggccctactgtttaataatgtatgaat

SEQ ID NO: 122313 - DNA, 286 bp, Glycine max
aatctgaattattgcctgaatctttcgatatttcactttctttacgttactgacttctgatgatgctcttgaacatgatggaatgaatcatatgggcttgtcgaattgactactatgaacgatctgattggctgtagaaatcagcactgaatgcattaaaagatatagttgcttaaaagacaggtgaaattgagaaagaaattgtcaagcagatatactggctgcctcctaatgatggatcatgaagcctggagaccattttgtttgtaaatactgacttcgacta

SEQ ID NO: 122314 - DNA, 122 bp, Glycine max
ctgagctcacgtactgccacgtagtccatatactcgtgtctctcaacaccgggttcccatcaatactctcaagcttgcacaacatgcaagcataacaacattcatacagcacaagctatcac

SEQ ID NO: 122315 - DNA, 205 bp, Glycine max
aaatgaaataaggaaacgtgtgcttatgagattacgtttttgagcaaacttaattactagcatatttaaatgtatcaggactatcaaacttcacactgatttatgtcgactgatctaattttgacaatacacctgctactctactttaaactctttgatacatacaccttgaaatcttatatatcattggtgtttgacatctgtg

SEQ ID NO: 122316 - DNA, 144 bp, Glycine max
  unsure (1)..(144): unsure at all n locations
ctcacgtctttgaatatttaattgntatcttggacaaactatgattttgtccttaatttacacacaaaaggcctgaatgtgaaccaacatacgtctgattacacataattaggaatctttctggccccttattgatctggtaca

SEQ ID NO: 122317 - DNA, 92 bp, Glycine max
tattcgtctttctcttgccaccattgtaaactgcttgtctattctgctctatgtctctctctattgatttaccttataaatctacaaatggt

SEQ ID NO: 122318 - DNA, 91 bp, Glycine max
aagtgctacgcaagtgatggctaaaaaaaattatatctctgacatgaaaacggcaatgaaggtgagatatgaaaccagtgcgatgcatcta

SEQ ID NO: 122319 - DNA, 181 bp, Glycine max
taatctattatcaacccttataataataactctaaaataatacgtaaataccacaatatcacatcaactatacatataattaattataattaattatattataattataatttaatattttattatagggggacatgtcttaaaactgtaaacctaaaagaaacaattgtttatttattaa

SEQ ID NO: 122320 - DNA, 167 bp, Glycine max
  unsure (1)..(167): unsure at all n locations
ttactcgctctgtagcctaattttacctgatgacacgacttcaaataatgctacttaatgagccatctaccatatttgaacccgaatgacacngagccttggaaataatggcatactttactcgatgtcgatcagccatacattagaacctcgaatgacaacgaact

SEQ ID NO: 122321 - DNA, 84 bp, Glycine max
atacctcttctgtaggaagaataaatccagttcatttttccacttattctctcatgtgtttacccctgataggcttaaaaatta

SEQ ID NO: 122322 - DNA, 190 bp, Glycine max
atgtggactgcaattctacatggccatatttcccaccagctcaacaatatcaatacccgggcaatatcagtccttctcattacccaccaccctaccagtctagaatgcccaatcatccacaaaggccacccctatatcatgcacatagtctgtctgtcgcacatctgataccaaacactacccttatcac

SEQ ID NO: 122323 - DNA, 259 bp, Glycine max
cttcttcattgtgttaacattgaacatattcatatttaataactatataaatataataattcaatgtttatattattaagatttacagcaaatctgtaagtcatatactcaaatatctaactttcataaatttattttatgatttataacaatgaatgacatgcatctataatttaagtaaccatctctgactttcataatatctagttaatatatattaaagtgtctagatcacatacaacattgagtatgtgttaca

SEQ ID NO: 122324 - DNA, 132 bp, Glycine max
gatccatgttacaaatgaaccatctggcaataaacccacacatatggggaggtaatgtgagaatgcttacactatcattataatacgaccggaatttccttcttaaacaagctgggtgacatgtcactatgt

SEQ ID NO: 122325 - DNA, 413 bp, Glycine max
  unsure (1)..(413): unsure at all n locations
ttatcatgtatactttacttctgnagtgtgcgccgtttatattgtatcctgctgacttgctattacttgggaacatgtaaaacaattaagactatcaagatgccttctaacgtgatgagtgtgcaccttatacactaattggttataaagttcgagcacatgtctaattaatttgatgttattttgaatgtaagcattatgactaaaatgatgangcatatcatgatataccatctaacagatacaacccaagctttcagtcggatgtatatcctctaataaatatattaagagatatattgatgcttgtgtgatatggacattaatacataggttacaatcatataatactagacattaatcctgattagataattatatttacaattaatggctttactcctagctactgt

SEQ ID NO: 122326 - DNA, 84 bp, Glycine max
tacactatttaaatatatgataggatgtgacgcacgattttcacacagaagttatgtggtgggcattcgaagctatttagttta

SEQ ID NO: 122327 - DNA, 172 bp, Glycine max
aactagctctctttgaaaaggggaggaaggaaggtagcctagctttttttcaatgctagaatattccggagaaatcagccagcgctcgtacgtgtcgtgtgtattaccagatctgacgtctcagactcgcgtcgtcttggttctcatcctcacgggtagacccgaaccagct

SEQ ID NO: 122328 - DNA, 310 bp, Glycine max
tcacccgctatggatgctgcctctatgcttaccgacgtctatccttgcattttgcgaaccttagaggatcaccaagcgtagaccatgggtttgatgagtcttatttgcaacgcatgtgttgtgctctagcacacatggcactcgcccggggtggcatgcattggagacctaatggcatgctctagcatacgcgtaacgtactaaacggcacatagaggagatatgggggagtgcttccttatatatgtcactcaccgtgggtagcctatactggaaacgtagtgttaagaatgctaaagactcatctggg

SEQ ID NO: 122329 - DNA, 311 bp, Glycine max
tcttaaactacccgtagtatcgcggctcgtgtacaccatgttattacgtcgcgaaatgccaagatgatgtctccgagtgcagtggattactgcgaccacgcccttctgaaattcatccgggacatacgcgaggggaggatcaccccagcattgacccaacgagcataacgtatacccttactgtgctaaaagctatatagatggccctatgctttatactcattacctttggtaagcgcatagtgtcactagaaaacgaatgataacacacaagatctctttatatatgttcctacgcctatgcccaatat

SEQ ID NO: 122330 - DNA, 303 bp, Glycine max
actcaatcggagatgggagacaaaaggcagtgtcgtctgcatacgctacaaactgaaaatatcaattactggcatatccatacaacatgggactcaaactagcatgtgagaccgagtccattggcatatggagaagcacgaacttctgaacacaagcactggccccaagcaaaatactgggactcatagagacgatcaaggaaagaattctagactgtagcaagagctacgaacttgacgaatgggagcacgagcgagacacaaaaccccgggactcaaaacggaaatggagcaccaactcat

SEQ ID NO: 122331 - DNA, 253 bp, Glycine max
tttgctacaagcttctattttcaattaccggcatctcgatatattatgggactcaatcgaacatctgaggaaaaatttattgtcttttgaatttcgacgacctttcgtgttcaattacgtgcgcctcgatatattatgggactcaaacagacatccaagtgaaactttattggcctttgaatgtgctacgaaccttccgttccaattacgagcgtctcgatatactacgggacacaatctgacatactagtaa

SEQ ID NO: 122332 - DNA, 363 bp, Glycine max
actcttaagctacgcgttgcacgctcccgttagtatgttaccactttcaaggagaaggtacttctttacatggatatgtaggtgcctatgcatgtatatatctctgtatagaaagagggttgcctatgttgtagtggatgatttcttcagatgtacctgggtcaactttattatatagacatctgaagcctttgaagtattcaaggagttgagcctatgacttcaaagagaaaaggactgtgcgatcaagagaatcacgagtgaccatggcagatagtttgaaaacagcatgttcactgagttctgccatgcgaaggcattactcatgagttctctgcagccattacacctcggctgaatggc

SEQ ID NO: 122333 - DNA, 243 bp, Glycine max
ttttttgtaggcacaccaccttttcagattacttcttaaccgcatggtctgaattacttatgcggacaagtaaaccaacccatgattgtgacatatgaacttcttcacacgatggtgtatttttcgacgccaacccttgctgtgggggaatgaaattttccttcccggatgaaaattctgaaccattcgtcgaatgcagaatatctgaccgttataaatgcagtttctgcctccctatggcga

SEQ ID NO: 122334 - DNA, 418 bp, Glycine max
tggctcgggtgaccttggtagtcaaataccacttgaacagattcctacagtccaagatgatataatttacgtatgcagacaattatacaagccagtgattgtaacttctcagattcttgaatcaatggtcgagtatacaacgccaacacgtgctgatgtaaaatcaagttttacatccaggatgattattatcaacctttgcgtgaatggagaatatcttacaatgagaatagatgttactgggaaactacggcagaattctgatctatgatgatgtttccaagttccctattggattgctgaaattacctcgaatgaatattcgcttttatgcaatacgtagcagatgtttctgaagcagatcgacaatatgctgatgctttgatgttgtctggagagtcagatattggatcatatg

SEQ ID NO: 122335 - DNA, 338 bp, Glycine max
atgctacgcgtggccagcagcctacggctctgatgttttactcggatgttcgattgatgcacgcactacatctaaacgctcgaaactgaaaacagaagctctgggcaaattctaacgacaatacattttaactcggatgtccgattgagtccccgacacttatcaagacactccggatggtgaataaaagctctgaacgaattcactcgacactcacttgatactcggatgcgcgattgagttcaggactctctctagacactcgcggttgctaataaaagagctgagcggatataaacgacaattactatgtactctgatggcccatggagtcccga

SEQ ID NO: 122336 - DNA, 340 bp, Glycine max
  unsure (1)..(340): unsure at all n locations
actcggatgttctattgagtcacgtaatacatcgaaacgctcgaaattgaaaacagaagctctgtgcaaattcaaacgacaatacattntaactcggatgtcncgatgagtcccgtaatatatcaagacactcgaaatggagaataaaagctctgaacatattcaaacgacaataacttcttactcggatgtccgatggagtccagtaatatatctagacactcgaatatgagaatagaagagctgagcaaattcaaacgacaatatacttttactcggatgtccgatggagtcccgagcgtctcgatatattatgcgcctatattggacatccgaggta

SEQ ID NO: 122337 - DNA, 366 bp, Glycine max
agactatatagaacccacccgttcgcatgcaagctagtactacaagattttgtcgaggacaacactgtatacataatgggtaaaggtgaccgagggacatccctttaccccatagaactatttaagcttcatccatgcagcacgtaaagctaggctcaccccatatagggaaaagtgacagagtagcgtgttgacgtatgaaagaaaaaatgccattacgctctggaaaaacactccaacttatggcaaacagacacgcctcaacggaattgtaagactacaaccatgcaatataatggtcttagccgaagtgcatgtataaatcaaatcgtatagagtgtggaataggaacgaaaaaatgtaata

SEQ ID NO: 122338 - DNA, 172 bp, Glycine max
  unsure (1)..(172): unsure at all n locations
tctattttattcatcctccagtagaactggcttaccacatttgtgtattttgacatatgcctgttgccactagaatgtagcagatgccacgtatgctctggttaatcnttccatcttataccaaatgacctactgagtgtatcgttagactacatttacacataattaatct

SEQ ID NO: 122339 - DNA, 312 bp, Glycine max
agagaggttgagcactcaacgaaaagaatctctcccctactcgtactttcttatggaaaacatctatcatatggtttaagagtggaggaaaaggtcgcattgcctccctccgtgccaactccgactatggggtgtttgactaatcgtgactatccctaaagcatatacttctccctctgctctctcttatagggagatgaaaatgaacgtgatgttccatccctcgactgtgatcttttcctgattgtgaagcttgtcggcactgagtgttacgactttgctcttgcttggagggacaaccttcttcatgct

SEQ ID NO: 122340 - DNA, 373 bp, Glycine max
  unsure (1)..(373): unsure at all n locations
tcatcattcanatctcatgagaaatgtgttgcacttattaaaaataattctaaccctactcctacttcttcaaaaaaaagttctattaaatgttttaagtgtttaggaaagggtcacattgccttccaatgtgctaactangactatggttgtgttgggtaatggggatatcactagtgcatcttcttctagctcttatagttcttctagtgagagtgaaagtgaatgtgatgtacagcccctggaatgtgatcttctgatgattangaggttaatangtaatgtgtgtaaggatagagatgaaactcanagggagaacattnttcatactatgtgcatggtcatggngaaaatatgttcttngattattgat

SEQ ID NO: 122341 - DNA, 373 bp, Glycine max
ataatgcccacccgcaagcgagcactcatgtctggtgcctatatctctgaggcctacactacctcgagttttgcttcacatcctcctctctgaaaacgtccacctcaaaaaatattttaacacggcggactctattttatgaaactagtacaaaacgacaagactactttatataaatgcacaaattcatctataagctcgtcgagcctcataatacaaaatgatagtagagttatcatagaggaacctgtgacaatactcgttgttcaataactggtctgcctaaaaaggaacgaaaatcatgtggttgaacagatcataaatagcacgtctttgtatactacatctcattacacgtgtgatctgagtattc

SEQ ID NO: 122342 - DNA, 359 bp, Glycine max
cgagtgcatcaagacatcttccttgtgatttatgtgcaactcaaataatattttatcacgcagactctatttatgaactatacataacacatgactctttaattattctcaaatacaattttaactcgtcgtgcctcagaataattcatctcgtcgagtgtccataggggaacctgttacaatactcgtttgacattaacttgtcgcccttatagggtcgtatagtcatgtgggtgtacagttcataattcgcaacgtaatgcatataacatatcattacacgtgtgatcgcgtatgttacacatacttatactatcacttacacacaggtcatcacactttcatgattcaagacatcg

SEQ ID NO: 122343 - DNA, 276 bp, Glycine max
caccaaaatatcgcaaactagaacagcccttagaaaagggccgtaacgatgaaaactcaaaatgaaaagaccttcgaaccaattgggacactgaacaacgataacaccaaaaaggttagcgcgtagcagatactgaaaaccaaacgaaacccaaagtatcgataggaaaaaaattatcacacttagaatagatcgagtcctgacgacaaaccagaagaatgagacatgcaactaggctctcttcttgagtcctgaatacatcaagagacttgaact

SEQ ID NO: 122344 - DNA, 448 bp, Glycine max
  unsure (1)..(448): unsure at all n locations
tcattaaatttgtatttctacgtncgaaggcagcggtaatcgattacctaaacattgttatcgattacagccttttgaaaataattggaacgttgttaactcaatttgtaaacattttcaaactcattttgctactggtgatcgattacaccaatatggtattctgttgccatagagtcaaaactctttgacacttatagttttgaaataaaaacttctaatactagcatgatggatatttcttcattcttgaatcttgagctcgaatcatgacttattctttatcattgaatcttcttgaatattgaactctagaactatccttgattcactggggatgatctttgatttacttgaagtgttcctgatctntgagctattgttaacacctgtgaatatctttggtgtctctttgtatcacacaacaccttgattaattcacatgatt

SEQ ID NO: 122345 - DNA, 336 bp, Glycine max
gactctataaagctcaaccgcggccagattgcaacgaccataacttttaagcttgatgactgatagaggaccgaatatatatgcaactcaaaattgaagacagaagctttgaggaaaatcacacgactataactttttactcggatgtctgattttggactgaagtatatcatcgacagctagaaattgaaaacataaggattgagcaaaatcatacgacaataacttcttactgccgatgatcgataggggactgaaatatgtcgtgtaagctaaaattgatagtcgtatgtactagcaaaagcaaccatataaattctactgggatgtctgatg

SEQ ID NO: 122346 - DNA, 234 bp, Glycine max
cccggtaaacccccccccccaaccctaattgcacgctacgacacagcaaccgtgaggaaacaacgtcatacaactcctgaaaaccgctacgcccaatggaatgcgcccctaaaccgacacctactcctaggacgcgccatcaaagacacgagcacaaggggccccatcgaatcctcccgccaatgagagttcactggccgcagcgagcggcccgcccctaacccgaacgtccgg

SEQ ID NO: 122347 - DNA, 318 bp, Glycine max
gggagcttaaagtaccgcggaagctgcacctgatggcacgttatttttattaattctataatgctgtaggcgtgggagaaaaacaagaacgataaatcatatacacacccctcaaagcccttctcatactaaattagcgatccgtcaattaggtgctcccctctcatatggataagctatattatagtttagaaacttgaacggatcccattgggagaaatatggggggcgatattagagggggaagccagcttgatctctggaataaacctcctcggaaagggggagcgaatcccccttatatggtgtaaaaaactg

SEQ ID NO: 122348 - DNA, 302 bp, Glycine max
tcttaaactaaccgttgctgcaagtttgactcgatttttgtccatagggattctccccaggcctcaaacgtgtcgacacctcattatgcaggaccaacaggatcaagagattctgtacagaacttaccgtgttagaatcgccagaaggcagccaacaaccgatcgaatgttcagacccatgatggtgtctaccccttcatcctaaggctgaaaaaccactgatttacttttttagcgtgacctactcgggatcactttatggcataggcctcatggtcctgagaaagaactgatgccctggc

SEQ ID NO: 122349 - DNA, 214 bp, Glycine max
gcttcttactgatagggactatacctttgcatatcttacaccagattcctctctgtgtagccacattcacatccgatatactcttgtaaagattgagtgctcaatcgttcatatctttcacactatttctttatcttatgatcacctatcacatatgtcgctgtttatatctcttatccacgctctgaatgtctcatatgaacatttatataac

SEQ ID NO: 122350 - DNA, 323 bp, Glycine max
gtaaaagcaacttaattatttgtgtggtttattcagactatgtaaatagcaagataagtaatgctgtgcggaattttactaatagagtttgaagagaaacgacgccagatttaaaagtttcttaataaattatgattggagatgatttccatattacctcccatatgtctggcatatggagatattaatttggcgcagcgctagatcgtacaactatggagtgattagcgacaagagaaattatcacgacaccaaaagtcacatgcctcacggatattgcattacgtgacagacgttttcgcctcaagaactattgttagtga

SEQ ID NO: 122351 - DNA, 425 bp, Glycine max
  unsure (1)..(425): unsure at all n locations
aaaaacatcttaattatttgtattngttattctgactctataattacagctaattaatgtagtgtgtaattttcttaatagattctgaagaataacaacccaagatttagaagtttatgaattaattattcttggagtgtattaaaatatttactcccaaatatttgtgcaatagacatatttctctgcctcagcgcatgatcatccaacagtggtgtgattgtgatttacaaaataatcacgacaccaaatatcatatgccacacagctgttgctatacgtgacagccattttatcattaagaactattgatagtttgtgcactgaatgatctaacagctaagagctatattgaaaatctatgtcatcttccactcaccaataatgcgcgaagtatcttcaaatgtgattaattttccacttca

SEQ ID NO: 122352 - DNA, 352 bp, Glycine max
agactatatagagctcacccgcgtgcaagcatacagaggaaccactctccttataagcctatggacctcctagaggttaggagacagaaaaggtttgtactctaatcatcgacggcggaagcgcgtaccaacgttgctaagcactacattattggagaagactcggctaaaaaaccacccctcacccgaagccttatgagatgccatggctgatcgaccatggggaaaaggtggtggataatcactacgatgctcacattctatatagaaaagaatgttgatggtgtgcttcgcgatatgggtctcaagaaaatcggacaagtccatattaggagaccctggctttatgatc

SEQ ID NO: 122353 - DNA, 423 bp, Glycine max
  unsure (1)..(423): unsure at all n locations
agatgatacacaaagagaagtaataaaaatcattctagatgtctggtgaatgaaaaggtttgttctctaatcattgatggcggaagttgtaccaatgttgcaagcactatattagtggagaagcttggctaanaaaccacccctcacccatagccttataagttgcaatggctgagtgacaatggtgagttggttgtggataagcaagtgttacttacattcttcattggaaagcatgttgatggtgtgctntgtgatatggttctcatgaaagttggacatngttttctttggtgaccttggcaatatgatagagatgttgtccataatggggtcgtcaatcgatattctttcttgcataaaggtagttntttcacctttgtctccaagtgaggtgtgtcaggatcaaatattaatgagatt

SEQ ID NO: 122354 - DNA, 355 bp, Glycine max
aactaaccgtggtatgctactttccactacattttatgtaccggaatgagtcttctctggggtcgtgctacaggtttatctccatcctttaaatacattccatgcatacatgtggatatactaataccaggaatgaccgccacggtgcagactataaacgacgaatgcttatagacaatagataacaccttctcctcttgctcatcagctacggaggaagatataactacatatgaagactttagctatgattcaatgaggcaggcttgagattatacggcagaggctgcaattctactggggcaggctggatagtggcataccgagatggatgctcagactatgcctcatgaag

SEQ ID NO: 122355 - DNA, 476 bp, Glycine max
  unsure (1)..(476): unsure at all n locations
cttcactacatcaagagtcaccgggttgagtcttctctgtggttgtcttactggtttagctccatcctctaaatttattcgatgcatacatgtggatagactaataccatgaatgtccaccatggtccagcctatagccttcttatgcttattgagaatagataacaacttctcctcttgctcatcagcaaggaaggaagatataattactagaaaacttttgctatcatccaagtaagcgtattttataattgatggcagaggcttcaattctggtgtggcaggctggatagtggtagaaggagatggtttctcatcctatacctcataaagaaagtcagaagtatgtgtacttcctgaaacatggttagttntatctgactctataatatcaatctcaagaggttaaacatcaccagacatgcaatcaatatcaatttcagattcactcttcgcatcaaattcagacatatgat

SEQ ID NO: 122356 - DNA, 158 bp, Glycine max
ggacgccccccaggccacagacgggccgacaccccaccaagcgaggaccaacagggaaaaggggaaccggaccggaccacccgccgaaggaggggcagaagggggcccaacaccgaaccaaaggtccggacccagaagggacacaccctagagcccca

SEQ ID NO: 122357 - DNA, 385 bp, Glycine max
  unsure (1)..(385): unsure at all n locations
tggatcaattgatacggagcagtatttaccgcatttggttcgccagcatgcggccaaccaccgatcgaatgtacatacccatgatggtctttaccatttgagcctcatcctgcatagccaggtgtttacttctnttccatgccctactccggatcactttatggcatatgtcgcatggcccggagatnggcctgatgcccgggcaggatatgcaccatcatatgctcccgacgatgcatatgatgcccgcgaggacgatgagatgaccgattctgttgatttcttgggagggagcgatgccacatgaatgggagatccctanatccatatttctttttatggtatgttgttgttacaattttaccgtacatatcatcttatttta

SEQ ID NO: 122358 - DNA, 327 bp, Glycine max
cacgcgaagcatgcgagactgaaagaacatttttgttggttatccatcaccataagtgggtcagcggttacaccgagccaatcgcgaacactcattgcaatcacagcagtccacaatttttggaccccggcaaatgaattggtccaccgagctttgtgtaccaaaaaataaatctcttgacaaagactttttaatctaaaattattggactgacccttagccactgaaattaagatgacccgtcctatttaatataccctccgaaaaactctaaagacttccaggagcacccatttagaagttttgtacctgtgctggctcgaagaa

SEQ ID NO: 122359 - DNA, 423 bp, Glycine max
  unsure (1)..(423): unsure at all n locations
ccatatatgtggaaacgaggacacagtgcagattgtgaattcaaattttaatagctgtcgtaaataatttttggccactggtaatcgattacatcctctggttatcgattaccagagaataaatctcttgaataagactttgtaatttaaatntcttggccaaacctgttgctacttcaattatgaattcccttcctatttaatatacccttcctaagactctagagactatcttgatcatccatcttgaatatctgtaatttctttgtcttgaataaagctttgagaagcatgtgatcctttggcatcatcaaaacattcagcttgatcctttgtctgcaatctccacccttgtgatgatgacaatccctgaaatcaagacangctatatacaagatgatagcatgttcacacaacccttac

SEQ ID NO: 122360 - DNA, 287 bp, Glycine max
cattacgctgctcccttatatatcacattctggaagataaatgggccatgaaaaccaagtataacaaaggtgcttgcattgtgcctcaatggtggaacccacttcagcaaacggacccaattgctgactattggactcaaattcaaaactcaccacttaacaactcgccatggactcaaagaccaaagagcatattcaatcggagactcaacgctaattgaatcttcaacaggcgacaatgccggtttatgaatcggaaagacaaacgccatatcacaggccactgc

SEQ ID NO: 122361 - DNA, 431 bp, Glycine max
aagcttctaccaccttaataccatgtgaataacttgttgtgcttgttaaaatacgttacgttcctcccttctctctcgctctctggaggtttcttgtgcctccaataccaagtataacagtggtgctttcattgagcatcaatggtggaatcaacgcgatctaagggatcagtatattgcctcgaggacgcaattgctaaactcacagcttcacaactcgccatgaactcaatgatcgatgatctcctccaccgaatgtctcaactcgtagtgaatcatcaacaaccgctaatgccatcgtcttagtctgtatgacagacaccatctcacagtccactgcaccgtatgaagcttgacgttccgcgattcgatggcttcgatccaactgactggatcttcaaaatcacgcaatgtttcgaatatcattcaac

SEQ ID NO: 122362 - DNA, 287 bp, Glycine max
ggactcagcaaaatgctggttcttcagagctttcatgggatctttgaatcctacaccggagatcctgataacgcggtcttatcattcacagcgaaataaagtcaatcatcctacaaatgcctattctagaggaggagactgcagcgactaatgacacctcacgcctattcacacttgctatcgcgatatatcaaactcggtataacaatatttttctaatatcatagcagagatgaatgaatactgcattgagatacactaatgcgaggagctatatatgcgatata

SEQ ID NO: 122363 - DNA, 412 bp, Glycine max
  unsure (1)..(412): unsure at all n locations
gtacagttgtgaatcatgccgaaagcatgtaatatttttcatcactattttcttccataactacaccggtgatgccaagattaatgtgtgtgaattgcattaaaaatgggaaataaggtcaatcattaatagaaatgcctaaactattggaggagactgcagtgactaaagagagcacacgactctacagacttgcaattgcaatatatcagactccttataattatatttttctaatatgatctcanggtgcaagaattcttcattgagtaacctcattgagtagctatatatgcatatagctacaatgttgacatttntggctagaacacatctttgtacctccaagcttatcaacatacgaacaagagctttgtgatgataaaccatctttcacataacctataatgat

SEQ ID NO: 122364 - DNA, 218 bp, Glycine max
ctatctagagctgaagcgtatgcatacaccgcttaagaaaaacttgtttttcatacagacggaacaacttacgcacttatgcacactatacttacagcagtatcaaaatatccacactatgctatgtaatgaggggcttctagctacgagcctgccaactgataaggaagggcagaaccagaaatgcttagatgaaattctgggtaagaagataacct

SEQ ID NO: 122365 - DNA, 357 bp, Glycine max
taagctttcggaagcattctggaccataaacacttatttcttgataatccatcttgagatcttttgatgctctgcacacaagcaatctctcggggactaaccgactgaagaccttatgaccgtctcttctgactgtttgcggaggaacgagacgactgacatgcctgaatgatatgggggataccttctccctgtgaacaaaatccaaagggagcaatctgaacaatgtttgataataacattcgatgctacaatggtgtctggaggactaaccgcctgagaattcttttgtatccccattcacaaagtatcaaaggattagccgcctgagatctttgtcttaacacattggagggt

SEQ ID NO: 122366 - DNA, 368 bp, Glycine max
  unsure (1)..(368): unsure at all n locations
tgccaaanagaattcgccaaggactaaccgcctgaattctttttgtatgtctcttcttccttttccaatagaacaaatgactaactgcctgaattcttttgtgtctcccttctcccttgtcaaagaattcaaaacgacacagtctgaaaatgctttagattctatccattccctaatacaatagtgttcataggactaaccgcctgagaattcttttgtatccccattcacaaagtatcaaatgtttagccgcctgagatctttgtcttaacacattggagggtacatgctttgtggaacaaattgagggtacatctacttgtgttgttgactgataacaatatacggaacatctctctgtggatcag

SEQ ID NO: 122367 - DNA, 295 bp, Glycine max
acattgaaagatggtcgctatcatcgtaagtcagtatacatgcttctcagctggattcaccccaacctattattagctcatcctggtaatgctaatgcattagatggtgtcgctctacaaaatctggatatagcatttctagacccttaactcgggtcacatacacaccggagctatatcatccacagtacatatggtcatggtatgcaagactatcctctcctacctatcagacactccccccgaaaagactatggttgttcaataaagaatccgaagatacatataggtgcaa

SEQ ID NO: 122368 - DNA, 392 bp, Glycine max
ccttagatcatctcattgaaagtttttcactttcatcataagataatagcagtgcttctcaactggattcaccccaacctattattactagtcctggtaatgctaatgcattagctgttggtgctctagaaaataaggatatagcattcctagtcccttaacttggttcagattcacaccatagcaatatcaacaacaatagtgatggtcatggtagggcaatttatactctcctacctttcaatcactccagccgaaaagacaaaagttggacaataaagaatatgaatatagaaataggtgcagttgtttgagcaacgcgtatctgagacaatagtcagatttcattcaagaaagtagcagaaaatatgtcgtagccttcatgtgcttat

SEQ ID NO: 122369 - DNA, 243 bp, Glycine max
actatataaaactcacccgtacgcatgcactctgggcaacacctcgtttcacaagctaaaggataacactgtgccacaatagatgcacttacagcttatcggggcgtatgagtaaaaaatcgggaaatggaaaagaatgagaggggacgggtcggaaatagtaataaagcaatttggaggggaaaaatgaaacgggctgatgtgtattcgcactatcccaagctggaggcgaagaagcctata

SEQ ID NO: 122370 - DNA, 344 bp, Glycine max
  unsure (1)..(344): unsure at all n locations
cctcatcccaagcttcaaatttccttgcgactttgctttacttcacatatcgggcgagcgcgtataaacacgcatatgtgaaagcctcgcttatccgtttgggcggaaattccctcacaatatttatttttgggcggcggatatgaaaacagtggggtggatgcggtgtgctgcaaattcgtgctcatcttcgtcaggacgagacacgtcctatgactacgatgtattatttatctgtacctaaacgaatatccggcttagctgcaaaccanaataataccctgtgcctacctcttgaggatcgacaaatctgactgtcttattatacccatctacatattact

SEQ ID NO: 122371 - DNA, 311 bp, Glycine max
taaactaccctggttgccccaaggaggagcattttgtctgctttgtggaccctgagagggatctctctgacttttcctaatgagagcgaccacacttaccaagggggggacaaacttggcatgtgctcctatgagttttacgaggattctcattaccctgggcccaccccgcatataaaagtgaatcggattggacttatagcataacacttgccatatgaacgatgtaactggccctgggatggtggatcatagatggagatattgatagatgcgttgcaacgacaaatcatatgctccgaacgtgtgat

SEQ ID NO: 122372 - DNA, 359 bp, Glycine max
ctacccgtatgtttccccaccgagagttacgtctatcccactactcggagatgatctgggccccacaaacacacctgattcgaattcctaatgggtgagggtggagataaaaattgctcttgtacactccacttggagtgactttccccacgatataccgactatgatcttggaacacattgcggatgattttcttttccactcatagacacttcgtactggcgctgattattccgtacagatcacaaatttatctattgtgttattacacctgtactctagctcgccaatattacatccctgcatgagacgatgcgaatataaatgcgatgtcgctagtcgctactagatggatgccc

SEQ ID NO: 122373 - DNA, 380 bp, Glycine max
  unsure (1)..(380): unsure at all n locations
gaccgattgttaacgtctatcccactactattttatgatcggtgccccacatagacaaatttctcagttacctangggttgtggtaagagaaaaaaattccaattgtccactccaattggaatgttgtccccgacgatctaaagacaataatctgggaagacattgtggtaaattcttttaaccacacgttgcaacttcatacttgtgctgataattcagtttcagatcacaaatttagttattgtttcatcacacctttaatctgcagcgcatatttgacatccctgaaggtgacgatgcgaaaaaaaaggtgatgtcaatagtcgctactagatggaggcaatttaagtcttcngtgacgtctaaatttgtctatgct

SEQ ID NO: 122374 - DNA, 419 bp, Glycine max
  unsure (1)..(419): unsure at all n locations
ctgtgctgatatcctctttctctctgccagagatggcattgtttcggtaatttactccttctcttctgtttcccactctgctcaacctcactcactagatctgtcatttgctagcacttctttttcgtatgttcatcaccaagttcactcttgatagctaaagtttatatacatataccctatccataattctagcaagatcggtctattnttagtataaggagatttgttgtggcaactgctttaattcattattaaagtgagaaattattctcgtaattaatctgatgtgttgaatgcagctaggatgtccccatatccctcttaaaacatgaagaatggatggttgaaggagcagagccgatgtggtagatcatgtcctcccagaccacaatgaatncatttcttgcagtcttgac

SEQ ID NO: 122375 - DNA, 370 bp, Glycine max
ctttccggagactcttaaactaagcttcgcccgcatggacgtacctagaattatttcctttgagagcccttgtgagccgtggtttccttttcttgttttgaaactcactaccctccttaaaagaaaaaccatgatattaccctatccttaaagaatgtccgagctatggaattgttttgggaatacatgaggggggatgttgtctcatggaacaacttggcttgttggctttacttcatgatgtatatgagcccatacttcctgtacatcgtatatggcataaatggatgacatgctgtacgagagcgacgcgttcatctgctggacgacgagtatactgattttctggaagaaataaggctttaacaga

SEQ ID NO: 122376 - DNA, 469 bp, Glycine max
  unsure (1)..(469): unsure at all n locations
tactaagcttctatccaatggacttaccttgaattaattcctgtgatagcccttttgatcactgtttccctttccttgntgtgaagctcactacaagccttatgtgaaaaaccatgatattaccatatccttaaggaattttggagctctggaattgttttgggaataagtgtggggggtttttgtttcattggacaacttgttctgttggctatgcttcatgatgtattttgggccatacttgatgtacattgtatattggttaaatgttggacatgctgaatgaaatggttgttctcataggctaaagagtaaaaaaaaaaaaaatctaataaataataaaatctaaataagaataagaaaagcaataaagttgagtgaataagatcttaaatggcacaagaatgatgaaactctnggttctactcttcatgtctaaattttatctttacttctttgtatgttccta

SEQ ID NO: 122377 - DNA, 351 bp, Glycine max
taccctttgctgctgacttctacccttgtccataagagctatctctaccccataggccaacttcttcactctttatagataccaccttaaccgaggacattcgaccgaggggagcagccttgcttaagacatgataaactacctcatcaaacttgggacacctaacagaatttatcctcacacctcatttatatcagcgcaacggcaactattggcaagatcgagatgggcatataaagggatcactaggctcactctcataccggaagacataggagattttgccaatctatggagagggagaaaaaataccttgatctatcaacacatatattcaatactctcacatat

SEQ ID NO: 122378 - DNA, 409 bp, Glycine max
  unsure (1)..(409): unsure at all n locations
actttatagataccaccctaaccgaggacattcaaccaatgagtgcagcattctataagacaagatagaagacctcatcaaagttgggacacctaaaggatnttatccacaagcctcattcatatcagcacaacaacaactatatgcaggatggagataggaagagaaagggatcacaatcatcactctcagaccgagagacataggagtgtaagccaatctacggagagggagaaaaaatcccttgatcaaccaagacatatcgtcaatactattacataaagaattgttggaagatgggcaatatcctcagcttgaaaatgaacctacagtatgtccgacaataaacatggtttcctacacaagccctttcatgtcgctatcaccttacttcaatgacttaaagaat

SEQ ID NO: 122379 - DNA, 306 bp, Glycine max
atgcggagaacactctatcgccaaatgtatggggcttgatacttttcttgaagaaaataacttgagacctctccttttcacaaaccacattctttacgaagaagtgtattaaatcatctgactcggtgttggagaacaacgaacgaggccacgaagtttaatattatattatgatcatattcatatggattcacctgaacatgatccgtgtcattagtgagataagctatactagcgtatacgtcaatactaacttacacactatgaatcgattaaacaacccagagttacccaacatggaaacac

SEQ ID NO: 122380 - DNA, 326 bp, Glycine max
aacgtttagtatttgaaggaagcataccaattgaggaaatcttggctgcttagcgaaagaatgcttttcaaggcaagcttgctaagtgaggaaggcttgctcattcttgaaagaacacttgttgaggatggcaacgctaattaaaaatggctgaacaattaatgagatgagtctaattatatgacttaagggctgatttaggaattatccattcaaaagcgacgcttatctgtacgtctctccgataaggagaggagaatgtgaaaacgcacagagattctcacagactacaatttcttctggaagacaaagactagaaaaaggag

SEQ ID NO: 122381 - DNA, 299 bp, Glycine max
gctaattaaggaaagaaggctaatttatgaaagttagctaattgatgaaagcacgctaattaatgaaagaagactaattgaggaaagcacggctaattatagaaagcggaagaattaatgaaatgagtctaattaaggaaagaagggctaattaacgaaataccaattcacaagtgcgcttatctgcacatatgatagaaaaagagagataaaggagaagacacactgatattccaacagaatacaattccttctggaagacaaagacttgtagaaggagaaacaacgcatgagagtca

SEQ ID NO: 122382 - DNA, 455 bp, Glycine max
  unsure (1)..(455): unsure at all n locations
ctccctaagagtcctctctcgaggcggatgttgagccatgttctcaatatgaaaattagtagttgaatgctcacaatcagaatgttcagaatcaccagcaacaaaatactcagaatgctcaaaatgctcaagatgcacagaatgatcacgatgcacactatgccgtaatgatctatgaaaggttggatctatttaacgatcaaagggttgtaaatcacctggattgcccctactcatgcactatatgcatcatatcatgtgtttatcaaacaagcaccacgggaggtgtaaaactacaactatagacaaacgatatgcaaatgagctgaaattttgtgagcaacaccctataatcatgaatagatagcacanacattctcatacaaaaattcaaagtctaactatgaacactacctaatgaaagttataagaataagacataatacttgaaaaat

SEQ ID NO: 122383 - DNA, 369 bp, Glycine max
gactctatagtgctcacccgccagcatgcatggtcgtataggaagccttgttggccgagggaaattatgtagatagacctaccagctggaacgcgatggggtacgcactactggggaacccgcatgcacttctttatagaggccacaaaactatatttttgggaagccacaacacgaggacctcatgctccctttattagacccggaagcgcccctgtaaaacaacctagagcaaactgtactgaggagcaaagatgattaaacctttatgatatgctggcctgaaatatttttacatctgacctaggagttgacgactaccacccggtttcaaactgagcaagcgctactgatatgtgggatacacta

SEQ ID NO: 122384 - DNA, 382 bp, Glycine max
acactaagcttaagaatatggcctcataaaatacttgtttcccgagggaaattctataaatagtacctccatctttaatggagtgggttaccactactggaaaacccgcatgctaatctttatagaggcaatagatttaaatatttgggaagccatataacaatgaccttatgttccctctattatatccggaagtgcaacaatatataaacctagagcaaattggactgaggaagaaagaagattagtacaatataatttaaaggccaaaaatattattacatctgccttacgtatagatgaatactttatgggttcaaattgtaaaagtgctaaggatatgtgggatacactacaagtgacacatgaaggcacaacagat

SEQ ID NO: 122385 - DNA, 360 bp, Glycine max
taagctacgcgtcgcatgcgaccacgtgcgaggtgctggatctacttcaatgggttctgaggggcctatgcgcgatggaacgcctcggaggaaacacgtatgcctatggcgctgaggatgacctttccatgttgacctgcgtcaactgtattagagagatatcacacacctcttatactggtatgtactcacacatgttcggataaatatgttccatcttgcgcgatatacaaccaaggagaaatatggatccccagagtgatgcaggaatatttctgggatactctgcaaacagctgtgcatataaacgtttccattaccgcaccttatctgtgttggagaccacagatacggttgctg

SEQ ID NO: 122386 - DNA, 437 bp, Glycine max
gcgctctattacactctgcttatcatcagaccacttccagtgtgctggaactacatcacatggatttgatggggcctatgcaagttgaaagccttggaggaaagatgtatgcctatgttggtgtggatgatttctccagatttacctgtgtcaactttatcagagagaaatcagacacctctgcaactgtcaagcacttccacatctttggaagtccatgttacattctggcagatagagagcaaaggagaaagatggatcccaagagtgatgcaggaatattcctgggatactctacaaacagcagagcatatatagtattcaattccagaaccagaacagtgatggaatccatcaatatggttggtgatgatctgtctccagcaagaaagaatgatgtcgaataagatgtcagaacatcgggagacaatgtagca

SEQ ID NO: 122387 - DNA, 426 bp, Glycine max
  unsure (1)..(426): unsure at all n locations
gcttctcaaggaagtttcttaagaaagcttctcaaggaagctacctattctattaatagaagcatgtgtaacacttgttgtaactntgatgaatgagagtcttgtgagacatacttcaaagttccacttctctccgtcttttattccttcaatttcgtgctcccccctctctctttctctccctctatcttttcctccattgaagcatccttccaagcttcttatccaaggctcatcttggtggtgaagctccttcttccatggcttattccctagtggatggcacctgctctcacctcttctnctttgtcttacgctgcatctccatgatggaaaatcaccattaaaggacctcattgaagctcatagatccagccttcatatgatccccacaagcaagctttcatcacacgtcctcgccttcat

SEQ ID NO: 122388 - DNA, 305 bp, Glycine max
taagctaccgtgcggcaactgcttgagagactttttggggaactaccttgagaagctattagctgacctcacacgcccctctgatgatctggctcgcggcttgaaaccttgctgacgaagagtgctgagcaatcgcgagcttacctgctcgtacctttctaatcgctccgctgacttccttgagatgagaagcttgagctgagcttcaccccgcctattattgctaagctcctgctcatgagaacaaacatgacaatgcaaagagaagtgcgtagtgcctggactactgagaacgccccgagata

SEQ ID NO: 122389 - DNA, 393 bp, Glycine max
  unsure (1)..(393): unsure at all n locations
ttgagaagcttctgtgtgaatacttccttgagaagctagagcttagctacacacacccctctcataactaagctcacctccttgagaagcttncttaagaagattcctaaagaagctagagcttagctacacatacctctctaatagctgagctcacctccttgagatgagaagctagaacttagctacacaccccctataatagctaagctcacccccatgacaaanaacatgataatacaaaaaaaagtccttactacaaagactactcaaaatgccccgaaatacaaggctaataccctatactactataatggccaaaatacattgcccatacgaatgataaacctattctagtatttacaaagataagcgggctcatacttagcccat

SEQ ID NO: 122390 - DNA, 146 bp, Glycine max
tgtatcatatcacatatactctctgctgctagttacaccaccaatatgtcatgtttgacacatatcagaacggtcattttttaatatcatcttgaccaccctccatatgcattatattcacagatacgaatagttgttgcacaaac

SEQ ID NO: 122391 - DNA, 254 bp, Glycine max
aacaaactttccgctctctcgattaacatcaacctgtatatgtggaggactatacaaaaaggacgcctcccataaccttctggggaaaaaaggatcatattgctatacctgcccttagaccgtattacaaacgcaagccagagttcaaatcacatgagtgttgagaaataggttagtgcacttctcacaggggctccgaatgtctatctccgcatgacaaattatgtgttgccaagcctgttggattcaatgaa

SEQ ID NO: 122392 - DNA, 463 bp, Glycine max
  unsure (1)..(463): unsure at all n locations
ctcactcttctaaacaaacttctctttctttaaaattgtgggatgttgccttccaaactacagtttatttgataaacagactttccactatctctcttaagtttcaacttggttatatttgttgtattcaaaaagtcacctaattataattttttggggaactttggatcttcttgctatcctttctcttagaccttataacaagcacaagcttgatttcaagtcacatgagtgtttatttcttggttattccacttctcacaaatgttacaaatgtatatctcctaatggcaaattatatgtttccaaatatgttgtcttcaatgagcttaaatatccttacaatgatctttgtcatacttatccaactctgtcactccttctaagagtgattntgttacctattgctcatattgccattatatcacctgcttctaataatcttagtgctgctttcccaaat

SEQ ID NO: 122393 - DNA, 365 bp, Glycine max
ctcttaaactacccgttggcgcgcttgcatcttttatatgagtgtgtatacttcgctagcttaagatcagtgctagttgaatctacatggatgaaaaactattgcttatcttactttgaggagaatatgatttactacaaggctcacctcccttggaaggcattgattatagtttgcatgattattaagatgatacgacggatagggatactatgaacactaaattttgtgccttataagaggactggactttgaattgtacttgtaccatgaactgagttgagaaaatgcacacacaaggtctgtatttatagtcctaagtggccgaataattggacacttgaatttgacattgaatttgtgga

SEQ ID NO: 122394 - DNA, 415 bp, Glycine max
  unsure (1)..(415): unsure at all n locations
atcttcttcataatggagtcctttgcttctttaatatcaatggaagtggaatagagatggaagaaaaatgattggagattccacttcaaggagaagatgagtcacgaagaagctcaccaccatatgaagccatggattagagtttgaaggtagaataagatgagatgagggagagggagagaatgagcacgaatatttgtgccttataagaagtctggactttgaagtttaattctaaaatgatcanaagtgataaaatgcacacacatggtctctatttatagcctaagtgtcacaaataattggacacttgaatttgaaattgaatttgtggagccaaattctggagccaaaatttcactaattatgattagtgaattgtagctatggttcatcccactaatccaagatcaat

SEQ ID NO: 122395 - DNA, 382 bp, Glycine max
ctatataaaactcaacctctaataatcatgctacacatgttgaaattaagcccccacataggagagcttaccaaacaaacaaataataccctctttgatcaatggcaacattatatcttaagaaaattcgaataaaagcaatcaaaaagatttaagcacggttactcgaaacgagccacttgaaaaacagcagatagcaagaaaagagcaccatctatgaaagaatggatgatctattattttaaatggaaggagaatacgcaagaaacttgaaattgtgaaaagagggggaacaggaaaaaacaccactatcttcatcagcatgcaaaataattatcataaaactcaaataatatatcgtacaatgaactaagcaattata

SEQ ID NO: 122396 - DNA, 302 bp, Glycine max
cttatatatgtccactttataacccccctgttgtttttttcaattaccctttctatgggcttttttattattaaaaagaaaaaattaagttctgttggtcttaaaatcgcgcgtaaagtgcttgctgaaaaggatgactttttttttggttggaaggagacctgtattgaatgagggacagcaagggtttccttcctcatcattctttatttccttttttgtgccagactatattctttaagttataattaaaggattttcttttggatatttcacaattaagttctttttttctcattttc

SEQ ID NO: 122397 - DNA, 301 bp, Glycine max
cgcgtactacttctgtgatagacactgcgttaggctgtatcgtacataatgatgggcttaacacaagggggaatgttgtgccacctcatatactcactatcattgcgacacatgcttattgggtgtcttacctgaaacgaagcatcatattgtggaatttgtcgtccagcttctagatcacatgactcatgttgccctaaattatgctactctgtatgatcttgaatcaccgaccatttcaacatgctggaagtcgattatattggacatccacaagagctatacgctataattcacgact

SEQ ID NO: 122398 - DNA, 314 bp, Glycine max
  unsure (1)..(314): unsure at all n locations
gaagcatgcacatgctactcanagttggtatatcgtgaagcatgcttataggtacatgaaatgatgtatcagattgtggaatcttgccactcatagttcctatctcgtgaaacatgcttatagggtctcttacatgaaatgatgtatcatatcgtggaatcttgtcataaataaagctagtcaataataacttatgttgccataaataaagctactcaataataacttgaatcacggaccactcaaacatgctntaagttgtgtatattggactccagcaagtgtgaaacaatattatacaagttaagatatca

SEQ ID NO: 122399 - DNA, 347 bp, Glycine max
tacccgtggcacgctaccaatggctgttacgattacaagatgagcagagacatgattgttgctagaagcgttatcactacaaacccccgccaacctgagtaaaccctatttattgactaccccttccgacgcgagttgtttccttcattggacatactattagaatgaccctgctgtagtaatcaatatatgatgctacctatcgtatgggacctatttacaagtgcacgagtcgtaaaagccccaggccaggaaatagctccttttgagccacagtctgggctgcctcgtactgactaagacctgtggggatgaactcctgcacctctaaaatgacgccctttact

SEQ ID NO: 122400 - DNA, 394 bp, Glycine max
  unsure (1)..(394): unsure at all n locations
gacctttaatctcagctgcaacatacgatggcagttgatatcaagatgagcagtgtctgaatgttgttggtgcattatcatacaaacccctgaaaacctgtttaanaatatattaattgtcaatcccttcaattgagagtagtatcaaacataggacagacaattagtatgaaactgctgaagtaatcaatgtatgataatacatatggcattagacattcagcatagttcacgaatcataaaattcccagcagatgaaagtgcaccttttgagccacagcttaagctgnctcgtctcgactaacacatctaagtatgatctcaggaacctcagaaatgacaccctattcataagaacccaaaacagatattanaacgtggaaaagaaattatc

SEQ ID NO: 122401 - DNA, 295 bp, Glycine max
cttatagcccggcacacaaacatcttttcctacacaccaacacttataccgtggccaccaaaagtatctatcataacaccaccatgctctattatgaaatacatactccaaatgggctaccttgcggaaggtcgacaacggcgagaaagaccgctcagcacttcaactattatattatcaagctcagagaactagacaaacaagggttcttgcacggaaaatgaagtgtcattcttgagaccagactgaatatataatgagtgagatacctcttgggatatgagaggagcatatc

SEQ ID NO: 122402 - DNA, 227 bp, Glycine max
  unsure (1)..(227): unsure at all n locations
tgtggagaaagacaattccttagtgctcaacagagaagcttcttctcaaacacaccaacacgtctaccagaaccacaaaatatatctttcttaacatcaccaactcatattttgaaatcaataccccaaatgggtcaccttgtggaatgtagaaaacggagaaaaagacagctcaccacttcaaaanaaggagtctcaatctcaacggaaaggaagaacaagtgttc

SEQ ID NO: 122403 - DNA, 358 bp, Glycine max
ctcttaagctacgcgcggcttgcaagatagcgatttatgtgttctgctctgacatactttcatgaagaccacataaaaaacgctttagcacatgctgggtttgaggcagacttattaccggtatcgagtacacgtgcacacgaacccctgatgggacagaacacattcggtggtatgacacgcgcagcatgtgctcatactgttgatagtatatgaagagcttttacctggggcataagggcagctagcgcatgggtttcttcatcgagaggagtgcaagatgaaaccaacgagaccacaacagatgctatagagaacgcgtttgactacactggacctgatggttgatctttcaagc

SEQ ID NO: 122404 - DNA, 253 bp, Glycine max
  unsure (1)..(253): unsure at all n locations
atattacctgaatccaccaccactgcacatgataccctggtgggacagttcacaattggatgtatgacatgtgcagcatgtgtaaattctgttgaacgtatattaataaatattccatgggtcaaaacggctgttgtagcattggctacttcatcangtgaagtttgatatgatcccagtgtaattagttaagatgatatagtcaacgcaagtgaagattctgtgcttgatggttcatttatagacagcaatg

SEQ ID NO: 122405 - DNA, 261 bp, Glycine max
cctagaccgttctataaaaaaattgaagcactaattctttccatagtagcacgcaattgcccatcctcacttggctatgggcggctagaacaggagagcacaaaaggccatgtccccatgaacgtgaatgctattatgatttgacaatgtgcgggagccacataaggatggggtcggagtcttcttgatgttgcagagtactctagggcctgctgttggggctgagacccaatttacctgagtcttctctcctatggcctt

SEQ ID NO: 122406 - DNA, 98 bp, Glycine max
atacatgtgtacgagacttcccctccggacaacattgaattttctggcttagagttctacagatgcgcaaggccatcccccctgacagtattgactta

SEQ ID NO: 122407 - DNA, 352 bp, Glycine max
cccgcgagtatgcaagctgacttgagcgcgcattttcactttagaatattaatcaaatcaattaagactgcgacatcccaactaaaaaacgtccgaaaggatcttcgctatatctaactaaaacgtaactatcattattatagcaaaattctacacctttattgatcaccaacgtcgtatcagcacataccaatcagtcataattcattataaccgacaatgacagatgatacaagatcactccgaacagaggaacattattttaattttagattacgagagaaaagacttatataactgactgaatctcgtaaaatgggggtgtacatacctaatgacaacgcctattact

SEQ ID NO: 122408 - DNA, 328 bp, Glycine max
  unsure (1)..(328): unsure at all n locations
ttcaattaagaatgagaaatcccaaagagaaaacgtccgattgatttttcgctttattttactaaaagggattttntattattatattattattttacctcttttgtgatttccaacgtatttacggcacgaccgaaccgtcggaattcattttaaccgaaatttacggatgatacaattcaaatgatcggtggaaatttatttatttttagattacgcgagaaatgacttaaataaatgactgaagcacgtcaaaaggggatatagaaagcgaatganaatgagaataaaaatacatgaaataaaatgtggaccaccacgggtacat

SEQ ID NO: 122409 - DNA, 372 bp, Glycine max
gactctataatactcacccgcaggcatggtttcgttcgcgagaaaatctttttatatataagaaacatctcataatatgatgattatattaagagtatcttacatgatctattatgagtggtttatatatttctcaggttactttcttatttgattttattagtattgggagtctagaatgagtgtaaacgaaggtcaatgctttatattttgttgacaccaatatagataattgaacactattcatatatgttttattattttgtatcattctccatttttatactttttgttctttgttattagtttgttataatgagtggaagtggatacaattcaattggtggagatacgattgtgggtggctcgtct

SEQ ID NO: 122410 - DNA, 402 bp, Glycine max
  unsure (1)..(402): unsure at all n locations
aatcttagaatatataagaaacatctcataatatgatgattatattaagagtatcttagatgatctattatgagtggtttatatatttctcaatttactttcttatttgattgtattagtattgggagtctagaatgagtgtaaacgaaagtcaatgctttatattttgttgacaccaatatagataattgaacactattcatatatgttgtattattttggatcattctccatttttatactttttgttctttgttattagttggtataatgagtggaagtggatacaattcaattggtggagatacgattgtgggtggctcgtcttcggttgctagaataaaagaaaaatacccctgcgaatatgactgatattgtgtgaaacatgggatngatgttgat

SEQ ID NO: 122411 - DNA, 343 bp, Glycine max
ttaactaccgcgtaaaactcacgacaaatttgtggcaactggtgagctccccctataaacagaaaactggctgctggagtattgtttgtcgatcgcgccaaaagacttctttaagagaatgcgcaatttatgagatttgaacaagcatcatgtgaacattgaatccttgacctcactgccccagacaattttagatattatatcgagaaccatactaactaactatatggcaataatgatacttactagtggtctactccaaagtacaccatactgaatcacttttcatatatgcccatcttctttactgacaaatgcacaagggatcatatatatctgattc

SEQ ID NO: 122412 - DNA, 390 bp, Glycine max
  unsure (1)..(390): unsure at all n locations
tttctggttcaccttgattatctccaccactatcaatcagctcagctggctcctcctgtattgcttgttgattgtcaccacaagcttctttaggagaatgccaatttantgaaattgaacaagcttcatgttcgtctgtagccttgaaccatgccacaaactatttcagatattatatagagaaccatactagtaactatattgcaataataattcttactaatgttctactagtaaaatacaaccattactgtatcacttttcatattgcccatcttcattactgcaacatttacaatggatcatatagtctgttctgaagtaacaaaaatgctatgcattgtatttgtaatgaggaaaggagaatatagagctaaagaagtagcatga

SEQ ID NO: 122413 - DNA, 286 bp, Glycine max
tgaagcttatgttgaacatgctgggactactcttaggcaacaggaggctggtgttcattgatgttgtaaaaataggatcctggttgacaactaaatagtgcgagcttgaaaaagtcacttagacactttttcgccaggggaatcgatctagctatattcccgtcatcaatgcgatatgattcttgaacctctctccctttatgcatatttgctggacaccttggcctgattctcaatgggacgagacaatcttgatgctctgattttacaacccacgttcctgttt

SEQ ID NO: 122414 - DNA, 431 bp, Glycine max
  unsure (1)..(431): unsure at all n locations
actctctcaaaggaaaggggagatggcatgtggataaaattataaccccgcacacatacctatctattttgaaattaaaagataaggaacttgaataagcactataaaacttttcttgcaatgaataaactatctccacatattcccctttccaatgtgaaatgtgtgaggaacctaaatccaaaaatgaatatttgctataaaccttgtccagattcacaatgggaagagataatctatatgcacttctttcacaacaaaagttcatgtgtaaaaaggaaagactgtgctatacttttggcaagaaaacctttatcacattgaggggttaatgttaattgaatcttagagaacaaatnggtaaacacttgaaacgaatctattcatacccacttctagaatctcgggtatttccaacattggatactctg

SEQ ID NO: 122415 - DNA, 304 bp, Glycine max
gtgggaacattaggtacccagtccacgatgtgctaagatgatggtccgactactgcgcatatagtccaccatgccctcctgaatttctgatggcaaaatggcgtgtggaacaactcccactgatttaccctactagcataatgtcaacattctcggttctataagctctatgtccgggtctatgctttaaagctttctccttatgaaaagctttgcgcctcctttccgaactatcataccaggatctttctggctcaggcactggactctgcccattaccattaatatgcatgactactttttt

SEQ ID NO: 122416 - DNA, 232 bp, Glycine max
attcccttctgatttccggctgggaaattggcgagtggaagaacgcccctacatttactcttcgatcataatgtgaacccttgccgttctaaaagctctatatttgggcctacgctttatagctgtttactttttgtaatgctttgtgccttttggttctgaatttataatacaaagatcattgttcatctgttactggtctctacccattctcattcatttgcatagttac

SEQ ID NO: 122417 - DNA, 272 bp, Glycine max
tctaaatgatatcgacatgcagagtcttacgagcggcagatgtaacatgattgaaactctgggatgagtatgtgatcctataatcataaagacagttggccccatggagagcactgggcgggcaactttcacacccaacatgagaagaacgagagaacattggcctggtccctgaaccgtgacatacattgcttgctgtcataaaacaatgagagctctatacggtaacattcatatttacatctattgtcatgtccgggatggaagctttt

SEQ ID NO: 122418 - DNA, 482 bp, Glycine max
  unsure (1)..(482): unsure at all n locations
tgaataaaacctgtgacatttaatgtatgtttggtttaatggaatgaattntaaatgtaattgaattgaagtgttctaagagtgaaagttgtaagatgattgcttctttgcgatgaatatgtgatgtaatttttttaaaaattatgggtcccatggtgtgaaagtggggtgcaactttcacacccataatgagatgaaagagagtccattgcattggtccaaacaaagtgacatccttctataattgttcgataaacattgtgagctctatacaattagttatcatatctacatcattgattatgtaagttattgaaactcttgaattagatagaattggtctagaattgtcactgtaattagttatgcttatagcatagtcgaatatgtatggtattggattgaaacattttattatcagaagtaactacataatcgattatcctgtttgctaataagtagatattccttgattgtcacaa

SEQ ID NO: 122419 - DNA, 356 bp, Glycine max
ctaaccgtggccgccaataaatatgtttatttggaaatcctgctggctgtggatgcttatttgacaatctctcccaggtcgataatatagaacccagacgtaaaatgaattatttcatgccttgggctgataagagcttgccgctattatctctatactcaaaacatagtatcaaggatactttaacagttgttacaggaaatgtacgtggtaccatttcatcatactatttagcattaaaggtatgctttccctttatctatatctttatgcacactatacaagcttacaactagtttgtttagaataatataataattttgattatatatataatcaaattgtagcttttacaa

SEQ ID NO: 122420 - DNA, 320 bp, Glycine max
tttatctcagcttggcccccactgcatatgttttcatggttgatcaacttgttgtggtgcaattgaaatctctcataacaaaatatgaaccaagtagtaaatggtgcctttgcttcctttttgatcattgcaccaactatttttggttatatgaccatatatttatattttgcttattatttggtcggatagtcttttttacctatggaatcatactgtgccttgtctttgataatatactctctctttcaatttgatggatgtctctgctcattgatttcctttcatagatattctccatgttttttgtcctcctcttt

SEQ ID NO: 122421 - DNA, 346 bp, Glycine max
tacccgcggcagggtgcttatatgaacgaaattaaacagagaatgggcgaacacgcatgtgaatgaagacacgacggagagaatcgggcctttgctatggggctcacaagacttgggttcatcaacacccaacaagtgttacgacggctgctattattcaccaaggggcttacttgggatgctaaattgagcaaacttacctgacacgacatgttgagaaaactccctggttaaaagtctcagagagacaataacatgtattttatatggtggctgcacacacctctctaatagctaatctctcctccttgagaagagaagctagagcttatctacacacccccta

SEQ ID NO: 122422 - DNA, 348 bp, Glycine max
  unsure (1)..(348): unsure at all n locations
gagagaagtgtgaacttgaagtgcgcctcataagactttcattcatcaaagttacaacaagtgttacacatgcttctatttatagactatgtagcttccttgggaagctttcttgtgaaaacttccttgagaagctttcttgtgaaaacttccttgagaagattctgtgagaaaaattccttgagaagttatagcttatctacacacacctctctaatagctaagctctcctccttgagatgagaagctagagcttatctacacacccnctataatatgaaagctcacccncattccataaatacatgaaaatacataaaataaaagtccctactacaaagactactc

SEQ ID NO: 122423 - DNA, 322 bp, Glycine max
  unsure (1)..(322): unsure at all n locations
acccgcggcctgcttcggtcactcaggcttcctctanaagcacttctatgggtgtctttatagaacttgtctttactttattctcttaagctaactccttatttgggctcacccgtctaggctcttgatttgcgttcttaaggcttgttacggttgaagcttccgcggctttggactcaacatctttcctatttactaagatgttatagctatttttatcgaggcgttgcatatcgttccccatcctgggattgagagcacctttgatctcttgaaactgaaaggtacacagatagatgtccttacgggctccacattaaac

SEQ ID NO: 122424 - DNA, 421 bp, Glycine max
  unsure (1)..(421): unsure at all n locations
tgtcacttttttgagtcactcatgacagccctaagtttacttcaattggtgtctttatagaacatgtctgttcttaatacacttaagcaaactcataaatagggattaattgataaggcttatgatttgtgtttagaaagctcgtaataattaaagcatcaagggttttggactcaacaaatntcccataaaataagatgtaaaaacaattatcaaagagacattggagaacattcaccatacaatgatagagagcacatatgaactaatcaaactgaatggtacacagattgaaatcataagggactaaacaatatatatctaaacttcatataaccggntaaaattacctgctacaacaagtcaattttggtgattcatcgtgcacttgccatttcataacatttctaaatactatgat

SEQ ID NO: 122425 - DNA, 365 bp, Glycine max
gactcttaagctacccgccgtatgcaggctcgttcaggcggtatattttctttcccatggctcaaaccatacaggagggcacctacttgaacctgaatcacttagtccatccaagacaatccacggcggataattaccaatcactgacctgattgaacctgctagaggcacacgccataaactccccgcgtgcaaacttccataacggagatagactagagcggctttctttccactaatattataaggacgggacgtctatcataagaccaatgacaatcttctgaagagttaaaaatgcataaatttaaacgtcctgctcatgtaggagctctagtgcatgctcattaatgcccaacccctga

SEQ ID NO: 122426 - DNA, 392 bp, Glycine max
  unsure (1)..(392): unsure at all n locations
tggcgcctcctctcacctcttttgcttngtcttccgctgcatctccatggtggaaaatcaccattaaaggaccccattgaagctcaaagatccagcctccatagaatccccacaagcaagcttccatcaagatgttagcctcttgaggctttctttccttctatcttctatgggagtgaggtctaagatgtgacctatgccttccttcgtaatagtcacgaagttcttcacttatgctcttgcaagagttatgactactataggagggcatattttctcttttcatttctttcattattttacatctttcttactctgagattttctttctttcatctggacttatttattccactctttntnttactttttcttttctctcttgttgttct

SEQ ID NO: 122427 - DNA, 333 bp, Glycine max
tacccgccgcatgcggtgagcttagaaagcaaacagtttttttgtaggagagctctcccttctgaacgcagggtgatcagaacaacctcttcactgaaatcatattcaccaaagctattcctggatgctgaccaacttctaccttgaaacgtgtgtcactctgggagcccctttcaccatggatatggcagcgatacataccatcaaagatgctctgctctccctagatttttcgtcattcaaaagctcccgcctgactctgactgtaccccatgctttctctacagtgtagccacccccactagcatcacttccgaggctcatctttatggt

SEQ ID NO: 122428 - DNA, 491 bp, Glycine max
  unsure (1)..(491): unsure at all n locations
cttagtattagaggggtgtgtgtagttattctctagcttctcaaggaagttttctcanagaagcttctcaaggaatgtttctcaagaaagcttctcaaggaagctacctagtctataaatagaaacatgtgtaacacttgttgtaactttgatgaatgagagtcttgtgagacataactcaaagttcaacttctctccctttttcttccttcaatttcatgctcccccctctctctttctctacctctttcttttcctccattgaagcatcctctccaagcttgttatccaaggctcatcttggtggtgaagttccttcttccaaggcttattccctagtggatggcgccgcctcttacctcttctcctttgtcttccgctgcatctccatggtggaaaatcatcattgaagctcatagattccagctccatagaagctccacaagcaagctttcatcatcacctacctcgaattaccttcgtatgtgtct

SEQ ID NO: 122429 - DNA, 364 bp, Glycine max
attaaactacgcgcggcggctgcatctgggctaatggataacaacaccctgtcattatgaaagaatacttcagtatacctgtactactagtgagcctactctcgaagcggacgaaaatcggccagagccttcctggccggcatatggcggagatggaatacaagattcgcttgtaggggggggggggggggcctatggttttgtgcttttgtttactttcattgtgcagtcaattgatttatgaaattcatgccaaggttttcttttcctaaatagttagaagttaggttctgaaacagaaaagtcatgccaacatatttcatagcataatgtttacaagatgtttttgctacatttgtattga

SEQ ID NO: 122430 - DNA, 406 bp, Glycine max
  unsure (1)..(406): unsure at all n locations
acactcaagctggtgattggaatctctgcaatatggagaacaaaattatatctgtagaaagaatacttcagtatacttgtatttctagtgagccttcccttgttgtggacgaaaatcggccagatccttcctggccgtcatatggcgaagttggtatacaagatttgcaggtagtttgagctattatatgcctatggntttgtgcttttgttactttcattgtgcagtcaattgatgtatgaaattcatgccaagggtttcttttcctaaatagttagaagttaggttctgaaacagaaaagtcatgccaacatatttcatagcataatgtttacaagatagttttgctacatcggtattgatgtctttcccatgatgaaggttcgttatgctccacatctcccac

SEQ ID NO: 122431 - DNA, 306 bp, Glycine max
tgatgctgatcttaccttattcagtggttccaaacgttcatttcttgtgcctgcattgtatgatatgtaagatgtaagaatttcactgcattgtaagctcatgagaggagttggtgttgcatgagcgtcagtatagtgcatgatacatggttcgctgatgaagaacgagttcgaaaagcagttggcttgttggagaagccaattgtccagcatcctaatgctagagaggtgagatatggatcgtggggttttaatactatgaagcacatacacttcttctgttgtgatagtcacagtattcgacat

SEQ ID NO: 122432 - DNA, 322 bp, Glycine max
atgtcttctccaatatgtgggcaacttagcaagaacactcaaaacaactaattgaatgatactccactcactcctatttcgctgcataatgggatgacatggttaagacattcgtttcctggagggactttgctttaacatgagcacgtgcgcattggatcctccatgggtgcacaaggcaatcttataatctaagtggatatgatgtatctaaacatggaaaacatcaacgactaaatgaagcattcattccctactcggagatgtcatgcgaaactacatacttacgatatgcattcattcacagctaaagatcacactc

SEQ ID NO: 122433 - DNA, 436 bp, Glycine max
  unsure (1)..(436): unsure at all n locations
ataagaacactcaaaacaacaaatagtatcttagttcaatcactttgattttgcttcataatggtttgtcatcattaaaacattcagttcctggagggactttgtttcaacaagtgcacattcacattntatcctcaatgggttgaaattgtcaatttataatagatgttgatgtgatgtaattagatttagtaaacttaaatgatttaatgaataattaaataactcatagtaatgttattgattactacataattttgatattaagtaattaaatgctctttatcatgtcattttgataatcaaatattaattttgataatgttctttattaagtagtaacatgccaaccatcgtttagtatacaattctgattggttatttttcattcataccagtagtggagacatatcatatattcttactcatgccttct

SEQ ID NO: 122434 - DNA, 361 bp, Glycine max
tacccgctagcctgcgtgattgcggcaaaatttaagatgaaattacggagggattagatgtggtgaaacacccaccaccatgttctactttaccaaaccatctccagtaggacttatttcagaagactatctgaggagggaggctggtatttgtgagctgatgctgtatacctagcatgtcacaaacgctccataacagccataacctgattattacattacagtgtaaatagcatatgcttataaccaaggactgcgcgttgaacatgatcatagacattcctagatactattgttggatcagtgtatactgattaggtacataccatctgatggaagtgatgagctactttatagcaac

SEQ ID NO: 122435 - DNA, 341 bp, Glycine max
tgtgagtagatatcttgaagcaaagacaaccatgttattctttaccaaatactcttttggttgacttctttcataaatctttctgtggtgggaggcttattattggtgctgatgcatctatcttgcatgttaaaactttcctaattgtcatacctgcaattacattctgtgtaaaggcatatcttataaccaaaaagccattgatcatgatcattggtatcctgtaattattgtccgatcgcgtttcacttgtttggtatatacctcttgtaatttgtcctgtgagattgtataaaaactagtcgtcaacattctttctgtcatgttccctttatccttat

SEQ ID NO: 122436 - DNA, 370 bp, Glycine max
cccccgtccgggactcttaagctacccgcaagctgcccctattaacactttttttgatgcctccttccacctatattggctcttgcacggatgacctgccccttggagacaaatgaatctatgagggtggggagaactgcaggtattggaatgagtggattcccctcacttaacacctgtaaagcaccatttggccttccaagaggctggaacctatgctgcctagagggcgcttattagacctggcactacccctacttaagccgctttgatcgtcttatactatgaacaaaagcgtgtcgccactttccactgatgaggcctgtatgtatacatactaagcgcatgtagaatgagatctcatggggcc

SEQ ID NO: 122437 - DNA, 189 bp, Glycine max
ccggttacactgttgttttatccatattggtctgaggatactgtcctatgacatatgatatgaagggaaaactcagtttaatgattattgattactatcccgaaagtagaaactattttaaatagagtatttgttaaagtgttttaattgtaatacacaatgagtatgatgctatttatgacaagctgt

SEQ ID NO: 122438 - DNA, 356 bp, Glycine max
ataaaactaccgtagactgcacacgaagataaatgatgtgtgcgacatggcgagactttaggtgggtcacaaggaatctcttacccaccccggcatatcaaaaagccatatgaaagacactcccctttaataaactgtggatccctggcgggatatctctgaaaaccatgaggcattcttattttgctctgcccaaacaggtggaaaaaaagggaaaacgatcgaacacacttgacttataaaaaaaagattaacgcgccttaatgtttcatattaaattggtttccatatgtcagagctgataaaactcttgcctgaacattgttgcgtttattcgtggaaccaacttatcatag

SEQ ID NO: 122439 - DNA, 444 bp, Glycine max
aagataaagtgatgtggacgacttggagatattttatgtgtgttattaatgattcccttacccaccccgcaatatcaagaagccttttcaaatgttagctcatatttatatcctttggatccctggtgggatagctttgaaaattatgatcataactaaatttgatatccctaaacaggtggaaaaaatgattaaaggagcgaacaaacaggaaaaaataaaaaaagatagacactccttaatgttttagattagattgctttaaattcgtatcggatgagaaagtcttacatgaacatttcgctcttactgtgagacccaaatcatcattcttgccccttaattaggcttgaatggaagatttgatctgatatatcataaagtgtcgtattacttaagagtataaattaaagaaaaatcataaatattttttttcttttaatt

SEQ ID NO: 122440 - DNA, 296 bp, Glycine max
tgccccttcaaagcatgcctttgtctccagcagaatacttccacctcttcggagggagaactctctacctgctagcccctatagaagcgcctcattatatactatagtattatgagtactcagaagctctccctctacccgtgccttactaaggacaacatcggctcacaacggcatccatacgggaggcccatataagcaccatccttatttaaataatactatatggcgactctggcagtgctgtggacacgaactactgttctactacccatgctttatctagctctgccttt

SEQ ID NO: 122441 - DNA, 300 bp, Glycine max
cctttgacccgttgtgatttctttcacctcttcagatggtgagctcactactgctgccctataaagcccctcaaaactttgctttggtcgtgttcttcctttcgggccttcttggtttctcgttccaaagcttcagcggtggacataatgacgtcccttagttcatcatactcttttcagactgtgatggctatggacttgaacttctcttagactacccaagctctttcaagctctgcctttatggcttgtacctcatcactttcttccgaagctttacctcatcttcctcacagtctt

SEQ ID NO: 122442 - DNA, 319 bp, Glycine max
agcaatggaatacaatattctgtttgacacaattcgttcaattaagttcttagaaatgtgaactaagcgctgatgccatcatgcttatgagtttgtcttatcaattctacacttagtaccacgcaatgtctggaataatgaatcactcacaagaagctacagtatcaagataatatagaacatcattagccacgagagagcctcttcttactttatatgacttgaaagacgacctacacacattgtgtgcgaatgaacacaaataactcccgttgtcctatatacaaactgataccaggttgttgccttatgacagtac

SEQ ID NO: 122443 - DNA, 273 bp, Glycine max
  unsure (1)..(273): unsure at all n locations
ctcagctgtgaaataatggaatccaagattctgtgtgacacaattcgttcaattttgttcttagaaatgtgacctaagcgcttatgccataatgcttctgagtttgtattatcaattctacacttagtaccacgcaattctgcattaaatgattcaccacaggaagctacagtatcaagtaaatatagattatcattagccaagagtgaaccagttctaacaatatctgaattgaaagacaacctanacacattgttgtcaaatgaacacaaa

SEQ ID NO: 122444 - DNA, 335 bp, Glycine max
catgcaagcttctgccgtatactctttctgttgcatgctaatccatacacacgggtgggtgtatctcttctctcgctccagcacgaggtccgcccgcttgacctttttttggacggatgccatggaagggttataatggaggttatatgcatatggcttcttttcgactctagagcgtccataaatcccttcatgctggtcactgggcgggtccttactggaaggccccctacgtgaaccttctggacgactatccgtctctctgtcctagggacgctaaggctcgcgcagactcctctatcatggtcaaaccccgtgctttcccctattgcatg

SEQ ID NO: 122445 - DNA, 188 bp, Glycine max
taatcttctccacgaagtattctcaagaaagctgttccaagtaattttctcctgaaaacgtctccccgacgcttcctactctatcattataaccatgtgtgctacttcgacgcaactttatgattggagagcctgtgagacatacttcacagttccactactgtcactcttttattacctctatttcg

SEQ ID NO: 122446 - DNA, 327 bp, Glycine max
aatcacgtttattttgaacgggacgctactgatatggtaatctctggaacattacacatgcttatccatatgaaagatgatatctctcttgcgagtatcacaccagactaaccacttccgccaagagaccgacagcacgacacaatcagcatcattcacttcattcgaaactcatgggttcacaagcctggatgctacaaaacgcaaccccacatcttctttgacgctaatgtggggaggacgatacttatcgtcatgaagacaagcttatcatgattatgattcatgacatgcatttgccatagatctgtaccatatctcccaggc

SEQ ID NO: 122447 - DNA, 205 bp, Glycine max
atgaatgatgagttcttccctgtgagtatgactcttgaatatgcacctgcatcatgtgaccgccacaatgacataaaccagttcattcactttctttgtgactcatgggttcacaatcattgatgctacaatacgcatcatcgcattttctttgcaattatgtaagtcaaacgactaattatagtcacgatgtacaattaataat

SEQ ID NO: 122448 - DNA, 305 bp, Glycine max
gctgcctctttatgggtttttgcccccttcccttgtactacatctagacggctgatgctaatgcgtcattgggaggactacccagtctcgactctactgggaagacatcgctattggggtgtttgctttactcgactgtgccggagacttttattgaatgtggtcaatactccaacggtggccggcctagacctatggacaccgactgctgttgtactttggatcactgctccgatccggtgagcaattccctctactcacggtcgttgtgtaatcatcctctgaaaaaatacaccatgttacag

SEQ ID NO: 122449 - DNA, 447 bp, Glycine max
cttgactcatcttctacttgaagtggcgtcttcaatcaccttttccacttattcattttgcttccattgatcttcaagaagcaaaggactccattgttgaataatatccaatgcctactagctctacatggagtttcatcactcttgtctctctttgcttcacttgcctataccggatttgtttatattctttcttatttatttcattggtgcccaacctaaagcttattaagcctcatgcatatgtttgttgcattactcctcctatcaatttagcagtgattcctactcacggtgttcttggctgtttatcttatttttatggttgtcttaaagaaaacatatatactctggctcggagggggtagcacgggataaattagtgtttgggatgaagaaacacgaccatatgtcatttcaaatcttgactaaagaatcttatagttt

SEQ ID NO: 122450 - DNA, 214 bp, Glycine max
  unsure (1)..(214): unsure at all n locations
ctttactctcatctccctatatgcatggcactcttagactaacggtgaattgttttcgacaatttgtcctctaccaatagcgggatcatccgcactaatagcacttaggtctttaataacgcggatttacatatggtattaatgcactaacacgtgtgttatcaaaatcantgatgttctacaatacagactacctatatattaataagtgttt

SEQ ID NO: 122451 - DNA, 262 bp, Glycine max
cgggttacccttactggaaatctcgagcgctcatgaatattggggccacacatctcctaatctcgcaacccatcgatattgggcctaattttcccgccgactgtgatagagtaattactaacgcatgctcatgaggtgattacgttcccttacaagatcctcctactatactgtgtgaagaggatttatcacgattaccctgcatccttaactcgctacacatagtatcatgcgtcctcagatttgatcacaatatctcatt

SEQ ID NO: 122452 - DNA, 374 bp, Glycine max
  unsure (1)..(374): unsure at all n locations
atgattgcaatatacacttgtctaaattacttattaattnttaagtggggatggttgcataagatcctatcgagatatctatagcactcatgaatattgggcacacgcatggcctattatcacaacacaacaataatgtcaagaattgtgtgggtgactgtgattggtgaattactatcacatgctaagtgttttcttaggttcaatatcattgtacacctactatactgtgtcatgtgttattatcagtctatacactggtcaatagcttgctacatcaggtctcatgcattatcacatatgaacacaaaaactctcttatgcttttcttttaaaatatcctctcanaatgagttaatcttttgtaatatgtg

SEQ ID NO: 122453 - DNA, 264 bp, Glycine max
aaaaggacttactcatgagctagaaccgatgaccctggggctgaatactaaacacttccgagggtgtagtttttgaaagaggggaaactaacccattaaatgcactaacgcacctccttttcgcgtgataagcatttggagcgggggtggatctctcagacaagctaaggtgcgtcaaactacctacacctgtatgaattattgttgagatgaacgattagcttagtcccctgcaatgctctatcgaatgcgtatatgtgcacg

SEQ ID NO: 122454 - DNA, 280 bp, Glycine max
  unsure (1)..(280): unsure at all n locations
atgcgaaaaatgatgaccctatggctgcaaactcgtcaatcccgcgggtatggcttttgaaaggngggataaaaagattttgaatgcaataacgttccccttttcgtcattcttataatttggtgcaagggtggctcgcccatgcgagctcatcttgcccatgcgagctaacctgcattttttttttttgagaggaacattaaccatgtccactcctttcttttagcgtcttgcttaacttgaacttacttaagttagaagtaggcattgattacttatt

SEQ ID NO: 122455 - DNA, 306 bp, Glycine max
ggactagaggacacaatggcggtcctgacagaccaaggcccaatctaggagcgggagtcaccctcaacgcttctacgtcctcaggggaaagtcatccagatgcctaccagccgtgactactcatggtgcacaaaaagtctagcttccagcaggtgaattctcccactatgcccttcatcagctggcttccctcctcgccagaaatgatccaaagaagaacacttgagttgtatatccatggactgccatcaaaagggggatgagcataacgtatgtcctcctaacgtgacagaaccatgcgacaga

SEQ ID NO: 122456 - DNA, 334 bp, Glycine max
  unsure (1)..(334): unsure at all n locations
gagtaaagctcaatgttcctcccttcaaaggtagaagtgatccagatgcctacctgcaatgactacactgatgcgcataaagtcaagctagcagcagctgaattctccgactatgcccttgtttggtggcataaataccaaagagaaatgttgagagaggaacagtgagaggtagatacatggactgagatgaatagggtgatgagaaaaaggtatgtgcccactagctataacagaaccatgcgacagaaactccatgggctgtcccaagggaatntaaccgtggaagaatattataaagagatagaaatggcgctactgagggccaacatcg

SEQ ID NO: 122457 - DNA, 375 bp, Glycine max
ccagccttccggacactcttaaactacccgtggcttgcaggcttgctacaccgattttactaatttcctacaagccctagccgcattaaaacatgccttctgccctcgtccgacaatccgccaattgctttcaacatgaactaactctacgatggaataacagttctggctattactaacttttttcatgcgcggtttgaaggggaagtatccacaccccatctattgatgaaaatctcaaaggttgaagcctgaaaatgttatttcgatactgcagaggttaactctcactacttgcaacacctttacatgcgtattccactgggatatacagcttttcatgacatacactatgccgagaactaatcttcctct

SEQ ID NO: 122458 - DNA, 120 bp, Glycine max
actctctaaagctcaccctctgcccttctcacttaagcgccttaaccactcggggccttgtgcttatcgatatgcttcggaaccacccccgcctaaaccctttgagataaacctccgtgc

SEQ ID NO: 122459 - DNA, 375 bp, Glycine max
  unsure (1)..(375): unsure at all n locations
gcacgtgtcagtcaagtgtatgatccacatcgtggncaatgttcttatcgataatggttccagnttaaacgtgatgcctaatagcactgtggagaaattaccattcaatgcttcgcacctaaagtcgaattcaatggtggttcgtgccttctacggaacccgccgagatgtaggggagagatcgaactcccagtacagataggccctcacacctgtcaagttaccttccaaataatggatattataccccctacatctgtctgtttgggcgtacgtggatccactctgtgggagttgttccctctacactccaaccaaagttgaaattcgtagtggaatggcatctggtcatcgtatcatgcgaagaagacatgt

SEQ ID NO: 122460 - DNA, 296 bp, Glycine max
ctccctcacagatcgacacacgcttaacgagccccaaacacattgaccaacaccacttggtggaaaggggtgctcaaacacaaaaccgaactctacactatgatgaccacatacatatacaaaccccacaagtggaaaactatactgagaaaacaaaagccccctacatgttcctaagacgatgaacaacaacatcttcatgcacacttaaccgacattgactgagcttgacccacggggaccactcatcgataccaagttcctttgccggtttatgctctccataaccaacattt

SEQ ID NO: 122461 - DNA, 334 bp, Glycine max
cgtggaccctaacaactcaacacaaattgacaattcccacacttccacacatatagacaaaccccacacgaccaccaaacatattaaccaaaaccacttggttgaatggcatgcacaaacacaaaacaaaacccttaactatgatgaccacatccattaacaaaccccacaaataatattacttacttgaaaacaaaagccccctccatgttcctatgacgttcaacaacaactcttcatgcaccttcacccacattcactgaccttcacccactgtgacaacttcacgatacgaggttcctgtgccggttcatgcttccaataaccaatcttt

SEQ ID NO: 122462 - DNA, 340 bp, Glycine max
caggctgcttaatttatccactttgttgcttggaacggcaaatgtctgaatcgaggtcatcctaggagcacaaacctcaaacccttgcgacaggtccacatttatcattcacgtcagctggtataccatgtgaaccaacgtcaccacttatcctttgcgctgctaacttttagaagaaccctatgggtgtggtgataactcctgcactcctctaaagactataggcttatttctaacgctacactgctgatagggggacgccaccttcttaaggagagatctggcttataaaaagaacatgtctttgagggcatcaccggaggcagcatacatcctactc

SEQ ID NO: 122463 - DNA, 350 bp, Glycine max
tacccgcggcatgctagctctgtcacatatccatctactttggggacatgtgactggttgtgataagaatggagcggggggggcatatcatatcttttgtgcatcatgcatcatcatgagtgagtgagaagaaattttctaaagttagaaaatttcttcagaagaaaaaactctttgttttaattgattacaaccttatcataatcgattacacaagttgtcataagcttgtagagttatgtctcgtatcggtttaatcaattacaactttatcataatcaattgcatagttgttcttaagacaatgactgatttattcaggagtctctgttttaatcgattaccatttg

SEQ ID NO: 122464 - DNA, 218 bp, Glycine max
tattgaatgtcgcatgctattccatatcatatcttctgtgcatcatgcatcatcatgagtgagtgagaagaaattttctcaagtttgaaaacttcttcagaagaaaacactctttgttataactgattacgaccttatcataatcgataacacaagctcgcataagctcgtagagggttgtctcgtatcggtttaatcaactacaaccttatcatagt

SEQ ID NO: 122465 - DNA, 342 bp, Glycine max
ctacccgatgctcttgtgtaggacgattgttaatggtgaactgtctactaaaccggtgaacattaattgcaccctggaaatataggccattggacatgagaccgtctagacgtttatgaggagtgatagggcccaagacctaggatgctctatccgatcaattcataacctttgccgatagcgatgacgggggaggatcctgagagctcgagcttgtgattccactggaagaaggcgaaagggggaccgggaatcaaggaggcttgtggtggctggccaactgtgaattttgtggaatatgtgagatatggcctctgggaatcgattaccaagggtgggtaa

SEQ ID NO: 122466 - DNA, 232 bp, Glycine max
acactaagctatatcttttgctatcgatcccattcataatatggtctgtttactaaccctgttatattaattcacaaggaagttaaggccattacaaatctatttgactaatgtattataattagttaatggacaattgactacgatactctatttgattaattcataacccttgccgatagcaatgcggtgggtggatacggatagctcgtgcttgcgattccactggagg

SEQ ID NO: 122467 - DNA, 273 bp, Glycine max
ctgctacgcctaccgcctcctcttttggtaaaaatgccgcatcacgcccacattaactcatacagagtctcgaaacatcagcacgactcctgttttgccatcctgtaaaagttaatgagccgcgctcacggccggaatattctccaccagacagcgtagtgccgccagccgttagcatgtacttatcaagcaccgtcgcctcgaccatgctgcgcatgccatgcctgtgaatatctatatagatgcccccgttaaccgactctcgaatatctc

SEQ ID NO: 122468 - DNA, 232 bp, Glycine max
  unsure (1)..(232): unsure at all n locations
gctctcgctgtgcagatggtccggcgcaatgtttataccatatntgactcctaccggcatgactttttcttattctgcggcatcgcgggcaatttactcatacacgtgctgagtcagcggcacaatcatcttttgcgattcggcaaagttaatgaatgcatacggtggaatttctcccgcgacaggatgccgccagcgtatcaatacattcaggcccgtttctcgcatagct

SEQ ID NO: 122469 - DNA, 366 bp, Glycine max
aatactacgcgctgtgagcatgcaaattcataataaaggtgttttaggacaatgctctctccacgggcaccagaacacattgtctggtcatagagtgctagagaaacaatcttgtgtatagatatgagaacattaattcattggcccctcctcatgctgttgcggctgcaagacttgctagctgatgtatcttggatgactacggttcctgccctggtttaaacctgaaaaactcatgaacacatggcatcatggacacctaaaagactgcgcctgtacaatctgggcctctttgctgatgacaatgattttactatcgccaagatgacagatggacgcatgatcaagacataggcgtttactttt

SEQ ID NO: 122470 - DNA, 417 bp, Glycine max
ttctaatttcaatctttaaaatgtttagaggttttggccactggtatgattcatccttggtatcgattcaagagataaatctcttgtaaaaatatgttagcttaaattcattggccaaacctcttgctgtttcaacttaaagattttcttgatgatgtatcttgaatttctttgattcttgtcttgaattaaacttgagaaacacatgatcacatggcatcatcaaaacatcaaagtctttgcttctacaatctccccctttttgatgatgacaatgtaattcctataatcaagatacaagatagaatatattcaagatataacgttcactcattccatactccccctatgttatggaattaatgatctcttgatttctaagcttctaatttctaagtttctaaaccaccgttctct

SEQ ID NO: 122471 - DNA, 284 bp, Glycine max
gaccgaatataggcgaatatcaacaacccacttggacgcctttgtaaacaggggcctttaaaagggttagaaaaacgccgaaaccccgactgttactatcttttttttactacccaaatttatcccaacccaacaaggttattaatgatgcaataacaaatctcttccatccccaccatttatttatgaacaaaggggggaggatgatacaacacaaatcctctctaccggcctggtgatgttctacaaaaccttttgctctcccaagagagccgaccataaaa

SEQ ID NO: 122472 - DNA, 327 bp, Glycine max
catactgtgtctaccattcctatacaaccaagatttccaccaacccaacaatgtcattactcagccaataacaaacctgctgcttacccaccacccagttatccacatatgccattccttaatcaaccacatagcctatctaccgcacttgcaatgacgaacatcacctttatcactgaccatgagcacctaccaataaatgaattttgcttacctgtttaattcaccccagctccagtgtgctatgctgacttgctctcatatctacttgataattcaatggtagccataaccccaaccaaagttcatcaaccttcatttcttcga

SEQ ID NO: 122473 - DNA, 370 bp, Glycine max
ctcgttacgtgagactatatagagctcacccgctagcatgcggggctgtgcaccgaaggtgtttattggtgctatcccgatctataagagacatggatacaggcagcctgctggacgacacaaaggtaccaagggttaaaagtggagtgtaagacgatttactgtaccactctcgtaggcaaccctattctgtctggatctacatatctcaacagtgcgatctccatctatcactatgtcaaaaacagcttaaaggcacatgccgtgactattgataaggctgatctaacgaactagccaggtctggatatgtaactgtctaaacattagccttttataaagaatatgtgatgggatatacgactcgcaa

SEQ ID NO: 122474 - DNA, 233 bp, Glycine max
tacccttggcatgcctgctacaaacctatctttattgacaccgataacctgagatgtacctaatccggccaccttctgatgggaatggtgtaaatggaaaacgggatctcttaactctgatgctagtggaggctggacaactgttcatttcgtgaaataaatttattggggcctttggaaatcgatcaccattgtcgggttaagcactacagcgcttaatacttctggacctg

SEQ ID NO: 122475 - DNA, 343 bp, Glycine max
gcaagctcgttatgagaggatttgtacgttcatcatctcagtatttgttaccaagaaaaaggatcatttttaaggtccctcgtcctaataagagcaccttccatgtctaaagaatcgcttgattcacccttaaagaacaactaacgttggtctgattttctatccgatggatggtacgttagatcattagccccacttttgttgtcctcgtattataaggggaattttttggtatggtatcactatttacacctacttaacgaataaagctgctgttctttgagacagacgtgagaggtgctaataccttattgggacgcatatacaactaccggactgggaa

SEQ ID NO: 122476 - DNA, 268 bp, Glycine max
cttttcgccttatataccgcaaaataaagatgtgtacactattttacataggtcattagtccactttatgaccctcaataaaacgtgatacctaaaaacactagttattctttagaggacgagacaacccattgcaccaaataagataagttgtaacattccattaaatagtgtgcttaaaacgaaggtaactctaactaatcaacgactgatttttgacgtctattttacttacataaatggggccgctttctctgaacccctactc

SEQ ID NO: 122477 - DNA, 372 bp, Glycine max
acactctatagaactcaccctcgctctagctttacattgagagtatggtttatccgacgatgttgtatctcattgtagatctaacaatagtgcaccactgctctaactaactttccaaaagacttcctccccccgaaatggcccccacgaattttgcttaactcacgtcccccaatgacaacgttatccacagaactatttccgttccggacccttatacccatctcttcttgaacgctgtacacacatcatgctctaccgtcatccaagaataaacggcttatccaggaacaacccgtccaactcacataccactaccatactgatttctactaagaactccagcgccagtctctggcatcacaggctact

SEQ ID NO: 122478 - DNA, 397 bp, Glycine max
  unsure (1)..(397): unsure at all n locations
ctctaaatttacattgatgttgtatttatgggatgaggctgtatgtcatttctgttctaagagtagtgtcccactggtaaaactaactctccaaatgttngccttcgcatgaaatggccccgaggaagcttgcctcatagaagtccaagaatgacaatgtagccgaatgaactatttccgctccggagtatgatattcaccgctgtaggagtgctgtacaccatcatcgcttcgatgccatcaagggatggtcgtttctccgggagcgacgcgtccagctcatggacgacgagtatactgatttccatgaggaaatatggcgccggcggtgggcatcactggttactcccatggccaagtttgatccataaatagtccttgagttttatgccaatgc

SEQ ID NO: 122479 - DNA, 356 bp, Glycine max
ttaagctatatcttcgattgcagaatgtgtacatatgttttatgatgcgcagagcctggggaagaccctaccttaagatctattgaggttcaactatccaccgtgaaggataggtggatcttcgaaaggatgacgagtgtacactgtcatcgattgagataatagtttttaacgagaaaatatctagaattcaacgatggtgatcatgtattcaagatagatgcgactttgtctggggatgattgatcgttgtaattcttgaaacataaaccttgctttatgtgggagccatgacttccaagattgttatgatgatggggcagaatcctaagttatacaagttttacaaaattatg

SEQ ID NO: 122480 - DNA, 318 bp, Glycine max
aacaacaataacttttgtactgcggatgatatgatagaatactgtatcagacatacaagctagaagttgaatgccgaagctctgagcaaaatctaacgacaataacttttagactctggagacagaacgggacccagaaaatatcccgacgctcagacttgaagtgcctaagctttgatcaaatctaaaccacaaaaactttatcctctgaagtctgaacgagacccgaacaaacttccgacgctccaggtggagtgttgaggatttgatcaaagtcaaaccactctaactttttacttggaagttagaacgggaccc

SEQ ID NO: 122481 - DNA, 272 bp, Glycine max
  unsure (1)..(272): unsure at all n locations
tcgagacgctcgatattgtataccgaagctctgagcaaattcaaacgacaataacttttgtactcgagtgtctgattgagtgccgtaatatatcgagacgctcggacttgaatgccgaagctctgagcatattcaaactacaataactttttactgagatgtcggattgagtcccgtatgatatcgagacgctcggtattgaatgtggaagcattgagcaaatccaaacgacaataacttnttactcggatgtctgatttgagcccgctata

SEQ ID NO: 122482 - DNA, 230 bp, Glycine max
caccctatgatgctaaagaggcatggctcacatactcacatcttgtggaatcccttattacaagaggtcctcgaaaaccatcgggcaatgctaagataaatcaaggatttcaattcgcaataaaagctgacactgtgttatcaaaaacacatcccaggtcttggacttcgcactataatccaaacaataacatgcaaaggctcacgagtgcgataaaatgcatatatact

SEQ ID NO: 122483 - DNA, 256 bp, Glycine max
tcctctttcgcgatttatctagctttgcagacaaaataattttagaggtgactacgcttagagctagaaggttttaatagaggactcattgatactaagttggcaaaatgttataaagctttcacaattctcttgtattactccaagatttttatccatgcaaactattcacactctaattgatcaaattgcctggaatgtacctattggtatgttccatgttcgacgttaataattaagatggatgatctattct

SEQ ID NO: 122484 - DNA, 524 bp, Glycine max
  unsure (1)..(524): unsure at all n locations
tcaagctntataagcgcgcgctcnggagacanaggtcaagcgttcgcgatatgcgaagattatattccgagtactttggatgtggtacgaccatgccctcctgatttccagctgggaaattggcgagtggaggaacgccccggcatttactcaacaagcataatgtaaacctttacgggtttaaaagctctatagttgggcctaggctttagagattttccttttgttaaggctttgtgtcttttgtttttgaatttataatacaaggatctttcttcatctgttcctggtctctacccattctcatcatttgcatgtgtatctttnttctgaaatggcagatccgatgacgagtccctcgaaggtactaatacctgtgacccgtctatcgacttcgagcaagaaatgaatcatacggaagatgaatgaaatgatgatgtgggacttnccccagaactagaaagaatggtcgcccatgatgaccaagaaatggggcctcatcaagaagaatcagagctagtata

SEQ ID NO: 122485 - DNA, 221 bp, Glycine max
attgaagagcctgactctgtgcatctcgtgagagcatcctatgattaaatttgagcgagagcatctattgtacgcctgaatccgacctcatgtgtagaagttatgaccatgtgacatttttgagagcatccgacgatcattttcgagcggcgctatctgtgatgaaccttaatcggacctcggtgtgaacaagtatgaccatttgaatttctcgagagcgt

SEQ ID NO: 122486 - DNA, 151 bp, Glycine max
cctattgaactcttcaagcttcctccatgcagcaagtatagctgggctcaccccacctcgtttatatattacacagtacgtgtttgcagtatgacagagcaaatgccactcacgctctgtgatatactctcatttatggcatacgacctac

SEQ ID NO: 122487 - DNA, 475 bp, Glycine max
  unsure (1)..(475): unsure at all n locations
agaagatggtgaggaggagaacactctatccatagtantgtatggngacctaanganttccagggagcccatagaactctctaagtctcactccatccagcaagtagaactgggctcaccaaatcttggttatatgtgacagagtgcatgttgccactataatgtagcagatgccacgtaggctctggtttatctttccatcttatagcaaatgacctactcatttcatcgtaagactacatttaacaaataaattaatataagcaaaagtactgttattatcaagtcatatttattgtagaatagtcttgaaataatttataacctgatcaataacatgaatacgtgtgaatatttcatctgattcctttgtaatcttcatcattatgttagtcagtgtcttccatttttcttgatgttatccatgggttgcaactcgatttacattaaactgacataatatgctgatcatttg

SEQ ID NO: 122488 - DNA, 386 bp, Glycine max
tagctaaataatataatcactatctacaggcctgtggctaaatattcaggtaaatggaagagtatttgtttcttgtccttgaactggaatacactctttgtttcaaggcaggtcctgaatttatgcatttggggtctgagtttaatctctattgttgactcatcttgtgttttgcattctaaaatacaatgcagcatgattcattcttcaagcaacaaaatttgagtgtagaaaaatttctgcaatctctccctgctaaaagtgtacctgtcattacatctcatcacctgatgtggatttcttaagaagagtaagatcaagctttagttctggaccactggcttcatcttccgttgctcgagcagtctaaacttgacctacaccaa

SEQ ID NO: 122489 - DNA, 268 bp, Glycine max
aaaaaaaataagctttttatttataaggagagttgggactacctggcatttctatgcccaatgaaatgttgataaggaaatgtgaagatcctccctatggcgattgttgaccctaattatatactgtactcgtctgtatatcacctactcaattgatcatattgagtgagagcatgcatgctcctcgcaaacctttattggaagctgacatgcgaatattgcggctatttaaaacaatctatggcaaggttaatttatctcttcctaa

SEQ ID NO: 122490 - DNA, 226 bp, Glycine max
  unsure (1)..(226): unsure at all n locations
ctgaactagacagtaacatcttgcgacgctatccaactcgcccctgagttggggtgtgcaactatgttccgctactttaacactgtatgccanatgcggatgtggtgtaagctgagacgaaattctagcacgtcttatgtctgtagcatgcctttgttcttttaaatgcgactgggcatgcaagtattatatataaagcatatgggatgtcttctactaattcttg

SEQ ID NO: 122491 - DNA, 307 bp, Glycine max
ctataacgcaacatggcggacaaaagtgggcagtaaacctgaatgggtgtcattgtcaatgcgaaaggtattctgcgcttcactatccatgttcacacattattgcagcttgtggtacgtgagcatgaactactaccaatatatagatgttggtatacaaacgagcacatcttataagcttactccgcacaatggtggcctcttgggaatgaaacggctattcctccttctatgacacatggacacttatccctgacccaactacaattcgtgcgaaaggtcggcgaaatcaccaggataaaaatga

SEQ ID NO: 122492 - DNA, 289 bp, Glycine max
atgtggggggttcgagaaatatttgcagtacttgcctagtggagtcttgccgatttcctatcttgaatcatgccttcatattatggtgaatccatgaaacaaacttctcgttgagacagaatcttgatgagttcttctcatgaaacttgaaagttaactcgaacttgaactctgtgactcaatcttgaagtcatgctttgggctgtgtggcatcatctgtggcattatcaaaactacttgaatcatcttgattcatcatcatgaagctggcttctacaacacattgatg

SEQ ID NO: 122493 - DNA, 348 bp, Glycine max
gaatttgagaagaactctcttgaaaaacaaaattgtgctatgttcgtttcttgaaaaatatttacaatacttcccttgtgaagtcttcttgatttcttctcttgaatctcgcattcatcttctcttgaatcttgaaatcaaacttctcttgattcttgaatcttcttgatttcttctcatgaaacttgaaattaaacttgatcctgaacttgttgactcaatcttgagatcattctttggcttgttgtcatcatctttgtcattataaaactacttgaatcatcttgattcatcatcatgaagctcgcttctacaacacattgatgaagatagctttgctactgatgt

SEQ ID NO: 122494 - DNA, 427 bp, Glycine max
  unsure (1)..(427): unsure at all n locations
acaccccgattgataaagttcagcttacaaatacagtagaagaatagaatatgggaatgaatcgagtcaaatccaatctagggagaaaagaagaacaccctattggatagtaaacaatgccaaatccagatctcgtagatcatagcactttgtagcaactataatgacttagtatcgccttagtctaacttaaatctccaaattcacaataacatgaacgggtaacaaaacatattgtgtggaaanataatcatattctctactctcagcttactcaatatcaatcatattagttagtctaactagggtgttgaacatcacaacagagacagaccattgaacaatggattggcatcattaacatacaacagagacataccttcgatgtaagcgcaaacacgaactccacatacgcgaacttcacaat

SEQ ID NO: 122495 - DNA, 311 bp, Glycine max
  unsure (1)..(311): unsure at all n locations
gcttgagcgtatactaacgaacnagactctttctctgattctcgagagatgtccttgacctatcaaatcgctacgaacttccgaccgaaggtcgcagcgtattctaacgacactggcattacactcacaagcccgagtgaagtccttgtcattcgagacgctcgatactaaagacctaacttcggagcgattcgaacgacactagcactctactcggcattccaatgagagtgccgtagtctatcgagacgcctcgaagctacgacctaagctcgcggcgcatgcttacaactatgacctttacctcgaag

SEQ ID NO: 122496 - DNA, 272 bp, Glycine max
cgaacaagcttaggagtctcaaagcttatagaagtcttttttttttataacatgcgtacacttgttggagctgtgatgaatgatagtcttgtgacacacaacacaaaggtcaacttgtctaccttcttctgtcgtcaagtgtgtgcatccccactctctgtgtatgtccctctttctatgcctccgttgaagcctcctatccaagctccttatcctgcgctcatcttgtggggaagctccatttccaagcgtattccctagtggatggcgcc

SEQ ID NO: 122497 - DNA, 295 bp, Glycine max
  unsure (1)..(295): unsure at all n locations
acctgtgtggaagcttcacaagggtggttcttatttgcttcatcaactgcatccctcaagcccttcattgtcnggcccaaattttgtgtaagatatttggtagatctatgcagaaccaacggtttgctttctgaatcaaaagcaaatatgttcttctgatagttacaagcttctgcaagactcatatgcagcattctgtttcctctcggaatcccatgaagaggtgggggtctacagacaacagtacagataagttggtagtaaattttcttttttaaaatgataacaaaactta

SEQ ID NO: 122498 - DNA, 103 bp, Glycine max
gtgagaccttgctcggcctttgagaaaggacaataataaagactgcatcactcacttataacggaggacagcctgccctctcttctcagagatagtctacata

SEQ ID NO: 122499 - DNA, 391 bp, Glycine max
atatgggataatgatccaagtatgtgcgaccttgaatgtgattcttaagaagaattatatgaataacaagaagatgaagaatcctccttacgagacaagatatacagacctccgtctctttagctcaatgattatctagaagattggcatgggctatatatgaaaaaaacattagccctcttactataaatacttttgagatcttacaaagagggattttttcttactattaccaactgattatcttggttttgtctccctgatacactccaatgtgacattgatcccttcacttctaactattcttgctgtgtctttatacacatatattctggtagaagactcggatctacctatttatatctcatctttcgtaatgaatttcttgtgg

SEQ ID NO: 122500 - DNA, 204 bp, Glycine max
cctcttgtgaggggcttctggaggcgtcagacgactctgcctggcaagacgaccacgaatgagactcccatctcggccgcctgctccatctcggagatccgttcccacatgaactaccgcaaccgaacatatttcgacatattctgtgcttacccacacccgtgatacaatacgttgccttcgaggtagatatcggaaatgatg

SEQ ID NO: 122501 - DNA, 204 bp, Glycine max
gatttaagccaagcctctactcttgaggggcaactcccgccttatgacgactatccctggcaagacgatgaggaaggagatacccatcttggccccatgttccacctctaagatccgtcccctcatgaactaccccaactcgaacatagtttgccatatcctggcctcacccacacccggtaaagaatctgtatccttcgtgga

SEQ ID NO: 122502 - DNA, 438 bp, Glycine max
  unsure (1)..(438): unsure at all n locations
tccttcttcactacatcaagaatcatcgggttgagtcttctctgtggctatcttactggtttagccgcatcttctaaatatattcgatgcatacatgtggatgggctaataccaggaatgtccaccacggtccagcctatagccttcttatgcttcttgagaactgataacaatttcttctcttgctcatcaacaagggaggcagatataattactggaaaactcttgctatcatccaagtaagcatattntaaatttgatggcagaggcttcaattctggtgtggcggctggatagtggtataaagagatggttcttagcctgtacctcatanagaaagtcatatgtatgtgttcttcctgagacatggttagttctatctgactctattaaatcaatctcaaaatgtagaacatcaccagacatgttatcaatatt

SEQ ID NO: 122503 - DNA, 339 bp, Glycine max
  unsure (1)..(339): unsure at all n locations
atggcctagagnatctcagggtccacttggacctcatttctaccaactacaaaacctaagagaactatattatctacacaaaacgtacacttctctatatttgcatagagggagtttttcctaaggactgaaagaactngtctgagatgtcctaagtgatcatctatgctcctactatacactaaaatatcatcaaaataaacaactacaaatctacctatgaaatcccttaagactgatgcataagcctcattaaggtgctaggagcaatagtgagcccaaaacgcttcactatccattcatacaaaccacacgtggtcttgaaagcagttgttcact

SEQ ID NO: 122504 - DNA, 286 bp, Glycine max
gagagactatattcttataaacccacgcacctttataagctatgttaacctgctggcatgatattggcgatgatagaacatccccaatctcttttgacatcacacataactatgaatgtatatatgtatctatagatacatatatgatctgagtgatatatctatatatatataccctgatcttaaaaggtgttccacaggctgcttgttgagcacttacaagagcatatggttcaaggcacatttactctgtattctggcgagggtattcaatggtggggaaaag

SEQ ID NO: 122505 - DNA, 384 bp, Glycine max
  unsure (1)..(384): unsure at all n locations
actttgtaagctatntaagctaagtctagtcctacaagagggatatgaggatgaagcttactttaagttagtctaaacctaggagggctgtctaaattgagcctattccaacaagatggatctgaggacaaagcttgaattgattcaatctaactggggatcgaggtttagtaacttaggccacaacatataacacaaaagcatgatcgatcggtgtgctttccggtaaaccggatttcccttgaacattgttttataaagaaaaaagtggacaaaacaataactgcaggggaatcctaacaaagtattcatggcgccgttgtcggcgaactagatttaagaagagtttatgtcacgtttacgacattgcttagtattctctct

SEQ ID NO: 122506 - DNA, 398 bp, Glycine max
  unsure (1)..(398): unsure at all n locations
actcaagattcaagaatcatgagattatattttcaagataagttatgaaagagtcttttcgaatactgagtagcacatggatgtttctcaaaacatgtttaccaaataagttttactctctggtaatcgattaccacactggtgtaatcgataaccagtagcaaaatgtttttgaataagatntcaactgaatctacaacgcttcaattgatttcaaaaagctgtcatcgattacaatgttttgggaatcgataccaatgcgctagaatgttgaatctaattcaatgcgatgagcacattctttcctaaaaaaactttgtgaatcgattcactcgtttgtaatctataccagtgagagttcgaacaataaaagatgtactctcaaaagctttgacttt

SEQ ID NO: 122507 - DNA, 377 bp, Glycine max
caccctactgatgtctttgcctttacatggacttaaacctggattttggccatgtgatgaattctctgctcttgcaagtactaaaaacttgcatctctcctcaacagataaaacccattgagaatcacttctcaacatgttagcaagcaattcagaagcaatcgaattctcaccaatatggagagaatccagatttggagcggtaatctcataagcatctgcaagaacccttgtacgctctaacttagcacagacatcattacacatcagattctctgtctaaagggagctttttcgccatttgcagccacaggttgaagaagcacaggcaactttggaataatggaagcttcatgtaccacatcagcattataatt

SEQ ID NO: 122508 - DNA, 273 bp, Glycine max
acccaaatggtctaacaagactggtaaacaaagtgagagaactgattatgctcctaaatgtgaaatactgatcttactttgataagaaggctctgcggctatgggcagacgtcgacttataggccaggacttactataactatctcccgaagaggcatacatgaacatataggcgaatgtatccccatccctgttcgatggaaaggacatttataactgtgaacgaacctcaattatatgtcagaagtagactcatttaactcctactactat

SEQ ID NO: 122509 - DNA, 437 bp, Glycine max
gtgctcgtgcgcgtatcgcaattctgagctgcttagcgcacattagtgatattctgcttagcacgtgctgttctcgctcagcggataaactgaagcggtgcgcttagtgagatgaagcggtgccctcagcgaacctatacagctcatcttcttgcagattcttcctcgcgcttaactaatgagtgttgcgcctaagccagcagattggcttatcgagaatgttaatacaacactcttcagagtcgcctaattaacctgagattcagagaatatgattattatacacacaccacggaagtactaagtatctattacctatacttagtagaaagtacttattacactattaaataaccataatttggggaagttgatacaattacacaagtttcacacaaagttagtcgtttatcactacaactcccgaattacagttt

SEQ ID NO: 122510 - DNA, 336 bp, Glycine max
  unsure (1)..(336): unsure at all n locations
cggttactccttcttcactacatcaagaatcatctgtgttgagtcttctctgtggctgccttactggnttaaccccatcctctaaatatattcgatgtatacatgtggatgggctaataccatgaatgtccaccatcgtccagcctatatccttcttatgcttcttgagaactgataacaacttctcctcttgcttaccggctttggagacagatataattactggaaaacttttgctgtcatccaagtaagcatattttatatttatggcagacgttcaattctggtgtgggtgctggataatggtagaaagagatggtagttctatctgactct

SEQ ID NO: 122511 - DNA, 441 bp, Glycine max
tcaactcgatattctcttaagtaaaacctatccttcttattgaattatgtccccgataaatattattaaaacgtgtcgacattattaatccatcttaaataaataaatgatattgtttctcacaatattttaataatagacgactttacttgtaaattgtaatccgattaattgctaaatatagatctctctcaataaagattgagtcgtaattcatcacttttacaattgtagtccttttactttaaattcattaattaataagcgatgcactatccttgttcaataatcaacttattgtttaataaattctttaaagctcgattagcattcattagatgtatgtattattttccaaacatccatcttataaaccagaatgtctgtactattattgttgtcgcctatatctggtgctaaactccgatattcattgatcta

SEQ ID NO: 122512 - DNA, 297 bp, Glycine max
agccgtggtatcctttccttgttttgaaactcactaccctccttaaatgtaacaccatgatattaccacttccttagagaatgtcgcaactatgctatcctcttagaaatacatgtagggtgttgctgtctcatggaacaacttctctacttagctttacatcctgatgtatatgagcccttaccaccatgacatcttatatgcgcataaagtgatggacatgcttactgaaacgacgcttcctactcgctgacgactaatatactgatttccctgaagaaataggacgtctacaga

SEQ ID NO: 122513 - DNA, 435 bp, Glycine max
  unsure (1)..(435): unsure at all n locations
tctagcacaatggacttacctngaatatattcctttgatagcctctttgagccttgtttccctttccttgttttgaagctcactacaagccttaagtgaaaaaccatgatattaccatatccttaaggaatnttggagctctggaattgtnttgggaataagtgtggggggttgttgtttcattggacaactcgttctgttggctatgcttcatgatgtattttgtgccatacttgatgtacattgtatattggttaaatgttggacatgctgaatgaaatgttgtttctaaaggctaaagagttaaaaaatacataatctaaaaataaataaaatctttatatgaaaagaaaacaataaagtgagtgattagatcttaaatggccagaatgagaaactcttggtctactttcatgttaattataacttacttct

SEQ ID NO: 122514 - DNA, 363 bp, Glycine max
ccctagatctacttcaggaaacaaggatgcttgtgtgccagacagccaacacccctatataaccaaccaactagaatagctccgaagatgatagtcctctagctgccataagcatggccaaaaatccatgtcaccatgatcgtacgaagcatgtagagattgacagacacttcattaatgaaaaaattgaccaagacattataattgttacccgtgtaaccaaacacagacattctaactacagctcttccaagacgctcatataatgacatcataatcaatctgggaatgatagatatctatcacccagatcgagggggagtgtagatgattgtggatatatacagaatcatgcgattctga

SEQ ID NO: 122515 - DNA, 155 bp, Glycine max
gcaactgtggatggtgggtttacttgtgatctgtggatgtggagaagtgacttgcaccatctgccgaccaccacctaataccacatgtgatgggtaccccataatcctactagcttgaaatgaggaagtgtggaatggtgagacttcctactttt

SEQ ID NO: 122516 - DNA, 200 bp, Glycine max
  unsure (1)..(200): unsure at all n locations
cattctgacgcggcatatccattcgaacagaggcgatcgatcataccatactgggtgcgaagcgcaccaagtgaanttggtgaggcgtggtttacactctcacactggcaacctccttgatggaagcattagctgtgcagctgtcatgaatttatagcaacctatcgatcctgggatcaaatgatgaagctcatttgact

SEQ ID NO: 122517 - DNA, 299 bp, Glycine max
agcctggaacattatcatttattacattctccgccggaatatccttccggagagaaatgttcaattatatcatactgagtttgacgagttcacagtagaattggagaggcgtaatctacacaaacacctcaccaacctccatgagggaagcatagatgtggcggctgtcaaagaattttatgccaacctatacaaccctgcggatcagatgatgtaaactccattggagctcgtgcgcctatgatcttcttcatcaatggattccttgcttcttggaggatgaatgacagcggaatgga

SEQ ID NO: 122518 - DNA, 222 bp, Glycine max
aggaactaaagaatttttattttctgaaaaactatcatcattaaattgatgaatacttcatatcaattacatgaataaaaataacaacagtaactaatgtttatattgtatgaaaattctaaatttaagttaatctcctaagtaaaataaattaagagaaaaataccggtgttattattataattaaaaaatgattatttgtataatataaataagaataat

SEQ ID NO: 122519 - DNA, 413 bp, Glycine max
  unsure (1)..(413): unsure at all n locations
cttcgattcattctatgtacccgtagtggtccacattgtgtnttgtgcatctttattctcngtttggttactttttatacccnctggtgacgtgcttaagccattntacttaagtcgtttctcgcttaacttaaaaataaaataaatttccaccgaacgtttgaattgtattatccattaacttcggttaaaataaattccgaccgttcggtcatgccgtaaccacgttggaaatcaaaaaagaaggtaaaaataatataaattataaanaaaaaacatcttttagtaaaataaagcggagaatcaatcggacgttnnttctttgggatgtctcattcttaatcgaattgattaataactaaagtgaaactaaggctaaaatcaactcgcctagtcaagctcgtctcacaaaa

SEQ ID NO: 122520 - DNA, 437 bp, Glycine max
  unsure (1)..(437): unsure at all n locations
actcagctgaaacacaacaccgtcttcgaagaaaaattcacttttttatgaatctaanataaatctatatatatatatatatatatatatatgatctctcacggtcaaataataaatcagacagataggagtaatatgatagcaagggaattaatcattatttttacttatctgtaaataaagataactacccatcagattcagacttcagtccactcattaaatgttaagaaaatgttgaaacaaacaatacttgtctcatcaatcctgtgcattaccatangagggttccantttcggaggattacaagtcaagagaaacacctacctcttgaaggtttgggcagatcagtattgagaacagcangattgcccccggtagtgtagaaagtgaatgagaggaatgctgaaattgaatgatatctttcattgaatat

SEQ ID NO: 122521 - DNA, 85 bp, Glycine max
gggaactactgagggatgaacaattccttttgtgaatcacaaaagcgaaatatgatgaccgcatgactgcaaactcttcaatccc

SEQ ID NO: 122522 - DNA, 417 bp, Glycine max
  unsure (1)..(417): unsure at all n locations
catgctactcaaagntggtatatcgtgaagcatgcttatatgtacatgaaatgatgtatcanaatgtggaatcttgccactcatagttcctatctcgtgaaacatgcttatagggtctcttacatgaaatgatgtatcatatcgtggaatcttgtcataaataaagctagtcaataataacttatgttgccataaataaagctactcaataataacttgaatcacggaccactcaaacatgcttaagttgtgtatattggactccagcaagtgtgagacaatattatacaagttaagatatcagaaggtcatactntggcataaaaccattgtgtcaaccattaccttacaccaccctcctttcattcttctccattcttattntcatccttctatccatatgtgttggtcttcatt

SEQ ID NO: 122523 - DNA, 482 bp, Glycine max
  unsure (1)..(482): unsure at all n locations
ctcgtagttcccgtgagctnntgggtttttgaagtgagatggaagaagtctgggtgaagaaaacgttccccctccacccctctatattttcgtacaggggttgctcgcccaagtgagctcagctcgcccaggcgagctaacctgtactttttntttttttagaaacattaaccatgcctcccccccttacgggttagcgtttgcctactcgaacctacttaagttagaatcaggcgtcgattactttatttaaaacaaataatagtaataaaatactgtgaattcaaggatactggactgccatgcagcgacgttctctacttgtctagcgccgggaagggacaacggtcggccatgaccctatcctccatttgcctccatccataagtacctgcaagtaggagacaaacaatacgcggccaattcgtgaccgccattgtcttaccttggttgtntcttgcatagacttgcttgacttctga

SEQ ID NO: 122524 - DNA, 373 bp, Glycine max
  unsure (1)..(373): unsure at all n locations
aataagccctnntcctctcctcacgttgattctgctacttttctcctccaccattgaagttccatcaaagctccaacctttgctcaccatttctgctccaaatcgtgaaaggaagccatcttcggagttgtgaagcgcacctctactttgtgagacttcaaatatcagggttgggtagacttctttctcacatgattatgcgggtattgggtgtttgggagatatgatgggtagtttctactaggtgtatgccttacggtacctatttgtgaaagaatttggtgaaagcatgctaaacttgtcatgtttgtgtgagtcagacctacccattctgtttanggttttatgatgatgcttgcgatgttcgtgtgct

SEQ ID NO: 122525 - DNA, 398 bp, Glycine max
  unsure (1)..(398): unsure at all n locations
cgagggtacttacccgtgaagatcgaagaacgatgaagaacgaatgattatcgtcgaagaacggttgaaacctttgcgagattcctcacggaaaacgttacggaaacgtttcggaagcgcctcggcttagattnttttcacggaaacaatttttccaagcaaattctaaagggagagaagtgcctaaggggctggcccccctttttcttcttgcattcctcccctatttatagcaaaataggggaggtggttgccgcccagctcgcccaggcgagcagggttgcttcctccaaagcaaccgccttctggaggaatcttctggagggcccaaatgggcctgggtgctatttgcacccccatntttactaatgtacaccccctctgcttgtttttggtga

SEQ ID NO: 122526 - DNA, 502 bp, Glycine max
  unsure (1)..(502): unsure at all n locations
actaagcttatggcggacactattgtattgngtcacagtcgttaagattgtttntgttgccaaatattatgatcacttaaccaaggctgaggaagcctcttangtattgcttattccttgtcttgcttctttaattcctccctgttctagaagggtctcctctgttatagtctcctcctaatccacctcttctcataacttatcagcattgtctatgtcccatgctagtcaaggaacctcccgttgaaagttcaagtgactcacatccagtcttaatctcttatgtcatgtccattgaaaggtattcaatatcttaattctcctagtgatgctcatcgcgatgtcgcggctagaaacctgaagtcattctgattatatctcatatattgatgcaaattaggtaagtggcccgactaacagtcgatctacttcacgttactcgtgtcttaatagatgtaaattcacttcatggaagagtacaagcataatgttgacccatcta

SEQ ID NO: 122527 - DNA, 441 bp, Glycine max
tgcttcaattcctaacaaaacgagaaaagaatatccgtattataatgaacaacgtgtggtcttatgttggtactaactagtaacacgactataacatttgtaataataaaaaccatcatacgttatactatgggtagtgactagtgacggaggatggagctcagtaggtaacatgttgagtctgataaaaaaaaaaaaactcaggataaattttcacgtattgcatacttagaaagaatgaaaagttttaagtattactgtcagattagttctataattgattcaaagacaaaagcttaattatgagcatacatcagaatcttatcatgtcgaaaactctaattatgataattaaaaaaattatgaggggtagaggatacctcggagtgcttatatttggtgggtgaggaaggcattcgtggttcggaatcagagaaagat

SEQ ID NO: 122528 - DNA, 484 bp, Glycine max
  unsure (1)..(484): unsure at all n locations
ttactatgtaatttattattggcattgtgtgttgatgttgattntgtgatgctcatntgatgaatattgngtggttaacgtgttnttatcattctctggtgctggtgtagattgaggagtggatttctttgtttttaggtcaaatcatgatcggcatacatttgcaatctcgctcagtgagcaaatccctctgatttagaaaatttagaaatctcataagactcgctaagtgagcaaacctcactggaaaacaagaagattggaactcactaagtgagacacacatagttgtttagctagaaatgctcgctgagcttgtcacttctttgtattatggctttagagtttccaaaatataattaatagttaatttctcttcttagtaatgaataagattaattgtgacattaacatagagataagatgctctgtattacacaacttcgatagaactataggaatgtcttgatttgaaaaatatagt

SEQ ID NO: 122529 - DNA, 319 bp, Glycine max
aacaaattctttgtgaataaataaaatgtatgaatcatgtacattctataagttggtatgttggaacagaaagtagtgataacttggttgaaataggaaacgatgggaaatgatgattcatctgaattgccagcttggttttatgttgctattctattctcaaggtatgtttgaatatccagagaaaccaatatttacttctaagccatgtcaacctgttaagcccttatgatccatgatgagtatggactctggctttgattgagggaaatgactgtagatgatttttacctatatcattgacatggatgaacattgc

SEQ ID NO: 122530 - DNA, 414 bp, Glycine max
cttggtattgtgagatgattggttaatatgatttgtttgaagcagaggccagttggaggatatggcaactcatatgtgctaatcgacagtgggattaataatgttggtggagccaagcgtgctcactcagaggtggcatctgctggtgttccacgggaacctgccagtaccaggcctttgcatcagttaagtgtgtcaatgttggagaatagtcaatggatctgtgaaactgttgagaaggagaagagaacacctatagctaaccaattttatcgtaactcaagttcttgcttgcgaaagacaaatatccacccgcagagagtaacaagaagtcgaaattgaattggaagaagcaatgtgggggagaaatggacatggctttggatggatctacgtattcaaagctgtagttac

SEQ ID NO: 122531 - DNA, 257 bp, Glycine max
ccttttttttgtctgataaacatgactaccttcctcacttaagcccactcattcatacggagttaatagacaaggattatgatatgtgaacatagagcctggaatattacatgcatcatcgggtggggacctaacatgtgtcccatacaatctcacgtgcacccatttatcggtgagacattgtataacattcaccatacctcgatagagagcacttttgtactaatcaaactgtatggctcacagatataatcata

SEQ ID NO: 122532 - DNA, 468 bp, Glycine max
  unsure (1)..(468): unsure at all n locations
ctaagctatgctgaccctggcaaacagctacacacgatatatgtccaggctatgtgctggccactggtccctcgatatcgtaagcacttgagatcactattgctaccccacagagctgaggaataataattccggtcatactctggcttgccagacatcttggtgtatagttcaacggctctggtggtgattgcattactctaccgctaacgagcatactcctttctgatgtgtgaagcggccgacttgaacacatgctttganagaatgcctgctctaactcactctcgagagtgtgactggtataatctctaccggtgcacacaactgtgtcgctgacgacttaactagcgagccagtgtaagctcgtgataactttcaacatcatgggagcaccatgatgcaaacgaatgcgctatgactcgacattcttacggggtcccagcctatgatcttgatagctggatt

SEQ ID NO: 122533 - DNA, 241 bp, Glycine max
ccgaaataggcactgtggtgctgtggaatattgtgccctgcgcattgtactctaattctacacaagacaggctgttaataggctctgaatctgcgacattgcgcttagcgtcaccctcgcgcttagcgcaggtgagtggattcgagcttaacgtcaatcgtgcgctgagcctagctgaagacacctgctgcgcttagcgcactaatctcacacttagcgcgcgacctcatgctgatgccct

SEQ ID NO: 122534 - DNA, 390 bp, Glycine max
  unsure (1)..(390): unsure at all n locations
cgagatgaggaagtgtagaagggagaaacttcctgctnttattctttaaccacagagtggtacctggagatatgtcgcgggggtcaggagaccttgtggacgtcaagtggggtgctattgcccanaaccaagcttgaccaatcctgacccaacccgggcatagtcggtcagtgagaacctgtgatgtacctaaacatgcgagctcctggcagtcaacagataaaaggaacaaagaccacaaagcaaggaggcttgtggtggctggccagctgtgaattatgtgtgatatatggttgtggcctctggtaatcgattaccaagggtgggtaatcgattacaaggcttaataatgaagacaggaggctaagatggtctctggtaaatcgatac

SEQ ID NO: 122535 - DNA, 189 bp, Glycine max
ggctgccccatattctgtgtctgccgagatattgttgtctctatccatagcgcatagctcacagaagtaacagattatggtgtcacacatggctgtgacactctgcatgctatgctattctctcgagaggtcaaatacatcttgagagcggtctacttgatccaagaactatagcgagcccttctcacg

SEQ ID NO: 122536 - DNA, 364 bp, Glycine max
ctcaaagattaacagattattgtattacagatggatgtcacactcaactctttagtctattctttgaagatgtagaatatattatgagagcttgttactttatacaagaattgatagaatgctttacacaagaatgaaagaattgaattttcgcgtgggattgggtcatgtctagtgctccacagctctttctatttataacctccatctttaaatgtgcggtgacttcaacagaggtaattcttcacttacattctttgctgatgaattatgaccgggggacaattgatcttgcattcatgaatgccctttcatatgcagagagtcatgtgataggtagcatgaaaacacttcatagaatgtt

SEQ ID NO: 122537 - DNA, 441 bp, Glycine max
  unsure (1)..(441): unsure at all n locations
ctaagcttagcttcntaggaatcttcttaggaagcttctcaggaggtgagcttattatgagaggggtgtgtgtagctaagctctagcttctcaaggaagtnttctcaaagaagcttctcaaggaagttntctcaagaaagcttctcaaggaagctacctagtctataaatagaagcatgtgtaacacttgttgtaactntgatgaatgagagtcttgtgagacacaactcanagttcaacttctctccctttttcttccttcaatttcgtgctcccccctctctctttctctccctctttctttcctccattgaagcatcctctctaagcttcttatccaaggctcatcttggtggtgaagctccttcttccatggcttattccctagtggatgggcgcctctctcacctcttctcctttgtcttgcgctgcatctccatg

SEQ ID NO: 122538 - DNA, 508 bp, Glycine max
  unsure (1)..(508): unsure at all n locations
tgttcgcccanaggactanggtgcanagttaggaacacagcgtttcatctttaatgagtcanggtttaattaatttaaaanaattgaagganaattgcccaataagaacaggcttatagggaaattacatggggaaaatcaccggagattctgataccaaattactattactcataaaactcttaaatatttcttaattgttnttttttcgttatntaattcgaaaaacttcaagaattttttaatccttctttaatttctaaacacaagtaaatttggttgaattgagattaaaccacattcttgagagtatttaacattatattacttgtaccactagtatactctgtgtgaccttcacaaccatcatctagtattaatattgtgtgcttacaatggtaatatcttgtcatgaataagcacttattcttaccatttctctttattgaatattattcctctctctcgatcatatatatataagggcgngtatgttacactgaatatt

SEQ ID NO: 122539 - DNA, 323 bp, Glycine max
gtagcactactgacggagtgtctatttttgttcctaaccctcccatcagtggtgcttcgtcctttatgcccataagcattaatacaggaactttccctggaacacctgcagttcgacttattggggactgtcatttcctccatagattatgccaactgttgctcttctggtttttttttcgacgagcacaacaaccccgctatgcgtgaggtgtacagagaactgctgacacatatttacaaaaaccttaacctaatgcttctgtccctgcaaggtggaggaaattgcaaaaccagtgtcaactgtggttaggccacatgatg

SEQ ID NO: 122540 - DNA, 325 bp, Glycine max
gagagaagctgaactctgagttgtgtctcacaagactctcattcatcacagttaccatgagtgtggccgatgcttctatttatagactatgtagctttcttgagaagctttcttgagaaaacttccttgagaagctgtcttgagaaaacttccttgagaagcttctctgagaaaacttccttgataagctagagcttagctacacatatccctctcataactaagctaccttcttgagaagcttccttaagaagattcctgtagaagctaaagcttagctacacacacctctctaatagctaaattgacctccttgagatgagaa

SEQ ID NO: 122541 - DNA, 147 bp, Glycine max
ataatgttacccttctagggtggaagccctatagccgggcctaagattcagagatttttccttctgaagaagatgggggtcttccgatgctgaatctataagacgaggatttatgtttatgttgtatctgaacttgacccattatta

SEQ ID NO: 122542 - DNA, 470 bp, Glycine max
  unsure (1)..(470): unsure at all n locations
tctttgggaccttgaacaagcaactaactcctctttcanaactatgctatgtgctcgcgactggtccctctcttcccttcgcagcttgagttcactattgctaccccatagagctccgcgaaatttattccggccatactcttccttgcgagacctcttggtctcttgttcaagggctctggtggtaattgcattctcttcccgtaatccggcatactccttccggatgtgtgtagcggccaacttgaacttctctttggcaagtttcgcctttcctaactcactattgagacttggacttcttcgtcctcttccggtgcttcanaactctcttcgctgacgactcttaacttggcgagccaatctaaacctcgtatatgaactatcaaccattcatggtagccaccactgatgccattacgaatgcctctaagtcttgatctttcctaacagggtttccatgccttatg

SEQ ID NO: 122543 - DNA, 313 bp, Glycine max
  unsure (1)..(313): unsure at all n locations
aactctgcaaaagncatccataagagacacaagaggcttaatatctctattcaaatatcaaaccttgcctatcacttcataataagacaaatccatctctcgaaagtttctgtgcttccaatatgtccttaagcttgccaatctccagagttataattgatgggtcaaagattaataatggaaattcaacaaagcatcctcaaatacaagtccctgatctcatcatacctaagatgctaaagaaacctagcgcattctatataaatctcattaatacctcacttcaggacctggaagacacgctaccctacaa

SEQ ID NO: 122544 - DNA, 261 bp, Glycine max
gtttataaggaacaatagatttgacaatgccatgctagatttaagagcttctgttagagagaggcctctgtctattttaattctctatctcttggtcccttgccgtcaactgatgtggttattcatttaccctatagaagtgttgcctatcctgctggtgtgatagatgatgttctacgttagatggtgaactgatttacactgttgatctttatattttgaatatggaggacggactctcctaaggatcattatcatcat

SEQ ID NO: 122545 - DNA, 463 bp, Glycine max
  unsure (1)..(463): unsure at all n locations
ctctagctnttcattggtgtatattgatctctttctgttgctctaatatgtgggaatgtgctcaaatatgtggggcacatttggtttgttctcttgcttgattaggttgaattggtggtttgtatgggatggccctatgcctataatgcattttgaaacaatgggacatgccacattgtccccattctcttgctattgatacctaaacgcgcgcccaccaagtgttcggggaaatgcctcaatggcattagcacgtgacttttgtaaggaaacaacccatggggcattttgtttgacatatttctatttttgggacatgcattcattccggaaaggcttaataattgtccacatatacctatgcctataaaccaagtttatgcatatgacacagaggaggtcatattggttacgtacccttctggcancatcagctatagcccactacatattttccttcgct

SEQ ID NO: 122546 - DNA, 217 bp, Glycine max
gactacctgcacccagatgacatatgtatgtatgtatgtggatacgacaactagtagttgcatgagtgtattatatgaactctgcagctgtatagatacttgcaacattttctgagaatacaaacattcatgttttaggatgctataagagctcgttcaataacgacatattgttgctaagagctgtctaatattatgaacgaaagctcgaagagat

SEQ ID NO: 122547 - DNA, 237 bp, Glycine max
atatactgacggatccctggcgggataggtctgatacttatgagcatttcttattatgctctgcccaaactggggcagcatgagggagaacgagcgaactatcttgactataatcattaatattgacgcgccttagcgtttctgaataaactgcgttacatttgatccagctgagaaagctttgcctgaacattgtgttcttactgcgacacccaacttatcatagatggcccttaa

SEQ ID NO: 122548 - DNA, 433 bp, Glycine max
  unsure (1)..(433): unsure at all n locations
actccacaaggtgtgaagtaaaggagaccttcaaccctataacgcaacgtggtggacaaaagtgggcagttaacatgaatggtcatcattgtcaatgcggaaggtattctgcgcttcactatccatgttcacacattattgcagcttgtggttacgtgagcatgaactactaccaatatatagatgttgtttacacaaatgagcacatcttanaagcttactccgccaatggtggcctctcgngaatgaagcggttattcctccttctaatgacgcatggacacttatccctgacctaactacaattcgtgcgaaaggtctgccanaatcaataaggataaggaatgagatggattgatcaaaccattcgagcaccgaccaaaatgtattaaatgtggagccgaangggcatacatgcatcgctgtgcaatgc

SEQ ID NO: 122549 - DNA, 241 bp, Glycine max
atggacattgataattcagtgtgtttaaatgcacaactctggctaattggctctctgatttaataagggaacactggcatggaatgctctttaatctatgactcgctgttagaacgttgctgctgattctagaaagacttgtatctcaactttacatctgaagcgtcttctgagcaaggtgatgggtctggaaaagaatcctcgtgtgtgtttcaatgtctcaatcgcggcgaccctgcgg

SEQ ID NO: 122550 - DNA, 501 bp, Glycine max
  unsure (1)..(501): unsure at all n locations
ctaagcgttgaanaattctcanacagagagttattagttgcaccaaatatgatatcatgcacatatatctagatgagtaggaatggacttctataatctttacgacatagagtagtatctacctttccataatctttgctttaaaccatacaaggctttattaagttcgaatacatgatgagggtagatagaactctcanacctagggggttgatccacatagacttcttccttgataagtccattaaggaacacactttatacgtccatttgatataacattataccatgatgagcaacaaaggtagtaaaatgtgttcgcctctagacgagtcacaagaacaaaggtttcactataatctataccttcttggtgtgagtaagattttggcaagtgcctcagcctgttcctcataaccctacctgtttcatctagcttggttctgaacactcattctacaagcgtccaggcatcattcttcattaacttgtgcagctttc

SEQ ID NO: 122551 - DNA, 352 bp, Glycine max
  unsure (1)..(352): unsure at all n locations
ctaagcttatcagactagtcntatgcttactatatntgatattcttcatttcattcatgattattaaactgctattataatcagaaaaaaaggtgttatgagccctatataaacgcacattgcttagagtaaggcgcattcaacaacaatgtgaggccatttaaataatatcctttgtgcttcacatagataccttgtctttttccacttaacatccattatcgtgcttcagatgaatcttccacattaactaggtcatttcacattttcggtctagcagatttcagacctttactcttttaaaagtttatggaaatattctgaaacagtggatttatataaatatgctcat

SEQ ID NO: 122552 - DNA, 400 bp, Glycine max
  unsure (1)..(400): unsure at all n locations
acaaactacttgaacaattcatactcatggcatcgcccttaaccagagcaagctcttttcatcgtgacctatccaggaataattgcatcacacaatgtcgacctgaccacccttgacaacgtcctctcagatcaatgtcgttggccatatcaacatcaccacatgtctatgaaagatcccttacgcgacatcaacagtcttgccaattgcacagatatatgtattactcatggctgagggacacactaccgaggtattccaacgacacctgatnagtcagctctagtgtttttatcccgagagatatatcacatgcatgattgtgagacatctgcgtgttgcatcaatatgactgcaacacgacaggctatttcttatggtctgatcctgacctaaatat

SEQ ID NO: 122553 - DNA, 327 bp, Glycine max
caataccttcatttttctcaccaagtataaagggatcatcttaaggtccaatgccttaaaaggaccaccttccaagtaaaaagaatcgcatgattcaccctcttgaaagaactacgtaggtctgatttcctcttcgatggagggtacgtatgagcaagagccccgcttttgtcgacctcaaaattaaaaaagaaataaaagtttagatacattatttcacacaattctaatctaaagctgttgtcctctgggacaacgtgagaggtgctaataccttcctcaaacgtaaatacaactcccaaatctggaatatttttcatgaccgat

SEQ ID NO: 122554 - DNA, 304 bp, Glycine max
gcttccttaagaagatacctaaagaagctagagcttagctacacatacctctctaatagctaagctcacctccgtgagatgagaagctagaacttagctacacacctcctattatagctaagctaacccccatgacaaaaaacatgataatacaaaaaaaagtccttactacaaagactactcaaaatgcgccaaaatacaaggctaataccctatactactagaattggcaaaatacaaggccacacgaaggaagaacctattctaatatatacaaagataagcgggctcatacttagcccat

SEQ ID NO: 122555 - DNA, 125 bp, Glycine max
ttacctctgagtattatgcgtttgttcagtgtgcaaaaaaatttgtatacgaggttttattgtgtgctactatcccctcacccaagtgaatatcatttaactaaagaagcttatgctgggtgcac

SEQ ID NO: 122556 - DNA, 256 bp, Glycine max
  unsure (1)..(256): unsure at all n locations
ccctatganagaggggttcgtttttataggaggcgtggcggtaaaatagcacatactagtgttcaacaaacaagattattactagacaattggaccagaaagattgacatctttgcccctagaatcctcatttgttactcctgtaatatgtaactgggaacctagtaacagagtttatgacttttcgcgaatattttgactgtcaaggtataacctgaatgccgaacacttgccctgctaaaaatggtcgaatgac

SEQ ID NO: 122557 - DNA, 294 bp, Glycine max
tacatggacgaagagaggagggatgcaagtggaactccttagaggatagaagaatacttatgttcatgagggtgactactagagattcacctgcgtctatttatagacagaggaactcccctcgcaagctttcttcaaaaaactgtgttgagaagctcacataagaaaacactcgtgcaagcatagtatgaagaacttccttgggaaacaggaggttaactacacacacacatctatatgctcatctgaccgccttgataaggattcttgtgaagctatagctctactacacac

SEQ ID NO: 122558 - DNA, 473 bp, Glycine max
  unsure (1)..(473): unsure at all n locations
taagctcgaagaggatgccttaatggaggaaaagaaagagagaaggggggttcactatattttaggaataaaanagggaaagaagtggaactttgaagtgtatctcataagactttcattcatcaaagttacaacaagagttacacatgcttctatttatagactaggtagcttccttgagaagctttcttaagaaaactttcttgagaagctttcttaagaaaacttcctgagaagcttctttgagaaaactttcttgagaagcaagagtttagctacacacacccatctaaaaactaagctcactccttgagaagctttcttgagaagctagagcttagctacacacccctataatagctaagctcacccgcatgacaaaaaaacatgataatacacaagaaatcctactacaaagactactcataatgccctgatatacaaggctaaaaccctatactactagaatgaca

SEQ ID NO: 122559 - DNA, 373 bp, Glycine max
  unsure (1)..(373): unsure at all n locations
ctttaaaggaagacatatacttcatgggatcctgattcttaatgaggtggcggaggaagcattggattccccaaaggatattccataaattaatttccttacaaaggaaatttctgtggggaggagacaatactcataataaaattccttgggtgaaatgggctgatatttgtctacccgagaatgacgggggatttggtataaaagatatttcnaagttcaatgtagccttgatgggagatggatatgggctttagcatctggtcagcagcagctctgggtaagagtctaatctcttatatggtgatggctgagtctacatgatcagatagactgatttctattgggacgaccttaaagattttcatcatca

SEQ ID NO: 122560 - DNA, 140 bp, Glycine max
  unsure (1)..(140): unsure at all n locations
taagntgaatgtacgctagcgccacttgcttctgaagaatcctttaattgtgttagcgtgacngagcgctaagcccttgatgtgtgtttagatatgccccctactgcactaagctatactacctcactgtcttttaagtt

SEQ ID NO: 122561 - DNA, 254 bp, Glycine max
  unsure (1)..(254): unsure at all n locations
tatcatgaactactctataccaagaaaacagggcagaggcagataattctgcccaaaacacattcacatattacagctntccttactcaataccccagaacattctcttcttctgattcataaccggtggatcgactcgaaaattttactggaggtttctagaacacatatctacaatacgaccggtgggatcttctagaaatgttcagaacccactatggactgtctttcctattaccatcgatgcacaagca

SEQ ID NO: 122562 - DNA, 93 bp, Glycine max
aaatagaataccggaccactaaactctgcagcttgtggtggctggccaacagtgaattttgtgtaatatgtgggtcggggcctttcgtgatcg

SEQ ID NO: 122563 - DNA, 291 bp, Glycine max
  unsure (1)..(291): unsure at all n locations
cctaagcaggcgagctcctggcagtcaacagataaaaggtaaacatgaccacaaagcaaggaggcttgtggtggctggtcctctgttaattttgtgtaatatgtggatcgtggcctctggtaatcgattaccaagggtgggtaatcgactacaaggctttaaaattgatgacaggacgctaagatggtctctggtaatcgattaccaaggagtgtcatcgattccatgcttgtaaacacatcaggaaacttatggagcctttagtaatcgattactngcctgtgttatcta

SEQ ID NO: 122564 - DNA, 254 bp, Glycine max
tctccgcgcaataacaccgctctcttgactaaccttcttttgatgccacccaaaagcagcaacttgcttacttttcagaaactctctgatccgggcgctttaccagaaacggggacataaatccctagatcttctaagcacgacgagtcctgaggaagccttttcagcccataaacatgaaaggtgacttaaattggacattactcttgcatgaaaatagcgtacatagattcctgaagactatgtaagctagc

SEQ ID NO: 122565 - DNA, 299 bp, Glycine max
acctagatgagctagtttcaactttgtatatgagtggagcaacaacttaaaagatagccttcttcaaaatcttatggctttcactcttatccaaagaaagacaaagcccaaggaattttgggggcttcaccttcaatacccaaggaagataatggtgagaccatatagaaatccacccctaagactagttcccaagaaaggactagcaacattaaatgcttcatatgtcttgtgagaggtcacattgtctcccaatgccccacaaagaatacctgattatgaggggtcaagacatttat

SEQ ID NO: 122566 - DNA, 477 bp, Glycine max
acggtgctcaacccattgatgaagaagaacatttacatggtggtgataattcctctctccttcaaaagatattggacatgttctatggtcttcacacctctgttggtgaaaggtttgatactttgtagttacaagtggacatgtgattcaatgagatggagtcaaggatcatcaatgttgaagaagatgtttcttacattcgtacaagctttgatctatcaccaccaccgccaccatcattttagttttctattatgtttaatattattagtactttgatttctagcgcgcatttggctatattattatgacatttgaacaatatagtatttctcttatttgcatagtttgattgaacaattatgaattatgttatatgactactgcggtgttatatatttgaactattcatgtctcttgttcatgatggggtagatttttcaatgaatgtctgtaatgattagaatgatgtctgtt

SEQ ID NO: 122567 - DNA, 114 bp, Glycine max
  unsure (1)..(114): unsure at all n locations
cgtgcctacgatacggttcaataacgattgtgagcgatgttctgcctaagtgaactcacgtttgacctatttcatcgtaaagactttttctntcatcctacatgtgtgagacag

SEQ ID NO: 122568 - DNA, 248 bp, Glycine max
agcttgttcatgaataactctgcagctgttcggaggtggaagagtgatttatcatctttcaatttggaagaatcaacttctttccctttgacaaagtcaatgtttccaagatggaggattgcagctaccacacggaagatcgcatcctgtgaaggaaaattttatttgatcaaatgtttggataaaatcaaaccactgcttcattagaacgtgatgcacttatgcacttgtccaatacctgctcttct

SEQ ID NO: 122569 - DNA, 251 bp, Glycine max
cattcagctttctaagaacatatttttaaaacatcaaaatctgatgatagaagaataagactgccttaaagaataagaattttaggaggctttcatctactaagctttttgtagaagtaatctctaatgagaaaccacttgttagcttccttcttagcataagttttgtcttccaaagcttgagcaagtgcttttctcattcttagaagcttagtctcgatgagtctggcatactctttgagggggatcat

SEQ ID NO: 122570 - DNA, 243 bp, Glycine max
agcttgtaattgattaaattgatacgagagatttctctgcaagctagaaacatttatgtaatcgattacgatcaatctgtaatcaattaaaatagaaagtcttaacttcaaaaaaaatcttctaactttataaactattcctcttactcctacaagatgatgcatgatgcacatatgaaataatagagactaagatggaacacacaatataacactcaatacaaatgccactcaagagagttg

SEQ ID NO: 122571 - DNA, 452 bp, Glycine max
  unsure (1)..(452): unsure at all n locations
agtttactcccaagtatctagggccgtatcagaatttgaagaaggatgggcctgtatcttatcaaatcgctttacctccgagtttatcgaatatgcatactgtggttcatgtctcacaactgagatggtacaacccggatccatcacatgttcttgcagtggacgaggtacatgtgaaggataaccccacctataaagcacaacctcagaagaatactgatcgaagaatgaagtcattgagagggaaggagatcgcgttggtgaaagtgcaatgtggacccgatgagggtgattcatcatgggagttagaggatagggtgagagaantttacctcagtttgttcatagagtagntaatatcggggacgaaaatccttaaacggtgggagtatcgtgacatccttggaaattctaccccgaattttgttaatgatgcattctgaatgatcata

SEQ ID NO: 122572 - DNA, 250 bp, Glycine max
  unsure (1)..(250): unsure at all n locations
tttgaccctctatagaccaacccgcacgcatgcaagcttacttataagaantttgttgngnnaagcaaagacacccattattttatgacctaaactatatgaaaacgcttaagaagatattaacacaaattgcaaggtgagtatatgttggcctgtgacgcacaacgtagataggcgcaccaacgttgatatattgtatagactctgaataagcgggtataatagaatgcccgaaacaatgcatacagtt

SEQ ID NO: 122573 - DNA, 242 bp, Glycine max
actttacttgtgaaaaatagtattcctctaatctttcattcttctctccattaaatgttggttgcagtgttgggcaaccatgactacaggggtgatgttgaagctcaattgaatccaatccttcggaaaattgatcctagatggatctgccaaagatcatttattgttgatactggtaaggtgacttctcggaatctcaatagaggttttatcctgaatagtaagttaagtagccttctaat

SEQ ID NO: 122574 - DNA, 159 bp, Glycine max
taaattgtaaactaaccttgacagaagaagctggttgctgccatgagtcacgtatgaaggagtaagatcggctccaagcacaagcagataaagtcaagaaaattgagctgcggatccacagtcgatcaatgtcagactctgccaaatctgatgctgaca

SEQ ID NO: 122575 - DNA, 236 bp, Glycine max
agcttgtctgggatctctgattaaccaagcaaaatcaagcgaaagagaaataaagtttgcaagtgataaaatctgcagaacagctcgaacatgataattaaccttcataccttcggatagaacctgcaagtaaaacaattcaactgaaattatatttggcaaaagatgagaaaagaaactaaaaattgtagatagatcgtaatctaataatggctaagcaaagacatcatctgaat

SEQ ID NO: 122576 - DNA, 232 bp, Glycine max
agcttaagctccttcaactgcacaagacttttaatatttgaagagtatccttgtggaaccttcacccgacaaagacactgacaaaaacttatcttctccttcttggacaaagtatggcaggctgggggcaagtaaattttcttcccatcagaccttggatgcaactgtgatcgtatacccatatcagctagatcttgacgggtattcaagccatccttcatcttgccttgaa

SEQ ID NO: 122577 - DNA, 230 bp, Glycine max
agcttttactaacttgaacatcaaagtatatgcaggtgccaccatctcaattgctagatcctttatagcatccaaccaactttcccttcccacaacccctcgatggtgtacctgccatgtcatagtagttaatgataaatccctcacattggacaaactgaaatgtaccctccccttgacccaagattaaatagggagcaaggttacaacatcacttcgatattttttaa

SEQ ID NO: 122578 - DNA, 231 bp, Glycine max
agcttatctggctgggctgatgaggcatgctttactgcaggagctcgcaagtctggccgaagtaggaacttagaagcatgaaatgtttgggagtctaacaaattggtggaaaatggtgcaaaaagaaggtggatgaaagaagatgtgtttggctcatataaattttgatgggcatgggttaaagaaaaagtgtgttggattgcattataggtatgtgaataatgagataag

SEQ ID NO: 122579 - DNA, 219 bp, Glycine max
agcttgcttgtggggcttctacggaggctggatctttgagcttcaatgaggtcctttaatggtgatttttcaccatggagatgcagcggaagacaaaggagaagaggtgagaagaggttccatccactaaggaataagccatggaagaaggagcttcaccaccaagatgagccttggataagaagcttggagaggatgcttcaatggaggaaaagaaag

SEQ ID NO: 122580 - DNA, 218 bp, Glycine max
agctttgtaactggaatgttaggaagatatcaaagtaatccaggaatggaacattagaaagctacaaagaaagttctgagatacttacagggaatgaaagatcacatgcttacatataggaggtttgatcaccttgaggtgattggttattcaaactcagactttgttggatgtgtggataggagaaaatccattcttggctttgtatttctcttagc

SEQ ID NO: 122581 - DNA, 252 bp, Glycine max
atgcaagcttcttagtctcgactgttgaagatgaattcgttgttacttcatgcactcctctaatgacaatagcatcacttccggcactaaattgctgggagtttgaagccatcttctcaattaaatttctggcttcagaaggggtcatgtctccaagggctccaccactggcaacatctatcatacttctctccatgttactgagtccttcataaaaatattggagaagaaggtgctcagaaatctggtggt

SEQ ID NO: 122582 - DNA, 248 bp, Glycine max
agctttgacttgattattatttttgctaaaggactatctttcttgatattacaagtagaatcttcatcaacatatattggaatgaaaaatcttgaattagttgtcataccacctgtaatcaacaatcttgttattccacttaaggaaacaattagaacaatttatcccctaccatctaattgttgcaaaaaatcgctctccaaataaaaaaatttcttattctcttgtatccatacaagaagaaaagt

SEQ ID NO: 122583 - DNA, 143 bp, Glycine max
tgaagttagtggaacttggtgtgttaccaacaaactttatgtagtcttagtgattgagatgaatcaatataaatttcttgtggcttattatgcttattttgtcttctggtctttaaactgacccacaagttgaacttgatctt

SEQ ID NO: 122584 - DNA, 243 bp, Glycine max
agcttttgacggactataccaagctctaggaaccagggacggagaaagatctatatataggcttgctaagggtagagagaggaagactagagatttggatcaagtaaagtgtgttaaggatgaagaaggcaaagtcttagtgcatgaaaaagaaatcaaggaaaggtggaaggcatatttccacaacttatttaatgatggatatggatatgactctagcagtctagacacaagagaagagga

SEQ ID NO: 122585 - DNA, 280 bp, Glycine max
attattgaaacaccacccaacatgaccgactatgtgcttagaatgaaaaattcattctactttggcctaacattacatatggatgacccatatatgacatggttggtggaaagaattacggaatggaaattgggaaaaatttctcatgtttgggttatttggagaataaagaggattttgaacattttgaccatttggcgtatcacaattaggcatccaatttgagtaaaaatgggattgggtgggatattgggatccattatgtgtaagagaaagaaat

SEQ ID NO: 122586 - DNA, 240 bp, Glycine max
agcttgagctcactgttgctgcctcataaagctccacgaaatttgtcacggccatgctcttccttgcgagccctcttggtttcttgttcaagggctcttgcggtagctgcattttcttcttgtaacccgacacactttttccggacgtatgtagcgaccaacctgaatttttctttggcaagtcttgcttttcctagttctgtttttagagcttgaacttcttcatcctcttctggagct

SEQ ID NO: 122587 - DNA, 379 bp, Glycine max
  unsure (1)..(379): unsure at all n locations
aagctggagntgctgcacatgatgtccaacgttatgtcaaataataagatcgggctgcacaatgcacaaggcaagataaagtgtcaaatgaagaattgaagctgcaggattcacgatgtcggatataatgtccaggacatcctgcctgaaaatactggaattgctaaaagcattgaagctgcaggatccacgatgtcggatacaatgtccaggacatcctgcccgaaaatactggagttgctaaaagcattgaagttgcaggatccacgatgtcggatacgatgtccaggacatcttgcccgaaaatactggacatatannatctgtatatctttaacagattattgtgcagttagcaagagattagatgatctatctt

SEQ ID NO: 122588 - DNA, 242 bp, Glycine max
agcttctacttatgtggcagggcgggcttccttcactttcttgtctccaacgcgagctttgaccactgttcttccttcccgcgatgcttcttttcatgtccgcctgagtgggcttatagcctaaaccatacttcccacgatttccttgggtatttatcaggctagttatgccgccgttgtctttgcctaaacccatcccgggttcataaccgttccccaacataactcgggccatcattacc

SEQ ID NO: 122589 - DNA, 338 bp, Glycine max
gaaacatgcaaagaagaaattcattgagattatgctataggatttgtagtatatttttaatacaattattatttcaattcaaaatggtttttacaagtatttattcttatttatactaacacatttcctataaaaatgacaattttctttataggttcaatattgttcgctacactttatgggaagattatgttgtcactattggaactgtggaaaataaaacaaaaatgaaggaaaataaatatggaaaagatgcacagtctttgaataaataaaaaaataacaatagccaaataaatttaattgacaacacatgaataatgcattataacatacac

SEQ ID NO: 122590 - DNA, 235 bp, Glycine max
agcttgtcaaaatcttgtttatggctttgacttggccatttgcgtaagcataataaggggtagaagttaacaacttaatatttcaagaattggcatattgaacaactttttgattagtaaaaacggtgccttgatttgctgtaagcgtttatgggataccaaatcgaaaaataatattttgttctatgaaatttactacatccccttgatcaacatttttcaaaggaattgcttc

SEQ ID NO: 122591 - DNA, 236 bp, Glycine max
agcttgaagaggatgctttattggaggaaaaaaaagagagaaggggggagcacggaattgaaggaataaaagagggagagaagtggaactttgaagtgtgtctcataagactttcattcatgaaagttacaacaagtgttacacatgcttctatttatagactaggtagcttccttgagaagctttcttgagaaaacttccttgagaagcttctttgagaaaacttccttgggaag

SEQ ID NO: 122592 - DNA, 228 bp, Glycine max
  unsure (1)..(228): unsure at all n locations
agttgaactataatgtttatgttgtttgagnacacattggagaaccttacttttatgctttccctttcttagtgttcacaaattttcttcgcgctttcctatggtgttttatgtattaacagaggatcatgccaaaagagatggatagcatactttaacctaatgaataccggaactgcctgtatcgaaattattagaaactttctgagtcgtatatatttttatgct

SEQ ID NO: 122593 - DNA, 231 bp, Glycine max
agcttgcttgtggggcttctatggaggctggatctttgagcttcaatggggtcctttaatggtgattttccaccatggagatgcagcggaagataaaggaaaagaggtgagaggaggcgccatccattaaggaataagccatggaagaaggagcttcaccaccaagatgagccttggataagaagcttggagatgatgcttcaatggaggaaaagaaagagagaggggggg

SEQ ID NO: 122594 - DNA, 230 bp, Glycine max
agcttgtagccattagaatagaatgagcatgtgattggaagtatgactgaaaatgttagttagcttgtcagattgattatgaaggaatgcattaactgtatcctggtgagagtgtgatccttaaattttgagagaaacgactatcatttagtactgatttttgcatgaatctttgaagtatggactgaatgcatgaaattgaggatgatgaaggccatgtttgattgtga

SEQ ID NO: 122595 - DNA, 221 bp, Glycine max
agcttggtgggaagcttctcccccatttgcctataaatagggggagaggtgcaaggaaaaaatggtcagccctcctgttaattcgagaatcacttgacattattgaaaaaaatggtttgcgtgaagaaaattcaagctgaagcacttttgtaacgtttccataacgatatggtgggagaattcacgattattctcaaccgttcttcatcattcttcattca

SEQ ID NO: 122596 - DNA, 223 bp, Glycine max
agcttggtggcaagcttctcccccattttcctataaatagggggagaagtgcaaggaaaaaatgttcagtcctcctggtaattcgagaatcacttgaaattagtgaaaaaaattgtttccgtgaagaaaatccaagctgaggcacttcggtaacgtttccgtaacgttttcgtgggtgatttcgcgaagattttcaaccgttcttcaacattcttcattcatt

SEQ ID NO: 122597 - DNA, 216 bp, Glycine max
agcttctacttatggggcagggcgggcttccttcactttcttgtctccaacgcgaggattgaccactgctgttcctttccgcgatgcttctgtgcatatccgcctgagtgggcttatagcctaacccatacttcccacgattgcctttgacgttaatcaggctagttatgccggcgttgcccttgcctaaacccattccgggttcggaaccgttcc

SEQ ID NO: 122598 - DNA, 236 bp, Glycine max
atatggggtacccctcacaatggtttcttaggggcggtcgggccgaggtgcacaacaagttttccacatccacaatgcgcgcataaacccaccatcccctgttgcccacctccaactgagctcacatactcccacgtagcccatatcctcgtttctctcaacaccgggtccccatcaatcctcccaagcttccacaacatccaagcaaaacaacattcaaacagcacaagctatca

SEQ ID NO: 122599 - DNA, 246 bp, Glycine max
agcttatccttattgctttgtctccggacttcactccccgtgccactccggaagatttaagccaagcccctacttttgaggggcaactcccgccttatgacgactatcccgggcaagacgatgaggaaggagatacccatcttagccccctgctccacctcaaagatccgtccccccatgaactaccccaaccaaacatagtccgccatatcccaacttcacccacacccgtaaaagaatctgttc

SEQ ID NO: 122600 - DNA, 370 bp, Glycine max
  unsure (1)..(370): unsure at all n locations
ttatgtcttgatcggagtgtgtgattcttgtgttatgtgatttatgattgaaaagtgaatctagaatgacaaagtggtggaattacgtgagttatgtttaagttttgntttctttatatgatgtgtatatctagttgtcttgcttctctgttagttaagaatgtgataactcactccccgtgtgttgtttgtgtttggatcctgtgatgattttgaatattgtgtgttcgggggagcagatgactacgtgaatcgctttaaggaatattgtgctaaangacgtcagaacataatgctttgataggatgtgacattgagacataagtttctatattaattgcattgatgtagtctattttattttacctca

SEQ ID NO: 122601 - DNA, 243 bp, Glycine max
agttttttctgtgaagagttacttaatcatttagtgttaatttctctacctttgattgaagcaagaaatgactgaaagtgcccatgttgtgagtatctctaaagacaagggtaaaaggaaaagaatcgaggagcccaagaatgaaataagcctgaacatgtaaagaagaaatggaccaaatatcatgcctggagtgcaaagaaaggtatgtttgttactttggtatgttctgaggccaattta

SEQ ID NO: 122602 - DNA, 382 bp, Glycine max
  unsure (1)..(382): unsure at all n locations
cgtagaagttactgccatctttgangcctagatcacctggctttttaaataatacaatctcnttggcaagtttttgttgttataattgaaaaatatacctggccaacttggatgctcctggacttatcggtatgtattcaactgcaccaaagacattggtccatagggtataggaatatcatggccattggtggtaacctaacactatgcaaccagatgcatgttctcatattctttaactctcttccctcgcccttttctccttttatcagagttgcaaatagattaaaacattatatatctttgttgaggattcctcatcctcctgctacgccttttattagccaatacttgtacttaaccctacatacaatgataaaat

SEQ ID NO: 122603 - DNA, 241 bp, Glycine max
agctttgtttcaaagagtttagctgcagcttggaaatatgtgggtgtacgtgggtaaggtgacaaatgttctcatgagaaatacaaatctttaccatgtatgtatgattaagacttgttcgcataagaaccattttcaggcttaaatgtgatctttaaaataccatgattttctaatttggtctgtcatttataaaaagttgtaatttagtcttcataatttttttccctttcctatatag

SEQ ID NO: 122604 - DNA, 361 bp, Glycine max
  unsure (1)..(361): unsure at all n locations
aatatttagtgagggcaagggttgcatatggaaaattttatggaaaagactctcttnnccgagttgacatctatcttggagacagttggcggggatcagtggtgtntcaagatgcatccagtgtagtcaccaaggaaatcatttatgctgcttcatccaactatgctcatgtatgtttattcaacactgcaaagggtacaccctttatttcagttttagagcttagagttcttaacagngaggcctatctnagtaactttgtggagctatcggcacgaattgacgtatgcttacacgatggtgaaataatcaggtgagccatgttacaatataaccaacttatatcatggaataccactaa

SEQ ID NO: 122605 - DNA, 243 bp, Glycine max
agctttgaagatatgagttacgaacctacgcactaacattcaaattctttttgtaaaaagttctttgtgtattatagtaaagattgtaaagctctcaaaacaccttaaacaccctagagaaaatactaagtacttagattgtatattcatttgtaagacgattaataattagtcagtgagcaaatcaaatacaaatcttttgatttgtatagagctaataatgacttggtaaaacaaagaata

SEQ ID NO: 122606 - DNA, 461 bp, Glycine max
  unsure (1)..(461): unsure at all n locations
cgggccaattcttccattttgaggcatatagngctacgaagttaaaacctccgcacttgaataattaggctatgaaattgggctctgctntgtgtaattagcttaattaggtagattagatggtcctaatcaaggcccattccttccttctacgtatccattatatatattaatgtagttagttagtcagntatttcattttatacaaaaacaaatttagaaacttgttgtggaagttttaggattaaactttttctctcaattgttcttcattcttcttcctctcttcaactctgttataccttttttcttgcataaattccattgctcttccactggtgatgattattgaaggctaaacaaacaatcaatccaaggatccactccaagcaaggttgaacttgagttctagnttagtatttcaaatttgtgtgaatgtccatcttcttcttcaatcctat

SEQ ID NO: 122607 - DNA, 233 bp, Glycine max
agcttgtggtagagcttgcaagagtaagattaagaagtggcaatgaaaatacttgtaactttgttaagttattggaaactcggtgggttaccaagaacgagatgtggtctcgggtttaggatgaaccaacataattctttgtgtgcttgtctctattattttaactgacaaatgatttgaatttgtttttggatcttatatgttgttttgttttacaaagaaaactatttttc

SEQ ID NO: 122608 - DNA, 233 bp, Glycine max
agcttctagccaaatggacttaccttgaattaattcctttgatagcccttttgagccttgtttccctttccttgttttgaagctcactacaagccttaagtgaaaaaccatgatattaccatatccttaaggaattttggagctttggaattgttttgggaataagtgtggggggtttttgtttcattggacaacttgttttgttggccatgcttcatgatgtattttgggcc

SEQ ID NO: 122609 - DNA, 155 bp, Glycine max
  unsure (1)..(155): unsure at all n locations
tatttcacccccattttactaagtacacccctgccctttttttgtgattcttctttcgtaaaattacggaaacttaccaatttccgaacgatacttggtttctttctgtaatgttaccggatcttgcgaatacataatcatccccttnttgactt

SEQ ID NO: 122610 - DNA, 231 bp, Glycine max
agcttctcccccattttcctataaatagggggagaagtgaagggaaaaaaggttcaaccctcctggtatctgagattcacttaaaattagtgagaaaaattgtttccatgaagaaaatccacgccgaggcgcttccgtaacgtttctgtaacgttttcgtgggtgatttcgcgaagattttcaaccattcttcgacgttcttcttttgttcttcgtcgttcttcggtcttc

SEQ ID NO: 122611 - DNA, 231 bp, Glycine max
agctttgaagaaatgaagttacaaacctacgggctatcattttgagttcttcttgtaaagctttctataaattatttgtaaagctttctataaattctttgtaaagttcaaaagctctcaaaacatcttatacatcttgagagaaaagactaagtgcttagattgtatattcatctgttagacaattaagaactagtcagtgagccaaccaaacaacaaatcttcttattt

SEQ ID NO: 122612 - DNA, 158 bp, Glycine max
  unsure (1)..(158): unsure at all n locations
cgattaaaagataattaaatgatacttcatttgaataatcaactaccttgtaganttaattgattacatgcgggtataactattttctctataaataatcagcttgtgttctcttcanaaaagaacgaaataagcttctgagtgagccaagatcatgt

SEQ ID NO: 122613 - DNA, 233 bp, Glycine max
agcttattcaagactaagatacactacaaaaacatgtttattatgcgttgaagagaaacaaaatataaaaatgatgataaaatggtaattcgctactttttttttaaaaaaaaaataacagtaaggagtaaaaagaacatcaaagagggtgagaatagcacccctatccttcgcaccccttccttccttttatttttttcaccactaaaaggagcttgacaaatagatttttt

SEQ ID NO: 122614 - DNA, 221 bp, Glycine max
agcttttgagggtgccctattatgtgcttttttacatatataggaaaattcccttagcaatcccccaaattaaggacttatcataacttgaaacccttatgctctcttagaatcctaaaacaaggtcaaggatatcaaaattaggcttaggggtttattcaaacaaatcattattacttttgactcaacaggggtgtaagggataaattcatcacaggttg

SEQ ID NO: 122615 - DNA, 91 bp, Glycine max
tcccccccttatactactctgactctagaatctaaactgactactcctcctttatctactactctgagaagtgatactcctccttaactac

SEQ ID NO: 122616 - DNA, 247 bp, Glycine max
agcttgtaggattatggggtacccatcacatgtggtactaggtggcggtcgggcgatggtgcacaacaagttttccacatccacaatgcgcgcataaacccaccatcccctgttgcccacctccaactgagctcacatactcccacgtagcccatatcctcgtttctctcaacaccgggtccccatcaatcctcccaagcttccacaacatccaagcaaaacaacattcaaacagcacaagctatca

SEQ ID NO: 122617 - DNA, 246 bp, Glycine max
agctttgatttcctttgtttcggaaacctttttttctcatgtgaacccaaacccaatctccgggttcgaagacaaccttctttctccctttgttggcttgtttagcataacttttatttttcctctcaatttgatctttgactctctcatgaagcttattcacatagtgagcctttgcttgaccttctttatgcttaaaaatagaaacattaggcataggcaaaagatcaagaggagttagtgggt

SEQ ID NO: 122618 - DNA, 520 bp, Glycine max
  unsure (1)..(520): unsure at all n locations
ctcagcttctatccaggcactctcttgaggcgatggattcgcttccatggcttattctctagtggatgacgcctcctctcacctcttctnctttatcttctattgcaactccacgaccgagaatcaccattgaaagaccttattgaagttcaaagatccaacctccatagaatcttcttaagcaagcttccatcacatgccatgaggaattctataagggtgtttcctaatgctcatcacaaactgtgtgcatggaatttggctaggaatgcaacatctaacaataacaatgcattttccaaacagttccaaagttgcattcttggggacattgacgttggtgaatttatgaaaaaatggtgggagttggtgtgatagcaatactacaccagcaacacctagcagacaacaaaggaacaccatggctacgcgtaaggatgcatcactagcagacgaacaacacanaataatagaatatctgttgatatactaacaaatatgtatacagatcttccatctg

SEQ ID NO: 122619 - DNA, 243 bp, Glycine max
agctttttggctaagtggttatttacaatcaaaacatggccttcatcatcctcagattcatgcattcattccataattcaaagattcatgcaaaagtcattacccaatgttagtcgtttctctcataattatgatcacactctcactgggttacaattaacgcattccttcacaatcaatctgacaaaccgactaacattttcagtcataatcccaatttcatgttctttctcttctaatgat

SEQ ID NO: 122620 - DNA, 442 bp, Glycine max
  unsure (1)..(442): unsure at all n locations
atgttcgtcattggaagtgccgtagacagaacttgnggttgatatattatggccttctgggataactgggcggtgggtaaggagaaggattgttattggctgagtaatgacattgttgggttggtgggaaacttggctgtataagaatggcagtcacagcatgagcttctccctcattctcaccctcttcatttgccccagntttctcattcgtccaagtgggatgaataaatntgcctcttttcagacctgctttgatctttctgccggcgaagtccaaatccgcanagcttgaaggtgtgtaacccactatttccgtatagaacactggtacatgctactatcattgtataatcttttctctgtattgggggcgctacttgactgcaagtctctcatctttggcattcctttgaagactgagcctcttttgacatgtctg

SEQ ID NO: 122621 - DNA, 241 bp, Glycine max
agctttgtaaaaaaaatttttcatttaaagacaatgtaaatttgtggaagaatgcctataaataccagaaactttgaagagttatggttaacaaacctacgcatatagttttgaaatctcttgttctctgttaaagctctttcttaaaatttgtatagttgtaaagctctcaaaacaccttgtaaaacctgggagaatagattaagtgtttatagattgtacatccatctataagacgatt

SEQ ID NO: 122622 - DNA, 305 bp, Glycine max
gcagaacaattatgacctctcgagccacagatacaactctggacggaggaatcaccctaacctcagatggtccagccctcagcaacaatagcaacctgctcctttcttccaaaatgctgctggcccaagcagaccatacatttcttcaccaatccaacaacagcaacaaccccagaaacagccaacagttgaggcccctccacaaccttccctcgaagaacttgtgaggcaaatgactatgcagaacatgcagtttcagcatgagaccagaagcctcattcagagcttaaccaatcagatgggac

SEQ ID NO: 122623 - DNA, 244 bp, Glycine max
agcttgttaactcttctccaaatggtcctttcaaattttctacaaaacatgaaaaaaaaaacccaagatcaagcataaaaagtagaaaattagaaaattctaaacaaactaagcttttattcaaaacttaagaggaacacaaagctcaaaaacataaaagatagttcataattgcccccaaaataacaacaaaatgtaggaatatatgacaattatcactctccattctcatatagcatttatc

SEQ ID NO: 122624 - DNA, 410 bp, Glycine max
  unsure (1)..(410): unsure at all n locations
cgactatcaactctacgttgngttatggaaatcagctgagccattatatttggagatctttcgatcatttaaatcgtgtcgttctttttggaagaaagccctttaaatctttgcctatgatatctaaagctagtttgatgcaaccatgaaggttacagtcctcaagcaaaccagccatgatatgatcgctcatgtgggtaaggctcgggctgccgtagaagagctgagaaagttccttatagatgattcattggaagaagtgaacaggaaacttgacaagttctacatgatcctcattctgaggagcttacattcagactttgatcatgtgcgtgatcaagtacctgctggggacgcaagtccatcaatggattccctcatcactagacttctctgtgtgcctcatttat

SEQ ID NO: 122625 - DNA, 235 bp, Glycine max
agcttcaaccctttcccaaaactcggcaagggacgcgaaatgttattcccactcagatccaacaatgtcaaagatttcaaactagtccaattactcggtatcgaaccactaatatcattacctcccaaccttatctcaacaagagaatctaacttggcaacagaaggactcaaagtcccactaagattaaacttttccaaaataatcatgtccacctttccgtccccattgcacc

SEQ ID NO: 122626 - DNA, 253 bp, Glycine max
agtcgacttgcccgcatgcaagcttttaaaggatttgacctggttttgggcaaagacgccaccaaagaataaacgtcaattcaaatgataggggaaattagcctggaaatgcttttcatatacacatgataaatgaatataattcaaatacactgataatgaaacaaaaaatcattaacaaagacgatcacgtatgatgagttcattaattaatgggttataataactatcctaaaaatatgcgtctttcaaa

SEQ ID NO: 122627 - DNA, 230 bp, Glycine max
agctttttcctcctatttttatctagcattatttgtctttaatttccttgatatttcaaactttatgcattgggtttatttcagatttggttctttatatttctgttttggacttgctatttatttcttctttggttatttttctgtggatgctttggtcatttatactactgtttaagacttgatatatttcaaacttggttgcttcttttatgaaatctttggtcatt

SEQ ID NO: 122628 - DNA, 83 bp, Glycine max
  unsure (1)..(83): unsure at all n locations
ctcagctattttgctctaagcttactaacatactntttntcttataactnttcataaacatcactcatcctgcaacataatag

SEQ ID NO: 122629 - DNA, 208 bp, Glycine max
ccctgacccaagtccttgcagcatgcaatttatgcgcctgctttgagccttaagctccaataactgaaccaagatcttgaggaaacctacaattctcacattgaaaaagaacgaagactttaaatatacaacctaccaaccaagggttatatgcagccttcatgctcaatataatcgaatcatgagcgagtaagctccacaacatata

SEQ ID NO: 122630 - DNA, 247 bp, Glycine max
accaccgcaccttctttggtgctctcgtcaacgattctgcatagcagagcaaaccgaatatataaaggattgcctcataataataataataataataataatacgtataaacagtgaagcatatatcatcttgcatgccagaactagaatatgcaagctgtgctagaactatgttcacgtgtgcttatgttaaattcgttagtattgcgaagaaaacatattgaaacaagatggatttcatgggttg

SEQ ID NO: 122631 - DNA, 239 bp, Glycine max
gcatgcaagcttttacctataggacattgaccattccaagtgttggagaagatcaacgacaatgcctacaagattaacttgcctaatgagtataatgtaagtgccactgtcaatgcggctgatctatctctttttgacgcagatggaggagccttggatttgaggacaaatccttttcacaaaaggagggactgatgatgacataaccaagggcaaggaccatgaagcacttgaaggtc

SEQ ID NO: 122632 - DNA, 220 bp, Glycine max
agctttagctggggccatattgacgtcccttagttcaacatactcttttcagactttgatggctatggacttgaacttctcttcgactacccgggctctttcaacctctgcctttagggcttgtacctcatcactttcttccgaagctttaacctcatcgcctctcacagtctttagatttgggagccaatccaatccttgtgttcggactctcaaccac

SEQ ID NO: 122633 - DNA, 212 bp, Glycine max
agcttttaactctatggtatcatattgaaagatgaaataactaagattttattattgatctttaattataaatgtacaataaatatataaagtgcataagaataataaactctaaattatttattaaattatctataagttaaatttaaatatttatataactctaatttaaatttaccaataacttgaatttaaattataatatacaagaa

SEQ ID NO: 122634 - DNA, 250 bp, Glycine max
ttccaaccttttcttaaaaaaaatccaaaaaggttaaacctgtttaaaggacctatttcccttcccaattttgacaaccccccttttaggaacccctgaacaccaacagcgctttcgaggccatcaagggatggtcatttcttccggagcgacgcgttcagctcaaggacaacgagtataccgacttccaagaggagatagttcgccggcgatgggcgtcactggttacccccatggccaagttcgaccc

SEQ ID NO: 122635 - DNA, 245 bp, Glycine max
agcttgtgtttatacagttttacaccggatagttctttttcatataagtgtttaagtggaattagagtatttgatgtataatgtttgaatttttctctttgtttatacttccaaatattcagaactctgtttggttatgattatcaggcaagcaaaggatgttgttaaaggcataaagaagcggattggaagtaaaaattcaaaagtccaacttcttgcactaactgtaagcaaaatagtcttgc

SEQ ID NO: 122636 - DNA, 460 bp, Glycine max
  unsure (1)..(460): unsure at all n locations
cgaacgaatgtaagacacattgactcatgctatgcgattcttgtctccatntcattgaagcgcatatccacttgccattccaaagtgtcaattctctcaccaacaatggtttgaagaccatcaaacctgtccataatcttcgaaagaagagatgaatcttctncttcatgtccttcttcaccaacatttctagcacccttcttcacccaagagccatcatgctcctttatataaccaaaggatgctatgactgaagcgcctataaggaatgatctcttgattggaacataaggttcanaatcaagcgggatgttgaagtgttgaaggaaaanggtaacaagatgaggataaggcaatggggcattcaatcgcaatgccttatgcatgcgatatctaacaaggtgtgcccaatcaatntgttaacctttatgaaaggccacatgacaatgagatcttcttc

SEQ ID NO: 122637 - DNA, 244 bp, Glycine max
agcttgcacgaaaatgcttagatgactcaagaacttagatctagatattcccaagcttcgaaggatgaaaattttttgcacataaaagatgaagaaatgagtagaaaagaagagatttaagataccaaagcttcgggcaagaagaagaaaatgaatgttcaagttttagtttttggagagaaaatggtaagaaatgatgataaatgatacaaagctatgcctaatgttattgataagctcactt

SEQ ID NO: 122638 - DNA, 313 bp, Glycine max
  unsure (1)..(313): unsure at all n locations
tatgcaccttgcactaaatcattataaaaaattttcaagtnaaacactaagactaaggtgggagaaattntcaacaagtttatcacgtgccacacatataatctaagaatatgaaacgtttaaaactttgatctcggagaccaaatactattgtgccaagagataaaactaataacatcttctgagatttccacttactaaaagaaagtaacttcaaacattcttttattctcaaaatagaaactgtaatcagccactaaccacaatttaatttcattgaatagtttcaaaatgagtttttatgaaattaagt

SEQ ID NO: 122639 - DNA, 243 bp, Glycine max
agctttagttcactacttttagtagtgcacgatatgcttccaaaggaaaacacgttaccaaaaaggtattaacaggccaagaggatactatgttcaatgggtatggagtatcagaagattcatgcttgctctaatgattgcatactgtacagacatgagtttgaagaaatgcacaaatgccctaggtgtggggtatcatggtacaaagtcaaggataatgacgagtgtagtagtgatgaaaac

SEQ ID NO: 122640 - DNA, 93 bp, Glycine max
ctcagctattacaacttcttgatgatgatcccttaaaccggacactgtggaccccaccgatcaggagaagacgaccttcacatgaccttttgg

SEQ ID NO: 122641 - DNA, 243 bp, Glycine max
agcttgttggaggttggtttgatccgcctctactgaataagcgatataatcacaccgaaaacctttagcaagactagctctcttacctatgcaatgctctattggtcgttatggatgtgcacgattttcactactaatgtgccgaaaatgacgggaagaccacccccaactattccgtaatttaaaaggaaatttattatcgtgaaccttggaatgcattatgactctatgatcacttctgcg

SEQ ID NO: 122642 - DNA, 233 bp, Glycine max
agttttaaatttgaggcgtttgtttgaaaaaaagggtttatcgtttcgtcgtggatggcgaacccatctgggaaccatcaagaacacacgcacgtggtgtcatcttctgctccggagacttcaggtgcggctctcgccatgaagcacaaccctggcatatccctcgattggaccgcagaagaacaagccattctcgaagatggactctccaagtcagtttcttactttttttt

SEQ ID NO: 122643 - DNA, 96 bp, Glycine max
  unsure (1)..(96): unsure at all n locations
tgagagcgagaacatctgaggacacaccaagaaatgaatgaatgatataagaaaggatatgacgaaattgngagagagagagagagagagagaagt

SEQ ID NO: 122644 - DNA, 232 bp, Glycine max
agcttctcccctattttgctataaataggggagaagtgaagaagaaaagggttcagccccttaggcacttctctctctctcgaaatagctgaggaaaattagttccgtgaagaaaatccaagccgaggcgcttccgtaatggttccgtaacgttaccgtgagtaattacgcgaagattctagaccgttcttcaagattcatcgttcgctcttcattttctttacacttcaac

SEQ ID NO: 122645 - DNA, 231 bp, Glycine max
agcttgcttctacatggagtttatcatccattgccctaacccaacaaacatctttatcttgggaataacatgtagaatagttggtccagataaagtagtagtaagagaaacgtgtccaaaacaggcggcagatcaggagcgagaagggacaaagtaggattgttcctgacataaactttacctggttagcaaggaagatgcagacaagccagttcaagcacgcagcaaaaa

SEQ ID NO: 122646 - DNA, 234 bp, Glycine max
agcttgtagaatggctagactatgatacatgtcagggtttggtttggttcaaggataaaagggatgccccacattatttccatgacacaaatgcaaaaatgatgatttggaaactttatgcaaaactggtcatgcatgcacctatgcggacactcaagtgtcaaatttttatggtcatgtgatgctagggctcaggattcatttcctctattttaatcaacccaatgtttccaa

SEQ ID NO: 122647 - DNA, 321 bp, Glycine max
  unsure (1)..(321): unsure at all n locations
acattcggaaagatatttttaccaataaaagctacgtcttaaacaaaaatggcgtacaacctccttcaataaacacaaacatcaatgtaaatttagagcaaactcatgcacatacttccttacgaacattcactcgcacaagatattcttctaactaagaaaaatgcacccatgcacaatcaaggcaccttcgttacctagaatatatatatgtacttccaaagtgtatttgctacctacatcacatgcacttnncttggtgaaattatatacatgcatactcaaagcatcttggctaccaaaaatggacacatgcacatc

SEQ ID NO: 122648 - DNA, 216 bp, Glycine max
agctttaagccaaggccagacccgcgtgcaagcagaggcttgttgaagaaaaaggccgaactcctttcacaaaatccgagtttaggcttaaaaaagtggccttggtcgagctcgggcgccaaacgcacgaatggaccgcttagcgcacatgagagaatactggcgaagagaacgcggttcgcttacaggatgagctgaagcggagcgctagaggac

SEQ ID NO: 122649 - DNA, 217 bp, Glycine max
agctttatttagaggcttcctccagaagcttcctcgtggcttctttgagaagatttctcatgaggcttctttgagaagctagatccttatctatccacacccctctattaactaaatcaacttccttaaaaataattacggatgaaaatagcgcgacagataatctagcatcaagcataattactaagaatatatagatatatatatcagggtgtta

SEQ ID NO: 122650 - DNA, 250 bp, Glycine max
cctgcaagctttttttcgcacaaatttttatggttacccttatcattttaagtttgccaatttcataatttctataattgtacatgaaaaagcttttcattgctcaataattttcctaatcaagctttatgttttcagttatttcaaagacaagcgaagcggatagatgtcagaaagtgatacagccaagcaactgcaatctcggaaaatgtcaggcggattgcagcttccaatatagagactatcgcgg

SEQ ID NO: 122651 - DNA, 433 bp, Glycine max
tttatcaagtccatgcaaaaacatatgaattcatttgtgttttgggaaagtccttcattggttttcattctcaatgttttcaaaagaattcttttgttgtgttctgattgaaaaataagtttcaaaaatactgtgtggtgattcttttcaaagcatgttatattcaagaaaaaaaaatatgtttaagtcccaaaaagagttataatctataactatattatcattatattattatctaaaaaatttgcgtaaaaaatgtatttcatttttcttattaaaaaatatatctcattagttgaatagtattttgattttaacattatattgaagaaagaagactagttaatattataaatgaacaatctcatagattaatttattaacatgactaatgacgggataaattttatttatttctatatctattttcatc

SEQ ID NO: 122652 - DNA, 170 bp, Glycine max
aaagcattttgaactaccttttatattccactactttattgcctcatgcatgaacttaatggtgtgcttcttatttcattttcaaatagagcttccaaactagaataactaatatttgttacaggctttatctttataaatattcattgacaccagatcatctaggaata

SEQ ID NO: 122653 - DNA, 243 bp, Glycine max
agctttaaaaacttgatatatcattgagtgaaatattgaattatcacaggctaaagagcttgagagtctatattgcacaaaactgcatctacacttctattcgttttattaaacctcttttttggtgtgtgtgtatatataagaataagacaataataagatttaaactttgaatctataaactattaaattttgtcactattaggctgatcctaatgtgtttacacttgatctattggcaag

SEQ ID NO: 122654 - DNA, 403 bp, Glycine max
  unsure (1)..(403): unsure at all n locations
cctaacccncccatcagtggtccttcgtcctttatgcccattatcattaatacaagaactntccctggaacacctgcagttcgacttattggggactgtcattttctccatagattatgccaactgttgctcttctgttttttctttcgacgagcacaacaaccccgctatgcgggaggtgtacagagaactgctgacacaaatctacaaaaacctcaacctaatgcttctgtcccttgcaaggtggaggaaattgcaaaaccagtgtcaactgtggttaggccaaatgatggtcatgctggtcgagttagacaacttgtgcctgcatcaaaaggaagtgaagaaccatctccagcgcgttcaagaattggtactggaatgcctgcctangatatacatatga

SEQ ID NO: 122655 - DNA, 243 bp, Glycine max
agcttcttttggaccttgtataggcaactaactcctctttcaaaaccatgctatgtgctcgcgactggtccctttcttcccttcgcaacttgagttcactattgctaccccatagagctccgcgaaatttgttccggccatactcttccttgcgagccctcttggtttcttgttcaagggctcttgcggtaattgcattctcttcccgtaatccggcacactccttccgaacgtgtgtagcgg

SEQ ID NO: 122656 - DNA, 494 bp, Glycine max
  unsure (1)..(494): unsure at all n locations
ttttcttcatttttttgaacttgaagagcgcacaagtctagctttggcttaaattcttttcttcattcaacttcattcatttgggggtattcatattttgagncctttcatatttttaacagcttaaccaaatgtatcatcattgtctcttttttacttgcaggaagctttggattagactcttttttatcgttcatctcaatccatcagatagaaaaaggaaaactttggattaaactctttccttcagtcaaattaaatgcattcatttgtgtgtatcctattgcctatcatcatcatcatnnttttttaactcgccgacttttttagaaacatctgacagctttttattttcaatcgatgtattgaattggatttctctctcacataaagattacgagatatttaatttcagtaacattgaagttagatagaaatcatgtgaaagtgaattattgtaaagaagaaggttaaaaatttggtcactcatttac

SEQ ID NO: 122657 - DNA, 243 bp, Glycine max
agttttataagcacgggttttggagacaaaggtctagcgttcgcgatatgcgaagatgatattccgagtactttggatttggtacgaccatgccctcctgatttccagctgggaaattggcgagtggaggaacaccccggcatttacgcaacaagcataatgtaaacctttacggttttaaaagctctatagttgggcctaggctttagagttttttccttttgttaaggctttgtgtctttc

SEQ ID NO: 122658 - DNA, 313 bp, Glycine max
  unsure (1)..(313): unsure at all n locations
gagactatagcaacatcttgttatgtcanatcttggagctaatatcagaggggttgggggtcccggacacttggatattcaacgggatcataagggatgttgatagaaaatgccgcagagaaatgcagcacagaaaatgcaagcataactcatacatgacatacactcctccccctgttggctttcctaaatgcagtagagaaatgtagtatattcagcgtgaaaggaccctttctgaaagtgccctgatacgtgtttctttgtggcattcgtatctaatatgaattaatgtattaattcattgtggcttctg

SEQ ID NO: 122659 - DNA, 234 bp, Glycine max
agctttttctgcaaccttttctccccctttggcaacatcaaaaagccaaagaactcggaaatcaacacaattataacaatggagtagcaagatataagtatcagagtattaaatagaataagccaaactcataaacaagaaataatcaaaccagaattcaaatagcataaaatgtcaacaaccacaaaacatccaagactgaaatttaaaaccacaagataaataagcaaagta

SEQ ID NO: 122660 - DNA, 231 bp, Glycine max
agtttgtggaaactaaaaagtgcaacgcattttatatagctcataggcttttgaagatggctttagtcttgccggtagcaactgcgagtgtgaagcatgttttttcagttatgaaatttgcgaagagccaactatgtaacaaaatgagttatcaaggggtaaatgatggacctataacttttatagaaataaatgctgttgaaacaactaacaataatgtgattttaactg

SEQ ID NO: 122661 - DNA, 232 bp, Glycine max
agcttgcattacctagcaagtcaatgggtaaaccatgggactaagaagatcaacaagacgttctactttggggccgaaaagaatgctttgggatcctacaacgatattcttacatctcctataccatgccaagttcgtgaccttcataaaccccttcatgggaggcgacccaacgcattcatggggtctggaagagtggctgcgggggatctccctcttgcactcgcattat

SEQ ID NO: 122662 - DNA, 232 bp, Glycine max
agtttgaaagaaaaagaaaaaaaaaagcttgttattgttgaattaatcacactttattacaaatatagaagttaagatctctcccttaagaaactggaattatgttctctgacattcatgtgctacaaagttttaaagtataaaactttttccgtattcttcttccagtttgtcaccttttccttggcgtgattcatacatccaaaagagtaggtacactacttcatcttgc

SEQ ID NO: 122663 - DNA, 232 bp, Glycine max
agtttccaattatctcagcctactgttgttggctaacggatgtggagaagatgctagagccacgtgatgcccttccatagtattgactaatcttcacactagactctatcgcatgaacatgacctccatggttcgatcgcccaatgacagtgttcagtatgtcatcacgaccatgaggaacaaagctaccctatgtagtatgctcttctaaggaatcttacatgaaggatga

SEQ ID NO: 122664 - DNA, 219 bp, Glycine max
agctttaaggatagatcttcatagccaacctgagaagacaatactcacgagaagaacatattattaaccgacgccttgcgggtctatatatatacatatctatatcaaaagcccccccccttttgagaaaaccactggccaagctcaccatgatgaaccccagaacagcgtcctatctaaaacaacagaaagggccgcccgccatgtggacaaaacatg

SEQ ID NO: 122665 - DNA, 227 bp, Glycine max
gcggcatgcaagcttgagatgaggaagtgttgaagggtgaaacttcctgcttttattgttgaccacagagtggtacctggagatatgtcgcgggggtcaggagaccttggggacgttaggtggggtgctattgcccaaaaccatgcttgaccaattccgacccaacccgggcatagtcggtcagtgagaaccctgtgatgtacctaaacaggcgagctcctggcagt

SEQ ID NO: 122666 - DNA, 244 bp, Glycine max
agctttcacgtgtacatatttttttcaacaaaaaaatgagcatgaaataacattgaaactaaaaatagttgaaggaagattcgaaggcttcctaaacagacacacgaaacgaatctcccttacttacataaacaaatcttaatatatatatatatatatatatatatatatatatatatatatatatataaaattgattttgatggaggaatttggaacaagagtaccgtaacgtaactctgat

SEQ ID NO: 122667 - DNA, 269 bp, Glycine max
ccctagagtcgacgagtccgcaaccgcttgttgccgcaacttgtgggaaggagcaatcttggtaaagctgcttcctgaccacaccaaagggctcaaaaatgactccaaaaaccgggcatttgacaaaactcttggaagggcacggaaccaagtgattgcactgagaccgaacgtagtgactgatgtgggctctagaggacgcataaaaagtagcagcgggggctgaacaatacaggagctggaaccgactagacacaaatgacgctttg

SEQ ID NO: 122668 - DNA, 243 bp, Glycine max
agctttagcatttgcattttctccatcaactgaccatgtacatttcccatttggtacccccaactacaaataacaacaaaaacatcagtcatgccctcagaaaaattatttagagttgaacaagttagaaggctaacgttctcaaaccagaatcctccatccatttacgaataagattgattgccctcatggatgcaggactcaagaatgtcctctccaaataaccgctagcatcactcacct

SEQ ID NO: 122669 - DNA, 457 bp, Glycine max
  unsure (1)..(457): unsure at all n locations
tggagagcaagctatgaaggatatgtccacgcaacagttattatgtatttgagaagaagagataacacataggagtcttatactggtttactctaaccttgggctatgtacaacccttatccttcatgatgagattattaccaacacaaccaacaatttctgcgtttgtacaactaccaatgtacctactggacttccaaacaagaaacctactatancaagcaacttgtaggttccctctactgccagccaattataggacttcacaaaataaggtttctgtgagtcactacacaaacatacattctcctcttacaagggatgctcactcatgaaattacaatcacactcttctcatatacatgtaatacacaaatgagtttttaggaagtgggtgactctcacaccgagaggcttgaatcatgaacacatattcctcacacagaggtagacaact

SEQ ID NO: 122670 - DNA, 241 bp, Glycine max
agcttgttcgaagatcctttagacgtcataagaggggccaatctttcggaaaagactttcaagaagtttttgaagatttctcttaatgaaaactataacctgcatccttttgagttcaaccattcccacttctgcaccatggggtttgttacctggtgggagaaatattattcgacccgttcaattggagacactactatcatgatctccagacttgagagtggttttacacaaccaacgg

SEQ ID NO: 122671 - DNA, 416 bp, Glycine max
  unsure (1)..(416): unsure at all n locations
tgatatcatctntattctcaatgcaacattcatctgcattgttcaanggcgaagggtgatggaaacttctctttatgtattctgatagagtaattcttcctttgntagaggtgtgcttacactacacccttcccttttcagagatattttgtattataaaaaaatangatgtcattatagctaataaattatattatggactgaatataacataacatatatcagtggaatactgttaaaaaacaaaataatttatacacttgtataatgtataaaatgatggagagaatactgttaaaaaaatttctatcattcaacttttttgtatatgtatctttcactactaaaaaaaggacttctaacgaccggttataagtgtatttaatgaccggtgtacactgtcnngtgttaaacat

SEQ ID NO: 122672 - DNA, 243 bp, Glycine max
agcttgaggaagctgatggtggatcgtgtggatccttgtgtcgaaagtcttattgacaatgtggaagtcgagcggcacatttcaatggcagttgctaaaggcggtgcaagtcgagaccatctaatactcatgaaacaaattgcggggattataccaagcatgaaataattgtgactagcatccaaaagctgagagttaaagatgaaattaaaaattttaattgaggatatgagtgttggaaaa

SEQ ID NO: 122673 - DNA, 246 bp, Glycine max
tttgtctgcatgcaagcttgtgggatggtgcaaacaaggttgagctccttcttgacctattcaaagggttcaaaaatgacaccagttaaggggcagttgtcagagtccttggtagtgcatggaaccaagtttttgccctgagactgatagtagtgaataatgttggatcgagtggcctcagaataattaagaaggggggttgaattaattattcctaaacctttactaattaaaaattactctttt

SEQ ID NO: 122674 - DNA, 232 bp, Glycine max
agcttgtgacgcttggcaatttcttcaagacccgctactcaaaaggttacgactgccgaaccaatcttcagaaacaactcacttgaaccaaggatgacgtgcggaaaagcatcccgcgaaatcaggcacgactaagcgactaccagtaacgggtaatcgagcacacatgagcgaacgtgactccccatcgggaattctgaaaattaaaatgatgacaacccgcggcaataga

SEQ ID NO: 122675 - DNA, 306 bp, Glycine max
  unsure (1)..(306): unsure at all n locations
cacgaacatacacaacatgcacttgtcaatgcatttncaacatcatcaacattccatttcaatgacatcaccaataaccacaacaacctcattccatattgacataaccatcaataataacatcaattcatgttgacatgatcaccattaacaacgtcatctcaaatcaatatcatcgtaaatatcaacatcaccacatatcaattaaagtcaccaatagtaacatcaacaataagtcgcattccgcatataaatatatttttcatgcctgaagtccacactccccaagtcttaaacaacacaagt

SEQ ID NO: 122676 - DNA, 248 bp, Glycine max
ccgactttttgcatgcaagtttttctgatttaatttccgcttacgaaaggatccaagggggtctgaaaagaggcaaatttaatcatcctgcttggacgaactagaaaaatggggcaaatgaagagggtgagaatgagggagaaacccatgttgcgactttcattcttatatggccaagtttcccaccaatccaataatgtcattactcagccaataacaacccttctccttacctaccacccagttat

SEQ ID NO: 122677 - DNA, 228 bp, Glycine max
agctttttggagtaggaacatgggaccaactcattttatttcaaaaaggaagtcacatctagtcaaggtctaagagaccatacaagtttcctaacgatttctaattatgtgggccattaagtctatcatatgctgacaatagccgagaagcccatgaatctcttcgggggtggagtagctgtctgccatcgccttggccttggctaataatcggggaagttcttgact

SEQ ID NO: 122678 - DNA, 203 bp, Glycine max
  unsure (1)..(203): unsure at all n locations
tacataaactttngctcctatagctcgtctagatgcaatacgcatattactatcctgtgttgctcttcatggtatgatttngtatcaaatggacataaaaaagcatgtcctcaatggactaatcaaggaagaggtctatgtggaacaatcccctgtgtgtgagagttctatctaccctcatcatgttttcagacataacaaat

SEQ ID NO: 122679 - DNA, 219 bp, Glycine max
agcttttctttttggtgaataaataattctattaagctggttgtagagaactaatgcgttcttatgtgttggattgggtgaaggaatgcttacgcagtgatgaagtactagtgtttgattatttcagatcataatgcagcaaaagcattagtaatacgcaaggtgtgggcgtcgttaaaacagctgttgctagaggattttagatggctttttgacagt

SEQ ID NO: 122680 - DNA, 215 bp, Glycine max
agcttaccctctggacctcaaatcaaaagattgacaggtgccgcaccgatctggcaaaaacgctgaaaggacccatggagaacgtgcggaaaatctccccgcaaatcggcggagggctaggcggcaagcagtaccggagaagcgatgcgctgctggcggacctcgccgcccgagcggggaaaccgcccgttaaagtgatgacaccccgcccctct

SEQ ID NO: 122681 - DNA, 220 bp, Glycine max
agttttgcacttgagggtcaaacctcacccacaacaaacgttatacacattagacacaaacaaatacgcagcttcaagaaccttgtccggtagtagtagtaataataataataacccaaaaacaaaaagagaggctaaagaaagcaaaacaaaactgtcctatacaagacattcctaagaaaaagtaaaacaaaaaacaaaaaacaaacaatcacaagac

SEQ ID NO: 122682 - DNA, 242 bp, Glycine max
agcttataagaaattcaattggtcataacttttaactgggatgcccgattctggcgcgtaatatatcgagacgctcaaaattgaacaccggaagcactaaagaaattcaaatggacataacttttcacacggaggccacattcaggcgcataatatataaagacgctaagacttgaacaacggacgccttcgagaaattcaaaggggcataacttttcactcggatgtcgaactcaggcgca

SEQ ID NO: 122683 - DNA, 255 bp, Glycine max
tgcacgcatgcaagctttttctttaatagtagcaacaaccattgtttttttggcagggggaaaaggggatgacttagatggtacaccttgcggatgaggaatcttaaccatataaggacgaatctcaacatattcatctttatacccatgaggtggaaatattttaccgattgtaatcgtaacattcgattaatcagatgatgcactgaattactgctagaactcagccttggcttatgctagcattactacttc

SEQ ID NO: 122684 - DNA, 345 bp, Glycine max
  unsure (1)..(345): unsure at all n locations
tagcatgccacatatcacatcattgaacatttgctcacaacaatacatgctagatatgttattaatagatagaggcataagacttaacttaaacataccctcacacatgtagcctttaccaataaaaaacaccatgtctgataataacaactctattagactcaaaaacaaccatgtaccattggtggactaacaaagagagtctcactaaattcatcctaatattaaacatatgatagattccatctaatacaagagaattccgtggagatagctctagctgcacttgaccttcttttaacacatgtgtcatactccaattcgccatgctcacagnacatgtgc

SEQ ID NO: 122685 - DNA, 242 bp, Glycine max
agctttaacgtgaaatatttttaactcgagttctgaaaggagaccttcattgtttcctcaaactcttcattcatgtccttaccatcaccagcaatgatagtgtctacacacaaggaagatcttccttgcaccagtgctgccagcaacgtttgccttaaaactaccgacattcaagaagcggttccatgaacatcgcaaacacttcaatgttgtatttgacaccagcaagtgccattgcatca

SEQ ID NO: 122686 - DNA, 295 bp, Glycine max
atgctacttagcttacttagtttcctgcttatcttgttctacaagacagtagtatgacttgtcttgtcaagctgtctctttcccccttgatgtatataaatatgttattttgaatttaataaagccaagctagtgtgagaacagtttttccacacataagtcacagcttcaagtctacatttagaagaaaaagctgcttatagaatatagtagtgaatatttcttgtacgatatactcatgctcaactttgtggaaacttaatgtttaacgctgcctgtgtttatttgatgatgt

SEQ ID NO: 122687 - DNA, 220 bp, Glycine max
agcttataatatccttattaaaagttagttttttgttaattaaaagctatatatatgtttatgaagataatccttacacttaacctttttatttatttaagaaatgaaaattgtttttgcagttaatgaatcacttggcaaaaaggtttacaataggaaaagaagtcaaattttctgtagtgtaaatatgttatcggctaggttgtatagctgtattttg

SEQ ID NO: 122688 - DNA, 231 bp, Glycine max
agcttcacagcgaacggtgaaaggtgaggaatttctccgaattgtctgaaacccatttgcaaaagagtgtcttttattgaaggaaggcgatcggaggggcttcagggaaatgggttttgggagggagagatagtggcggttgtgagataaatgaccatgctttgtgttgcaggagaagggaacaacagcgtgagagagagaaaacgacgtcgtggaggccatgagcaatga

SEQ ID NO: 122689 - DNA, 228 bp, Glycine max
agcttgtgaggattgatggggacccgatgtttagagaaacgaggatatgggctacgtgggagtacgtgagctcagttggaggtgggcaacaggggatggtgggtttatgcgcgatttatgggatgtggaaaatttgttgtgcaccattgtccgaccgccacctagtaccacatgcgaggggtgccccataatcctacaagcttgagatgaggaagtgtcaatgggtga

SEQ ID NO: 122690 - DNA, 232 bp, Glycine max
agcttcttatccaaggcccatcttggtggtgaagctccttcttccatggcttattccctagtggatggcgcctcctctcacctcttctcctttgtcttccgctacatctccatggcgtaaaatcaccattgaaggacctcattgaagctcaaagatccagccaccatataagccccacaagcaagcttccatcaagtggtaatcagagcacaagagcttcaagtaggtactc

SEQ ID NO: 122691 - DNA, 232 bp, Glycine max
agctttcatcatgaagggttcacaaacatcccattgatggtaacaaggggttgtatcaattataatcccgtccttgccataagacaacttggctatcccatgagaggagcaccatcagaagaaagtatcgcgcctttcattgcatgaggcttcagtgaccccaatgcaagagtgcttcaaagagtctgaaaagcacagaatgtggtgcaaagaaaggataaggagctcaaag

SEQ ID NO: 122692 - DNA, 220 bp, Glycine max
agtttagaaactatatgagacatttccatgatgtactctctaatttttttcccgctatactttatggaaatcaagtggtgtagcaaagtacttgtttttgccttatcgcttttttcaaagcatttctctagttgatcaaggaaatccttagcattggtgatcccttcggtcattgcaccccttaaggattttggaatgccacactacaatcttgggtttt

SEQ ID NO: 122693 - DNA, 349 bp, Glycine max
agattagatggtgctaatcaaggcccattccttccttctacgtatccattatatatattaatgtaggtagttagtcaggtatttcattttatacaaaaacaaatttagaaacttgttgtggaaggtttaggattaaacttgttctctcaattggtcttcattcttcttcctctcttcaactctgttatacctcttttcttgcataaattccattgctcttccactggtgatgattattgaaggctaaacaaacaatcaatccaaggatccactccaagcaagggtgaacttgagttctagtgtagtatttcaattttgtgtgaatgggcatacttctcttcaatcctat

SEQ ID NO: 122694 - DNA, 217 bp, Glycine max
agctttgagtgaacccattgccttctattttactgcacatctttgatatttgagcattttcatatgttgtacattcttttcactgtggtacttcatttcccatgcatgaataacatgcctacaatctggttaaataatgattggaatgtatgtcctctcttaaggaacttatgttagacctatttattgtgaaagacattctcttcgattttacatg

SEQ ID NO: 122695 - DNA, 219 bp, Glycine max
agctttttattgtaaccttgaaattcacgaaatcactttgatttctgaggtttttggtataaaaatggtcattgaccaatcccttttccataacttaacccaattgtccagtgacggtgtaccatttgaaagtacaatgaatgacgattggaaatttgatttctctgcatatgatgcccgccagttggtttgcaccaaccatgcggatatgaatggacc

SEQ ID NO: 122696 - DNA, 250 bp, Glycine max
agcttccttttcatatttctggcaagattctaccttcttttctactataggttctatcttgactttctatctaatgtatttattcctaattctatatttttgtctattatgttaacgcatccgacacaccattcttatctttgctacatatagcttattttcttggatttttgctgcccaacacttggttccatacgacatcattgttccgacagttatgcagtaaacttttcctttaagcttgagtgat

SEQ ID NO: 122697 - DNA, 271 bp, Glycine max
ttccacattaagaaaacaaaatcttttttaattaccccaatatctataacatggacacacatacaacattcatagctgaagattactcataccacattgtactcaatttcatgtagggggtcataacaatcaaccaccaacatttgcaatcgttaacctcacaaacaagtagcaattgataggataagacacacttaacaaatgtaatctcatcaccatgacattttcattacaagctcatcaccaaacttccaatacaaccaattccaat

SEQ ID NO: 122698 - DNA, 247 bp, Glycine max
tagctttgaatcagctttttgttatttgttacgggctcaacgactgatgaagaagtttgcagacacgaaaagaagagatctgctgtttgagataggggaatgggtgtttttaaagcttaaacctcacaggcagcaatcagtggtcaagaggattaatcacaaattagctgctcgtttctatggtccttttaagattctggccaaagtgggtgcattagcttacagattacaattaccggctcagtct

SEQ ID NO: 122699 - DNA, 248 bp, Glycine max
agcttattatttgaatcataacgaacggtcactactggtaatcgattaccatgcatgtgtaattgattacatagtgccaagcttaaatacaaatttgtaatggctgttgccaatcattttttaccactagtaatcgattacatgctctggtcatcgattaccagagagtaaatcgcttgaaaaagtcttttttacttaaatttcttggccaaaccttttgctatttcaatttggaattccctttctaa

SEQ ID NO: 122700 - DNA, 249 bp, Glycine max
agcttggaatgaggtttgtcaatcatgagtggataatgactagagggccaatggccggaaacttggaacagatggatgaagatgctaaagttgaagctccacaagagcctgcacatcaatggagtccttttgaataactcatgattcaaaagatggatgctatgcttcacctccatcaagagcactcaactgaagttcacagttcgctggagaacataactacttggctagaaaacataaaaattaggc

SEQ ID NO: 122701 - DNA, 265 bp, Glycine max
tcatgatgaatcaagattgattctggagttttgatgataacaaagatgatgacaaaaagctcaaaagtcaagaacacttcatgataacaaagatgatggcttcaagaatcaaagaatgagttcaagattgaatcaagaacacttcatggttcaaaaggaaatttgatttcaaaaatcaagaatcaagtttcaagattcaagttccaagaatcaagatcaagattcaaggctcaagattcaagaatcaagagaagactcaatcaag

SEQ ID NO: 122702 - DNA, 249 bp, Glycine max
agcttgtgtattgctttattctactaatatatggaattgcccactgttttgcctgagaataacaattgcttgaccacaacaacgctggaggcggcaacggacaatggtctttcaaataaacctgttgtacatgaacaaacattatattatgcgctgaccgggccaaacgaaccagcgaagtcattgcataattgttacactaactatattcaatggacctaaacaaaatgattttcaaacacgtgaccc

SEQ ID NO: 122703 - DNA, 244 bp, Glycine max
ggcttgttgagcttctatggaggttttttctttgaacttcaatgagggtcttcaatggtgattttccaccatggagatgcagcagaagacaaaggagaacaggtgagaggaggtgtcatttcactggggaataatccatggtaaaaggagcttcgccaccaagagagtgccttttataacaagcttggagagggtgcttcaatggtggaaaagacagagagagtgattagatcataggggggag

SEQ ID NO: 122704 - DNA, 249 bp, Glycine max
agcttctccgtctttttcctataaatagggagcaaagggaagaataaagacgttcaaccctcctggtatctgaggatcacttgaaattagtgaaaaaaaatcgtttccgtgaagaaaatccaagccgaggcgcttccgtaacgcgtctgaaacgtttccgtgggtgattccgtgaagattttccgccatctatcgttcgttcttcatcgttcttcgtcgtcctgcggtcttcaaccgataagttcccga

SEQ ID NO: 122705 - DNA, 114 bp, Glycine max
acccttagcacatgttctgtaagtgcattctatccgaaaaccttatactggaacttcctaaccaaggaattttcttagaagctcaataacaaaatttgggaaggtcccaagtta

SEQ ID NO: 122706 - DNA, 248 bp, Glycine max
agcttcagctctctttccaaactctcttcacaaaatctgatttcaggcttaagtaagtggccttgttcatgcttgtgcgcttagcgcaattctgaaccgcttagctcacattagtgaatttcggcttaacgcatgcttttctcgctcagcggatggactgaagcggtgcgcttagtgagatgaagccgtgcgcttagcaaacctttacaaatcatctttttccagattcttcctcgcgcttagctaat

SEQ ID NO: 122707 - DNA, 244 bp, Glycine max
agcttaagaatgtgtgttgccagggacgagtaaccctttataaagccccggtaaaatcccgcgaggcccataaaccctcatagtgcctttggggcccttgatactggccattattgaaggggctgaattttatacggcaccagtcaaaatacctctcccgtcactatatgtcccaaatattccaacttttcttgatacaacatacttgagaaaaatactaaggagaactgacctgcaactagaa

SEQ ID NO: 122708 - DNA, 263 bp, Glycine max
tgtctctacagaagaaagaaacttttataagagtagattcattgcagataattctttgcaatgatcaagaataattatgaaccaatcaatcttgaagcataaattgaaaattggtcccacatcaagtaacagtccaagtaacttacaggatcttcaagtgttgtaattgagacagaaaatcgggaacttcatcctttaagctattatttgataaatccctggaaagcaaataattaagttgcccctttagatatatttaaatc

SEQ ID NO: 122709 - DNA, 246 bp, Glycine max
agcttcacagatgtttctattggttggcctgagagggaggtatacttaagcttgttctttgagccgcgaggcctacaacgtggattcttggtaggtggggccatgagaggctgattggcaatggcgagtgttggtggtggaaagggttgggaggaggaatccattaggtgatcctaaagtgacaaagggtacaaaactaataaaatgcaaaaggcatgattgtgatttgtaaaactttgcttgcgg

SEQ ID NO: 122710 - DNA, 251 bp, Glycine max
gctcatcttggttgtgaagctccttcttccatggcttattccctagtggatggtgcctcctctcacctcttctcctttgtcttccactgcatctccatggtggaaaatcaccattaaaggacctcattgaagctcaaagatctaacctccatagaagccccacaagcaagcttccatcacatttggtttaacaaatgcccctattactttcatgagattaatgaatcatgttttgagagagttcttaagaa

SEQ ID NO: 122711 - DNA, 235 bp, Glycine max
gcctaatgggtttttgggccccccgcatttggtggaccaagggggcaatcgggggatggcccaaaacaaatatcccttttccccaattcccgccttaacccccccttccccaattgcccaccttaattgaggttacgcacacatacgtagcccctttccccgttcctcttagcccggtgatgggccctcattttcttctatttatctaaaccccttttttcccccccttaatatg

SEQ ID NO: 122712 - DNA, 266 bp, Glycine max
tctatagaggctgaatctttgatctttaatgaggtccttcaatggtgattttcaaccatggagttgcaacagaagataaaggagaggaggtgccatccactagggaataagtcatggaaggaggggctttaccaccaagagagtaccttggataagaagcttagagagaaagtttcaatggaggaaaagaatgagagagaggcgggagcacgaaattgaaggagaaaaagggagagagaagttgaactttgaagtgtttctcacaa

SEQ ID NO: 122713 - DNA, 246 bp, Glycine max
agctcgctttttattgcacgaggcaatatttttataaagacccaaaaaatttgcacttaagtgagtgtttgctcaagccaaaaacttcaggtttaaacagatactacaaactctgcagttttgtaactctgaccaaaatcagtttaagccaaagttgttttgcttaagctaattttcctctgcaactttctttttcatcttctccaaaaaagaacttcaatctgggacctctaatcccaacttaag

SEQ ID NO: 122714 - DNA, 268 bp, Glycine max
ctaagcttgtgattttaacgatcagttggttatgggaattgaaaggaagacgcatagcaaacaaacaaacaaatctttaattatataagagtaaaaaatcaagaatattttttagttgcttaagagggacaaatatagcaaactagaagcaacaagtaacacatcacatacctttttctgacttgatcccggaggagtgcaaagcaatgtcggtgatgccggtgtcggaagagtggaggtggcatccatagttgatggttggagttag

SEQ ID NO: 122715 - DNA, 244 bp, Glycine max
agctttggttatcattagcaaagatttcttgggctttcttccaaaaagaacaacatgatttaaatgatcgaaggatctccaaaatatctgactcaactgattgccataacacaatgcaaagttgatagtcaagcttctcccattcaggtcttttatcgtctggaacagaatctgaagctttctccaagtggtcatggtgcccttgaccgagaaaccacaactccacggaagcagaccacgaaag

SEQ ID NO: 122716 - DNA, 259 bp, Glycine max
ttggcccaaaaagaatatacagagatgcttttagatttgtggaaagtgcagacatctttgtcttgacaaaagaactacctatatattaatttatatacctgtgcatattaatcttctctattttggctagcaataaagtgatcatatgtaaaccaattaaaattaggcatgttcattgttgtccaatttgatctccctaaggtgaactccaagcttggattttgatccttgttgaagcttgttgtttgtatgtagttac

SEQ ID NO: 122717 - DNA, 234 bp, Glycine max
  unsure (1)..(234): unsure at all n locations
agctnaanggagtttatacatgggaccaacacacttgagtccagaaagccgcatccagccaagaccggagagaccatacaagtctcccagcggaccctaaatatatgggccaccaagaccatcataagctgacaatagccgagaagcccaagaatgtcttcggggccggagaaagagtctgccaatgccccggcctcggctaacaaccgaggaagtacttgactcccgttcaag

SEQ ID NO: 122718 - DNA, 206 bp, Glycine max
agaatcaagccaacgctactgtggccgcaattaatggggaaaaacacaccaaatgattatgatgatggatggctcaaattctcacaaaggtaaacattaaaatgtagtaactaggaagtgatcctaggtcgtttcccaacgagcagtgacaagccaaatgttcataatatacttgcagtaacagtaacagtaacgatggggggggc

SEQ ID NO: 122719 - DNA, 248 bp, Glycine max
agcttatcaaaaagtgtttgctagttaaaaactcctttcaaagtaaaaatgttgtttctacttcaaaatcccttgatgtacttcacattgatttatttggtccttctagaactatgagtttaggtggaaattactatggcttagtaattgtggatgactactcaaggttcacttggactttgtttttgaaaattactcaaggttcacttggactttgtttttgaaaaccaaaaatgaaggttttgatg

SEQ ID NO: 122720 - DNA, 282 bp, Glycine max
tgacacttaaacctcaacctgccatttcaatccattaatttgtttctctgacaattttgcagcaaggatcctaggaaaacctcaaggatttggttagtagctttatcctcactccattattagtcttacccctttatggtaagtagctttattctcaataatgcctattatacctcacaattactacttagatgacaaaaccactatatataaatgtacaaaatgaaaatcatagaggcatcaaaaagaggactactatttactacgacaaatcactccatg

SEQ ID NO: 122721 - DNA, 246 bp, Glycine max
agcttcaacctttgttgcccatttccgctccaaattgcaaaaggagggcatttccggagtcgtgaagcgcgtctctacgtgtgggacttcgaaatttcaggtttgggtggacttctttctcctttgattttcgtgggtatggggttttgggagatatgatgggtagtcttgctaggtttctgctttatgatgattatttgtgaagaaatttgtggaaagcatgttgaacttgccatgtttggatga

SEQ ID NO: 122722 - DNA, 234 bp, Glycine max
tgtggtggcaccagctggagatggacagggcattaaatgaaacgcccatggtggtttcatggacggatatgatgaagagcatgatgaacctgcatgtgcctgctagttactcaagggacttgacactcaagcttctaagactaactcatggcaacttaggggttgagagatgttctgatcaactgctcctatcgcctttgctattacgtgtggtctggttcatgtatcaccttc

SEQ ID NO: 122723 - DNA, 245 bp, Glycine max
agctttcaccattttctttttgaactataacagtagtaactctatcatatcccttgtttacatacttgaataaatatttgatagaagtgctttggttacaccattcaatattgatatgtgtttgatatttccttaccaattttggattgtaaggtacaatattcctgttatcaattataaccccattcttggaaattgttagaccattgtctcttctgcgatagactagataaccatctgcgtct

SEQ ID NO: 122724 - DNA, 291 bp, Glycine max
gtgatactataccacacttcagcttttaaattttgaagaaaaggatttttttgttaatggggtggaatggttgagagggacgagaacaaatagggttaagaatgtttaagagcgcgagaggaaaacatgaggtgcgcattttgtttttttaatccaaatgaattaagacagtttttttaaacaacccgccgtaattttaattttatacaacattctaagacggtttttactaaccgtcttaaaatgaatgtcgtaaaaagcttttattcttactataattacaaaaatgac

SEQ ID NO: 122725 - DNA, 250 bp, Glycine max
agcttgacttgctgttttggtatcatgagatcctaatgcgtgaagaggatatgcacaagatagcattctgcacccattagggtcattatgaatttcatgtaatgccctttggcctttgcaatgctccttcttcgttccaggcgctgatgaacaccaccttcaaaccatatgtgcgtaaattcattatcgtcttcttcgatgatattctattttacaacaaatcattcaaggatcatctcctacatctgaa

SEQ ID NO: 122726 - DNA, 276 bp, Glycine max
tcaagcttgttcgtcacacctttcatgtatatttctaaatatactagcttaattatataatttgtctcttaattataattaatagttgaattgagtctcttaattaataaaaggtttaataaagttctccaattcttttaaaacatttcaattgagtattttaattattaaaaaaaattcaatcaggttctccaattatttaaaaatactacaaccaaactaaaaaatgtcgttaaaagagtacaattgtagtgattttaaataattgaatgacgc

SEQ ID NO: 122727 - DNA, 243 bp, Glycine max
tagcttattaaaaagttttttttttggaaactccttgtacagttgaaatggcgtttctacttgaaaaacccttgatgtacttcacattggattagtcggaccttctaaaactatgattttaagcggaaatgcctatggcttacgaaatgggggatgacaccccagggtcaattggactttttttttgaaaaaaacttacggttcacctgggactttgtttttgaaaccaaaaatgaaggtttt

SEQ ID NO: 122728 - DNA, 246 bp, Glycine max
cagcttcttaatttttgatgatgcagctgagtttgtagctacctcatgcactcctctaatgactatggcatcatttctggcgctaaactgctgagagttggaagccatcttctcaattaaatttctggcttcaacaagagtcatgtctccaagggctccaccactggcagcatctatcatacttttctccatattactgagtccttcataaaaatattggagaagaagctgttttgaaatctgatg

SEQ ID NO: 122729 - DNA, 283 bp, Glycine max
agtgtccttacacactcagcttgctttaatttacattgatgtttgtatttattggaggaggttgtatgccatttttgttttaagagtagcattccttggtaaaactaactttccaaatgtttgccttcgcaggaaatggccccgaggaagcttgcctcaaagaggtccaggaaggataaggcggccgaagggactagttccgctcctgagtatgacagtcaccgctttaagagcgctgtacaccagcagcgctttgaggccatcaagggatggtcgtttctcc

SEQ ID NO: 122730 - DNA, 246 bp, Glycine max
agcttgtcctttatttttaacatgatagcactggcatgttctgcagcattgcctacaattggaagcaagatgacagaaataaaagccactgacatattcaatgactcagatgctccctgcaagagaccagaaacacaatgtcaatgaatgaacttatgatgcagaatttatggataataggaatattgtgaatgtatgaatacagagttttgatgatgtcaaagtaaaatcaaacaaggttgtttc

SEQ ID NO: 122731 - DNA, 265 bp, Glycine max
tccacttttgaagcccatcctttatttatgacttctgctacgagaatggtgtctagctattagtatttaatttgcaatctatgatatccacacaatagtagtttcaaattgaataattctaaaatccttcaatgatatattttgctaatctccccatttttattcagcgaaaaatattaaatatttttaagatattaaatatatataataattattttattaaattatttttataaagtattaattaagatgactaaaatgagca

SEQ ID NO: 122732 - DNA, 203 bp, Glycine max
agctttggaaagtaatggttgagttgaagagaagttcatgatatgtctcttttatttcttcatcagatgatgtgtcgtctagttcttcccatgtgctcatcagtactttgttgtcctttggcttcttctttctcttttatttcttgcaatggtttattttttttgtcaactaccccattttgctatggtggcccattgcgccc

SEQ ID NO: 122733 - DNA, 268 bp, Glycine max
agcttgtgtaattaacctaaaattgttttataatgattattaaacacacaaaatggaagtactaagtatttattacctatacataacagaaaatacttataacactacaaaataaccataaattggaagagtttgatacaatttacacaagttttatacacaaaagttagtcgtattaaccgactaacaactcccccaaatttacaattttgcttgtcctcaaggaaaaagagaacaactcacttgccctcaagtgacaataacatgg

SEQ ID NO: 122734 - DNA, 228 bp, Glycine max
  unsure (1)..(228): unsure at all n locations
agcttggcctgttatgtttttatctaaggnaaagggaggggaggctaagtggccatcaattacctgtgtgccccaatgtgacagatgacattattcgacttcatcacaaaaaatggctcgcgttaaggattatgtatcagcggaacttttggacaatctctagctcgaaatggtgggaggattcaaccttagcccgaactcttcctggctctatcagcccaaagaact

SEQ ID NO: 122735 - DNA, 226 bp, Glycine max
  unsure (1)..(226): unsure at all n locations
aggagattttttataaggagggtnnttaggagagttataaaatgaattaataaagaaattaaatgaagggaaaaaatttagtggaaaattattggggaaaataagtagataaaaagggtagatatatgaaaaaaaagataatatgtgatttagagagatataaaatggtgtaagaattatatgaagaattgagaaatttttgggaataaaatgaaaagagggggga

SEQ ID NO: 122736 - DNA, 245 bp, Glycine max
agcttattcttatggcttgcctccggacttcactccccgtgccactccggaagatttaagccaagcccctacttttgaggggcaactcccgccttatgacgactatcccgggcaagatgatgaggaaggagatacccatctcggccccctgctccacctcaaagatccatccccacatgaactaccccaaccaaacatagtccgccatatcccggcctcacccacacccgtaaaagaatctgttc

SEQ ID NO: 122737 - DNA, 268 bp, Glycine max
tcaagcttctacttatgtggcagggcgggtttccttcactttcttgtctccagcgcgagctcggaccactgttcttccttcccgcgagatttcttttcatgtccgcctgagtgggcttatagcctaaaccatactttccacgatttccttgggtatttatcaggctagttatgccgccgttgtctttgcctaaacccatcccgggttcataaccgttccccaacataactcgggccatcattaccgctgcatcggacagacaaggttg

SEQ ID NO: 122738 - DNA, 242 bp, Glycine max
agctttattttttttttaacaatgacccactaacctataattaaaataacttaatgccattaacctagggaattaaaacaaactaaatggctgagagtaactgaaattgttggcaaccaaaagtcacccccaacatccaacaagtcagccaccatttggtctcccaaaaggctgatgcctaggttgccaattgggcccttattacaacttgaactaaagcccttttagttgattaacccaaa

SEQ ID NO: 122739 - DNA, 243 bp, Glycine max
  unsure (1)..(243): unsure at all n locations
tgccttgccccttgaatatttttggactcatggncactatgaatgacaaattccttgggataaaggtagtgttgccatgttttcaaagcccgtactaaggcatacaactccttattataaattgaatagttaaaggtaagaccacttaacttttcactaaaataagcaattggatgggcttcttgcattaacacagccccaatcccaacatttgaagcatcacactcaattttaaaagaattt

SEQ ID NO: 122740 - DNA, 287 bp, Glycine max
gcatgtctaagcattgttccacatcttatattttttttcaaatagtcgtacagtccattataccattgctccagggaattatcaagtaacgctcatagttcctctttacaaatcagtggtcctttttcgtacaacgaaaccgacactgttattggattgcgtctgcactaactttattatatgtagtccacatttttttttttctctaccctatcaaggttctttgaaacatatatgaagtcttctcctttctcttttgtagtccgaattttttccatttcgtccaa

SEQ ID NO: 122741 - DNA, 263 bp, Glycine max
  unsure (1)..(263): unsure at all n locations
tgaacaacgagtggttttaagcatttttttttttgaattcccnccgggacgggggattaaacctagcttaagcttattctccccccaattggacgaaccaacttgtcggtgctactcggtcctcttatcttttcccctttttcgctatttcctccccccattgcaacgctttggtgtttcttgtgcgccatctcgatgcttgcttcctgaacgcttcccaaatgcccttcgttttacagatgttttcagctgtctcctgtgac

SEQ ID NO: 122742 - DNA, 248 bp, Glycine max
agcttgggcgaaatcttttacagcatctcgctgttatcgtcattgctattcttaagcttcttgcatagcaacatcataagcttacccgaaagcctgaagtatcttccaagactccatcgtctttgtgtcggggaatgtaaaatgcttcgacgtatacctgcacttccacagtccattcagtgcttcctcgtctggaactgccaatctcttcaaacggtgctaagttcaacgattgaaccattggaatc

SEQ ID NO: 122743 - DNA, 271 bp, Glycine max
taaacttctaatagtttaaaaaacctttttttttggctggctttaaattttgtttagattgccctattcttaaattactattcttatatactagtggtagaaatgtaaagttttcattgtggagattaaactacccttattttcttttcctctgtcaacccctccttatgtttgctaccctttaacaaaattacatcttggctacttccgcaaaacatttttttcttcttttcattgattctggggtaatccatacttcatggaacttact

SEQ ID NO: 122744 - DNA, 96 bp, Glycine max
aagcttaaagcatgttttttttgtaagactaccttcactgaagaaacgcaacactcaattgaacatctaccaacacttaaagcaagcctggcataa

SEQ ID NO: 122745 - DNA, 254 bp, Glycine max
aagccaggttttttgtacatataaattccgagcaatacatatatcctcaatccacacttctggcggctttttataaagaagtcggtttcagcttcaaaaatatctaggaatccaagagttgtgcaatgagaaactctgattacttttggtaacacctcagagaaaaacaatataaacaccaacattatggcaaagatagtgacatcaatgacacaccctttttggctctaaacggaatgaatggccactactga

SEQ ID NO: 122746 - DNA, 247 bp, Glycine max
  unsure (1)..(247): unsure at all n locations
agcatgncaaggtttattaacaaccctcaatgtacaaaggaatattaaatgaaagaccagaaagacattggaatgtaaatgcaaccattatagtaagagataacaaattgcaaaaagaaaattatcaaaaggataaaacaaatgttgacctgatatcatatctcaaaagaggaaaaatacaattatctacgcagcaactgtaaaaagggaaataaaatattttattaaaaataaaaatatatacata

SEQ ID NO: 122747 - DNA, 282 bp, Glycine max
  unsure (1)..(282): unsure at all n locations
acataaaacctcaagcttttattgaatacaaatnngctgttatattgtcngacagaagaaggacaggtttctacatcccatgtctgattttcttccaatgctagaagtttttttttcaataacttcttttcaacatctatgttccatggtctatctaaatgaagaaggaataagagcaaatgctatagctgctgtcaatgattaacgggaagagaaaccatacttttctagtggttttctaacatgagtacttgcgacgtaaaggagctaatgttggatgaa

SEQ ID NO: 122748 - DNA, 228 bp, Glycine max
ggaaaaaaagaaaaaaaaagaaaggtagaaagaaaaagaaaggaaaagaagaaaagggaggaaaaagaaaaaaaggagcaaaaggagaaaaaaaaaaaagaaaagaaaaaagagaataaagaaaggaggagaaaggagaaaaaaaaaggaggggaaaagaagaaaaaaaaagaagaaagaaaggaaaaagggagaaaaaaaagaaaaaaaaaaaagaaaaaaaaggaa

SEQ ID NO: 122749 - DNA, 269 bp, Glycine max
tcttagccaacttgcttcctcatttgtatttgctagtgctatcatctcagatttcatattggactgagctaagatagtctgtttctttgacttccaagaaacagccccaccagctttgctaaatatatagccgttgggtgctttggaatcatctaaaagagtgttccaatctgcatcgatgtccttcaagtacagcgggaaaccttttataatgtaatccaagatttatggttcttttaaggtacctcattaccctttcaatagcgtgt

SEQ ID NO: 122750 - DNA, 245 bp, Glycine max
agcttgcctctttttttatgcgagacagagaccaacatgttagtcatcatcaacaagttccaagaagaattaaatatagccatggcccacgagcacaaagtggcggacaagtctgctccagtgtacgcggaaaaggaggctagaggaaaggtgatcgacttgttacatcaagaggcaacaatgtggatggaccgatttgctcttactttgaacgatagtgaataactttcccgattgctggccaa

SEQ ID NO: 122751 - DNA, 270 bp, Glycine max
gctttgttttgtagaaaacccacttttttttctttgtaaggaccaacgccttaaacggtcctcatcgcaattgaagatacgttggagcgagggaaacacccttgttgaccacaaaaaagaataaaaatacacaatgggccccaaaaagattaaaaaattttaaatagggaaaatacatataaacataaaaaaaaggaaaatacataattttgaagtcatgtcttgcacactcgattaaaggtgggcgtcccttgtgacggacgcgtgggg

SEQ ID NO: 122752 - DNA, 244 bp, Glycine max
agctttgatgtttatttgtggaacaaaatctatgttgtatagagggtgctgatgattacagggttttggcttctctatttttcatgttagggaatttgatatatacattagaaattttaatatcttaaggcaaacactaatgtcttctagctagatttggtatcatttgcagtgcataccatctaatcttatatgcctcaatgaatctgcatgctgtgtctgacactacaatggctttgaattc

SEQ ID NO: 122753 - DNA, 283 bp, Glycine max
actatacaactactcaaagcttggggaccgttctctgcttggtttttttttcggaaggggcaaccgtcggttggtcgtgaccctatccccacttgcattcgtccctatgtacctgtaagtaggaaacaaaaaatccaatggccaatcgtgtccggccatcgtcttaccttgggtgatttccgcagtcaacttgtctcgatttctaaccgtgacctaagaaggccctgcccctgttaccacaaaatatgcatgcgtatgtgcatgtatgttccttatgcgataa

SEQ ID NO: 122754 - DNA, 246 bp, Glycine max
agcttttaacattttttgaatgaaaacttaaatgatgttaaaattccaattattcacataaaaagaaggaaaataagagagaaaaattaacaaatcctacataagtcaatcccaaaatatacctatacataacagttattattgacaggctgcagcaactctagactcttgtaaacttattttaaatgaatccatatttttaatagctctaggatgtattggaatctaatctaatgtaccttaatc

SEQ ID NO: 122755 - DNA, 261 bp, Glycine max
tgcatgtagggggagatcagtttttgtacagcgtgcagttctttctcaaacagaagaacatccatccattcacaatcacaaatcaagacttaaaacatattaactcaaccattgctctttaagtgcaggtctggaaatgggttggaatggtgctgaacggaagtttagtacttttgaatgaacaaacggaatagtattgtgaatgatgatgaattgagtccaacatgggatcaattagacgtaactgtaattcatgcacac

SEQ ID NO: 122756 - DNA, 262 bp, Glycine max
agctcgcactatatttatattgacgtctgcatccgtgggaagaggacatctgccacctaagattttaacagcaaggtccccaccggttaaaacaaaactccccaaaacgaattgcctatcccacgaatcggacccgaagaagcaatgcctcaaagaacgaccagcacaagacacaagacggccgaacgaactaaaatccccctcccgagtaccacaatgcaccagcctcaaggaaccctgcacaccaagccgccgctgctaa

SEQ ID NO: 122757 - DNA, 232 bp, Glycine max
aacagaccaaaagcagaaattaggtgcatatagagctaccacatcttggaaatgagacaaacagacatatgggggccatctcatacacccccatggaaagggcaacagtatttcatatcattcagagacaaatactctagaaatgcatacatgtttcttatacatgaaaagccacaaactctggaagtgtttaaaacattcaaagctgaaggtgaaaaacaactcaacaaaa

SEQ ID NO: 122758 - DNA, 247 bp, Glycine max
tgcagcttcttttgaggtgagcttagttattagaggggtgtgtgtagctaagctctagcttttcaaggaagttttctcaaagaagcttctcaaggaagttttctcaagaaagcttctcaaggaagctacctagtctataaatagaagcatgtgtaacacttgttgtaactttgatgaatgagagtcttgtgagacatacttcaaagttccacttctctccctcttttattccttcaatttcatgctc

SEQ ID NO: 122759 - DNA, 259 bp, Glycine max
ttcaatgctcttaagcaatagtttaccaatgcccccatacttgctttgccaaatttttcaaaatcttttgaaattgaatgtgatgcttcaaatgttgggatttgggctgtattgttataagaaggtcatccaattgcttattttagtgaaaaattatgtggtcctacccttaactattctacttatgataaggagttgtatgccttaatgaaagcgttgaaaacatgaaaaccctatctttatcccaaggagtttgtga

SEQ ID NO: 122760 - DNA, 240 bp, Glycine max
agcttgctctaaatttacattgacgattgtatttattggagggagctgtatgccatttttgctttaagggtagcatttcttggcaaaaactaactttccaaatgtttgcctttccaggaatggccccgaggaaccttgcctaaaagaggtccaggaaggacaaggcggccgaaggaactacttccgctccggagtacgacagtcaccgctttaggagtgctgtacaccagcagcgcttcg

SEQ ID NO: 122761 - DNA, 261 bp, Glycine max
  unsure (1)..(261): unsure at all n locations
tctcttgggacatctngatcttttttccaaactgacattcaccacagattctgccttcttctattttcagattgggaatgcctttaacagcacctttgtcaatgattattcttcatgcctcttaagtgcagatgaccaaatctttgatgccatattctgatttcatcttctctggagaatagacatgtggaggagtaactggtttcttgaggtgtccataggttacagttgacctttgatctgctgcccttcattaggact

SEQ ID NO: 122762 - DNA, 264 bp, Glycine max
  unsure (1)..(264): unsure at all n locations
gaccagcaggcaggcaagctnacgccaacatattatttctaaacgaggcactgcaacaaaaatgattctaaaatgccaaaacaagacaaagacttaatgaaaaaacttattacccaaattgggaagagaatgaaaatacgtacaataaatcatgcatcaagacgatgggggcataaacgatacggtgtcatcgcaaaaggaaatatagatgcgatgtcagacaaaataacacatgcaagaaataggttaagtcatctgaaaaca

SEQ ID NO: 122763 - DNA, 325 bp, Glycine max
tgacactataccacacctcagcttttaaaaaaaaagacactccctctttttttttaaggggtctggtcccgcagccggtttcaagctccttcaagcaacctcccgccggggcgtcacttaatccgcccggaaccacacccggaaaggcaagcctccatccgctaaacgcccgttttgcaaccgccgaaggtgggaggaaagaaagctactagctgaggaactcatcatttttcaagtcgtatgaagagggaacaaactaaaaaaaagagaatttgagtggcatgtttagtacaaataattggttcctttctttttaatcttccta

SEQ ID NO: 122764 - DNA, 247 bp, Glycine max
agcttaagctcctttatttgcacaagactcttaatatttgaagagtatccttgtggaaccttcacccgacgaagacactgacaaaaacttatcttctccttcttggacaaattatggcaggctgggggcaagtagattttcttcccatcagaccttggatgcaactgtgatcgtatacccatatcagctagatcttgacgggtattcaagccatccttcgtcttgccttgaatgttaaggagcatcc

SEQ ID NO: 122765 - DNA, 263 bp, Glycine max
tgcttgtggagcttctatggaggttgtatctttgagcttcaatggggtcctttaatggtgattttccaccatggagatgcagcggaagacaaaggaaaggaggtgagaggaggcgccatccattaaggaataagccatggaagaaggagcttcaccaccaagatgagccttggataaaaagcttggagaggatgcttcaatggaggaaaagaaagagggagagaaagagagaggggggagcacgaaattgaaggaataaaaga

SEQ ID NO: 122766 - DNA, 247 bp, Glycine max
agcttgcatgattttctttctccccctttctcaagcaaattcttaattcttcttgacatcgtcaaaatcttcatgatttacacaaattacaaaattacaaaacggtcctcaattttgggggttgttctctctttggtgattcactcaatttggagtacttcttagtccaatagctcttaaggtggttggccccttgcttctggactcaaattcttcaagggatggcaccaatcttccttccaattcc

SEQ ID NO: 122767 - DNA, 292 bp, Glycine max
gtgacacttataaaccactcaagcctttcggctcatgcggggaacgcttttatttcaacacccgtgcagcctaaggtacccacccagagggaagctccccaagttccaactccgaacacgactcgaccggccggtaattccaacacgacaaggaacttccctccgaggccattgccggaattcaccccgctcccaatgacgtacgaagatcttctaccatccctcatcgccaatcatttggccgtggtaactcccggaagggtcctcgaaccccctttcccgaagtggtatg

SEQ ID NO: 122768 - DNA, 246 bp, Glycine max
agcttgcaaaccaattttttaccactactagaggagaagcctttaggatgattcatataaacctacgcctgtaaatcaccattaagaaagaatgatgacacatccaaaaggagcaatccaaggtcaaaatgagcaactaatgcaaagaaaatacaaacagaatccaccctagatacaggagaaaaagtctctgtgtagacgaaaccttcaatatgagtaaaacccttagcaacgagtcttgccttg

SEQ ID NO: 122769 - DNA, 241 bp, Glycine max
tttttttcaagaaaccatctcaaaaccaagcctatacataatggctaatgtaactcccgtcgaccgagtggatgactgagattttggacttcttggagaaaagcttgctccaagaaaatccaacggcaacaacaaagctcaaaagaaatgctagttattacgtaatagagggtgaagacttatatcaagaggctttacaacacccataatgaaatgcctaaccagagacgaaattgaatat

SEQ ID NO: 122770 - DNA, 249 bp, Glycine max
agcttgcgaacctttaatacattcttataaaatgggcaattcttacatgtaaatgttcgtgttatacttgttataggaaccttataattctaagtatatataggtgtagaatggtgttttgccttaatatcaaagataatatgattgtttgcgattatttggccttattgatgccaatatactataattggaagactcatttaaaggagtatgtcatacggaaatcttttttgaaacgaccttataatt

SEQ ID NO: 122771 - DNA, 271 bp, Glycine max
tggcaaagaagctagccaaagcctttctattaatgaaggaatttgcagaccaatggcgccaggatgtaagctacgaagaaggagacactgtgttggtcaaactacgacctcgccgccaaacgtcagcaacaggaggcacttattccaagctcgcaaaaagatactatggaccattcaaaattgttaagaagattagcagtgtgggttaccaattgaatttgccatcaacttctagaattcatccaatttttcactattcactacataagcc

SEQ ID NO: 122772 - DNA, 276 bp, Glycine max
  unsure (1)..(276): unsure at all n locations
agcttggaacanatgattctagnatccgaggtgcctctcacaaaatttgggtccaaatatactgcaaagctgatcatttgagtttgacaaaattcatgtactatatctccttgggaccaacaggtttcttccctaacaaagatggcaggtcaatcctctatatggttgggtttctttacatgaaacgattgtgattgggaagcaatggtgaaagagcctgcttggcttgtcacaatacaacctttggttgtgttaatttcacacaaacttcaactc

SEQ ID NO: 122773 - DNA, 262 bp, Glycine max
gctggatgatctctaaagcatttttttactattcccaaaaaaggagtataagttctccaaaatgaagaggagagctagccaaaatcgattgcatgcctatctaatgtgtctcttacacactttattgcctacacctttaacattccaagataaactgaagtattttctaaatctatcattgaaaaaaaggttataatataaaaagagaatttgaagcaattttttaaaataccaaattaataagttgtttggtaacccacta

SEQ ID NO: 122774 - DNA, 246 bp, Glycine max
agcttgccgctggttctgacccatcaactgccctaactctcttagactggtgatccctaggctcttgatcttgactggatagaacctccttttaagtgaaggcttttgacttgatcccatgttttactaaagtgaaacaaaacccagtgcgaatcaaaacaccgacatctattatgggtggaatggatgaatgcatgaagaaatgcatatgatacagatgtaatttatgaatacgggggcccggga

SEQ ID NO: 122775 - DNA, 268 bp, Glycine max
ctcaagcttgggcaagtttgtgccttcatagtgatggcaacaaactttcctgggtgagtttagctcgcctgggcaaatttttctgcacctcttggctcttttctataaatagccatgtcaagtaagaaaagagggacattggaaggtagagagaaacctgagaaacaccagaaggaggaaggaagtggaaagtggagctcgagcactatagagttgtgaccgaggatcacatccttcgtattattggtaatttcattttgttcgtaat

SEQ ID NO: 122776 - DNA, 245 bp, Glycine max
agcttaatcttttttggtgtgtttgaacatggaggagttgttatttgattcaccatcgaccaggggcaaatatccaacttataaagggactatgacatgttttaatgtatggtccccccaacaacccattttttaaaatagcaagaacttagacctcttttcaacccctctaaaaagtcttagcaatgcttctcggggctaggttgcatgtgtcatagattgttcatcacataatttcacatcta

SEQ ID NO: 122777 - DNA, 262 bp, Glycine max
tatgtttttagtgtgttagtgttctgtccaaggccagactaagaatatttcttcaatccttcaatttgatgcttcacataagtgcttctcatggataacttcatcattcaacaaccttgcctcttcttatgtagctagctcttcctttctgatgtgtcttcagtgattatggcaacatatggagggtgaagaactattagactttagtctgttgacattattcaagtgatgcatcttgagtctttttaaattattctgatgt

SEQ ID NO: 122778 - DNA, 244 bp, Glycine max
agcttttgatttattttttaaagctatacaattttatttgctccaggatacttgatgcagaatgggaggctaaggatctgtaacacataagaggagtaggacaagagatgaaccgttaaagacatttaaaattcttccaaagaggactgtcttctgatcaacaattaagaaaagactgagtgaattcagctacttataggatagcaacccttattctggccctcaaacgaactaatgctatcca

SEQ ID NO: 122779 - DNA, 261 bp, Glycine max
ttctttacaacaaagagaatattttatgaaggattgaagaaatacaagtagtggggatgtttcctccacctctagaacctcacaatcactcagaaactcatctcatgctctcaaggttttgcacttgcacatttgagaagaaaactcattcgaccaggagctcgtggaaaatgcccaaagacaattgtgatagtagggcacatttgatgttagtcactcatgcagactccttaggattccttttgaatccaagggtggcct

SEQ ID NO: 122780 - DNA, 268 bp, Glycine max
agagacgaccgcacgcaagcaagctaatagattctttttggtgaccaccgagaaaaaaaaaaaagtttgacgaaaaactcacaaccatcaacagcacgtttttaaacagaggaaaaaataaaaccgcaaaagccactaccaggtctagagggaaggaatggttaaaacttaaaggaagcgcaatgaagacatgacttgcgaggcgaagcacaacaaatgtgcaaccacaaagaacacatacaagcctacgacgggactaaagcaccaa

SEQ ID NO: 122781 - DNA, 267 bp, Glycine max
ttttttgttcgagttaagatgttttttcaaccatatcaatagattgtaacaaccgaataaaatcataaagctttatcgtggtacagattgtaatgaaaggaaatagttaaccaataattttatcataattcaaccacatttaatcatttgttatttattcttgactggtcgttatcaatgagttagtgctgaaaatatactattatcttacgcaatgatatgcgtcaacctttgtggatcacaccaaattaatgttttttaaggggg

SEQ ID NO: 122782 - DNA, 241 bp, Glycine max
agcttctagttctttatacttaccttgacttaattcctttgatagcctttttgagccttgttttgaagctcactacaagccttaagtgaaaaaccatgatttcgccatatccttaaggaattttggagctttggaattgttctgggaataagtgtggggggttttttttcattagagaacagggtgtgttggccttgcttcatgatatattttgagccatatttgatgtacattgcatatt

SEQ ID NO: 122783 - DNA, 258 bp, Glycine max
tcttatccaaggctcatcttggttgtgaagctccttcttccaaggcttattccctagtggatggtgccgcctcttacctcttctcctttgtcttccgctgcatctccatggtggaaaatcaccattgaaggacctcattgaagctcaaagatccagcctccatagaagcttcacaagcaagcttccatcactggggttattgttacaaacacagatttgtctttgatgaatgcagcgaaaactgtattcccggatgct

SEQ ID NO: 122784 - DNA, 241 bp, Glycine max
agctttatgatttattgaaaccccgtatatcgatcttgataatcctttggccaaggaattaatggaagtctatgagttcatgggcgacacattagcctttcaatatgggggttctgcaggacaccataagggaatctctctaccttctggagtttggactttatggattatgaaatgtaatttgggatcagaatttctacacataattattttatttaggatttgcatgagtttatcttaa

SEQ ID NO: 122785 - DNA, 262 bp, Glycine max
tgtagctgacatccaagcgcagttagtccataagcatattcacgaatatgttagataactttgtagaaaaccctaaaatactagaagagctttagcttaagttttcaaacatctttctatcatgttgatctcagtgtcagtaacagggtcctagatctattctctgaaatatctcagccaacagaaaaaataacatcaattaacaatgaataaccatacggaaaaagtaaatcaccctgattttgagaaatgctataatcga

SEQ ID NO: 122786 - DNA, 248 bp, Glycine max
agcttatgatccacttgtatccaaatggaaatatcacaatcaaatgggatattataagctggacacctgatggctatgttgcaagtctattctttttttcaatgtcgcctattaaaatcagaagcaaataatctgattttataattaaacatgatggttctaaatgtttttggctctttttctctctactagttgggcacaacttttgtggtggatctgcatgtttacaacagttgcatgtcatatgt

SEQ ID NO: 122787 - DNA, 220 bp, Glycine max
  unsure (1)..(220): unsure at all n locations
tgacaaacagaaataatggggagcttcnnccttggtttcttttttggttaacctctacaacnnatatagcaaacacctttgaacattattatccannggtcttagaacgtnntgtaagggtattagaaagtgaaatcaactcatttgcgtttgtatttgagtcttcaatcccaccctttttagaaattttttcgtctttagttcaagagtattgtggttg

SEQ ID NO: 122788 - DNA, 248 bp, Glycine max
agcttataaaaacttttttgggttaatcataaccaaatatgcatgtgaattaggacgcctcataaagaatcaagccctggctattgtgcaagcaatcaatggggcaaaacacaccaaataatgataatgatggatggctcaaattctcacagaggtaaaatcattaatttcaaattgagctttcaaaactatcacgacatgtagataataatcaaggatttcaagtcataaaatgtcaaaaacattta

SEQ ID NO: 122789 - DNA, 263 bp, Glycine max
tggagagggtgctttcatggctgtttttaaagagagaaggggggagcacgaatttccacgaataaaagacggagacaagtggaactttgaagtgtgtctcataacactttcattcctcaaagctaccacaagtgtgacacatgcttctatttatagactaggtcgcttccttgggaagctttcttgtgaaaacttgcttgacaagctttcttgtgaaaacttccttgagaagattctttgagaaacattccttgacaagttat

SEQ ID NO: 122790 - DNA, 271 bp, Glycine max
tacttcagcttgggggttgctggccatggggttttttttttgagctttttgggagctttgttttggggaagaatggggtgaaaatggcttcatcgttcccctttttatgtttttttgacagtcatgctcgcccaggcgagctagccactcgcccaggtgagctaatatatttttttttacaaaaattctttgcaaagttgtgttattcattgtttctctcttaaaatcctataattgcatataaacttagacgaatttaggatatagctca

SEQ ID NO: 122791 - DNA, 245 bp, Glycine max
agcttttgcattctttttcatttatcctatctccgacagccaatgggtgagtcccgtccacgtagtcccgaatagaccggcctctacagtgattaaaaatgagaaggaggagctgattcctactcgggtgcagaatatttggagagtgtgcattgactataggaggctgaaccattttaccaaaaaggaccattttcccctgccattcattgagcaaatgcttgaacgcctggcaggtaaatgcc

SEQ ID NO: 122792 - DNA, 246 bp, Glycine max
gatttgcattctttgctaagccaatatgctggcttagcgagccatccgctgagcgcaacattcctcgactaagcgcgaggaaaaatctggaagaaggatgagctaagcatgttcgctgagcgaagggtcatgatgtaggctccattggagcttgtaggtctaggatcttcttcatcaatggattcctttgcttcttggaagatgaatggcagtggaatggagaaggacaagagagaggagacgcca

SEQ ID NO: 122793 - DNA, 242 bp, Glycine max
agcttcctcaactgatttctgtttaggaactaccttagttttaatggtttctcctaaaacttgtaaacatttgttggtataatttgcctgttccattaggctcttaatgtctttagaggttacttcctcattaacatcttttgttttgaatggaacggccatgacatgcttattgttactgtctttgacattcggtagttgatattgtgttgcaggaggtaattccgattgaattaactcac

SEQ ID NO: 122794 - DNA, 264 bp, Glycine max
tgccacctagctcgcccaggcgagctaggttgcttcctccagaagcaaccaccttctggaggaattttctagaaggcccaagtgggcctggttgctatttgcacccacatttttactaagtacacccccatgccttttttggtgattctttttccgtaacgttacgaaactttacgaatttcgtaacgatgcttattttctttccgtaatgttatgaaaccttacggactacgtaatcaaaccccttttggtttccgggatgtc

SEQ ID NO: 122795 - DNA, 253 bp, Glycine max
agcgagcacagatattttattatcagcatcagaaacaacgacgagaaaacagtcgggcccaacaggcagaaatcgaccaatgaagcgaagggagaaacagaaagaggaggaaagcgcgcaggggcaaaaacgccattacaacacccacggaaggagaccgggaagcccaaacgagcgaagagcgacaacaaaagaggaggaaatcccaaaaaagggatcaggtggaacacccaagatgaacgacggggaaaaa

SEQ ID NO: 122796 - DNA, 248 bp, Glycine max
agctttttggagtttttacatgggaccaactcattttatttcaaaaaggaagtcgtatctagtcaaggtctgagagaccatacaagtttcctaacgatttctaattatgtgggccattaagtctatcatatgctgacaatagccgagaagcccatgaatctcttcgggggcggagtaggtgtctgccatcgccttggccttggctaacaatcggggaagttcttgactcccgttcaaggtaagagcaa

SEQ ID NO: 122797 - DNA, 267 bp, Glycine max
tacatagccctcatcttaaactaattctaacaaaacataaaaaccctaaaattctaaagctacagtaaagtcttctaccctaaagttaagataagaaaaagagaaaaaggatcaaggaacttacttggacggggtatgattgatgcttcaaagtcgaaaaatgcacaaagagagtacaaatgcaaaatgtgcaaatttttttggagagagagaatgcaaaggcgaggtttctgtactctaacaaatttgagtgtaactgttgttaca

SEQ ID NO: 122798 - DNA, 279 bp, Glycine max
  unsure (1)..(279): unsure at all n locations
ggggaagctccacaggcgagcaggaggcatgcaaacggggttatggttgggacgaacggccccgaacgaagaagagaaagatacaaggccggaagccacagacaaaaatagggaaaccacacctgcaaagcagaaaagaggaggaaggatgggcgaagacaacaaaaaccggagggccagaacaagaggaggaagaggacacaccaaccgggacggcnaaaatagaacgagcaccacgaaagtcgaaaaaacagcatgcaagggagccaaagagaaaag

SEQ ID NO: 122799 - DNA, 269 bp, Glycine max
tgttcgtgactctcacgttgttttttaacacgctctgaaccacaaaagaggcctcaataaaactgcaacctgggctggcgagcactgctcaacaaagtgaaagcgacaccctactttacagttgagaagaccaaccgctgactttggaataatgcagacaatcacgtcaggaccttacttgataccttacagaaaaggtggggggaaagggggccatgacagacatgattgtctatcataaccacagtgtacaccttattgtagaaatg

SEQ ID NO: 122800 - DNA, 242 bp, Glycine max
agcttctttgttattacttccttgagaagcttctttgagaaaactttttggtccaatttttattttttacaaatatgttcaagggaaatctgatttgccggaaagcgcaccgggtcatcaagtatttaaaactaaaatggagtgatccgagtatcgaactatggaacttgcttattagaaagagttttattcagaaataaggcattgttggaacaacattgattaacgatggttaaaaatac

SEQ ID NO: 122801 - DNA, 262 bp, Glycine max
tggttcgaggtacttacccgttgtagatcgaagaacgatgaagaacgaatgaagaacgtcgaagaacggttgaaacctttgcgagattcctcacggaaaacgttacggaaacgtttcggaagcgcctcggcttagatttttttcacggaaacaatttttccaagcaaattcgaaagggagagaagtgcctaaggggctggcccccctttttcttcttgcattcctcccctatttatagcaaaataggggaggtggttgccgc

SEQ ID NO: 122802 - DNA, 247 bp, Glycine max
agcttgtaaaggtgttttgttgccgacatatgttttgacctcgttttaaaatttcataatgcttaggcgacacacaaacttatttaatcttattcgttagattagatcatattagttagctttttgaaagcaattcagctggtattttataacatcgaatgagtggatcaatttgtgggattgtttcatcttcgagcacggcggaaccagaaaaaattatcaagggagcaaaaatttaaagaatata

SEQ ID NO: 122803 - DNA, 261 bp, Glycine max
tttggactttatgcttgagggctattctctattcgatcgaatgccccgaggtacccccatgatacacgcaggtcgcattgggattgtaccaccgagggaaaggagaccggtagatcctttcgagggttgctaccaccatttggttggtgatcaaagatggcaacaagtccccgtacgacatcgaaattggggcaaactctgaaagctttttcactggagggttcctccccgggttggcactcgtgccacccttggaactgt

SEQ ID NO: 122804 - DNA, 249 bp, Glycine max
agcttctcaaggatttttcctagtctataaatagaagcatgtgtaacacttgttgtaactttgatgaatgagagtcttgtgagacacacttcaaagttccacttctctccctcttttattccttcaatttcgtgctccccccttctctctttcttttcctccaataaagcatcctcttcaagcttcttatcgaaggcaattcttggtggtgaagctccttcttccttggcttattccctagtggatggt

SEQ ID NO: 122805 - DNA, 265 bp, Glycine max
cttgtgcattcaatatcctaatgaggatgttccatatgttctcaagactggcctaatacatttgctgcccaagtttcatggtcttgcaggtgaagatcctcataagcatcttaaggagttccatattgtttgttccaccatgaagccccctgatgtccaggaagatcatatctttctaaaagcttttcctcattctctggagggagtggcgaaagattggttgtactaccttactcccaggtccattaccagttgggatgacctt

SEQ ID NO: 122806 - DNA, 248 bp, Glycine max
agcttccttaagattattccttatgaagcttgagcttagctacacatacctctctaatagctaagctcacctccttgagatgagaagctagagcttagctacacaccccctataatagctaagctcaccccatgacaaaaaaacatgaaaatacaaaaaaaagtccttactacaaagactactcaaaatgccccgaaatacaaggctaaaaccctatactactagaatggccaaaatacaaggcccag

SEQ ID NO: 122807 - DNA, 270 bp, Glycine max
cttgaaaactattggaagatttacattttttgatttttattcaaaactaatcactggtaatcgattaccaaatcattgtaatcgattacagaaagcatttttgtgaaaggatgtgacctcttcacatttgaatttgaatttcaatgttcaaacacactaataatcggttaccaatatattgtaatcaattacaccattttgaaattgattggaacgttgtaaattcagttgaaagctttttgaaaacaaaacttgccactggtaatcgat

SEQ ID NO: 122808 - DNA, 253 bp, Glycine max
ccagcagggaggcaaccatcgagggggcgcttttttaacatgacaaaataatagaataccaaaaaggaggccaccattacgaaaagcgcgacacactacataagagggggaaccaccggggccgacaaacccctccaccttatgggcgggggacaagaacgaaccagcccacgaattgcacatgggccgtaagtaggagccagccggaaccatagcaaagacgaacagatactgactaacaagagccaccatc

SEQ ID NO: 122809 - DNA, 272 bp, Glycine max
cagcttaaacattttacttcgaacggctttttttttacgagactcaatcagacatccgataaaaaacttattgtcatttgaatttgctcaaaggttcaacattcaatttcgagcgtctcgttatattacaggactcaatcaaacattcgagtaaaaaggtattgtcgtttgaattagctcagagcttccacattcaatttctagcgtctcgatatattacgggcctcaatcagacatccgagtaaaaatatttggcgtttggattggctcac

SEQ ID NO: 122810 - DNA, 246 bp, Glycine max
agctttgggatttcttttaatccacataatttatccaaacccacagattatatatttagttcaacataatttatcccaaaaattgacatacaaatgcatatataaatcacaccaaatataattcaattgattagtacaactcaaatcctgccattgggaatctctcaagacacaattgtaggtattaaaccagaaggcggatgtttctttgctttatacattggtatcacaatcaattactgtggg

SEQ ID NO: 122811 - DNA, 234 bp, Glycine max
tttcactttggttattaggggattcattcaaggaaacttccaaagaaaaacgtccaattgatttttttgattattttattattattttgcttttttttttgtttaaccgaggttacagtgtgaactatcggttaaattttgctttaacagggattaaatgacattacaacacaaatgatcggttgaaattcattttatcatttattaggcgagataacggcttaaataaacggg

SEQ ID NO: 122812 - DNA, 244 bp, Glycine max
agcttggagagttttcttcaatggaggaaaagaaagagggagagaaagagagagggggggagcacgaaattgaaggaataaaagaggtatagaagtggaactttgaagtatgtctcacaagactctcattcatcaaagttacaacaagtgttacacatgcttctatttatagactaggtagcttccttgagaagctttcttgagaaaacttccttgagaagcttctttgagaaaacttccttga

SEQ ID NO: 122813 - DNA, 263 bp, Glycine max
tcttccccaattttctataaatttttggagaagtgaagtgaaaaagggttcagccccttaggcacttctctcactttcgaatttgcttggaaaaattgtttccgtgaagaaaatccaagccgaggcgcttccgaaacgtttccgtgaggaatttcgcgaaggtttcgaccgttcttcgatgttcttcattcgttcttcatcgttcttcgatcttcaacgggtaagtacctcgaaccaagcttttcgattcattctatgtaccc

SEQ ID NO: 122814 - DNA, 251 bp, Glycine max
agcttgattgaaggtttatttttctcattatacaaagtttgcaggaactagttcagcaaagaccaattatgagtatagagcaattcgttgagaaggtggcctggccaggagcccgaccttcttttgtgggggataatgaaagttttacagcccagacacctcaacagcatgagctagaaccaggaaatgatcactcatatgaagccaccatcgctggagctgttgattgtaaaaaaagaagattagagacg

SEQ ID NO: 122815 - DNA, 277 bp, Glycine max
actcaagcttatgatgatttccatccaaaaatgtttactaagaacttaaatatgcatttgcttttgattagaagtaagaagaagatctaaacaaaaaagaagcaaaataggcgttcatcagagggggagtaaacggaagattgaaggcatttaacttatgggaagtgtttatgctttttctgatatttattcttgtactcatcaaaacatcaccttgatgtaaaaatcttttgtgaataaaataagttgcctttagacttttactaaagactttttc

SEQ ID NO: 122816 - DNA, 244 bp, Glycine max
  unsure (1)..(244): unsure at all n locations
cgctcattttttatttttcaacaggtcaagtagngaatatggaagtaaccatgctgcagaattggggccaaagatgaattgagtcacattactgattcgtctactggcaaacataactaggatcgttgacggccttggtacttccagtattcaccttgacacaaatgtcatggatcatgctgaaaatctaaactgattcaacccacaattctgcgtaaaaacttacaatacttgaactggccat

SEQ ID NO: 122817 - DNA, 260 bp, Glycine max
tcagaaccacttcagaattttttttttggcattcccagaccacctggtcctacaagatctgttagcatggacctctccaaggcaccactggaatcagcttcatctgttgatctttttcagttaccagcagcaccatctcaagctccaacattggatttgtttcaatcatctctttcatcggcagatccatctttcaacgagaatcaacttagtcaaacatcccatcttgcatctattgattttttttccgatttttctcc

SEQ ID NO: 122818 - DNA, 241 bp, Glycine max
agctcaactatacttaaagaaagctgtaagtatatcctaaaaatattattctctccgatcaaatataagttatttttcattcctcataaattcaattatacagattaaataatttcatcttacaaatcttcacctaaacaaaacaaatagttcatattttaaaccaatattttgacagtttaaaatagttagttttattttaattgataaaagataattattatttgtgactatgaaagta

SEQ ID NO: 122819 - DNA, 262 bp, Glycine max
  unsure (1)..(262): unsure at all n locations
tctcgatgtattatgcgcctgattctgacatccgagtgaatggatatgaccattggnntttcttaagagcttccgttgttcaatttcaaacttctccatttattatgcgcctgaatcggactttcgttgaaaagttatgatcaattgaatttcacgagagctttggttgtccaatttcgagcgtctcgatatattatgcacctgaatcggacttccgtgtgacatgttatgaccatttaaatttctcgagaccataccttgt

SEQ ID NO: 122820 - DNA, 250 bp, Glycine max
agcttcctttacaatttagagaagagaaagatgaaagattgcaaaaatacaagtagtggggatgtctcctcaacctctaggacctcacaatcactcaccaactcgtctcaagctcttaggacggcttcctcttccagctctggtctctgcagatcttcacacaacaaattctctcaaactctctggaacttggacctttctctctctagaactctccaattatgcagaagcttcaggaaaaggccaaact

SEQ ID NO: 122821 - DNA, 264 bp, Glycine max
tatggtggaaatatttaccataaatcttcttaaaccttaagaggcaaatcaaccacagcagagcaattatgacctttccagcaacagatacaaccctggatggaggaatcaccctaacctcagatgggccagccctcagcaacaacaacagcagcctgctccttccttccaaaatgctgctggcccaagcagaccatacattcctccaccaatccaacaacagcaacaaccccagaaacagccaacagttgaggcccctccaca

SEQ ID NO: 122822 - DNA, 250 bp, Glycine max
agctttgctgttatttctatgatatattatgaatcttaattgtgggaactaattaaagaaatgtttctctatattatgctgaagtggtgcttaaaaattggcaggaaatgaggaccattactctatcataaagcaaggtcaattcgtccacttagatgatctctgtcttgctcacatatttctgtttgaggaaccataagtggaagggaggttcattatgcagtgcatgtgacgctaccattcatgacat

SEQ ID NO: 122823 - DNA, 264 bp, Glycine max
tggaatttacccccttttgtatttatcttttgtcggaattggaaaaagacattttgattttaaaatttgttaattaacacgaacagggcggtgctgtacgagagaaactattggtttaaataactttgggggatgggagggtcctagaaatggggttccttgcaatttgtacagagacaagaatattgtactatatttcgttcacggaatagaccacatgaatcctatagacaatgctgttcaagttgacaacatccactacat

SEQ ID NO: 122824 - DNA, 229 bp, Glycine max
agataggggtttttatgtcaatgtgcatgtgggttaggccattactcaacgtgacatcctacttatttactgacctaaatccagaagaccgctttactaaaaatcaactcttgggctcttaaacgaaggagacgactatgctttcagacatgacccattccaataggctgtcttgaggtatatcctcaggccctagctggatgctatatcttacagcttcttaagacac

SEQ ID NO: 122825 - DNA, 254 bp, Glycine max
  unsure (1)..(254): unsure at all n locations
agcttgaggaanctttttgttttacccatggaccctcgtgttcaaagtctcatcgaccatggggcaactctaccggcacattacaatggcagatgactaaaagcggtgcaagaccccgaacatctaattcttaattaaacaaaaaggtggggattaatcccacgcctgaaataattgggactcccctttcaaaagccgacaatgtttagatgaactctaacattttaaatgggcaattttaatggtggaaaatt

SEQ ID NO: 122826 - DNA, 272 bp, Glycine max
aaccctaagcttccttaatttttggggacggaactttttaacgaaccttttattgaactggccttcaacacaggctgtattaagaacaccttttggagttattcaaggggcgaaaaccacctttgcgacatatacacgttttaggatgcccgcctgaagtaagaatttataatcctcaagagaagaaactacaccctaagactattactggggatttcattggatatcctaaaaggtctaaagggtataggctctattgtgcatcccacaac

SEQ ID NO: 122827 - DNA, 245 bp, Glycine max
agcttcaaaattttttctctaactgggtgaagatcgatgaacgatgaagaacgaatgaagaatagcgaagaatgatgaagaacatccacagaattgatcacaaaaacatcatggaagcgttacagaagcgtctcggcttggatttattccttctttcttcttttcctcactaattttaagtgaaaactgaatatccaatgtgctgaaccccttcccctcagtcccaaaagtcattttatagcaaa

SEQ ID NO: 122828 - DNA, 285 bp, Glycine max
atttagtgacacttcaatctcagcttctacttatgtggcaggctgttttcttactttcttgtctccaacgcgagctctgaccactgttcttccttcccgcgatgcttcttttcatgtccgcctgagtgggcttatagcctaaaccatacttcccacgatttccttgggtttttatcaggctagttatgccgccattgtctttgcctaaacccatcccgggttcataaccgttccccaacataactcgggccatcattaccgccgcatcggacagacaaggttgcc

SEQ ID NO: 122829 - DNA, 326 bp, Glycine max
tttaagataggaatcaaggattgttttttttttatccaacaattgatctcctgagcgagtgaactccacgatccgcacccacgtgcggcttttccatgaataaacatacagatgaatgagccaacaagtccccaagcacgaatgaactctcacagatttgatgttctaagaacaaattccaaagaatccaagtttccccaggttttcaacgaatacaacgaacttcccgaatcacagaatacatcatcgaatcaaggatctcatcgacatcaagaaaatgacttcaatcgacgataaagtgctaataaagctcttttccaaaacat

SEQ ID NO: 122830 - DNA, 244 bp, Glycine max
agcttaccctttgtttctcaaatcagatgattgactggtgccgcaccgatctggcaaaaacgctgaaagttcccgtggagaatgtgcgtattatctccccgtatatcggcggagggtttggcggcaagctgttcctgagaagcgatgcgctgctggcggccctcgccgcccgagcggtgaaacgtccggttaaagtgatgctcccccgcccctctattcccaataacaccacgcaccgccccgc

SEQ ID NO: 122831 - DNA, 260 bp, Glycine max
tcatacaggcggcgtaaacgccttatgtggaggtattcgcgccccattgtccaccagaacccgcagaaaccgggaaactggaatcgccgaggtgaaccgcaacctgctccagcggtacgccaagcatttccgctgccgtctgggccagaatggtgtagctgccggtgccaatgtcggtcatgtccgtttctacggtaacggtgccgttttgttcgaggtgaacccgagcacccgatttttccagcagattattgcgaaag

SEQ ID NO: 122832 - DNA, 239 bp, Glycine max
agcttaatttttgcccgagtcattcatccctatgagatgttgttgaagtattggcgatcagaattgccattccttggattatagggttgaaccaagctcatgcttttacaaaaaggttcataaagtcaagttgaaatatggaagtaaccgtcttgcaaaattggggcaaaagatgaatcgagttacatcactgcttcattttctgccaaaacacatttaggactgttgatgtccttgtt

SEQ ID NO: 122833 - DNA, 263 bp, Glycine max
tgaaggcaaactggatgcgttggtcaacttggtaacccaactggccttgaatcagaaatctgtacctgtcgcaagggtttgtggtttgtgctcctctgctgaccaccatacagacctttgcccttccatgcagcaacctggagcaattgagcagcctgaagcttatgctgcaaatatttacaatagacctcctcaacctcagcagcaaaatcaaccacagcagagcaattatgacctttccagcaacagatacaaccctggat

SEQ ID NO: 122834 - DNA, 249 bp, Glycine max
agcttcaacatcataccactttcagggtgctggaactacttcacatggacttgatggggcctatgcaagttgaaagccttggaggaaagaggtatgcctatgttgttgtggatgatttctccagatttacctgggtcaactttatcagagagaaatcagacacctttgaagtattcaaagagttgagtctaagacttcaaagagaaaaagactgtgtcatcaagagaattaggagttaccatggcagag

SEQ ID NO: 122835 - DNA, 270 bp, Glycine max
tcaagcttgaacaggatgctgtagtggaggcttcttttgagagaaggggggagccccattttgcacgaatacccgagggaaccaagtggcactttgaagcgtgtctaataagactctgcttcatcagagctccaaccagtgttactcacgcttgtatctatatactaggtatcttccttgagaagctttcttaagaaaactttcttgagaagctctcttaagaaaacttcctgacaagcttctttgagaaaacttccttgaaaagcaaga

SEQ ID NO: 122836 - DNA, 248 bp, Glycine max
agcttctattttcaatttcaagcgtctcgatatattacgggactgaatcggatatcggagtaaaaagttattgtggtttgcatttgccacgagcttctgttttcaatttcgagcatctcgatatattatgggattcattcggacatccgagtaaaaagttattgtcgtctgaatttgctcaaagcttctgttttcaatttcgagcgtctcgatatattacgggactcaatcggatattggagttaaaa

SEQ ID NO: 122837 - DNA, 264 bp, Glycine max
ttgagcaaattccaacgacaatatcttttaactcggatgtccaaatgaatcccgtaatatatcgagatgctcgaaattgaaaacaaaagctctgagcaaattgaaacgacaataaattttactcggatgtccgattgtgtcccgtagtatatcgagacgctcgtaattaaaaacggaagctcgtagcaaattcaaaagacaataaatttttaattggatgcctgtttgagtcccatagtatatcgaggcgctcgtaattgaaaa

SEQ ID NO: 122838 - DNA, 248 bp, Glycine max
agcttgccatttatttttaggccaaactggtatcacaaaagaaaggaaagatgggagaagaatggggcaaagcttttagagaagaagtgtacaaactccttaatgccaactttatcatagaagtcatatattccacttgggtccccaatcttcacatggtcaaaaaggccaacaacaaaatggcgaatgtgcactgactatattgatctgaatagggcatgccccaaagatgcgtgacctctgcccat

SEQ ID NO: 122839 - DNA, 267 bp, Glycine max
tgacatgtaaggctaagcgcctctttttttctgtaagatttcctttgaataaggctaagcgtgtctgggcgttaagcccttgttgtgtgtttagctaagccccctactgcactaagctcaactccctcactgtcttttaagtttttgtagtaaggataagcgcaccctgtgcgctaagcctaagtgtcattctgatgaggctgagctaaacgcaccatgctacgctaagctccaactctctttggttttgaaaattgtaaacttact

SEQ ID NO: 122840 - DNA, 241 bp, Glycine max
agcttgttattttttattaaatttataaccattccttttatgtccaatctatacattgaaagcaaaaggcccacaacttatgtgcttgatatgtaactggttactcaagtttgggggtaaaattgaagctaatgctggaagggtcaacaatctcgctttttcttatccaaccaaacagctttgtgttgtgacctgtggagaggatagggtcatcaaggttagttgtcacataatttgtcat

SEQ ID NO: 122841 - DNA, 266 bp, Glycine max
tttatgggagacgagattatgtgtgtagaggtttctttcctatattctgaaaatattaccgctagtacattaaatgtgataaatgcttttaaaaccaaaaaaatatactgcaattgatagtaacaaataatttttaaaattcatcactgaaatttgagtgacactagtgttaataacataaattatcattagtaagaaaaattttgtcactaatgcattgattttttgtagtaagaaatgataaagtcttacgtttatctcccttt

SEQ ID NO: 122842 - DNA, 276 bp, Glycine max
ggccggggagatccacaagagacgagctggagggaagaaagctagagaaattttatagattccaagtttaattagggggatgagactgatattaaacaaaaatggaaaaaaaggcgtgcacaaataagaagggtaaatgttgagaaaaatgatttgaacaaagaagagaaactcggatgaaagcacaaaaagatagaagaacatattgtggaaaaacagggttgacttaaaaaagggaaaatgaaaactgagccctagggacacaagaagaaaaaa

SEQ ID NO: 122843 - DNA, 258 bp, Glycine max
gctagtgcaaaattgctggatttttttctagcccccttcccctatttatatgagaaaaggggaggtggttgccgttgagaagcttcttgaggaatatttctgagcgcacccaaaattgataatttcaccccctctccaaaggcttcctgaggaaatttcttgagggcatcccgcaattgataagttcaccccccttctataatgttcacgatgaagtttcctgagcgcacccctcaatttgatgagttctcccccctt

SEQ ID NO: 122844 - DNA, 247 bp, Glycine max
agcttcaattggagtcttgtcttttacagacttagttggacatctgttgagtatgtaaacagcagggtagactgcttcagcccagaatgtgttaggtagtcccttctccatgagcatcgatctagccatttccataactatgcgattctttctctcggacactccattttgttgaggagaatatgtgactgtaagttgtcgctcaatgccttcatcctcacaaaatctttcaaactcgtgagaggtg

SEQ ID NO: 122845 - DNA, 263 bp, Glycine max
tttggttcaaagaagaagaatattttctaagagattcaaggcttgtaaagaattgattggaaaagtattcaagattgttgttagaaagattgattaaaaatgcaaaacaaggccttgcttttatagactcttaatgtctggtcaagaaggccattaagaagagttataacttttagaaaaacttaaaacccatttgaaaaagtcaaaacctttttgaagaattacatctttagatttttcagaaacaaacactggtaatcgat

SEQ ID NO: 122846 - DNA, 245 bp, Glycine max
agcttgttggtttttttctttggtgacgaaggacaagaaattgtaactgacacgctcgaagaagtaccacaatgcggtggcataaacgagcaccgcaaccgctccacgccaattcatccacaacaccacatcagcaattaagcctttgccgagaacacgatgaaaggatgagaaacttaggcaatgccaaaattgttagaaaaatgaagaatgaagggttagaatcatcaatggcagccatggcc

SEQ ID NO: 122847 - DNA, 264 bp, Glycine max
ttttcctgtgtcgtctctcattttatggtttgcaaagcaacagcggagcacttcatctatcaactttgtgttaaaggtaagaacccttgtccgtccagtgtttaaataatttctatgaagtacttcaaccatccttgactagtctagttataccacattgctcttctgtggaagtctgtattatcactgtgtattactaagattttaataatggggaatgttgcttaatgtgaattacaaatgagttaataagacaagtgaagt

SEQ ID NO: 122848 - DNA, 87 bp, Glycine max
ttaaccaaaaccccgatcgatattcaagtgagggtggagtatcactattttttttttttaactacgcaccacatgagggagtttttt

SEQ ID NO: 122849 - DNA, 272 bp, Glycine max
  unsure (1)..(272): unsure at all n locations
aaactnaagcaaagcagagacatacgctatttttttagaacgcgacatgccgggggcgaaaaggaagcaccagccgcaccacacaaaaaggaaccgcggcaccgcggaaagaaaaaaaagcggccgcacacgaaccccaagaacggcgaaaacgggacggagaacccccccgcacagcacagcaaaaggccgagggctaaaggagcacaggtgcgcaaaaaaaaaacaggcccacgcagaccttccagggggacccaacataaggcgaaacc

SEQ ID NO: 122850 - DNA, 243 bp, Glycine max
agcgaagttttctcaatattaacaggatcttgagattgcggcgcatatgtcgaacacctgatttcaggaggatgcacacgcttaaaatgaggtcataatttatatgcaacaatataggtgtgagtcattgaaagccaccatcatcaaaaattaaggagattacttcctagttgatcattattaaataagactgtcaaagaaaacatgatagcatgtctcaatgtataaaaatgctcatacata

SEQ ID NO: 122851 - DNA, 261 bp, Glycine max
  unsure (1)..(261): unsure at all n locations
tgtgctgaacttttttcttacatgttcagncttccagtcattgagcatatctacaatttcagagcttttgagtaaccaacactggtcagagctcaaaccccattttagaacaaccaaacctgcaatattccttgaccaattgttcaatgcgggggttgattcagagcttgttttaaggttctttcagtggtctcagaaagagttcaggatttcatatggtcttgaaacaactggcaaagttttacatcttctagcaaattt

SEQ ID NO: 122852 - DNA, 281 bp, Glycine max
ttagtgacactatcatactcagcttttgatgactaatgatattttttatgggataggccgcttcttacttttattcaagatctgattgttaacttatgatgatttggtgatttgtcacaaaaaatttgcttctatggacataaagccataaagtaggactccaacataccgagaaagtcttcaccagacctggtctaacctgcaagtgttggaagggcacttctactgccatgggcaagatgatgaatgtaacttccctattctcctatagattttatggg

SEQ ID NO: 122853 - DNA, 255 bp, Glycine max
tgcaagctttcttgtaggccactactatttgctgtaggcttgagcacggatgagccagggacacatagaaaagatttctcactatgaccatattgacacttctcttactgggattttgcgcattgtctggggctatgcgccattataccatacccatcgtggggttcttcgtgttaataagctcagaacagttggcatgattccatgggggcattgatgaatgttacctccctgaaattgcagtattactttatc

SEQ ID NO: 122854 - DNA, 338 bp, Glycine max
agactctatagagctcacccgctagcagtgcaagcccaaaaaatacacgtccgagagagaaactgatcactttggaggagacttactgataaaaactggaaacccctgtggagtggctcatccaaaaactaccttctggcatgggaggccataatatcgcaaaaaccgctatcttgattattatcagcgtgacccattgtagctaaatgaagtacatataatcactcttcctattaataatcaaccagcgctgaataccaacgactcttggacttggacatcacatcatatcacggtcatgacaataaaggatgaatgcaaatgatgacacattacta

SEQ ID NO: 122855 - DNA, 234 bp, Glycine max
gtatggtggtattattccaatgaacaatatgatatttcaagtgacacatatataaagaatcaattatactttctccccccccctcctaaacctcatttcattgactaaatataaggataaaatgagaagattgatccttatatatatgaaaaggattaaactaaaaatgcagggggatgattataactttattaaatgatcatttatttatataatttaaataataatacttta

SEQ ID NO: 122856 - DNA, 252 bp, Glycine max
ggagactcttaatctacccgcggcatgccagctcgcgcctcgaatggaatggcactgatcgccatatattgttcttaccgcaactaagacatatgctcacagagaattgtggtgctgcgtgcgaatactcacccgagacggatgagagaattacgattgaaggctcgctcatgaccccacgtggattcccagaggattacatgttatctgaggccttttcatacttttttcagggagaggcacacgattggc

SEQ ID NO: 122857 - DNA, 181 bp, Glycine max
acttatcgcaatatgatatatgctcagtgcgaattgtcatgctcagtgcatatcctaacccgagaaggatttgtgtttagtgtcaaaagtcgcgcttaacaccaaaagtggattcccagttgtctaagtgagatctgcaaattataaatacgttattcagcgtgaaatacacgattcacac

SEQ ID NO: 122858 - DNA, 295 bp, Glycine max
tgctagcactgtgcaatagttggtgtgaatatcgctacgacccttgtcacgattacctggttgtgaacattagctcttcccggcgatgggattgcttttttacctccgtttaccaagtgctggttctttggagagacgtgactgggatcgctagcaatccataaagtttgatgacgcggcacacaagtctttttcttacacggtattgagcttcatgagaatgccatgcggtgcaatgcgtacatctatgttaaggatctttgcggtaacgctagatacacttagaagagaagta

SEQ ID NO: 122859 - DNA, 267 bp, Glycine max
aatctccatgacattcacatcagtcacatcctgctatttgggtcgtacactgccatcaacagcttatatatacgggacttgagacacactctctacctcatgtgtatcaaacaaaaacgccggagcctcactctaagctaacatattccaccctcgtaccaaactcttggccaaaacacgtgcgattcaatatcgaattatgagagggctctcacacaccaatctatgtgattcaggagagaagacttctctatgactactttattc

SEQ ID NO: 122860 - DNA, 447 bp, Glycine max
  unsure (1)..(447): unsure at all n locations
atgttctatgcttcttgaagtggaagtccatgatgaatctccttgngatagacatctnntaaatcctgcaataagggttgaacactangagaaacataaatagttaactggattagaatatcactctctctctcttgtgtatcactactttcctacggtgtatcactcttctttttcatattcctttgtggtgcctcactattntctttctcttgttctctcttttctctcattctgatttgtcatcacacactnttctaggggatagaaggttaaaagtaacgaggaagaattgctattcgtctgtagggctcttctttgtacggtcaacaaacatttatttgtgtagtcacgcgtcatatataacactgagatcgtcagtgatattacaccaaatgtaccagctttgcatgataaggacaaagattntgcagaataaaaaaaatc

SEQ ID NO: 122861 - DNA, 348 bp, Glycine max
agactctatagagcctacccgctagtatgctagcttcttacatctatgttggctagtgattgtgcgagttgcctgctaatatggactcttctgcttgaatccatctcaatgcttttgggcaaactcttacatgcgtgcttcgccccaactgattatgatgattgctggctcgaattctcacataggtaaggtgatccctgctatgtcgcgctttcgagactatcctgacgtgtccataagaatgcaggctttgaagaacggactgtctggatctattatggatgagcctattacgcttttcttgaacatttcctatgatcctatgaatcatacgcagactcgttcttg

SEQ ID NO: 122862 - DNA, 344 bp, Glycine max
  unsure (1)..(344): unsure at all n locations
acatatgattactgaaagttaattcatacatacatgctttgacacaacgcanaagtttctctgcgaatctgagttataattttttcagggtgttacatgctctgacacaaaatagtgactacctattgtagtcctcatacatgcaaacattgaagaatggactctcttgctgagaaaaggatgtgcattaatgctagcctaaatctccaacgacctatcatatacgaaactaagttaatattaccacaatctgaaatatgctattaacctagcttaagacgaacaaaattcggtaaaatcattttttgaaaatttttaatctgaagtaaaattaaaactgacat

SEQ ID NO: 122863 - DNA, 314 bp, Glycine max
cacccgcggcatgcattctcgtaggatcagtcttcgggagcatcttactctgttggaagcgaatgattttccaattctagatcctcgagggaggtttcaaactctaactatccgtggaagctaccggccccgctcaatacataagcctcccatgtgcaaagctattgagatccacccctggcacactcgacatttcttataagaaggataaacttgagagacacagcgtcaagttcatacttatctaccaatctgccttcaaaccctctgccaactcatatgttgctaaccaatatgctcagacatagagccat

SEQ ID NO: 122864 - DNA, 208 bp, Glycine max
ttactctgttaaactctgcagttaaaaaacggcatgatatgtagaaatgaaccttagaatttctttctattctgatttttttatttcttctgatcttacttatcaaatttgggacttctctgattagagcccttcttttatttgtgccggaaactggattgctaatctctaattggttataatttatatacacagtaatgcttttgcc

SEQ ID NO: 122865 - DNA, 265 bp, Glycine max
  unsure (1)..(265): unsure at all n locations
tctatggtttgatatcacactttacggtcgcnaggactactaaagacaacgtattatgttggacaccttaccttgatctgacgttctatcgcgatcccgcttatccgagactctgtatgacccggcgatccttttgttgatccaagcttgcacatgattcaagaatatcttcggcctcacttattgaactactcattaccaaaaaaacttggcagaagctgaccactctgaccttatcacatttctgaaccaccactgttgttac

SEQ ID NO: 122866 - DNA, 207 bp, Glycine max
  unsure (1)..(207): unsure at all n locations
tctatagatatcatctgcttngatatcaaacattatggtggtagggactaccagtgacaacgtatcatcaaagagaaaaaaactctatatgatgtttcattgtcatcaagcaagtcggagacttatcatgaccaagcgattntcttggtgacaaaagctngattatgagtagaatttatctttggtttcacttatttttcaactcat

SEQ ID NO: 122867 - DNA, 208 bp, Glycine max
ctatagactcttgttctgctgaccgggcacccctggcagaataaagattttactttcgggtgcagaacactggttcttgctctagctttaccaattacaagcctttctgagtgactatactaatcacgattgccacccatcatatttgatgaacagttgcacatgtctcattctcccatgggaccgatgatgctttgatgatcatgct

SEQ ID NO: 122868 - DNA, 417 bp, Glycine max
  unsure (1)..(417): unsure at all n locations
gtcatttcactgatggtctacgccattgattaataatgattttactcacaaaagcagtactctacaacttatacaagcattaagaattccaatgtattctgaatgactatactaataactatngataccaattatgtgttatgaattggagcacatatcaattctcacaaaggaaatgttgatgaattgttaatcatgagatgtgatggtgatacgatgtttaaaatgtgtagtagttattgccactgtacctattatgtctataacctggttttgtctagcacaattactaagttgatgttaaaagaaatagaatggatactangggaatagtagctcgtactagtgataaggtaagatgcaaggagagagtatcttangtttttgaatggtaagtngtaaccaatcacactcatg

SEQ ID NO: 122869 - DNA, 190 bp, Glycine max
ggaggcgaaaccgtcttttgcaattacatttgggcctcaatcagtgtcaagtctgctacgactacacctctgggagtatctatggtacttaaatacttgttgctgagaccatcattgaacatgggataagatcatgctctgacaacaggaggagacgcgccctggaacctcatacctgaaatcccccccg

SEQ ID NO: 122870 - DNA, 473 bp, Glycine max
  unsure (1)..(473): unsure at all n locations
tcactatagactgactaaccgcccctgctgttactccataatgtattctgcaataactgcttaacgcaattacatatggtcctaaatcactacagattgatttacgattaaccctgtgtgcctaactatggtttctaaacatcacaacagatacagaccattgaacaatggattctcatcattaacatacaacagagacataccttcaatggaagcgcatacatgaactccacatacgcgaactcgaaaatgtggttgcagtcacggaagcgcatgccagtttgcgacatacacgaactcatgcagaatgagatacatcaataacgcctgggagtaccctntccgggactctntcctttactaactttcttcgacctgcgatagtcagcaaatgttaaaatgacgaacgcctaatggtataacgaaaggacatacctcantggatagacgatctcacatacacatctcacaat

SEQ ID NO: 122871 - DNA, 304 bp, Glycine max
aggagactcttaaaactacccttagcatgcttgctaagaccatttggtgaagcgttacccatgcagccaccgttagagttcttggtacagctaagccattatgtttacttatgtatgtgcaagggggttgttggagctaaatttcatagtcgttaccccctcacgaagcactcgggcgtaaccaaatctacatttgctgagtatgatagtattgtacccttggtgcactatacaaacagggcgtcatcatatgatatctgaactttaaattccgttcaaaactatctaacgagtgcatctttat

SEQ ID NO: 122872 - DNA, 82 bp, Glycine max
tggtgacgaatccaatattgctcgggaccccatatattggatgaactcgtgccaggtctcaatctatcatgggaaggttgct

SEQ ID NO: 122873 - DNA, 190 bp, Glycine max
cttcctgtagatctgatcaagcataacaattagtttactaacattaatttcagtcagcttttatattctataaacgacgttctatgttacgctttgctgcacatacattttttcattgtaacagtctatcaatctgtttcttgggtactattactcttttgtcctgttttgtgtttagattacatatctg

SEQ ID NO: 122874 - DNA, 332 bp, Glycine max
gacattataaactcccctctgcctgcagcgtgtgaaaagccccatatttgctattatcaaggtcccattgtacttataactaccaacaacatgaactttttttttatatacaaaaaccaacctcaatcgaatgatgatgcatgtcctgactatattaaaattgggtatggctatcttaaccttacttgccgcaaaacctaggggcttactaatacaaagaccatggacgcttcaagtctgcacctggacatacgtaccaaaaccccaattaacatatgggcgtgatacaggccctttactatgaggatattaaatgtcttattttgtaaagg

SEQ ID NO: 122875 - DNA, 343 bp, Glycine max
atatgtataatcacttcttatctatactttttacataatgtttttattttaaacacctcatcatcctgagcagtacaactataaattggatggactttcttacatgaaaccatggctttaaacaacacatggtgctggttcacaaagacttgtcaaactaatatcgatggctctacgacataataaggatcatactcttgcttgaaggcagattattggaacgggtaaacgttattctattcatctgcgcattaaatggagggagccgattgggggaacattggacattcattcatgatatactttattggatctttccataatttattgattattgtattta

SEQ ID NO: 122876 - DNA, 335 bp, Glycine max
cgccgcatgccagattggagcattgcattattacaatgagctctagagcttaccaatgagacaatgcccccttgctttaggggcacaccactgggcacctgatgtgcctgaggaaatacaggtgaccctcaagattttccaaatacttttaataccatgcctatttataacatacccataaatattcatgacctgatctcaccgtggtataatgtgccttgctttaattcttacccaattcaagcgagcgtcttatgggtttgatggttagacttacttctatgcagttcaaaacgatgggtctcaaagttggattattattacaaaattcacaa

SEQ ID NO: 122877 - DNA, 477 bp, Glycine max
  unsure (1)..(477): unsure at all n locations
gttcgcacgccactgggccactgctgtgcctcatcatagacatgtgtcccacaatgttttccaattacttgtaagaataaatattgtgttagtatacctaanaataaacaaaacttgatttcactgtgtataattctcctgtgtaaaaattataacgaatagaaggagtgtcttatgtggttatcagttagatatacctagatgcatctcgaaacgtggtagcacaaattggatgaaaatgtaaaatccacanaatgtatggttntagacattattaagtaaaaaaatatgttttctcanatataagcaaactcaatgatnttatcttatctaatcgaacatgttaaatatcatcattaataagagatatactaattcaatcaaaataataagaaaatattattgtaataagaatatataattataaataataatttaaaacatgaatatggttaagataaatatataactataatg

SEQ ID NO: 122878 - DNA, 321 bp, Glycine max
gctgcaagctatgaggaacgagttgctcctattatatgcttgctcacactatatttaacatttcgtctttgactattctcgtgaactcaagcttcttgtccaacattgtggtcagtcctgagtgaccttgttggagggggtgtagatccttttataaattatttctttactaactttcttactttccaagacatttaaatacatttagtgggaggtgtttaagaaagttttaggtaagttcagtctcaataattcaccagaatcaatacaagctccaaagctaaaaaaaacatttaagatatttaaaatttaccgatcaac

SEQ ID NO: 122879 - DNA, 465 bp, Glycine max
  unsure (1)..(465): unsure at all n locations
acacgtaaacactaatgantctacttgaacattactactanacataacatgtaagaatatgtacatgtactcatgcaaatattcaaacataatcttaggtataagttactgtgttaagaaaataaataaatccctttattaaatatgtctgtactaactgtcttactttccaagacatgtaaataccattagtgggaggtgttaagaaagtttaggtaagttcagtctcaataattcaccagaatcaatacaagctccaaagctgaaaaaaacatgtaagatattgaanatgtaccgatcaaccactggtgccatttaaatacatataggctgtcattataaagtactggaataaaaatatataaacaaaatataacattatcttcatatggagtgcttngcttgaattgtaggcatattatttatattatatatatatatatatatatatatataaatataata

SEQ ID NO: 122880 - DNA, 217 bp, Glycine max
accatacttacacaaacttattgcgggcttaaactgttgatgtaacttcttgtcaaccatggatggaattgtattatcccctaacttggggtaaaatgaatttcgaccagactggccgcccgcaaccactttgggaaacaaaaatagaggttaaataataatataataatcaaaaaacgtcttttataaaataaggcgaaaaatctatcggacggtt

SEQ ID NO: 122881 - DNA, 150 bp, Glycine max
  unsure (1)..(150): unsure at all n locations
atcaagtgaaacaacacatacttatggaggtcagaatatgttgatgtatctncatgtagagcttgtanngcctggatcttcttcatcaatggagtcctttgcttcttgaaaataatggcagcttatgatgaacgataatgatgattggag

SEQ ID NO: 122882 - DNA, 221 bp, Glycine max
tgcccttttgtgggcgagcgaatgcgatgctcactgatgcccttatgctacgacgaatcatgcgcagcgagtccaaatacgtatatttgtggataacgtccggtcaacacaaggatactggtccctttgagaatacttaggggcggcattgtaggtacagaagacgatagttttaacacctatttagcttgcgcaaatgacataatccaaatgactttaag

SEQ ID NO: 122883 - DNA, 454 bp, Glycine max
  unsure (1)..(454): unsure at all n locations
ctaggaaattatgtctaaaatacccatattacccaattagtctatgtagagcatgtcgtatcaatatgtagagctatataaatgttaatcagatcgagatgctgcaacctatctaatgtaacgaagttttatatgtatatttttcaatatttccccctcttaacaagcgttatatgtccttaaagaaaaaaataaaggcaacanttgttggtttatgaattcttgtaattttaacaactatttgagcttcgtcagttgccataatcaaatgacgttagagtctacaccaattgtgtgtaatagaatcgacatgattcgtcgctggttttgtatgtctaaagtacgcaacctaagtttaaagcggtaaagtcttaactggtaacattcaaacaatactgtaattcactaataatatataaaaaattgaatagtaacaattattagattaataata

SEQ ID NO: 122884 - DNA, 321 bp, Glycine max
atgctgcaaatttataaagatttcttgactcatggcatggattggggtggttcaaagatttatgggctgtcccacatttggtgcattacccaggtggaagaatagtacgaaccttaaatagtttgcgtaatttgcgaatgaaagcacctatacagactcatttttgttaaagtgttatggctatgtgatgctatggttcatgattcatttcatcttttttaaatcaaccacatgtttacaaacagcgaacttttatggattcttgcataccttccattgaacaacttgcgaagcaagagactatgcaaaacatgacccttc

SEQ ID NO: 122885 - DNA, 326 bp, Glycine max
taacctttgtatgcatgactcagaacgatgcttcattaaccgttgctcgggtgcaagagcatcactgtggtcattcatatcatccccactttttagtcacaaaatagtcacatggaattgctggtaattatttgacactctcaaagcgtggtttataatcctcagattgtgcttctctcctattgtgttattggactattatgactatagggcttgtgctgccgcgttgcccatactctagatcgcccaatttgaacgagtatgccatacttttttgctacctcttcctggattgacgctgttacaaaatgttgcagcatgcataa

SEQ ID NO: 122886 - DNA, 141 bp, Glycine max
  unsure (1)..(141): unsure at all n locations
ctattataatcatacataacatctccatattgaatcaagataagagtcatagaganatgccgaatataatatgaaaatctcaaacaaggatgagaatttacagattgtgcttcttcaatatgtgtcaatggtctattatga

SEQ ID NO: 122887 - DNA, 221 bp, Glycine max
gatgcttttccataaccctatgcttgagcggataaccgactgagagggcaaatggtcgaaagcatacttccctggattgacgggagcatcaattaagcgacttatggaaccgcaggctttccctcaacccatatagagtattttgccggtccctaacatggctcacgccataataactgctgactacggcctacctgctactacaagatactagctaaatt

SEQ ID NO: 122888 - DNA, 391 bp, Glycine max
  unsure (1)..(391): unsure at all n locations
tctacttatgtggcatggcgggctgtcttcactntcttgtctacaacgcgatctttgaccactgtctttgctttccgcgatgcttctgttcatatccgcctgagtgggcttatatcctaaaccatacttcccacgatttcctttggcatttatcaggctagttatgccgccgttgtctttgcctaaacccatttcgggttcataaccgttccccaacataactcgggccatcattactgctgcatcggacaaacaagtcgtccctttatacttgtcgaagtccggcactttgaacttcgggggaataacaacatcatgtactaagcatagatccgtcatgtctgcgaacggatagtccncatatccttccacgggcctcaatctttcctca

SEQ ID NO: 122889 - DNA, 378 bp, Glycine max
agattctctaaagctcacccgtaagcatgctagctatgggaattaagcaagtctactctcatgcaatggcaatattcattaatgtgcgggccgtacttttgtgataagtataggatattgatacagatgacgtatcatagatgcactacatcttctttaggcgctagacatgcagtgaggtacaaatgaatttataatatgtgagattggaatgagtgaggactattgattcacggggcatgatgcatcctggtctggaatctctaggaagacctggaaacaattttttgcctttgccgacttaagggagatgacatctgtcctggggggcctatttcatgtaagatcgaatcgcttttacgtttacttcaacgaaat

SEQ ID NO: 122890 - DNA, 192 bp, Glycine max
gggaaagggggagatggaattaaaatagaggaagggagttggtaagaaaagagagaggaatggaggaagaagggaataagaaaggaaagggtaagaaaggtagagaagggtgtaaaaggagggagaaagaaaaaaaatagagaggggaaaaagaggagagataaggaaaaatagtgtaaagtaaaaggggaa

SEQ ID NO: 122891 - DNA, 304 bp, Glycine max
  unsure (1)..(304): unsure at all n locations
ctgatacctgcttcttccatgtgtgaacatttcttggatagcanaagtggttagtagaggaaaacaatgtaagttaactgtgagtaacgtgatgttagtgcatatatgatntacctaagcagttcacaataacatgcatcatgaagttgtgaaatgaactataactagcacatagtaattcaaactgatatgtttgacaaacattgatgcattacttattgatgcctctngaaattgttacagctcgaatacgagcaatgactaatctaatggcttaactcatctttatggtnnngtgtgtatt

SEQ ID NO: 122892 - DNA, 320 bp, Glycine max
ccctatcgaaggactagagcataatcaatataccgaacctatgcatatactaaccccaacgacgatccacccttatatcgcaagggacgaactgaactggacctaacttacctacgaacgcagatataacactaccactcacctcttcctcagaaccctcttgatggcctgcactaaaataattggaatttgaaccacacgacaatccctctttcataccaagaacataaaaactcatcatgaaaacacaaatgagcaacctgaaccaacgcatgctctatgaaaccagagggataagctacacttacattttacgcacg

SEQ ID NO: 122893 - DNA, 306 bp, Glycine max
taagctccccgccgcatgccagcattatactgcagattacatcttctaaggagcgcatccgagacaaacttggtacttcctgcccagacccttccttgatcttgaactcggctttatgacttactgctcgactactatgatcaacctctcatgcctagcgatttattacgatttgactcgcactggttgatctagccccattgctgtattgagactcgtgattacctaaaccattctgactgtaagccggcttatgtcctgcataagcgaaagcgtttgcactacacctaagtcttgcattgcatt

SEQ ID NO: 122894 - DNA, 385 bp, Glycine max
  unsure (1)..(385): unsure at all n locations
tcaatgatattggaagcttctttcatccttcctgcacgaccacaaagatcaaccaaacatgcatagtgatcttctctgagttgtatcgatctggttttcagaatttcatcaaagtatgtaaacccctcctcaactaaaccagtatgactgcaagccgtcagaagtncaacatatgtgacatcattagcacaaacacctaattcttgcatgtcataaatagataattgcctcttgcataccatggtgggatatgcagcaatatgccttccaagatataaatccctttggctaataacccatcatcaaacatcttgctagcagtatgcaactcaccacatgtcgagtacatatttatcagcgctgataccacacatgtgctatcctg

SEQ ID NO: 122895 - DNA, 244 bp, Glycine max
agactatatagacctcacccgtatgcatgctatcttcatgaaagctgtcttggttccttcttatatgggggcataatggtgtcttgctgaacgtaggcacacggctacatgaatctataggacgggccgcagaaacgagtttgcagatcgctaacagcaataaccgcatctgagatcactgacacaaccactagtgctattacagtagaagccaatatgccccaatgatgcatctaaacaaccg

SEQ ID NO: 122896 - DNA, 224 bp, Glycine max
  unsure (1)..(224): unsure at all n locations
tattgagtgtagcaagaaggcgataggatcctagatggcgtgcttcatgaacaataagacagaatataagcatctgatacaagttgtgagatacatctagacaaccactattgttattacaattgatgccaatatgcttcaatgatacatctagacaaccactatgcctcacaacagacttgacaattcgaagttcttgcaggtatctacctcanaattttaag

SEQ ID NO: 122897 - DNA, 279 bp, Glycine max
gcatgcaggcttgatgatgctgcacacatattagtaatcacggcgcacgctggatttgaacattgttcaccttaatacaatgcatcgggactagctgcgcgtaaaggacttactttccactgatcatggcatgcgctcagaatttataccgacaattggactgtgagcatcacagatgtcttgaattagggtacgctagacgttatgcccttttagctatcagcgcagactgtacaccaagtggaaccctctatatattatatgcaaacccattggaac

SEQ ID NO: 122898 - DNA, 283 bp, Glycine max
cttacgtagagaaccagtgacatacctatacaggggagctcatagctttcaaccatttatagagcaaagaccgcgatcccttgaggcttttttagaagattgctagctatctctctgagagtgaagtctaggccatgatccgctgtaatcgcatactaagggtctttaatattttactcggcatcatgtctgagacaggatgttcagaggacattgctgttataaagcgtatgtgggcttctccctcgcacgaggtggcttggctatcgttctacatgctcat

SEQ ID NO: 122899 - DNA, 300 bp, Glycine max
taagcttcagactaggtgtaagccttttcagacgaaaagcaactaatgggctgggtaggaaaacgcaccacctaccattgcggcagtctttttctcgagaacacgtgatgactcttagtgtaatgacaaaggcttatgacttgagtgctttgaccggtgacgattcttactcaggattactggattcacgatatgtggatcagttcaagactctgaaccttcactctttatgctgagcaagaccaaacgctcgccacattgatgtgcctgaattgatgattatggtgcagggtgacctat

SEQ ID NO: 122900 - DNA, 368 bp, Glycine max
  unsure (1)..(368): unsure at all n locations
aaaacttaattactagtattatggttttttttagttggaagcacgtttttcagttgagtaagtagaagttattatgacgtgagtgtgttgtgtgatgacgatggtgacgcataaataaaggaatcacgtcgagtcgacaggtaaaagacaatgacagatccatcttcatctgagttagtgccaatcgcacgcgtgattgctgtgcctggatttaaaatataaaatacatttaaatctatctttattattaaatattttatgttaaaatttgacattattatgatatattattatcaaataattgcaacantatgtaattttgtgatctatttaatacataatgtttactaaataattaaaatcacaaa

SEQ ID NO: 122901 - DNA, 321 bp, Glycine max
gcctgcaatcgaatgtcgggtcaatgtgttatatgataaactgcatggagataagtgacttaaccagcagcgcactatctgacgctatgtggcccaccatccgccattaatgctatcaacatggcagacggaactgattgctggcttggcacgatgccctgcgcataacaaacactatataggctgatttcatgaccgaagggtggaaccaacaagccatgctggagctgacatacaagctacgcaataattgcatacatgaggcataacctcggaatatattgaccgcgctacgaacggttatatggcggatagctgcac

SEQ ID NO: 122902 - DNA, 337 bp, Glycine max
gagattcttaagctacccgagctgcagctttataacccccttttttaaaagagggcatttgctggggaatgaagagccatgctccaaatgggactccaagctatcgagcaagcatgcactgcgttccccctagcctttatatggtaatgagggatgtcacaaatgatcacaaaggcatacttacttactccaaattgagcgtgttaaactatcatgacctttagaagaaaaacgaggatttcataccacaatatgtcaaaagacttttatgtttagaacaattacccgttactaggacctatcctataatctcaagaaaaacgtgagattttaacac

SEQ ID NO: 122903 - DNA, 245 bp, Glycine max
  unsure (1)..(245): unsure at all n locations
gtgattatgttgngaatgttatatgctgaaattgcttatggaaaactgctagagatgaatggtagttaacctatgggtggaaagtgagaatgtggtgttatgagttggaaaatagtgaatntatganggctggaagccaaatctggaattggtagtatttagaggttagagtgagttaatcttatcttgaaatgccatttatgacttgtcgcaacctacccttcggcgggagggcgacgcgtgac

SEQ ID NO: 122904 - DNA, 231 bp, Glycine max
aggctaagtgaaggcaaaacgtgaaaaaccctgagaataccatgtcctcaaagaattgggaagctacgacattgatcccaaaattattgcaaagggaacttcccccggggacaagaatcatattgagatcggggtcccgccttctaaaggaaaaattctcgaaatgcagacgtgttgcattcaatatatgggaaaatgcaacaggaagaagcaatcttttgcactaaacca

SEQ ID NO: 122905 - DNA, 427 bp, Glycine max
  unsure (1)..(427): unsure at all n locations
tcacttattgagatatggagatgcgctcaacgagtggattgtttcttgaanatgntnntaaagtattnttagtccactttctcataacatgtagaacaaccccccaatatctatgactcattataagctgatatcccccctctttaatgataaaaaagcaaattacaacttatgcaatgcatgataaacataatgaaatgagtcagaactgggttgctcccaagaatgctgtttaacgtcatatctcgatgctttacctaatggggataaatgcaaatggtgttgcttctaactctcacatggatagttaatcttgacattaccaccatgtttgcanggtctgaatatggatatgcactctatgattganggcaatgtctatgacaacgtcaacattgacttattacagaatattcatctgataaag

SEQ ID NO: 122906 - DNA, 334 bp, Glycine max
agattatataatgctcaagcgttgcttgcaacctgggagggccttatggagctgactccaaactgagacctaggctggcttattgcttagaaagattatttgcgtttgaaagacactgatgcgtgctcctaccctgcatgtgtttggtattttaagctacgggaggattcagggccaactactaagacaggccccaaggtatgtataaggcttcagggacacattttgccgcacgaggtagggttctgctttctgtactttgggatggacaagaatagatgctacgaccatgatccatggatcatcggcccatgcacaactctggggaagcagg

SEQ ID NO: 122907 - DNA, 355 bp, Glycine max
  unsure (1)..(355): unsure at all n locations
gcttcacacatgggatgccttaagcgcttaattaatactgaacctggctagctntcgcttaanaattatngcatttgaaaacgctcatgcatgcgcatacacatgcatanntttgtatcttatgcgatggtcatatacagggccaaatccaaagacatagaccaatcaatgtaaatggtaacacggtcacatgttgctgcacaatgttgtttcctgctttcaggtacttanggatggacatgagtagaagctatgaccatgatcgatggatcatcgtcccatgcacagctctggattagcgggaagcgcagctgggaggtagcctagtatcccttaaattctgaagtaatattac

SEQ ID NO: 122908 - DNA, 323 bp, Glycine max
catgcacgtgaccttgctattacattgcttagacatcccttatgagccctggaagcctttgcgcgtaaagaacctcactgcaagccctacgtgaagacccatgagattaccatgtcctcaatgaattgagaagcgacaacacaggtgctgtaaatctggctgagagttccggatgcattgtacaactaagcatatagagattgcgcttcgatgtctaaaagaccatgtctcgaagagcgatggtagcagggaatatattgaacatgaacattgactagctgacatttttactaaacctcttgttagagatcggttcttcttta

SEQ ID NO: 122909 - DNA, 380 bp, Glycine max
  unsure (1)..(380): unsure at all n locations
ctacctgataattcttgtaccttgacctgttccttcctgtttgaactactcaacctaatgaaaacatgattaccatatctagaattggacttggaatgtttggaataatgtgggggttntgttcattgacaacttgtttgttggcttgcttatgatgatttgggcctactgatgtcattgatattggtaaatgtggactgctgaatgaatgtgttctcaaaaaaaaaataaattcaaaaaaaaaaaaacataagtgatgataactaatggcaaaagtaacctggctcctcagtaatgtacttatctttattctattttttaaagacttccttgtcttttttggataccctttctatttctactgcggccttacactaaac

SEQ ID NO: 122910 - DNA, 333 bp, Glycine max
ttaaacctccccgagctgctgctttaacgggtcttcatatttatgtaccgcatgccaaggcaaagcgcttattgagaggaggactagcaaaacgcaatccctaatgacccatcgcacatataggttccagccttctgttaaatgcggaagatgtggcgtgccatgccttcatatgtgccccatgagagctgacggggtgcatccattcatcagggccaagtgccgctgactgatagcttgtaaccttacacatctggtatactaaccccccatctacagctttttcattgggctaccgccgattcactcagggcgatatgtgcattgtccact

SEQ ID NO: 122911 - DNA, 196 bp, Glycine max
  unsure (1)..(196): unsure at all n locations
gcacagtatcaggttgatgactagcagcagccatccgcatatgcaccaccgtcacctctatggtatccaccatctctgctcacatgctgatgatggagctccagatgcatgcatatatgcagcatgtgaccgaccagcaggcggccaatcatangggtcaggtgcagttgaatgagagcttttaccagtacaccct

SEQ ID NO: 122912 - DNA, 427 bp, Glycine max
  unsure (1)..(427): unsure at all n locations
aacaataaatgtgagttctatatgcctcacaacagaaagacaactnggagcactatgctaaccaactggcagataacataacaccatgaaatttctgaaattccacacttttcaacatgttaagaagtggccctaatttttcatctgcataatattagaagacaagttcaatatctgatgaagcaaaggctatttgtaagtgatagtcttatacagaatcaagaattaaatattatcctgtaggaagtataatgtgacactaacatcaacattattgttgaaagactgtataatcacaagtactgaagtgtgtaaaaggagattcactcatggataagttgatttgaagcgatgaaatcacttaagaatcactaagaaaanantaatgatacctataatgctaatagctaagggctgtcaacattta

SEQ ID NO: 122913 - DNA, 352 bp, Glycine max
agattctatagaccccacccgcacgttgcgagcttgagggaaacacttgatttgcttgtaacaacactaccccactcagcttggcatatatcatagattatcatggcgccccgtgatggtgcagagctgtagtcgctcattttttgctgaataccatacacatctctaatctgaattcatgcaagctgtggtgaatggacggcctgaagcctatggctgcaaacctaataaggaacccgcatcacagcggaacgccccacagcacacaaactatgatctttcgagcaccagatggcatccacgttggacgaatcatccagatctgagatgggcagattctgcacaacaacaa

SEQ ID NO: 122914 - DNA, 363 bp, Glycine max
  unsure (1)..(363): unsure at all n locations
tgagtttgcttcctttacgcttattactcccactgtatgcaattctctgtattggcttcatgatggtttgggcttagtgctcattttgcaaatcgtgaacattccattgatcagcttgttgtgattgaggttgtgtaaagcatataccttttgatctgaacatgggatgcaattgtccattcttgcattgtgtcaactccgcccaatgctcgtaatgcccatgttataattatttgcaattggtgggacgttgatttttagacaatgaatcaaaagtgccatgcattaactagaacaaccttactaatgaaaactcctggtgatcaattggttgataaaactanatagctgtgtaatttgtca

SEQ ID NO: 122915 - DNA, 119 bp, Glycine max
cccttgagatgagaagctcgagaatttttacaccccccctatcatagatgagatcaaccgctggacgcgaaacctgctgatacaaaaggggattgcggagtgcgaatactactccctat

SEQ ID NO: 122916 - DNA, 345 bp, Glycine max
agagattatacaccccccacccgcaggcctgctcgctcctaaggagactccattatatggctcctttagtggtcataaagacatagggcgatcactacttccgtctgacaataagggagggagcatgatctttcatttgtgtctgacagtactcgaacctaccctccggtaagaaggcgagcccaagcgcctattgatcgtcttggcaacttgctcaccaaggtgagtcgccaccaccgtcgactgtaggatctcataaaaaactcccttgaaaaactgtcagctgtctgcacacacccatctgatggctaggcgaaccttctcgcgaaacgaacgtgttaacac

SEQ ID NO: 122917 - DNA, 405 bp, Glycine max
  unsure (1)..(405): unsure at all n locations
tctaagctgtatcgttcgctctagtaggatacatatcttgctcttcttttcattaactntggtcttttttccttctctctnttatatgtcttggggataataattcatatatgtatgtatgtgtcggaacctacccttctgtaagatggcgatgcgaatagccaaatgagcatcttccaataatgaatacccgtcggagtctgcaccaacgtttactctatgaaaacattagaaataccaaaaaaaaaaagtcgaaggtctgcaaattttgaaatgagggtttggagttgttacacacgangaatgtatttgaccccacgcactcgtcacaatggatggcaacctttaatcgagtgncaaaacatgactcaaaatnggtatttccctttatatgtttttttattc

SEQ ID NO: 122918 - DNA, 306 bp, Glycine max
ccctgttagagtgtttagatagatggtaggggaggcaccagagggcggatgctcctttaagggaaagagtgtatgcttttggggatgtgactagggggtgattgaacctgtcttatgtagaacactcttggtggcccaaatcttgtgcttttcacacataatagtgaacattatggtcttgtaacctcctaccttgtctgcattccccttgcatagcgcccttctaatatgagattcatagctcttttcccatccttcttgatatgtgcttccttcacaaaagcacctatttgccttggcaattgg

SEQ ID NO: 122919 - DNA, 449 bp, Glycine max
  unsure (1)..(449): unsure at all n locations
aagcttctttctgggaaatcactcactgntgganntttgatggattangggtggtgcttggtcttggatgtgcatcgangtggatttgtggctcgatttggggtggcccttgtggatgattgagcgttcttggctggtanggtggtgggtaatgagaacgactgatattcgccgagtattgatattgttgggctaatgtggaaattggcatgtaggaacaacaaccacaacatangtttctcccttcttcttattctcttcatttgccccangcttcatattcatcaaagtaggataatcaaatntgcctctttttatgcttacttcgatcctctcacacgcntacactatatctacatagctcgaaggcatgtaatccaccatcttcttatatcagaacactgtgtatgtatccactatcatttgtatcatttccctctccatcattg

SEQ ID NO: 122920 - DNA, 319 bp, Glycine max
agattctatagagctcacccgcaagcatgctatcttcgactagaacgatttcgacagctctaccaccgctaaaccgcaccttttgtgcccaagcgtacgcccttacctacctacttgaagaacatgatgctctctcccactcacagtattttcacaagattcgtcgggaccaggtgtgctctgactgaaaacatctacccctaccgccagctaacccgtactattaaggcattattatagctaagctggcgcgcgcctcgctttacaagagtgagatcaatgctaatctgcttacctctctaaaaaaatgtcccctcgc

SEQ ID NO: 122921 - DNA, 476 bp, Glycine max
  unsure (1)..(476): unsure at all n locations
cacgtaatttctgcatatgtctacgcaattatctatcaactctaacaacatatttctctctcttactttcaatattgtaataagtattgtcaggtacgggtatcattggtctataaaattcaacccctactgacatcgaacccgttntatgtatgaaattttaaggaaagttangtgcacccatcaatttaaataagtgataaaaatgttgtttacttaaatgtaaaaatattttctccttgacaagttgatgtcattctactgttttcttcttacttctcgaacacttcttcttctttgtggtgctcattgtgctgcctgtcctattcatacttcattgtggattangaattgtcacaccgctggtggttctgcgcaaggaagctttatgggcttcgtaatgggttgtatatatgttcaatatactcatacaatatataatcatatttatgtgtgaatataaagtgaatacatta

SEQ ID NO: 122922 - DNA, 328 bp, Glycine max
agattctatagagctgacccgcatgcgagcaagcttgtctgagaaatcttccttgatgcgcgtgagcttagatccaccaccccaatcatgccaagctatgtctgcaacttgtgcgaaaaccctaagatctagagctggactgctcaacctctctaatagctaaactctccttcttgagatgagctgctagagctatcctgccctgcccctataattgctagactcaccgccacgacatgtcacgtgcttttattttcaaaactccttctcacttattgaacatatactgtcccgcaatgcaaagcttgcaacctattctgctcgcacg

SEQ ID NO: 122923 - DNA, 172 bp, Glycine max
  unsure (1)..(172): unsure at all n locations
acacaccaaatgattataatgatggatggctcanattctcacaaaggtaaaatcatcactttcaaattgagctgtcaaaactatcatgacatgtagagaagaatcaaggatttcaagtcacaaaatgtcaagaacttttattttcaaaacaattacccatttcttgaacata

SEQ ID NO: 122924 - DNA, 276 bp, Glycine max
ccccgggaggtataacccccatgcaagctggtaagctatatttctttttattacaagggtaaagggccctcagaaggggtccagaagatacctctacctccaaataacccgtaaattgctaatgtttttcttttctaaaactctatttcaatcttggggacaagtaattttataacccaatacacctcctttggcgactttgactggattcccccattcaaaagggacccggggggggattcccaggcacccttcttttggcaccttgaattaaaa

SEQ ID NO: 122925 - DNA, 368 bp, Glycine max
  unsure (1)..(368): unsure at all n locations
tcacctgataagtgcttgacagccaaatgctctttccagacattggtgagagtcttgtagaangtagaatactcctcctttgtgatctactcaagctttctcatacaaatgggcttgtgcttgttcaccaacgatcattcatgtgacacttccttaatcttctttttctttttttcttacttgctcttctcttcatcatcatactgcaacttaccctgctcatacgtcttctcttactcatactcatcatcagagatctccttctcggtagttgtctcaatccaaagaacaagtgtgtagctaatgaactcagaatgcttcttgatcaaatacttcaagcggcgctcctcaaggtactcaagctgatc

SEQ ID NO: 122926 - DNA, 319 bp, Glycine max
gcaggcaagcttgagatgaagaattgttgaagggtgaaactacctgcttttattgttgaccacatacagttgcctggagatatgtcacggaggtcatgagaccttgcggacgtcaggtggggtgctattgcccaaaatcacgctagtccaatgccgacccaacccgggcatattcagctagtgagaacctgtgatgtacctaaacaggcgagctcctgtccatcgacagattagaggaacaaacaccacattgcatggatgcttgcggtggctggccagctgtgaactacgattgatatgtgggctatggcctctggta

SEQ ID NO: 122927 - DNA, 341 bp, Glycine max
  unsure (1)..(341): unsure at all n locations
tactcagctctaaggaagtttctaagtagctctattgaacacctatctataatagaacatgtgaacacttgttgttacttgatgaatgagagtctcgtgagacacaactcanagtgaacttgtctcactttgtgttccttcaatttcgtgctcccaactcctctttctcttcctcttgtttttactacattgaagcatcctctacaagcttcttatccaatgctcatcttggtggtgaagcatcttcttgcatggcgtgattcttaatggatggcgccgtctctcacactctttacttggtcttccgctgcatctgcatggtggaaaatcaccattaaagg

SEQ ID NO: 122928 - DNA, 364 bp, Glycine max
  unsure (1)..(364): unsure at all n locations
tgtcttcttcttcaatcaacaaataaatgggttccagttacctgctgntcgactggcatcgttcacggctagccaagcagcttcaatatctgtacaatgtccaaatggctatcttgcagtgtatgttgtggagaaacataagcggtttgtggttcccgtatcatacttgaatcagccttcattccaagatcttttgtatcaagctgaggaagagttnggatatgatcatcccctcggtggcctcacaattacttgcagtgaagatgttttccaacatataacttctcacttgaattgagaccacaaatctcactgtgggagactcacatagattagtagacattntacactatatgcatcttct

SEQ ID NO: 122929 - DNA, 294 bp, Glycine max
tgcgggctggtccgaatatggggtacccggcatatgcctgtctaggtcgcgagaggacagaggggcttatacctctggtgcaatccacagccagccttggccccgctatacaaaaggccactcctgcaccgggcctacctacccccgactatcctaaatccttggagctataatgagcggcctctggtgtgccagtccgagctgcctcgatacccaggcggctccctaatccgctcatcatgaactaccctacacattatatctgggcatatgcataaaactctgcctaaaacg

SEQ ID NO: 122930 - DNA, 331 bp, Glycine max
tctaaaacttttgagctagaatgtgatgcctctggagtgggagttggagctgtatttgtacaaggtgggcaccctattgttatttagtgattaatccctatttctctccactttggatcaagaaaaaccaagtgcgtagaattaaaacatcataaatgatttaagctatacaatgtagtcatatactagacattatatcaataataagttaaactataaataaagtagtaattatatgtagtatcataaatataaaaatctagttcaaatataaaattaatcttggtagtatacttatatcaatcttttatggaacattggttctactaat

SEQ ID NO: 122931 - DNA, 326 bp, Glycine max
gaccgcggagcttgcttacacaccctgaagcactaatgaggaaagtaggcaccggtgacccgtcccttgaataatggaaaccttaaatatactccaaaagcgtatgtgctaagaatgcccatgaaggaatgaaacgaaacaaatgggaacctctgcatacaggaggacacattgaatatgcttagctgtatactaactatgaacaggccttgatgatatcaactctactaaacctggcatgagcctatataatacctctctcagacaaccttctgctagacagaccttgaagccttcttgataccttgatagggaaccatgtgcct

SEQ ID NO: 122932 - DNA, 300 bp, Glycine max
  unsure (1)..(300): unsure at all n locations
tatcttctagcatcgtacaagaangaataagtagagtcatatactcagcatanagagggtgaaatctaaaccacactcaaaatactttcattgtactctcttcttcttctctaagacaacacttttcatttgagaaactgangccttacattnttttttctcaaggaccntgtagcagtgtattatttgagtnttaagggtagttcggtgattaagaactctactatttctcctctcatcttctatttgtgttttcctccattagcaactttgaaagtaataaaagtgtcatttcatggt

SEQ ID NO: 122933 - DNA, 446 bp, Glycine max
  unsure (1)..(446): unsure at all n locations
gtcttcttctatcaagattcgttgtctctatacagacatatatcatntcttaagcttgcatatgaagaatgtggccgttanggcattatatgcacatactccttcatactgagaaaccacttttcatcgctggcatgttgaacaccatatcatgaaaccagttccttttacgttaaagtggtagtcaatcgtattaaatgtagagagtatatatcataaatagatcataatgcatcataagacttttgagatanagtctaaacannataacatatacatctcattttattcatataagaagtttcacatcaagaagatgtgttttaagaaagaataatgttcaggcananaataaaaaaattaacataaaaactcccctgatggtgcttcttctacttaactccccttaatatgcatgctcaactttactttatcctttttttgtg

SEQ ID NO: 122934 - DNA, 346 bp, Glycine max
ctcttaagctaccccggcggctgctgtacagtcctatatttctttttccttgctgcaaatgggatcgtcacacccttaacgaacattcgaagtgaccaattgacactattacaaagtgaatagtctagtactcaataacaccatcttctaatgactttgcagtaaaaataaacattttatagaccatagagtctatggttggatgacaactatgtctcgatccgacctctgtgggatctatcgaaccatagtgatataatacacgttacaacgttccatcttggattcgtgataaagaagatggcatccttgagcttttaatttctaatcatctcgccatctatta

SEQ ID NO: 122935 - DNA, 190 bp, Glycine max
  unsure (1)..(190): unsure at all n locations
atctaaatatactaaggatacgttacaatgtttatttgactaattcacatctctagaacttgatgaaatataatatcttatggaccgttgttctctggatggactgaataattggcttgattggctatgttactcatgaacanattgtatttcacttgcttcaaggtttcagcatgaatcatgataatga

SEQ ID NO: 122936 - DNA, 331 bp, Glycine max
acccgaaggatgcaagcttaccaaatctgctattttttttatgattgaacaacatttggtggccacttgtttaagcatgtatggcaagaaaaaggaggccaagaatctttcctcattacttcacgatgaaacataagactaaagtcgggccctacaacccctaaaatcaaaccaatctagcttgtaaacaaaccaaaaattgccccacaaatatgaacctatttccacaatttagagctccaaaagaagacctttttcctccaatggaaagctataaagcttaacgatgggatacttacttgttggagtgagtatgagtaccaaaaatgaa

SEQ ID NO: 122937 - DNA, 423 bp, Glycine max
  unsure (1)..(423): unsure at all n locations
ttactactcgaatggtcatttatactgaaataatatcaacttctaaaaaaatattgaagaacaaagagccaagagttatactcaagatataactgtgggactcaagaacatattaatgcccattgttgtgtatgaattttcgtattatatattaatgatgataagaacacagaaacatgacagatcactttaaagatttagaactagaaattgatgtatttgtctgtagagaagaataatgatgtctcactcaagaaataggtgagaaggtaagtgataagtcatatgtntgatcatcactagttgcctcgataagaaataaattaattctttgccaagaatcanaggaagctctcataaagggagaaaactcaaattttattcanacccgatctatctcanagttacaaaatttctcttact

SEQ ID NO: 122938 - DNA, 305 bp, Glycine max
agagtctctatagactacccgcgcgaccgcatagctggtgtgaacatctattcttaataagagaatgcactatgggcacggtgacaccatgtaggtacagccgctgcaagtctccaatatgggtgttctgaacagtgataaaaatgcaatttaggccaaggattgcgtttcaatgcgtccaggggagaccattcgctatcccattgctcggtatgagtgacaaccacttttcatgattaccacatctgtactattcgcattcaactctatcatcctgttagaagaactctctggccttgtggaat

SEQ ID NO: 122939 - DNA, 253 bp, Glycine max
  unsure (1)..(253): unsure at all n locations
atatatatgctcaatggggctgctgaacttctgatctgatgataaaatcttntgcaaatacggttaaatcaaggagagaaccatctgatctctggtgaataccaataattataataattataccagccaacctatgcatttcaagtatgcacctgtatgattgaacccacatgatactttgcatgctttcacgttcttctcaaagcaaactcttgtatgatgtatatagtcgacatcacttccatgaccctga

SEQ ID NO: 122940 - DNA, 343 bp, Glycine max
actctataaagctcacccgcaagcatgctagctagctaccagcaatttttttgtcgcatcagagtcctgcgaggacggagcacccattggcgaaatcttacttttttgccaaaaacgtaaatgctatgatacctatcccggagctagtggcatataagattcgctctggtacttttacagtgacagactggtacgttattgagcactgctgatagtgagatcatgtacaagtgttgcccattcggactgatacagattaactctatataggtttaaatgtgaaaaatgtggtatggtaaaatcgagcgcgaactaaccaatcttgatttaatgctgttttccc

SEQ ID NO: 122941 - DNA, 371 bp, Glycine max
tattgtatatataatgctaaatcagtgtacacccaatggaatctggtttgtgacactaaacaaatacttacgattagtgattagattgcttatactttaagtaaaacagtaatatagattgagtataagatcttacatctgtaatattagatcaattatcttatagagaatgtgaatataatattaaatggctgactacataagattatgtgttttcctataaagttacgatttagtaaatggcaacgaaattaggaagttgcttgctacaaaattattaaaaactataactatttcgttggttggggcacgtggttgttatgtactggttaattttggtttgttgaagcactctttaatgaattaatgac

SEQ ID NO: 122942 - DNA, 369 bp, Glycine max
  unsure (1)..(369): unsure at all n locations
taagctctccaaagttaactgcttatgctaatatatatcttactttctttactgaaaatcttctatataactttctagnactatctttaatctatatatagtaatttagttaatttaactattganaactattaattttgtttttttttctttatagtgcatacgaaactatataaataaccctactcttttatctaattaggaacaattatgataaaatgtgaactatctagaataaagagaatagtgcaaacgagatcaatggaatgaaaatatcggaagaaactattgcctaaattaatgacaattaaaatgatgtagtaattcaaagatttgaactgaaaacattggacaaattattataatata

SEQ ID NO: 122943 - DNA, 342 bp, Glycine max
actctatagagcctacgcgcctgcgtgaaagcttccttgacaggctatatcttaactctcacacccctctcattactgagctcacctgcttgagacgctaccttgtaatgatttcttgagaagctagagctttactatacacacctctctaatagctgagctcacctccttgtgatgagaagcttgaacttacctactcacgccctatcatagttatgcattcccgcctgacgccttacttgttcctgcaattagatgtccctcctacaatgacttctctggggcctataaatacaacggtgtaaccctattgctccttaatggccataatacttgcctggc

SEQ ID NO: 122944 - DNA, 459 bp, Glycine max
  unsure (1)..(459): unsure at all n locations
taagctcttgaaaacttctgaaagcagagctatctacacacacacctctataactaagctcacctccttgagaagcttccttganaagatntctaaagaagctagagcttagctatacacacctctctaatagctaagctcacctgcttgagatgagaagctagaacttatctacacacccgctataatatctaatctcacccctatgacataatacatgataatacaaaatatagtccctactacatagactactcataatgcctcgaaatacaaggctaaaaccctatactactagaatggncaaaatacaatgcctatacgaatgattaaacctattctaatatgtacaaagataagcgggctcatacttagcccatgggctcataatctaccctaatgctcatgataacactatggccttcctgggatctctggccaatctacttggagtctcta

SEQ ID NO: 122945 - DNA, 265 bp, Glycine max
caaaccttaccctccgaaccaattatgaactttccggcaacttgttctctccaaggtggaggaagaaattcctacctgagatgggacaaatgctccgcaagaacaaccccctgccccttacttgcagaatgctgttggaacaaacaagccatttgctcctcctccatgggagcaactacaaaaagaacaagcaattggaggccctgctctgcttttcgttcaagaagtaatgaggaaaaataccctccaaagtattcaaatctaa

SEQ ID NO: 122946 - DNA, 204 bp, Glycine max
tgactaccatataccttgaccattgtgagaatgtctatccttacactcggaagcaataaagaatagatggaatatttccaatcatataagaatagaatgaatatttccaatgaaagcagataaagataagaaggataattccccaatcaaagagtgggagaaagcaaatagaaaagaaaggatattcccaatcaaagaatggga

SEQ ID NO: 122947 - DNA, 314 bp, Glycine max
atgcaagcttgtcaagaagacgtgttgaagggacaaactacccgcttttattgaacaccactgacacttgcctggacatatgtcacggggggcctgataacacacggtcctcaggtgcggtgctattgctctaatacaaccttgatcaattgctacccccctctgtcttactttgcctccgataaccaatgctgttcctactcctgatacctgctgtccttggcggagaagctgctccttgaccgccttactccgtagcttgtggtggctgccctcctctgaaactctatggctatcggagaatttgcctgggg

SEQ ID NO: 122948 - DNA, 168 bp, Glycine max
tggtcaaggcgaagcggggttcaatggactgtcgagatgtcctggggaggacggctggaagtggactgaaggacacttatctctcatgcctagtccgaaaacaaccactttttctgaaacacaaaacatgaggcttatgaaatcttcgaaggacctactggagaactt

SEQ ID NO: 122949 - DNA, 237 bp, Glycine max
  unsure (1)..(237): unsure at all n locations
acttgctggaattgtgacaagagaggtcactttatcaatcagtgcaaggcaccaaagaataacaagtcgtacaaaaacaatatacgtgatgatgatgaatccgcanatgcagcaactgatgaactngatgatgcattatattgcagtttggatagtcctgttgattcatggatcatggactcangtgcgtcgttccacactactccctctaaagattattgtctaactatgtttcta

SEQ ID NO: 122950 - DNA, 315 bp, Glycine max
taactcccccggcaactgcatgtagagcgacaacatatctcttttttgttgtacgcaatcggtaatggaagcccttttgagagtctgccagaagctcctttacgggtgggactacaaaataccgggttagggtacacttcttttcacataaaataacgtgggtatatggactgcgagagatatgatgggttgtattactagaggccatgcctgaagattgtgatttgtgaagaaatttgtggaaggcatgctgctcttgccgtgttttgtatcatgcaagctggcccatgctgctttagggattttaatacgatt

SEQ ID NO: 122951 - DNA, 217 bp, Glycine max
  unsure (1)..(217): unsure at all n locations
tctgtttagggttttgtatgatgttgtgatgttatatgcctgaattgctatggaatctgtagagacganggtagaactaacccaaggtagaaagtgaaatgtgatgtatgagtggaaaagagtgagaacttgagagttggaaggctaagtcggaattctgtggtanatggaggttagagtgagtcaatactagcttgaaatgtcatttataacatgt

SEQ ID NO: 122952 - DNA, 322 bp, Glycine max
gattatatagagctcacccgcctgcttgctgacttatttgtacatagtttgcttgtctcatatacactctactaggatggaggtatatgataccttgtatcctataatgcattcgtggaggacaaacgggggcctataacttgcttgggcattattgtctatgatgtaggattactgcgcttcactattcgtggccacaccttatcgatattcgtggatatgtgaacactacctactacgatcatatatatgcattgaacacatgtgtgcatatactctaatcatactgcaaacgcaggctagcctatgggaatggcacaac

SEQ ID NO: 122953 - DNA, 335 bp, Glycine max
  unsure (1)..(335): unsure at all n locations
ctgtacacatatatactataataatatgagtatatatttttaaatgtaaaaaaaaaagattcgtgaatcgcanactgattcctaaagtatacttaagtaaatatatatcacatatgagaatacaatctaaaatgagttggtgcagccacatccctatatacattaataaatgtatactacaagtcaggatcttatctatacattgaaaacatgtatgaatatacactaattatattgaaaatgcaaactacaagattatcaaagcaccaattatttcaatattataccacantacaccataattcaaccaaataatactgcataataatttcaat

SEQ ID NO: 122954 - DNA, 266 bp, Glycine max
tacgcgggactattgagaactgaccttgacatagcctccttgtgcgaggtgcacacgttgttgcatacccctgtataagaaactctattttatgcagcttagcccactattccactgaaagataatggggatcgtcgagtcagtcctacctgaatggcttgatactacatcggacttgcgacagctcaatgtaacgccactaaaaaataacagcggtggtcttgttgctaagcacacatgctcgtcgcgagcgttattgaaaattc

SEQ ID NO: 122955 - DNA, 326 bp, Glycine max
  unsure (1)..(326): unsure at all n locations
ctgtgcgtgacatatcatgcctgtgagtggtgcaacaattgttgcgtaccactgtataaatcttctatagaatccggcgaggcctaagaatcctcgcagtgctcatggtgatcgtggtgttggccattcctgaatggcttgaaccttntccggcactgggcgaacaccatctncgggcactacgtgacccatgtattctacttgctcctaagcaaacgtgcacttggagagcgtcaatgaaaatttccctggtaccagaatctggaaaagcatttccaagtgagagatgtgatctgctatggtctgctggatattaatatatcatc

SEQ ID NO: 122956 - DNA, 313 bp, Glycine max
catgctaactgtaccatgttggcattatgagtgaatggtgccacacttgtagaaggctcattacccattgtgtgaaatgcaacctggggccatcctgtgatacacgcggctgtcggttttctagcgaatggtccaactaggggcttggttcaaatgagtaagatgactgtgacatatcgatggacctggagaatcgtagcttgcctaatgggttgttgaagggggagctcatgcatggatgtcatgatgcaggtcccgtctgggttgaaatggggctagggactccatcatatgggcaactcagacttaacga

SEQ ID NO: 122957 - DNA, 264 bp, Glycine max
ataagggcatttgtatggttatactttgtagtaaaaaagccaactggtaatggtgcatcttggattgacactatgctatttattaaaaataagtaataggaacttagatgggtgcttggtgacagatgacaattcaatttatggctaattagtaatagatagacccatatgtgtaaatcattaatagtaagacaccatatgtgtatgtgatattactggtacaatgagattcattaagcgatttttataaaaaactgatgagtt

SEQ ID NO: 122958 - DNA, 121 bp, Glycine max
aacattccctggcatgttcctcaaaccgtgctcctattatgctactaagaacccgacgtgctacacatacagctacatgttattattattatgcgcaaccattacatttatgcccccctta

SEQ ID NO: 122959 - DNA, 179 bp, Glycine max
cacttatcatccatgatgataatcacaatgttacaataaatcaagaatggtgatcaactctctcacacttatcatatgaagaaagtatatcattaaaatcatcaataatacaccaacgaagatgagatgaagaagaaagattccttaacatgttccaagaatctcttctgctattatgc

SEQ ID NO: 122960 - DNA, 335 bp, Glycine max
ccgggatcttacccacccgtgcagcagctaatcatcacaccttgaaacctggagaacatgtttaccttctctcgtgtcttcgccaaatagacttcggctaagactaaccacctggagtggttcagactctcttgtccctttatcttatgaacttgagcctaacctcctgatatgtttatactcatcctattacctcgtctatactttgatatcggcacaaagcgtgactacttaagcttcttgcctcacgctagaacaaaaatgttttatgggcacaccgtctgttgagcctaaggcattcgcaatgacaacatcttttaagattatatatccgt

SEQ ID NO: 122961 - DNA, 397 bp, Glycine max
  unsure (1)..(397): unsure at all n locations
tctaagcttacaagtttcagtttcaaacctgaaactgtgtatgatatttattctctctgctttgccaaagactgcgcatgactaccgctgattcttttgctctctttcctttttcaaaaacaaagactaccacctgattcnttttgtctccttctccttgtaaaaattcaaacgacacagctgagaatcttttgattttcctttcctaatcaaagtgtcaatgactaacgctgagaatctttgtatccatcacaagatcaaggttaacagctgaatcttgctaaccatggaggacatcttgggacaaataggacattactggttgatgaaataaaaggactcttttggtagtcatggaggcatcatagtcaaaaacaggaggacatctgggcttgtg

SEQ ID NO: 122962 - DNA, 326 bp, Glycine max
agattctatagaactcacccgctagcatgctcacttgatatgaggaagctgtttaaggaggaaactgtctggttgtatggtcaaccacatagcgcaaccctggagatatttgccaggggtcaggatacctggtggacgccaggtggggtgctattgtcaccaacccatcttgaccgagctcaacccacccagatcataatgatgcagatagaacctgtgatgtatctaataccgtaatctcctggcgggccccttattaaatgaactgagaccacacttcaaggctgtttgtggtggctggccagctctgaaacttgattgatatg

SEQ ID NO: 122963 - DNA, 329 bp, Glycine max
agagcagtgcgatgcatgctcgatgacctttcttgatggaccacagagtgccaatatctttatgagaccggcttttttaatgataacaccccctgacatgaaagcagatcagttttcactaaggatacggatcttcacaaatgagctatcgagcaaggcctgctttgataatgttgcaagacctaacgggttgcatgatcattgccttgttggcttagctacatgctatagaaaccccactgatggagtgagaaagctttcttttgatacccggaatgaaacggtgcttgtctgattgagcaagaatgctatgtgttgagttggggcac

SEQ ID NO: 122964 - DNA, 435 bp, Glycine max
  unsure (1)..(435): unsure at all n locations
ttgtctatatcttcatgagaatggctctcgagaggatagtttcacanaatatganataatttcagtatacactangtatttttctaatcttaaatgagctntcatgcaangcctgttatgattctngtgaaagaatagaattgttgaatgtttcttgtcctggttgcaaagctcatgctaaaatattactttcatgcaattggtaaactttgnttttcctacagttagttaaaggctgcatgtattntntannattgatcagatgggttttgtgncagttgatacatgattggaccattcattntccaccctattctatattgntggtattntatcttctggtatcanaatcaaaagatggtgttaaatccgtcatangaatcatanattctagatggtctgattatacatataatttcttgtttcctatctaat

SEQ ID NO: 122965 - DNA, 324 bp, Glycine max
ttcttaatctacccctgcggcggctctgagcgttatgcggccagtccctgacatcccacctgatgtcttatccctccgaagattcccatatgtggccttctcgagaaactctatatcctaggacattaccacttctaacatgatactcatatgacttttcctgggaagacttgtgactatttttcttttttcctacctttctcacttttgtgttttcaacaagagtattcttctaatcttatgcttttctcaagatgacactctctggctattgcttacctctggcaaagattgctttcgccattgtggcactgtctttactac

SEQ ID NO: 122966 - DNA, 412 bp, Glycine max
  unsure (1)..(412): unsure at all n locations
tctaatctcatgctttatcaccatgactatcccacactactactgttatcacttataaganatccgccattgtggcattatcaagaatacctatctgcttgaacattaccccatctagcctcatcctcatttggctgtttctcttcaaacttgtgactaaataactggtttactccctttttaactagatgaaagtaaaattgaattcatctaatctcatgcgtttatcaccatgacaatcccacactactactggtatcacttaatataaacatccgccattgtggcatatcaagatacctatctgctgaacatanccatctagcctatctcattgggtgttctcttaaacttgtgacaaataacttttactccctttaacaccatggggtctatacctacaccctacctc

SEQ ID NO: 122967 - DNA, 263 bp, Glycine max
catgctagcttcagatggaacattttaccatttgacactatcaaacctagcaaatacaagacttaggcaagagggctctgcccaaaacgacgaccatttcctcgggatttcttgtgtcaactacgcccatatcatacaatttgggccgattctgttaccgagagacacactgagggattttactggaggactctacaacattattctagctcgcgacacgtgggatgtgctggagaaaatggccaaccttataagactaatat

SEQ ID NO: 122968 - DNA, 396 bp, Glycine max
  unsure (1)..(396): unsure at all n locations
catccgaatatcatgaactatcaaaacctatcatatacaggacagaggcagaatactctgtccaaaacacataccaataccacaactttntcttactcaaataccccagtaacattctctgtgttccaattcgttaaccgttggatcgactcgaatatcttactggatgtccctagtacataaatctacattgtgaccgttgggatctgctagataacgtgcagaacccaatctgtactactgctttcacaaccagcaaatacatatcatttctgacatagccaaattctgctcacatttaacagcaaaattctgataatagtgagattttgatatcgacttgcctcgccaattttgccatatgaatcctcaagtctaatcatgttaaatcatgtt

SEQ ID NO: 122969 - DNA, 173 bp, Glycine max
ccactttcaggagactcttaagctacccgtcggctgcaagcttacctgtttttctttcctccacatatggtgctactgaacacccattatggactttaaatcttgcttcagcgctctgtgtcgatggggacacacgacaggattgaaccctaaatggaaagtcttgctctaca

SEQ ID NO: 122970 - DNA, 313 bp, Glycine max
agactctatagaccctaagcgctagcatgcgcgctttgggatacataagtttttggtcgcatcattggtatctgaccaaagttggactcttcatttggaccgaccatgccctaaagggttgcagcgagaaaaaaatgcgggggtggaacgccccccccttttctctgcaaacagaccgctctccttggccgtcttgataacacattaatgggcctgtgcttcatactcatcagagtgtgcggctttgtgcaatgcgtttttagatggaaatccatacatttggatctttgaattcactggtctctagacggac

SEQ ID NO: 122971 - DNA, 343 bp, Glycine max
  unsure (1)..(343): unsure at all n locations
aaacatacaataccaatatccatgtttatctcattataatgangcagtaggtgcatccgatagtgtttgaataatgtacaaaataatatcaaatagtttctatgatgataaaattctctatgagcaatatgtaaagttcactgcgactcgacaatatacaaattgtattattcttttaattgatggggatgatttcacgcattccgtaggagttgatacaatgaatatctcactatatcattttaggctaaaatcctcaataatttcagaaaatattgatcattgatcgatgtctcctgagagtttggttgagcctagcccagagcgcacattatttcagctc

SEQ ID NO: 122972 - DNA, 358 bp, Glycine max
  unsure (1)..(358): unsure at all n locations
ttgtgtgtggcaccanatttgttattaaaatattcaatatttatataaaaattctgacaatgaattctaccgactatanatgttttcttttattgtgggatgattgagcatccgggagttatcataattatcacttatatatagctaagaatcatagttcaaaaattatcatgtgatgtctatgggtggtgacatggggacgcatatttttcttcatggtcaaacactttgtgttgattcatatatgggttaaccaaacattatgctactatattgcataaaactttaagcattctttgacattagataaattccctctttatttggatatatgtctccattaattttattttttcta

SEQ ID NO: 122973 - DNA, 355 bp, Glycine max
agattatatagagctcacccgcgcgctgctagaatgaactcattgtgacactgtgatcattaccatgggtatataagctcattacagaaagactattaaagaacacatatatttcgctctctgccgtgcaccattaatgtgactaccaccctattgattggaccaccacctacttgacgcctatttgacatattgtcagtacgattactggcaacgatatactagctgtcccatgtctttactggatacaacaggaatgctcactacgattgacaggcattgccacctgcttatagctatgggataaagcgatctggtattgcattataaggggtagctttacaaatgaacatat

SEQ ID NO: 122974 - DNA, 398 bp, Glycine max
  unsure (1)..(398): unsure at all n locations
gctctctgtgtgcatattaattgattaccacttcattgtaattgattacaacatactatatgcaaatatgacatatngcaagtatgataatcgacaaccaaatacgttgcaatcgatatatctaatngaaattagaagaatgttctttgtgattgaaataattgattacctgtgtatttgtaatcaatagaacgttctggaaatgcataaaanaggatatataagcaaaagaacatattactaagtttgggtaatcgatatgacggtataattgttttattataatacacatctgggtattccctagtggactcttttgaagataaatacacactctaatttaaagagcctctagaggattacaaggcatttcttaagaaatcatctgcaagacatga

SEQ ID NO: 122975 - DNA, 290 bp, Glycine max
ttattttataaagaaattcactttgtgcatcgaaaaaatgcttgattatggagcacctattggggttgaggtccttcaacggaaacaaaacgttgtttacataccccctcaacttttttctatctgtatatatatgtgcgtatgctgcattcttcacccggcgaatgagagagcgactaaagactctgcctatataggatttgtagtcccacagatcaactatgccatcctatctttgactatctgcattgaattcccacaaaccgtgacaggattacctcttccactac

SEQ ID NO: 122976 - DNA, 301 bp, Glycine max
ttcctactcttatgaatattcatctgatgaattctgaatgtcaaatgcatgctctaagtacaaatgtttgttacataattgctatacatatttttatctatcatccactaggagtcactagactgcatatatgaatcaaataattactcacttcctttgctattcacacctagatacaattctatcatgtttcaaaatttatctcctgcaacatcttaacaataacataatttttgtcaattggaactatacagaaatattatgcatgtaccataaatttatcaaactcccctccttattt

SEQ ID NO: 122977 - DNA, 292 bp, Glycine max
agattatatagacctcacccgcgtgctagccagcctatgttgatctccatatggctttgcgcattcgagctcgccagagagctcccgcctgaacccttatgatgttctcttctgccattgccatgataaacccagagtgtcccccggaatgctttgtgctcctacgcgccccttggttgataattactgacggggtaccacgataattatttgcatgcttatctttcccatagacgcatgacacttggggactagccatcttagaattggtgagtgtcctcactcactgagt

SEQ ID NO: 122978 - DNA, 283 bp, Glycine max
  unsure (1)..(283): unsure at all n locations
tctcttctcccttgccaatagaattcgccatgactaaccgcctgaattctttntgtgtctctcttctccctgttccaaaagaacaaatgactaaccgcctgaattcttttgtgtctcccttctaccttgtcaaagaattcaaaacggcatagtctgagaattcttttgattctttcctttcccatatacaaaagatgtcaagggactaaccgcctgagaattctgtngtatcctcattcacaaagtttcaaagggttaaccgcctgagaactctgtcttaaca

SEQ ID NO: 122979 - DNA, 83 bp, Glycine max
tttttaaatatatcaaccataagcctgatttatgcttggctcaaaactaaagagctctaccactgaacaccaaatggatcaat

SEQ ID NO: 122980 - DNA, 499 bp, Glycine max
  unsure (1)..(499): unsure at all n locations
ttcatatatcttaatgttaagataaatataaccttcctatttgtctctctcaaaagcttcacaaacaagtcatgttcctatacacagagatatgacactctatattgcgtcatgactaggaaactgtctatgggtggaagtggaaacaacactgtattatgatgtgatgtgcctatatccaccaattaaagcaattgactgtttgactctgnggtgatcacgcacatcgattgacaaaaccatgtaactgaaattatgtttaaaaatcacatctactcaaaggttagagacatatattcatattgatattaattcatctagtctccttgaaaanacaaataatctagtgatattctctataaaatcattagtgtaccattcaaagccgaagcaatgaaggcatgtgttgatataatgaatgataagcgaagcatggttgactgattgaagctgatatgttgagtaagaagagcacactacttatactcatgtctctgta

SEQ ID NO: 122981 - DNA, 315 bp, Glycine max
atgtacctataatgtgtcttacctatgaaggaagacctttgatagaccggctgagccccgaatccgtttgcttacttcgaagctcacttgtctcctgaattggagaacaatgatatggcactcttctcatagaacttgggagcggtgaagtagcttatggagaaagggttggggggctcacaagaaagctacacaaaagaagtgttgaagaaatttaatatgcttgattgcaatcccgcgaacacacctatggaaggtggcttgaagttatcaaagtttgatgaaagagagaaggtagaccccacggtcttcaag

SEQ ID NO: 122982 - DNA, 261 bp, Glycine max
  unsure (1)..(261): unsure at all n locations
tactaagctnntatatggtgtgtctattatntgtcttatgtgatgacctatctttaccgtcataacacanannttgttgaagacttcaaggattccatgtctcatgaatttgagatgacagatatgggactcatgtcatattacttgngaatggaaatgaagcanatggagaatggtatctttgtctcacaagaaagctacacacaagaagtgtngaagaaatttaatatgctttgatgcaatcccgtgaacacacctatg

SEQ ID NO: 122983 - DNA, 258 bp, Glycine max
acatcgggaaatgttgccaaacatgtattgctcattctctgtgcgcgcatgaggcaatcattctctgttgctctccacatactgagctcacatacatgcacattttcgataaacagaaatggtgataactgggtaacttcagttctactaaggtttaacatcttttgtgacggtcaaaattcaatctgtgcaagttttctgggcttgacatggtcgttcataggcacacaaatatgccgaaacagcaaccaaattata

SEQ ID NO: 122984 - DNA, 271 bp, Glycine max
agctctaattggaaggacgaaacaggcagagacaatgaaccatgagttgtgcgtcaccagacaatctgttattaaattacactaagtgattctcatgcctctaattatatacatggttgctctcttgactatctatcttgagcttcctcccttgagaagcttcaatgtctatacatacttgtgaagctattactcatgaactctcccccccttcttttctaaactcgcctacttgagaatctatcaaaataaaatttctaacaaagcttga

SEQ ID NO: 122985 - DNA, 321 bp, Glycine max
  unsure (1)..(321): unsure at all n locations
gagttgtgtgtcacaagactctcattcatcanagttacaataagtgttacacatgcttctatttatagactangtagcttccttgagaagctttcttgagaaaacttccttgagaagcttctttgagaaaacttccttgagaagctagagcttatctacacacacccttctcataactaagctcacctgcttgagaagcttccttaagaagatcctaaagaagcttgagctanctacacatacctctctaatagctaagctcacctccttgagatgagaagctagagcttatctacacacccnctataatatctaagctca

SEQ ID NO: 122986 - DNA, 289 bp, Glycine max
tccttttagaacgccttaaaaccaaactaaccctttatttggcttgaagcttattacaccccttctaagataaaccatcttattatctttcccttattgaaattttgaagccttgaaatgtttatgaaagtaaagtgggggtgggaccaccgagcttcctttttaaaactttttgtgagtgaagaaactgtttccctgccttggaaaattttaagctggcttgtttcaaaagtttaaggttttaaaaaacggcctgcgaccgtggtttttgccacaatgtcaaggtttt

SEQ ID NO: 122987 - DNA, 293 bp, Glycine max
ataaggctgtgaggctaagggatgggcctttcctagaccggaggccgtccctataagttcggatttaacctaatggaccttaacaaagcggggcatctgggccaaccgtcccttatagtacccattccttaacacgcgctactctttctacacccttgcgaatggagatattctttggctatacccggcataacttgtggtacaaatgagtgacactatgagcgcacactatagatttgagaaacttcaccgtgctacacagaagaccctgtgccgatgaactattgggggag

SEQ ID NO: 122988 - DNA, 400 bp, Glycine max
  unsure (1)..(400): unsure at all n locations
acactttatctaagctgcttctcagacatactgaattagagctgtgtgttaagtgtaagtgggtcaatgccaatactggttccgtcaagacaatttggattaccatagtagacttaaataaggtgggttatatggacgaacctttcattatggcacaacaagcatacatgtgtttacgtcctatatccgtgtgattcaagatattcaatggttctacaaggcagaccaagtggtgttaatgagtcacacaatgattgcacacttgacatttgtgatacttacaccttttgcacatatattccttctaccaatgactcatatcatgtngatgaggtgcaagcaaatcgtaatgatcatgatgaaggactatgggataacaatgtcacttaactgtacccta

SEQ ID NO: 122989 - DNA, 253 bp, Glycine max
catgcaagcatggatccttcatacatctctcatataagccataactcgacatatatccaatcagtcatgctcatgcctacgcgatggaccgtacctcagctcctcttatgcattgaaggcacttctgccaaggagtagcctaatgcgggaataacacgaaactctcactcaggtttaactgagcaattgacgattatgttaccctgagatgaggagacaagttgaccttgcacaccctgtgaactttccgact

SEQ ID NO: 122990 - DNA, 439 bp, Glycine max
  unsure (1)..(439): unsure at all n locations
cacacactcaacatatagtcatcatccgtccatagttccaatcaatcatgctcagtacgatgcatgcacctgacctcaactctcaaatgcaatgtggtaccatccncaaggaatatcctaagcgtgtctacacgacactctcacttatgaaaactatgcaataagtgtcaacgtcaccctgtcatgcacagacatactccccccccccccacggtgatcagcctgagtctcaatgaagttccaaaccgagtgacatgccccctagtacaagtatttctcctcatgagaaactataagtacttactggacaaagttatactagttccatgtcatatgaagtatgaaacatgagcaccatcaatgcactaaccatggataattaaagaatttaagtcatccccctgcagagatgcttaaaactctgtaaccactctatttc

SEQ ID NO: 122991 - DNA, 211 bp, Glycine max
gggagactgggccatttgggtagattctttcctgagtcgacaacatatactttttatcgggcgcacatattttctttacgctttaaaaatattccccatctggcaaaacaattttgtatcccctgaataactaatagctgagagaacatgcatcacagtggcatgtgactggccagctaccttttattcttactcatttggtgcagatgaa

SEQ ID NO: 122992 - DNA, 281 bp, Glycine max
tctatagagctcacccgcatgcatgcgagcttgtacccgatgcacaacctttcacgattatgtcttaggctttggcgtgactgatcttctgagctgagagctgaagttacgactcacgagctcttgaactgatagcaacgacttaccaattggaggtatatactctggacgtgttggagctgcaataggaatgtcaattaaagttgagcctcagtcttatcatttagctctacacggcagataatcacattctttgttagttcttcttccaagctacgagt

SEQ ID NO: 122993 - DNA, 386 bp, Glycine max
tgacgatatctagaacagtcacctacgttggcccaattaaatctatctacactgctcgtgttgatgctccaatcggaatatcaattaatgttgagccatcaacactaacattcagctctaaacgaaagataatcaaaatcaatgttactttttcttccaagctacgagttcatagcacattcttatttgtgtacctgttctgcgaagattgtgcgcatgaagtcacatacactcggcatgcgcttgtatacatcaatgttggcaaaacagtgatgacctgctgtgtcaagatgacagggccaccctgacttattaatatcattaatattgaattcttatttactctcctaatcatatttgaaccacttctgaatcgtgtgcgtaat

SEQ ID NO: 122994 - DNA, 275 bp, Glycine max
  unsure (1)..(275): unsure at all n locations
accaacccttcccctattaaaacactctttcttctctatgcttagtgaatacaccttgttggtctctatttattcttaaccctctcatgcaacttctttacaaattgtgacctatattccccttctttatgtataatagaagtgtccagtgggaggggaatgatgtctaacagtgttaggggattgaacccatatacaacctcaaaaggtgactgcttggtggttctatgaacccanctgttgtatgcaaattctacatgaggaagatactcatc

SEQ ID NO: 122995 - DNA, 200 bp, Glycine max
ttttatacttatgtttttcatacggaccacatacgggtaatctcctaacaaattatgatcgcccatactactttgccacaagaatgggcttttcttgcatgtgtagcactttgctctttgaaccctcatttaagccgctacaaatatggcttagccgctgaaaatactgcttagtctatagaacatatgtctatgcgagc

SEQ ID NO: 122996 - DNA, 318 bp, Glycine max
gtgttgtgcccataaaataattgttgagatgaatgaaaatgttataagagataatacataattgatattaatgttatcattgtattctgtaattgtatagtatcgacaatgaagaaattatataatatgtttgaaaatgtattaatgcgtaaagaataattatcattcgtaacaatataagtattttgaatgttttatcatgagatgatatattgtatataaatctataataattgtcttctataaaaaaatctacatatatctgtactgtattcgagcaagcataatattatgaaacaaataataagtatctaatta

SEQ ID NO: 122997 - DNA, 329 bp, Glycine max
ttataaaaccacccgctgcatgctatcggttatcaactttgttctttcacaattaccctggtgtgtcatatctttatattcccttgtcccttggccaaaagaaatacctccaagactgaccgtctggacaattgttgtggctatgaccatgcttgcccacaaaaatgacagactttccgcctggattgtcatttgtctcctttctccctcttacaaagaatgcgaactgcatcgggacgaaactttgcagaccccttcctccccggatcacgacccatttgaactgactaattgtctggcaacattgatgcgtgcggttctcaaccaaa

SEQ ID NO: 122998 - DNA, 380 bp, Glycine max
  unsure (1)..(380): unsure at all n locations
gtgtgttatatcttttcattctcttcttcctttgccanatagaattcgccaatgactataccgcctgaatttttttgtgtctctcttcttccttttccaaaagaatgaatgactaaccgctaaattctttatgtctctttctccttttaaagaatcaaaacgaatagtctgaaattttttattcttcctttccttaacaaagattcaaggactactgctgaattctttggttccttcacaagttcaatgactatcgctgaaacttgtctacaaatggaggtcatcttgtggcaagtaagctcatctactggtgtgtacgaaacaaaaggtcatttgtgatagtagtgaggtctcatggtgtcaaaacagggaggcatctg

SEQ ID NO: 122999 - DNA, 244 bp, Glycine max
tatcaagcacctgcccgcttaacgagacatagtatcgcacattatccctatcaatgaatcattgtagatgctctttcaagttctaatggattaccatattgtacaatgcttaaaccctatcataacatatatatggatgatcaaaccaagttcatataaataaacacatgaatgaacaatgaaactagcaataacattaaatagatagcaagagtcttacatcaagagagttagtggaaagctc

SEQ ID NO: 123000 - DNA, 332 bp, Glycine max
attattaaaactcacccgcttgcatgcaagctttatctattgacttattcccttcatgccatgctcacataatgtttacttatatgacaagatgtcctcgcttaaggatctggacaagatctttgttgctcctttgtcatatacatgattaggtactgctttctcttgagaataaagacattaagctttattaaactatgggcattgatattagatgaccttgtttgttgcatacattatgagtggaaaatacttttacatctttgaagtaagtgtttaaaacattgcaattggccttatgaaatttgttaggtattatcaatgaacttttt

SEQ ID NO: 123001 - DNA, 416 bp, Glycine max
  unsure (1)..(416): unsure at all n locations
aagtatatatgagaatctgacatgatatntacttatctgacaatatcttcttgtttgaggagaggacaatatcttcttgtacctttgtaatatacataatatgtaattgtttttatgataataaagatattcgtttgataaaaatggaaattattatgagagaaattctataatgaattcaaaatgtataaaatgaaatttacaatgtacaaataaattcttaanacattgaaattgaaatataanaaaaaataaataanatcaaatcanatgttctgatagaaattctgaaacgataatttggtgttttgtcctttgtcattaaaaagaaactttgaataatatatttagaattgttttggcnanatttcccttataaatcanaatatagtcatagagatcatcanacaacaaca

SEQ ID NO: 123002 - DNA, 165 bp, Glycine max
aacgactaggactaaaacaaatcacagagtttctctctaaaacgtgcatgaaaaacacagagaggttacaccgcgtgcgagagtaacatgattcgagcggcgagagagcttacactcaaacctagctgctgtgatacagttttcatcgcccaagactgcaagcat

SEQ ID NO: 123003 - DNA, 358 bp, Glycine max
  unsure (1)..(358): unsure at all n locations
atttattgctaaacgaagagtgactaatacgaataagagagtagcactctaaaactgggatgaataagagagagaggagagagcgggagagagagtaaaatgaatagagacgatagagagcttaaacttngaaccttggtgctgttatatagttctcagccacaatgtttacaagtatgtgttacatccaagcacttgattacattctagataagatgagataagatctgatctagatgacattatatctcgatgatataatgtctaaatgatatcanatctagattagatagatctatatgagatatatctacatgagtcgaatctagatcagatagatctagatgaactaatatct

SEQ ID NO: 123004 - DNA, 334 bp, Glycine max
cttgttgtcttgctgcgagatcggacgatcgaactaatgacgtcgttctttgtagatagttcaatggccacttccatgatttgacatcaagggttgagatgtaggtccctgcagagcggatatgagactattgatctcaataattaattgtctgaatgccgcttattttttgttcataagtttaggggctattttctagtaggatgcttcagaccatgatctatgcgtcagtgaacaaggttcagctcaatattataaaaaaacacttctaggatgtagtcgtagatattcaccattccatctggtaaggattagctgtatacttgtatgcatt

SEQ ID NO: 123005 - DNA, 130 bp, Glycine max
tttatcacgctgcacagatttcacctcagaataagcaactacctttaatcctatggcggaacccttgtactattgacccgagattttgtagtgatgtcttctactgcgaaaaccgctctgtttataggat

SEQ ID NO: 123006 - DNA, 353 bp, Glycine max
  unsure (1)..(353): unsure at all n locations
tgcaagctgcctataccatcaccaaatctaccactcaccacaatcacatagtgtatacatataaattatagaatataaccgctatcaatctttcccaatgtgttactagataaaattatagcatgtntagattacacgcaagaatcaattctaccctataaaataatggtgataccatggaatagtataagcaactatttgtggttgtgccttcaccatgaaaaaagtagctgttcctagtaaatgacagtatgataacattaacatcatataggaccaaagtcattatcatatgaccaatattatcatcaagtttccccttgtatttcatacacacagagagctgtatgtct

SEQ ID NO: 123007 - DNA, 314 bp, Glycine max
ttggggttgaaaaactatataacagttccaaggttctagtttagctctctctctctcctgtctctcttctatttttcgtttttagttttagtctctcttctctttctcttttattttcgttttttacaattccagttcagacttttagttttatcaataaaatttcgttctctatttgattaatggaaggctaagtttgcagtgttgttttctcttgaggatcaagcacagttctctttgaggttctattattactgttaaattctgttcagtttttcctcttcactaattactctgaatttgttgctattaat

SEQ ID NO: 123008 - DNA, 317 bp, Glycine max
tataagttaggagttaaaaagtttaataattgtaaattaattaggaagagaaaaaaattaaaaggtactaaactaatttatctaacacactagaataagtccaaatctcacatcaagaatacaagaatttgatgcacaaacatctatttaaagagtctaatgtctatgtattgacaatgtaaaataattttacactctcatccaatcaccaatttatcgtttgaattactttaagataattattttaaaagtcaataaatttactataggattgtgattgaatgactatataaaactactaaaataaaagttttcaa

SEQ ID NO: 123009 - DNA, 317 bp, Glycine max
  unsure (1)..(317): unsure at all n locations
agcttttactttgaaaagggctnatcttttctttcttatncatgcatacagtatccttttaacaattgagcttacgttgctacatatcctaactctctaacagttgtaaagcctaactaactaacagtttggaactaactaacaaccttgctaactaactaatgaccatgcatgcaactttacgtgagagatgtctgcctgctgcatcatctttctaacacaatgtcgtatgtcctatcattaacggtggacggaagtcaacggatgaattaatttgtcacactttttgtgacttttgacgactaacacccaaatgg

SEQ ID NO: 123010 - DNA, 314 bp, Glycine max
tcaggctgctcgattgctccatgttgttgcatggaagggcaaaggtctgtatggtggtcagcagaggagcacaaaccacaaacccttgcaacaagtacaaatttctgattcaaggccagctgggttaccaagttaaccaatgcatccagtttgccttcaagcttcttagtctcagatgatgcagctgagtttgtaactacctcatgcactcctctaatgactatggcatcatttctggcgctaaactgctgagagttggaagccattttctcaattaaatttctggcttcagcaggagtcatgtctccaagggc

SEQ ID NO: 123011 - DNA, 312 bp, Glycine max
ttttcaaagtcaagtttgaaaaccatgcttgggttatttttgaattaagcttcagctaagacctcattagctatcattacaccatggaggatatgtctgcctttgaggaaagcaatttgcctttcatcaattaagtgaggcagcacaagagccagcctattagccaggactttggacattattttgtagacacaccctatgagagagatgggtctatagtcattaagagattgggggctatttgttttagggatgagggctatgaaggatgcattacttcctttggggaatctgccattaatgaagaattca

SEQ ID NO: 123012 - DNA, 336 bp, Glycine max
  unsure (1)..(336): unsure at all n locations
acgctatanaacactcctgcttcttgcctccgagctcgcccattcgtgtatggttgcttcctccagaagcaacagccttctggaggaaggatctggaaggcccaagtgggccagattgctattcgtacccccctttttactaaatgcaccccctttctattttttggtaattctttttccgtaacgttacgaaactttacgaatattgtaacgatacttattttccttccgcaaggttacgaatccttacggattatgtatttactcttttttagctttagaagaagttacggaaactcacgaattgcgcaaaaacacctcttttcgatttccgcc

SEQ ID NO: 123013 - DNA, 314 bp, Glycine max
ttgaaaagtgctattatgctttttctcgctgagccaatctactggcttagcgagcgttcgctaagtgcaacactcatgggctaagcgcgaggaagacactggaagaagatgagctgtataggttcgctaagcgcatcgcttcatctcactaagcgcaccgcttcagtccatccgctaagcgagaaaggcacgcgctaagccaaaattcactaatatgcgctaagcagtccataattgcactatgcgcacaagcacgaacaaggccacctatttaagcgtgaaattagattttagagggagagtttggactatga

SEQ ID NO: 123014 - DNA, 311 bp, Glycine max
tgtagaatggccagacatgatttatgtcagggtttggtttggttcaagggtaaaaaggatgccccacattatttccatgacacaaatgcaaaaatgatgatttggaaactttatgcaaaactggtcatgcatgcacctatgtggacactcaagtgtcaaatttttatggtcatgtgatgctagggctcaggattcattccctctattttagtcaacccaatgtttccaaaatatgttcttttatccatttgtgcattcatccgagtccattttgggcgtccggggaaatttcacagcgttcacccttcggg

SEQ ID NO: 123015 - DNA, 313 bp, Glycine max
tatcaaaaactcaaggtctgcctttggtactcatatctccaaaacccaaggtccacccttagtacatattcttgctaaacccaaggttcgcccttggtacatacctctacagaactcgaggtaccccctcagtccgcttacatgtagcaactacaatgaccatcgtcaagggtccaagttcaaccaaacgaactaccaccccactattttgcaagacttttaattaggtcaaaaccacacctactcctcataaccatcagagatctaaatgtagatcaactctaatttgttattgcgatttgattactttttt

SEQ ID NO: 123016 - DNA, 310 bp, Glycine max
ttatagttagacctaagttggttcatgtgtcttagttcgttgagttttcttaaacaccaaacggatctgagtaattgcttctcgaggaattttgagcttagaaagaaatactattggcattcgataaagcaatatgacaaataatccgtgtgataatgttcagcatttatgataagtgctacaagagaactataagaggtttcatttgtataccatttccataccttgccatccatagaaaacatatccaggagatccaccaaataaataagccatgacattggctggtataacataagaggaagaaggt

SEQ ID NO: 123017 - DNA, 310 bp, Glycine max
tgctggtcttctcatatttattgaccccttggttggaattctagacaggttgacttctttgctccttgttgaactggttccccggatgattcttctagcttgagccctgtgtaaaattcctcccttggttgaatcccggtggtcctccttggttgtagccttggaatccgtggtgattctgagctcccatgtagttcacctccttggaagaattttcttgggctatgcattgtcctagctcttgtgctccaccacagatgtgacatccccctatttgcatgattgaagagtaagaaggacttactgcttg

SEQ ID NO: 123018 - DNA, 311 bp, Glycine max
ttgagtctgactacctattctattctacatgtgacatctttccctatctttgcaaatccccaatcctgcaaagaatgccctgtatctcatcgttcaatgtgaccaacactaccaagcgatgccgagaataagacatggtttaaaatcaacttctatacacatgacacgacctatatggctaccttatcattccctgactctcataatacctgccttccctacaactcacccctaagacctataaccttaaagctctacaataagaactgaatgcaaagccaagattccgaaccatacgaagattacaaact

SEQ ID NO: 123019 - DNA, 314 bp, Glycine max
tgaatgatttacatctcccttttctattcaaattcttcttgatatcatcaaaatcttcatgatttacattctccccctttttgatgatgacaaccacctgtaggttaggagcaacaacaaagaaaatatctatttgcatatagtttactcccccttggttttacaatgattgcttatatgagacaattgaagatttcatatttttcatatataaaaagttgtctcataaaacaatagataatttttcttactattttatcttttatctttctctccccctttgtcaacatcaaaaataaatcatgaatagaaaa

SEQ ID NO: 123020 - DNA, 315 bp, Glycine max
ttgcacttttagaagcattgatttttttggcttgcgtatctgatacagggggtttgtttgtttcttgaatgaaaaaatatttttgattaaaaaattctagaaaaacagattaatgttgattttcttttatgttgaatgttataccggattcgaacctagtcccttatgagattgtcttacaaaaattatcatacggaccaaaaatactcatgcctaatattgattttggttgtacaataaaatgaagatttaagagggaaaaaaatccaaaaaaaaaatatcatatatatataaagatatgtttaatttctattt

SEQ ID NO: 123021 - DNA, 317 bp, Glycine max
cttcggcatcgaatacttaccgcttgtttattgtccaacgagccatgtaacgctatattatgcgctctggaattgatcacgaaagcattgtgtatgctatacaaaagcgccctaacttggaagtgatcctgttttcttactttgttcatagataacaagtgaatactgcatccccatagagctgaaccctctcatctcctgcctaagtgcctttctatcttacatataagggacgtggttgccgtctaacttgccaatccgcgctaggaaggtttcacctgaagcaaactccctccatactgttgattacgggccca

SEQ ID NO: 123022 - DNA, 314 bp, Glycine max
  unsure (1)..(314): unsure at all n locations
ttaggatcaaacttttttctctctttttctctcaactgttcttcattcttcttcctcttttcacttctattcttcctttatcttgcacaaattatgtggcttttccattggtgatgatcattgaagattaaacacttaatcaatccaagaatccactccaagcaaaggtgaatttgagttctagtttagtatttctaatgtctatgaatgctcattttttcttcaatcctattttcaatttttatgattatgattatgcataggattgaaaatggattangtcatggattcatttcctaatttcaaaattcaat

SEQ ID NO: 123023 - DNA, 114 bp, Glycine max
taccggcgcgcgcgcagttcatagatctagtcccgcgtttcgttactctggaagagacagggactttttggtcgtgtacttgtcacaatgacgaaattgtaatggcgggtgctg

SEQ ID NO: 123024 - DNA, 313 bp, Glycine max
tgcatgcaatggagaattttttatttccattcttcctcctcaagcattcttgtctagcacaagggaagagagaaaatggtgacttctctttgtgtgcgtgttacgtttgtctaagagaatgaatgagaaatggtgagatggggtgtggtggcggtgaaagagatgtgggtagggtagtggaaaacaattgtcaacttggtttaaggaaatgagacatgtgcctagctaggtgttaagcttaggagactttagggtttaggtgtcatgtagttagggtttaaggttttaggtacctcgagtttaatttacatag

SEQ ID NO: 123025 - DNA, 320 bp, Glycine max
  unsure (1)..(320): unsure at all n locations
tcaagctnctcattgtataatagttttctattttgttatctgtatcgtgcacaaataggttaaaacaatatcagcagtatggcttatatgcattcaattcagtaagccacaaatgcaaatgttgaaaagaaaaaagtgattttattgcatgacagaaaatgaacagaacaaggaaaaagatctcccctccaaaggttttcctttacaaccaagccactacactgtttaccctttgctgacaaagctgaatcccactccctactcacctcctctatttaagctatacccgacttatcatcctctctaactagtaactatct

SEQ ID NO: 123026 - DNA, 312 bp, Glycine max
tatgctgcaaacatctacattttacctcctcaacctcagcagcaaaatcagctaaaacaaaacaattatgacctctccaacaactggtacaatcccaggtggaggaatcatcccaaccttatatggtcgagtccttcacaacagaagcaacaacaacagccttattttcataatgttgctggcctaagcagaccatatgttcctccaccaatccagcagcaacagcaacaacaacaaccctataaacagcaaacagttaaggctcctccacaaccttcccttgaagaacttgtgaagcaaatgactatgcaa

SEQ ID NO: 123027 - DNA, 312 bp, Glycine max
ttagtgcaaacaacatctatgtttgtaacatagatgcccaaacagaatacaatatcatgaatacactcgacatatgaccatggtagccacgacataccagacaacccataagtgttcggaagaaataattatagatatcttagttgcaggattttccaaacaattaaaaggatggtggggtaattatctcactaatgaagaaaaatccaaatatacagcactgttaagacaaatctcaatggaaaagtcattacaaataacgataataaagagatccctgatgttgttaatacccttatttttacaatagcc

SEQ ID NO: 123028 - DNA, 104 bp, Glycine max
cgatgattgaccttcacgatatgcttgagcggatatccgactgagagggctaatggcctacagaatacttcccacaattgacggtaagatcaatcaagcgactc

SEQ ID NO: 123029 - DNA, 312 bp, Glycine max
tctacttatgtggcagggcgggtttccttcactttcttgtctccaacgcgagctttgaccactgcttttccttcccgcgatgcttctgttcatatccgcctgagtgggcttatagcctaaaccatacttcccacgatttcctttggcatttatcaggctagttatgccgccgttgtctttgcctaaacccatttcgggttcataaccgttccccaacataactcgggccatcattactgctgcatcggacaaacaagtcgtccctttatacttgtcgaagtccggcactttgaacttcgggggaataacaac

SEQ ID NO: 123030 - DNA, 335 bp, Glycine max
agagtgacactctacaatctcaagcttttagtttcaatgcattgtattttggcttatgtctaaaaatctaaattttggttttgaaagtggaaaggcatgaaaattaggacatgattgagagagtttttactagaatttggctgccccatgagggttactttgcatctaggtagcatggaaaatacctttcaatggtatgtatatatgtgtgtgaatataggtagcatggaaaacacctttcaatatatgttaatatatggcataaaatgccttgcaaagtgtgaatgagtagcaaaaatgccttttaacatgtgcgtatttgaggatgggtagca

SEQ ID NO: 123031 - DNA, 308 bp, Glycine max
tgaatacctgcttcttcccatgttgaacattttcttggatagcaaaagtggttagtagaggaaaacaatgtaagttaactgtgagtaacgtgattttagtgcatatatgatttacctaagcagttcacaataacatgcatcatgaagttttgaaatgaactataactagcacatagtaattcaaactgataggtttgacaaacattgatgcattacttattgatgcctcttgaaattgttacagctcgaaaacgagcaatgactaatctaatggcttactccatcttttatggttgttgttgttattc

SEQ ID NO: 123032 - DNA, 316 bp, Glycine max
tcatgatgaatcaagattgatttttagagttttgatgataacaaagatgatgacaaaaaacttaaaagtcaagaacacttcatgataacaaagatgatgatttcaagaatcaagaatcaagttccaagattcaagttccaagaatcaagatcaagattcaagactaaagattcaagaatcaagagaagactcaatcaagataagtattaaaaagttttttcaaaaactgagtagcacatgattttttctcaaaaaccttttttaccaacggatttttactctctgctaatcgattaccagattgttgtaatcgatt

SEQ ID NO: 123033 - DNA, 315 bp, Glycine max
tgtaggattatggggtacccattatttgtggtactaggtggcggttgggcgatggtgcacaacaagttttccacatccacaatgcgcgcataaacccaccatcccctgtagcccacctccaactgagctcacgtactcccacgtagcccatatcctcgtttctctgaacaccgggtccccatcaatcctcccaagcttccccaacatcaaagtaatacaacattcaaacagcacaaactatcacagccaagaaaacagagcaaaggcagaaaactctgccaaaacaccaaccaaaatcacagcttttctcactta

SEQ ID NO: 123034 - DNA, 306 bp, Glycine max
  unsure (1)..(306): unsure at all n locations
tctaaatatataggcatcgngtttttattttgatatgcaataagtttagttgattttttttatatttgcccattagctaattaccatgttagttagatctataaattgtaggggttggacattttaattcctttttgttataatatatatgcagtgttccaatgtaaatggcctagttttctctgtaaatataaatagtagtaagtcaaatatgctataccccttaacctcttttgggccctggatagtcaaatatagtaatgttgacctgatggaagccaaaaaaattcaaatgttttaccttta

SEQ ID NO: 123035 - DNA, 311 bp, Glycine max
  unsure (1)..(311): unsure at all n locations
nggtgtgagaaagcatggaatatttttttttcctactatatttgatgaccacagagtggtacctgcatatatgtcgcgggggtcaagaaaccttggtgacgtcacgtggggtgctattgcccaaaaccaagcttggccaatcctgacccaacccgggcataatcagacatgtgagcctgtgatgtacctaaccaagcgagctcctggcgatcgacctatttattaacaaacaccactaagcaatgtggcttgtgtggcggctgaccagctatctatcttgggcgttatttgaaaaataccctctggtaatc

SEQ ID NO: 123036 - DNA, 315 bp, Glycine max
tgctagtaaactatcaattgtataatgtattttgataactatatatcaataaagaatttattaataaccatgaataaagaatattcaattaatgttaaaaggttacatcaattgtaaaaaatgtaaagcacggtagtaaactaattaattaaactaaaactacaaagttgcctaacatcctaactaaaattacaagctagtaaactaagtttcatttctaactttgagataatagtttgcccactggatgcgaagcgccttcaatgtgtctaattccactggtctaacatcattaaaatactgcatgataaaata

SEQ ID NO: 123037 - DNA, 291 bp, Glycine max
ggctacacgtacatttttctcgttaaatatccattccttgttggccccctcttttgtccaacatttttgagaagcgtaggcaaggtccggcaggaatttcaagatttaaagatagaacctatggagcttgaacatgcctgtgccgaccaaagggcaacactctccagcatgtacggtgagcttggggggctttataagagggctacaaacttaatgcgatttcaatcatgaggagagaaatggttacactattattagctgtctacaagttgaaagaagtcttgaactttg

SEQ ID NO: 123038 - DNA, 314 bp, Glycine max
tcttgcgtagccgctgttggtgcttagaaaatcccaaaaacaaatgcctcttattactagctattttgaattctttagttgctgaatgtacaaccttcaaatttttgctcgttcccctctttcttttctgcaaaaaagaaaatcaatatcaaagaaaacatggatgaagtcctaaggatgccatgtacatgtgtatttctgaagatatagtatttatatttcatcaaacatacattgattgttgattacatgtaatagactttttataacatggttgccccaaatcacaattaaaaagcacaactaccaatctt

SEQ ID NO: 123039 - DNA, 314 bp, Glycine max
tggcaagatcctccttggtggtgatgtgacgtgcaccgcacacactcacgagctcctcacgtgcccgtatctgccactgcggatgcatcgcgagcaggatcgtggtccacgttagcaaattcgaagtggtgtgtttgcctgcgaagaaaaaggttttgcactcttccactatgtcatccaccgttacgttcacattggaggtggtgttgttgttgttgttggaagcccaaatcatgagccccagcaaatccgttggcctttttgtttcttctttcccacacgcattctcttttcttcgtcgttcgatgatcttc

SEQ ID NO: 123040 - DNA, 93 bp, Glycine max
  unsure (1)..(93): unsure at all n locations
ctatcctgagcgagcganctcagtaccttctcttgtccaccaccggataagtatgtcctgcatgctactactgtacgtacactcgctgatggt

SEQ ID NO: 123041 - DNA, 310 bp, Glycine max
tgagtctgctccccatttatttttcacctgtgaaaaaattcaacctctgtggtgggaattcctatcctgggtgaaggaacacagaaccatccattgtagaccaatggataattttgtccaacatgctcctactgtaggaacacaggctgttggtagaagatggaaaatctggtggctggcagccacaaactcaatctggaaagtcaggaatgatataatttttcaaaatcaatcctttgatatctctaaattggtagacaccactcttttccttatgtggacctggctaaaggggtgggaaaaggacttc

SEQ ID NO: 123042 - DNA, 200 bp, Glycine max
gggctgcagcgtgaacaccttgaagaggtgctgaggaagtagatcgtatatgtttcgaagaagtctatacttgtgtgatcgacagtctctttttggaccagaatacatgctgagctaccaattgagttatacaatctcattgaacatgagcatcatcttgtagactataatatgatctgtctgcaatggagtcacatgct

SEQ ID NO: 123043 - DNA, 309 bp, Glycine max
tggtgtgttttttgtgatccattttgttgaaattgttgaggaagttggactatttgttttgttaaggcctctatttgttgagtcaagagtttattttgagccagaattacattctgagtatccaattccattatacattttcttttaacaggagccttatcatggtgactctaataatcattggctgcaatggagtcaatgattacaatttcttcctcagggctcttagacatcatagtacctctaattgaggcattaagagtcatttttgtttggggtctcaaccactgtaaaagatatgtagttgtg

SEQ ID NO: 123044 - DNA, 313 bp, Glycine max
tgttgaaattgccatgtttggtttatttaaacatacccattctgttttagggtttttgtgattatgtttgtgatgtttatatgctgaaattgcttatggaaaactgttagagatgaatggtagttaacctagggttggaaagtgagaatgtggtgttatgagtggaaaaatagtgaatttatgagggctggaaggccaaatctggaattggtagtatttagaggttagagtgagttaatcttagcttgaaatgccatttaggacttgtcgcaacctacccttcggcgggagggcgacgcgtgactcgcgggat

SEQ ID NO: 123045 - DNA, 313 bp, Glycine max
tgcccatggccagcttagcgtgttctatcaccttgagatgctgaggtttgtgcgcttagtgcaggctaacctcacttagtgagaaatggagatgcgctcaacgagtggattgtttcttgaaaatgttttaaagttatttttagtccactttctcaaaacatgtagaacaaccccccaatatctatgactcattataagctgatatcccccctttttaatgataaaaaagcaaattacaacttatgcaatgcatgaaaaacaaaatgaaaggagtcagaactgggttgcctcccaagaagtgcttttttaacgt

SEQ ID NO: 123046 - DNA, 309 bp, Glycine max
taactgtcactcttagcacttttcgacttagcctctttttaacctgaaattgcacagatttcatcattaaatccaatggaaatattctacagacagctttaacaataaaacaatatttatttacaaaattactacaaaataaccataaattggcggaactataaaagttttggaaaaaaaattctatacaaaagttagtcgtataagacgactaccaaactcccccaaatttatagttttgcttgtcctcaagcaaagaaagaacagttcacttgtcctcaagtgacaaactatagtggtcactccaaa

SEQ ID NO: 123047 - DNA, 338 bp, Glycine max
  unsure (1)..(338): unsure at all n locations
gacactatanaatacctcagcttatctcctattatccttctgacttttctttatatatactggttgcagtgattcctgcccaattgaacacaatccagtcatgcttttcagttgctcctgaatcattgtttgctttttagataatgctgtcctatccctgtagtgaaggtcacatcgggagagactttggtctaaagcattgagctcattcactagctcttgtatacgttgtgtttgctgcatatcaatcttcatggcagcatccagattgtctacatggggtgcagcattcttgtaatcacatagccgcagtcgatagaatatgtgcagtaattcat

SEQ ID NO: 123048 - DNA, 314 bp, Glycine max
tattccaaatgaaggaattacatattatgtgttagttcacacataatctaactaaatatttatatgttgagtgattgcaatttttaatactacaatatttttttcgaaggtaaaatatatttttcatttttctaaaatttttgaaagataaaaatataagtaatttactatatttattttttattgacttaaaattgtaaaataattattgatgtcttaataaaaaaataattaatacaaaagataatttaaaataaatttttattaaaaagaacaaataaattctgaaaaagtttcaatataaaaagacggaa

SEQ ID NO: 123049 - DNA, 313 bp, Glycine max
tctagattagtgtaccagacgatttgtttgtcccagccaagctatcttggaagaagtgcatcaacaacttttcatccctagaatgcgcccccatcttgcaacaatacattttgagatggttcttaggacaagtcgttcctttgtacctatcgaaatcaggtaccttgaatttcggggggatgacgacgtctggtacttagcaaagatcagccatgtccgtgaacggatagtcaccaaagccttcaacagctctcaatctctcttcgatgagatcgagtttccttttttcttccgctgctgggggtggcccttc

SEQ ID NO: 123050 - DNA, 312 bp, Glycine max
tcttatccaaggctcatcttggtggtgaagctctttttttccatggcttattccttaatggatggcgcctcctctcacctcttctcctttgtcttccgctgcatctccatggtgaaaaatcaccattgaaggacctcattgaagctcaaagatccagcctccatagaagctccacaagcaagcttccatcaagaagaaattcaagaggatgttcaaagagattcaaaggatgtaaaagattgtaattaatgtcttttaaatgcaagttatggtcttgcttttatagactcttcatgtctggtcaagaaaatc

SEQ ID NO: 123051 - DNA, 316 bp, Glycine max
tgtcaaaacccaaggcaaacatgttcccggtccaaggctcattaaacccaacattcacccttggtgagcccttcttttgctaagttccatctctacaggaactcaaggtacgcaaggtctacccttgacaatcttttttattcttaacttttatcagtgtaggaatacaagaacaacaaaaacccaaggtccacccttgctacacactcttacaaaacccaaggcacccccttggttcgctcacttgcagcaactacgacgactatagtctaaggtccaggcttcacaagtcaagatgacctacccccagactagt

SEQ ID NO: 123052 - DNA, 60 bp, Glycine max
ccttattaacttctccctcttgcattatccttccacagagtcgtcactctccataacagg

SEQ ID NO: 123053 - DNA, 314 bp, Glycine max
ttcataggtgaaatcaggtgcttccatttcccttagagtcctctcacggggtggaggttgtgccatgttctcagaatgttcaaaactataatgctcaaaatcaccaataacagaatgctcaggatgctcaaaaggtactaaatgatgtctaactaatctatgaaatgtcctatctatctcaggatcaaagggttgtaagtcagatggattgtctctagtcatacactatattcaacatgcacaactagttgccttcttatgcaagtaaaagtgtaggtttgaactacaactaccattaaatgatatccaaatga

SEQ ID NO: 123054 - DNA, 334 bp, Glycine max
tgacaatatacacactcaagcttttaggtatctaaaaatcttagttggtttcttgtaaaaatcttagatgtgaacttacaagatcattgtaaaaaaaaacatttacaatactttttgttttcacatttcattgaaacagatccacaaccaatagatgttatgtgtggagaaagagtatttgaatatgatgcagatcactggatcgattcaaacacacttaagggatcatgatgtgcaacaaggtgagatcactttccaaattaaggtgtattccttttctttggcgtttgcagtgtgcaacgcttttccttgtgtgagcaatggcattgcaatt

SEQ ID NO: 123055 - DNA, 307 bp, Glycine max
ttggatctcaatagttgctttttgtctggtgttgtttaaaggaggtgaatgaacaaggacatgattgtttgatgacaaaaattgacaaaaatgcatgttgtaaacatgctttttctcattatcctaaatgtgatttgttgttgaataatttgagtgacgatttcaataacactattttagaggcaagggagaaaccaataataatattgtttgagtggattaagtcatatttaatggctaggtttgttacatagcaacaaaagctagcaaaatattatggttaaattatgcctaaacctatgaagag

SEQ ID NO: 123056 - DNA, 309 bp, Glycine max
ttgatgcactcaccagacctgttctttagagatgtgacataagaatctcaacatctgagagaacagaaaaagattggcatcagtgtggctgatatcaaccattggccaacctcatatctggctttatctagtagcattcgtaattctctattattttgccatataaaacctttgtctttgcctcttgttaaagccaaccccactccaaaacactttcatttttgtccaaaaccaaggtttaccacttaaaaaatacaaataataaacaacaaaatgatacattaataagggaaatgtctcaaatccaaa

SEQ ID NO: 123057 - DNA, 309 bp, Glycine max
tgtaagtattcgagactcatgatattcatggaaagtaagcatttgttcatttaaattgggaacttataagtttcattagtaatttgtttggagtgattttggcatgtaatcaatgttgaataagttacccctactccgtagtctagatgacagagggccctcaggaattatagatgtcaggattgttatattctactgccagttacccttgaatatgaaagattaacatggtttacatattgtcttgatcttctctatgttgttttctttcccttaccttaagtgaaatacttgtaaagatgaggggtt

SEQ ID NO: 123058 - DNA, 311 bp, Glycine max
  unsure (1)..(311): unsure at all n locations
tctcaaggaagttttcttatnttagcttctcaaggaagctacctagtctataaatagaagcatgtgtaacacttgttgtaactttgatgaatgagagtcttgtgagacacaactcaaagttcaacttctctccctttttcttccttcaatttcgtgctccccctccctctttctctccctctttcttttcctccattgaagcatcctctccaagcttcttatccaaggctcatcttggtggtgaagctccttcttccatggcttattccttaatggatggcgcctcctctcacctcctttcctttgtcttc

SEQ ID NO: 123059 - DNA, 308 bp, Glycine max
ttggtcatatcttgtaggatctatgatcattgtgcacaccaagcattcagctataaaatatctactcgccaaagtggattccaagccaagattagttagatgggtccttctactacaagtgttcgatcaagagatctgagacataaaggggtgtgacaaccttgtagctgatcatctatcgagaccggtcaatgaagaagttaccaagaaagaaaagaagatcgaaaaagaattcccagatgagacactcatggcagtaagcttcaaggacgaggactacccaaggttccttgacatggaaaaattta

SEQ ID NO: 123060 - DNA, 316 bp, Glycine max
tgtaggattatggggtacccatttttgtggtactaggtggcggtcgggcgatggtgcacaacaagttttccacatccacaatgcgcgcataaacccaccatcccctgttgcccacctccaactgagctcacgtactcccacgtagcccatatcctcgtttctctcaacaccgggtccccatcaatcctcccaagcttccacaacatccaagcaaaacaacattcacacagcacaagctatcacagccaagcaaaacaaagcaaaggcagaaaactctgccaaaacaccaaccaaaaatcacagcttttcccactca

SEQ ID NO: 123061 - DNA, 315 bp, Glycine max
  unsure (1)..(315): unsure at all n locations
ngaaggagcttgactgaccatttttaccccaagcaagggacttttttttacttatgaatgttataatatactcatcaaggcctttcttcaacttgaaaaatttgatggaaatttggctctgtttctaaataatcaattaattgagccacattgattgaaacaaagatttccttgtgaaactcttgggctgcaagtaaaactgatcaaaatttggagtgcttttctcacttgggacataatttttgctggaatcacctcaaaagacattgggttctatccctattagcctcaaatatttgcaagacaattaggact

SEQ ID NO: 123062 - DNA, 312 bp, Glycine max
tatcctcatgcgctaagccactgttttttcgcttagcgggttggtctcgctaagcgcatggttcaggcttaacaagacaaaactttttgaaccttcatagttttctcctttttacctgaaattgaagtgaaatttacattaaattcaataggaaggcttctactgagcataaatgaaaactaaactagaaatatttacaatcctacaaaaaataaccataaattgggagatttatttaaattttggaaacttttctatataaaaattagtcgtaaaagacgactaacaccgggcaccagagagaaccaagga

SEQ ID NO: 123063 - DNA, 312 bp, Glycine max
tgatgaaatctaatcattattttattgttttttatgaatctaaaattaattcaatgtctttgacatgatccaagaccaaaaaatatagcatctaatgatattataattaatttgtcaaatatatgaatacttttattttggtggtcaggataagaatatatagcataggatagaaatacgatgtactaataagaatgaatatttggtatgcaccatataacaaattaaatcaagagagagagaaaaagttatacattatgaatgtataaaattttagacctttatccgatcacaactcatcatatatgataa

SEQ ID NO: 123064 - DNA, 311 bp, Glycine max
tatggtaaaatctgggacttatccttggtagaagtctctacagaggccattgcctccctcgcccagtattatgatcatctgttgaggtgcttcacctttggggacttccagctatcacccatggtggtagaattttaagagatcctaagatgccctctagtggggaggaaaccataccttttcacagggttctatccctcattagctagaatttccaagatagtccaaatctcggcgcaggaattagaccacaggaagcaagtcgaaaatggggtggtcggaataccgagaatatatttggaggtaaaagc

SEQ ID NO: 123065 - DNA, 311 bp, Glycine max
  unsure (1)..(311): unsure at all n locations
tcatgtagactctctcgcnttcnttcacaaaggggccaatgtccttgatgtacttatccatcttcatgggagagaaatacctccttaagagtgcacttgtgcattgattccatgtagtgatgccattctcatgtagtaagcacaaccattctcatgccttcttgttgagcgagaaagaaaatgcataaagtcagacatattcttccaatacacgattctacctcaccatgctggtcaacttgatgaacttcctcaggtgttgcatatgatctttatgggcatgaccactgaatgggttgttctccaacatc

SEQ ID NO: 123066 - DNA, 73 bp, Glycine max
gtgcgagaactgaatgggagaactgagataatatggagcctgactggacctgacacacatctataacatcaac

SEQ ID NO: 123067 - DNA, 313 bp, Glycine max
tcataccaaagcaattcaaattctttttatctaaaacccctcaatttaatggattttcaaggtttgagaagtgaaattgagaatggggtaaatttggagcaaactctcacctcacacacatctataacatcaatttaaacttgttcaaactgaatttacacctcaaattccaccgaaccaaaatttgactcctcaacacccaattttaccctagaaatggctctttgttcactttggtcatttgtttttctctctagcacagcccaaactttctcgtaagtcctaaatgacatttcaagctatgattaactca

SEQ ID NO: 123068 - DNA, 309 bp, Glycine max
taaagtatgcctgagtcattctttcctatgagatgttgttgaagtattggcgatcagaattgccattccttggattatagagttgaaccaagctcatgcttttacaaaaaggttcatcaagtcaagttgaaatatggaagtaaccgtcttgcaaaattggggcaaaagatgaatcgagtcacatcactgcttcgtctactgccaaacatatttaggattattgatgtccttgttacttccagtttcaccttgacaaagatgtcatggaccatgttgaaaatctaaattgattcaaccccatatcttgcg

SEQ ID NO: 123069 - DNA, 309 bp, Glycine max
tgatccaaggacagaacactattatttcttcaaccttcacatgttacctatgttggagtatgctacttcaaaatggtttgttctatgatgaaatgtttgggttgatgaagttgagctatctacaatgtcatatcatgttatattcatctaaaggaacctgcattagaataagttctttcccaacatcagagtataggtttgatataccttcagaaagctactcagaatttgatcatgaaaatgacaacatcagaatggactaataatatatgagctaacaattgtaaagttaaaagcaatctctacttc

SEQ ID NO: 123070 - DNA, 312 bp, Glycine max
tgcacaagatccatcaagactctttggccaacatcaacacgcaacaataccctttttactccacttcaagcatgcatacattacttctgtcacaaaagaatttaattataaagcgttgttcctctctttgtcttctaaagtactacttagatatattcatgttcaaatgatgttaatgatgtattacttcaatcagatctattatatgctaaacataagttaaagcacgcattacaaaattttcaccgaaattacaaaattttggtgtgtgtgtatatataatcaaattaattcataacttaaataaggact

SEQ ID NO: 123071 - DNA, 311 bp, Glycine max
tgcatttggaattgcgaaagcttcactccatcattaggattagtacctgacatctcaaacaaacaaatcaaacgtaacaagacaattatagttgctgtttgaatacctcacccactcaagtgtatcacacaattatggcttttctctaatgaaacactcttgccttttaccactctaattccccttgagttcttaggcaattcaagagattatggccacaacaaagaacaattcaccaatatgtgtaaggtaaggctagacaaggaaaaggttaaccaagaaaaaggctaacaatgtttttaggcacaaat

SEQ ID NO: 123072 - DNA, 308 bp, Glycine max
tctataatgtctcatttttcatttagatgacaggtatcataattccccatcaaagcactcacaagtgcacgtatagattgggatttatactagccattgcagttgttatcatcacctcacccccacataatcaatttacccctcatcatgctttcaaacagaacaagaattcaacacaaacgaaagtaacaactcattttctactttgcaaaccgtaataggaaactgaaatattggatcaagcatgctgcatgtccattattagtctcatgtggggtgcctttggctttgagtgtgagatgatgaaa

SEQ ID NO: 123073 - DNA, 386 bp, Glycine max
  unsure (1)..(386): unsure at all n locations
ccttcttgtctccaacgcgaactntgaccattggtcttccttcccgcaatgcttcttttcatgtctgcctgagtgggcttatagcctaaaccatacttcccacgatttccttgagtatttatcaggctagttatgccgccgttgttnttcctaaacccatcccgggttcaaaaccgttccccaacataactcgggccatcattaccgctgcatcggacagacaaggttgcccaaagagggagtccacggaggatatgctgaccacctcanaagaatggaaaacagtttctaacgattcttctgcggcttccacataaggcatcgaggatgggcagcntaccaagatatcttcctcgcctgacacgatgaccaagtgcccctcacta

SEQ ID NO: 123074 - DNA, 297 bp, Glycine max
tgccacccagctcgcccaggcgagtttgtgtgcttcctccaaaagcaaaagccttttggaggaatcttctggagggcctgtcataccctaatttcgtccggggacctttgcttgatgacatgcgacctttctttggaccttgtgaggtgcttggcatccattattaggcaatttgtgaaatggcacgacatgcctaaaaacctaaaaaaatattgatgcacaatccgtaagttttcgtgacacaccggaaatccaatggaagcatcgtggtataactaattgaggttctgtaacatt

SEQ ID NO: 123075 - DNA, 319 bp, Glycine max
aagcttagctgaattcaaatcgaattgaatttggcttagctcatccttggccagcttaacggactaaatcagcctcagatgcaagggttgggagctaagcacttgagactcgcggcttagcgcatgaacaaatatgagcttaacgcgaggcttgcacttagcgaaaggactgatttttcagaaaatattttctaagttatttttcagtcccttcctcaacaaattgaaacccttatagctaacattcaaagataggctgatatactcctatgtatatattatgcagcaagttcccaatgatctaatgcatgaaaacaaa

SEQ ID NO: 123076 - DNA, 311 bp, Glycine max
  unsure (1)..(311): unsure at all n locations
tttgagtgtcatagcacaaaccatancttaatacatagataccattggaatcgtctcccatgttgtccgccatgggagtcttgtgtgattataaatatatggccaagaagcccaacattcatcaaccaacaatactaattacttgtgttgggtgttattatccatgattaaatccattctaaaattggaatcttattgtaaacacataattcattatttgttattgatttgatattttcttttggttggggtacatgcataggtcattttgaattgtcatgggtgagcaatggtgtgtgtgtgtgtttgtt

SEQ ID NO: 123077 - DNA, 310 bp, Glycine max
tctatataagctgaaccattttttttataaacacaagttgagttttattcagaaaattagagtttatctcttttatcttagtgagagtgattctcctaaattcttgagtgattcaagaacaccctggctgtatcaaaggactttcacaacctttgtgtgttgccctcgctggaaagagtgattctttccttcctatcatctccacccttgttctttcaaaccacaattccagaaaatccacctctgcccaaaattatctcgtgaccataactcccatttcacacactcaaattaagtgattcttgagcct

SEQ ID NO: 123078 - DNA, 338 bp, Glycine max
cgagacgatatacaacactcatgcttgtcactgttgaagacatagtttgtttcattgggctacttatgggcgccattattatactcgatatgactatgaagtatgatacaatcacattttctcctactttgttataatctgttttgagaatcacttagtgacctcaattttttttccttaaagaacgtggatgcaggtgcagcaaaggaactgatggcatatttggtcaagctgcagtcctcactttcagaagtcaatcagtaagttaattttagtacactaacattattttaattcttggttataaagatatgcatccggtgagagttgtcctatac

SEQ ID NO: 123079 - DNA, 181 bp, Glycine max
  unsure (1)..(181): unsure at all n locations
ctcgttgcctctagctgtaacgacgcctgggagatccagattanaacctatggtgatgcctatcagagctagagagtgagcctacagactctatgagggccttatgaactgctattccttaattagaggcgatcgagtcgcccttactgtgatacgattcgagatctggtctatgccttga

SEQ ID NO: 123080 - DNA, 314 bp, Glycine max
tgatttctcatctaccaatgtgtgaactccaagattttcaacaagatctcgaaggcctctacctctaaggaagcatgggagattttgattaaaacatatggtgatggagaaaagaacaagaaagtgaaactacaaactctaagaaggcaatatgaactgctttgcataaaagagaaagaatcgattgcagattactttgataggattagagaactggtcaatgccatgaggtcatgtaaagacaagatctttgatgaacaagtggtagacaagatcttgaggaatttgccaccacgatttgatcatgtggctat

SEQ ID NO: 123081 - DNA, 312 bp, Glycine max
ttgcagtgcagcttatcaatctttatgtgataagctggccttggattaaggatccttaaggcctatgctaatccttttctagaagtctccagccagctcataccagatgattgaccatgctaaattatttaacacaacaatcctgttttcattgtatttttgtagttttaagtaattttattagatgatcatggaaatattatgtatgctattttacaattacaattgcatttgtaccatttattatctcagctgattcatttcagaatctcgtattggtgttcaaataataaattgtaagagttgcctttt

SEQ ID NO: 123082 - DNA, 310 bp, Glycine max
ttgatgaaagtaaaattgattttatttaatctcatgcttttatcaccatgacaatcccacactactacttttatcacttaaaaaaaatccgccattgtggcattatcaagattacctatctccttgaacattaccccatctagcctcatcctcatttggctttttctcttcaaacttgtgactaaataacttttttactccctttttaactagatgaaagtaaaattgaattcatctaatctcatgcttttatcaccatgacaatcccacactactacttttatcacttaaaaaaaacatccgccattgt

SEQ ID NO: 123083 - DNA, 314 bp, Glycine max
ttaaggaccttagtcaagttttttatatttctcacccaagacttcataggttgccaagctaaagagacctgggtattgaaatcagggtggctaagctaaggacccaggaatttaaaatagttgtgatgacttctataaaccccatcattgatgtgcaaccaaagccaacaatggtcaaaagaggggacactaaataaaccactttggaattgaggaatttctactgtcacaacattagccacaatcctatccaaacgcttatagagggtgccaacaatggtcataagaggggacagtaaataaaccactttgga

SEQ ID NO: 123084 - DNA, 312 bp, Glycine max
tggagaggatgcttcaatggagtgttaagaaagagggagagaaagaaagaggggggcgcacgaaattgaaggaataaaagagggagagaagtggaactttgaagtatgtctcacaagactctcattcatcaaagttacaactagtgttacacatgcttctatttatagactaggtagcttccttgagaagctttcttgagaaaacttccttgagaagctttcttgagaaaacttccttgagaagcttctttgagaaaacttccttgagaagctagagcttagctacactcacccctctcataactaagctca

SEQ ID NO: 123085 - DNA, 294 bp, Glycine max
ttagaagcgcgggcctgggtttttactgatgaggggtcgccacctgtggagatgatgggcccaaaactatgcattcgcgccgacgatgacctactgatggccaaccgggacaccggcagctggaggcacacgtcctcctttactccacatgcatcatgtgaacatctacggatttagtagcgctataactgggcctccgctacaaagtagcgactacgtgaacgctacgggacatgtgacagtgaacatactggacgaggatgattctctatctgtagccgtggcctacccatg

SEQ ID NO: 123086 - DNA, 308 bp, Glycine max
ttgcaagttgatgagcatcgatttgactatgtctctcactgatctaacatttgtggaaagtgatgtctacttcgacgtacacgcaacatattatggtggtgtggcgtctttcttagttacaattatgaacatttcgactgcgcattaattcaaataacgtatcagtgcagtctcttctgcttcacactattattgtcttaccagcctgtagcctgccttggtcacgcttattgaattctcgatgatggcctgtgctctagaagttctgaccgatcatggcttttttatccccaacaatactgtgcgtg

SEQ ID NO: 123087 - DNA, 313 bp, Glycine max
ttttttaatcttctgtaagggtgattatcttttagaaaacggtgatgtctagtttacactgtttttctaccatgtttcagttgtatgtagcttgtatcttcttcacagatggggcatgcaagatgacccttaacactgtaaccgctgagattcccatatgctggaaagtcattaatggtacaaaatatcattgcacgcatttgaaaagtctccttgcgaaacccatcaaacactaaaaccccctcatcccacaactttctcaggtcttcaatcaacggacttagataaacatcaatgtcatttcctggttgtc

SEQ ID NO: 123088 - DNA, 312 bp, Glycine max
tccgttcccgagagcatctcttattttttcatttcagcctttgctttcttgtagcttaggaaaaatgccatttcttcttctttctttcttccaaatccatttctaaagttccaagtactttctccatcacccacatccaccattagccaccacaaaccatcattgttctccattgaaaacccacaccgagaggaacccttcaaccgaagcagaatttccaacttggcttgcggtttctgtagagaacgaaaaccctaatctgatctttcattttctttcgaggtaactatggttctatgcttgtttcttgtg

SEQ ID NO: 123089 - DNA, 312 bp, Glycine max
tgtgctattgattctttatcatcttttctccctttgccaaaaagaattcgccaaggactaaccgcctgaattctttttgtgtctctcttctcccttttccaaaagaacaaaggactaaccgcctgaattcttttgtgtctcccttctcccttgtcaaagaattcaaaacggcatagtctgagaattcttttgattctttcctttcccatatacaaaagatttcaagggactaaccgcctgagaattcttttgtatcctcattcacaaagtttcaaaggtttaaccgcctgagaactctgtcttaacacattg

SEQ ID NO: 123090 - DNA, 336 bp, Glycine max
  unsure (1)..(336): unsure at all n locations
aggngacacnatacactcctgcttctgagtgttatagcccagaccgtatgtgttacacaaccaccactggaatcgggtcccatgtagtcagacatgggagtcgagatcaaggaggctaagatggcgacccagcactttaaaaatcaaccgacgatactaattactcgtgagaggggggagtatccatgggaaaaatcgtgaatttatgagggccgtaatgccaacacatggatcattattagttatagatttgatatattcttttggtatggggtacatgcacttatcaatggtgccaacaatggtcataagagggggcgtgtgattgaccacttt

SEQ ID NO: 123091 - DNA, 313 bp, Glycine max
tagaagtacttgatcctttagtttcatcaagacatcaaaacatcttgcttaaatccatcagctgaaaaatccttcaactatttctcgtccttggaaaattctttttgcaagaatcaactgcttctttcattcttcctcactacgaggtcgtgaaaacaagacaacacttggtacctctaagccgtacactggggcgatgaggggcaccgtgcatgagcctcaagtgaacctaggggcagattagaagttctcacccaataggttccctcctacaaggtcatgccgaaagacaacgattggtacctcaaagcct

SEQ ID NO: 123092 - DNA, 309 bp, Glycine max
tcgcgtgggacgttcaacaccgttttatatgaacataactatgggaacacatgtcatacgtacccgaactaaggatggtctaatctaccatgccaaaatatatctatgtacatttactagtatgttggataatgcatgtgatgcgctcgggctacactgaaatcatacatatagtaaaaggaccgctctattagtaccactcacaacgatctccgtcttgagaatatcctgaagatatctgatggatggataaatgaccacatcacagttaaagatctgtgtgactcgactcacaaaccacaacttatg

SEQ ID NO: 123093 - DNA, 308 bp, Glycine max
ttataagcacgggtctgggatattaaggtcaagtggtcgcgatatacgaagatgatgttccgagtacattggatttggtacgaccatgccctcctgatttccggctgggaaattggcgagtggaggaacgccccgacatttacacagctagcttaatgtaaacctttatggttttaaaagctctatacttgggcctaagctttagagtttttcttttggttaaggctttgtgtattttgttttttaaatttataatacaaggatctttcttcatctgttcctacgcctctacccattctcatccattt

SEQ ID NO: 123094 - DNA, 309 bp, Glycine max
tcttcttcttctgcgtcttctttgttaacagccttcgaggttagtctccctaactctccattgcttttactatccagtattgattcagcagtgtaaccttaggatagtaaccttagggtagtaaccttagggtagaagacgagaggggagaagattaaagtacgccggaaaaaatggtgaaaaaggatgacagcggtgtcttccagaagacccgttaggggttcttccggaagttctggaagaacattttccggaaagtttccggaagaagtgttcttctggaagtaaccaaacgtcttccggaagact

SEQ ID NO: 123095 - DNA, 310 bp, Glycine max
tccatcaagaaataggagaaaataatggcacatcacacgctgaatgaattaattcaaaaagaagaaacatatagtaagattaatgtacttgttgcgataaagacttgaccagatgtgtcggccaagcaaggaaggtctaaattgcctaccccacttaggaaacctcatgagtgggtacaggaactgaagcatctgcatctataacctcctccacacttacctttacttggccaggcaacaaaggagtgttatgaacaatagtggatccctcataaactctccccagggcaaccaggcgggcaggatctac

SEQ ID NO: 123096 - DNA, 311 bp, Glycine max
tcaaaggagggagagaatgagttagagagaggggggtggaaattgaaggagaatagggagagaagttgaactttgaagtgtatctcacaagtttcttattcatcaaagttacaacaagtgttacacatgcttctatttatagcttaggtagcttccttgagaagcttccttgggaagcaagtgttacacccctccaatagttgagctcacccccatgggaacacacacccctccaatagctaagctcacccccaaaatacatgaaaatataagaaagttcctactacaaagactactcaaaatgtcctaaa

SEQ ID NO: 123097 - DNA, 307 bp, Glycine max
tccatcaaagtgtatgaattttttaatccaatcctacagtttcttgaattaattaaattcgttattattgtttctgtaattttatgtatttttgacacactaaattcgattatatttgttatttcattcctttagttattttcgtcaattaaacaaacccatgatatttcgattaaacttgtacttaactaggggttggaataggccaggccaggccagactttgaaaggcctgagcctagcctatgatgaatctttgaggcctgagcctggcctatagcctatcaaaggattttattttggctcgg

SEQ ID NO: 123098 - DNA, 314 bp, Glycine max
tgtaggattatggagtacccatcacatgtggtactaggtggcggtcgggcgatggtgcaaaacaattctccacatccacaaatcacatataaacccaccatcccctgttgcccactttcaactgagctcacgtactcccacgtagcccttatcctcgtttctttcaacactgggtccccatcaatcctcccaagcttccacaacatccaagtaattccacatccaatcatcatgaactaacaaaaccaagcaaaataggcaaaggcagaaaactctgcccacaacacaaaccaatatcacagcttttcacatac

SEQ ID NO: 123099 - DNA, 127 bp, Glycine max
tacctctgagcgaatatgtggagtgtgtgctgagatagaacacctctgatgtgtggctgtggcagttcaacgatacgacactcgagatcatcgcactatgaatagtgtctggtgactgactcatgct

SEQ ID NO: 123100 - DNA, 314 bp, Glycine max
tctcctcctgaagcctagccaaacttgccacttgcaccaaagttagaggttgatgggcttggacctctcggcgtatctctggagtcaatcccgagataaaacaactcaagaggaatggcagaggtagttcgacaatacgattcgcaagatcttcgaactctgaaaggtgcgtggtgactgtggagtgctgtgtaagtttacaaagggcaccagtgggatcctcgtattgcgacgggcgaattgtgtctgcaacgcctggaggaaacctagctagcaggtgaactgagcattactggtcatccactgaaaccaag

SEQ ID NO: 123101 - DNA, 310 bp, Glycine max
tcttgaggaagctacatgagctgcctttgttaaaatgctgccaagcttttgttaaccgttggatcttctcgatatttgatctgcagcttcacaacacacttgtccatgatctgaccattgggatcttcaagaagatttctggagtgtgcgtgacatttccgtgtccgagaccatttctcacttgagcgttttcagcctttgctttcgtgtaccttaggaaaaaataccatttcttcttctttctttcttccaaaatcatttctaacgtcccaagcactttctccatcacccacagccaccattagccacc

SEQ ID NO: 123102 - DNA, 312 bp, Glycine max
tccatcatttctccccaatggtctttctctaggatttaaaacacttacattttccgcaaaacatgaatcatcattttgagcaaattgattaaaatgagtctccaccctagatagatatcttgcacaaaatatcaagtattcatgagctaaatatctttctgcaatagatccttttggatgtgctcaattacgaacaaatatctttctccccaatggtctatgttggatttcccctgcagttactttttggtccaattttcctttatacaaatatgttcaagggaaatccgattcgccggaaagcacatcggg

SEQ ID NO: 123103 - DNA, 226 bp, Glycine max
ctataacttgggtgcttttctaaagatgcatcctttcatcacgaacgggagtcttgaactacactctttgttggaacgatcacattgagtcaaccagatccctttgtaacatgttgaaaacatggcactagctgaaaactgatctattgatatgtgttgactgaactgactaatctgtctaactgactgattgattgattgatacttcttgactgacgtctacttc

SEQ ID NO: 123104 - DNA, 309 bp, Glycine max
tccttgagaagcaggattgtatcttccttgggaagcaaggaagaaagcttccttgagaagctagagggggggaagtgcacttcttccttgggaaggaaggaagacatgttgtaagctccatttgagcttgaaggcctaggatcttcttcatcaatgaattcctttgcttcttggaagatgaatggcagcggaatggagaaggaagagagagaggagatgccacttcaaggagaagatgagtctagaagaagctcaccaccataggaggccatggataagagcttggaggaagaaggagatgaatgaagg

SEQ ID NO: 123105 - DNA, 311 bp, Glycine max
tatccaaatactgggattccagtgtaaagccttgtaaccattaaaggtgcgtgcttagtagaataggggtactcgggagggaaaccttgcaacgattcaaggtgtccttggtcgaataagggtactcgagagagaaaccttttagcgattcaaggtacacccttggacgaatatggatattcgggaggaaccttacaataattcaaggtgcatccttatccgaataagggtatttaggagggaaaccttgcaatgattcaagtagctccttagtcgaataggggtattcgggaaggaaaccttgcaatatt

SEQ ID NO: 123106 - DNA, 312 bp, Glycine max
tatcataatcgattgcactgttgttttttagacaatgattgatttattcatgagtctgtgttttaattgattaccatgtgatatattcgattacttctatttctataagtatttcagaagtgatcaagaacactttaatggactacattgaggatctaatcgattacattgtgcttgagaggtttccagtttttgggatgaacactttaatcgattgataagataatataattaactacttcattgaaataatcgattacattgtatatttaatcgattataggcagttataattgttttctctataaatag

SEQ ID NO: 123107 - DNA, 310 bp, Glycine max
tcatacaattgatataaaacctatttcctagtgacacatgctatcatagcgtggtgtccccgtgtcctataacatgaggttgttcgtagacatgcccctattcatctgctcccccgaacacaccttcaaaagcatcacaggatccaaacacaacaacacacagggagtgagttatgacattcctagctaaaaaagaaacatgacgattaaatatacatattatatgaatgagacactactcgcataaacataactcacgtagtaacatcacgttgtcattcaaaatatactttcaatcatcaatcacaga

SEQ ID NO: 123108 - DNA, 312 bp, Glycine max
tcatgatgaatcaagattgatttatagagttttgatgataacaaagatgatgacaaaaagcttaaaagtcaagaacacttcatgataacaaagatgatgatctcaagaatcaaagaatgagttcaagattgaatcaagaacacttccaagttcaataggaaatttgatttcaagaatcaagaatcaagtttcaagattcaagttccaagaatcaagatcaagattcaagaatcaagtgaagactcaatcaagataagtattaaaaagttttttcaaaaactgagtagcacatgaatttttctcaaaaccttt

SEQ ID NO: 123109 - DNA, 311 bp, Glycine max
ttatagaatacacctatgttttgttgtgtgtggcttgatgtcggagataaagttcaagatttcgagtcactctagtaaaatctgaatcttactcactatgcaaaggttcaagttgtatgacacctttgtttatgcacaattttatgaaatcctcgaaaatattcttttcaaatttcaagtgggggattgttagaacaaaggagaatgtggatgaaagtttgaaaaaaaacgagaaaactgaaagacaaaaggcttcaagtcccacctcattcaggataaacactcgaatagtgtttcactccatatatata

SEQ ID NO: 123110 - DNA, 309 bp, Glycine max
tgcatgcattcgcatcttgtctttctgtgaatcggaggatgaataaagagtcattttgagtgatggtcaataccacaccatattgagacaagggtaagtgaaggtaatgcaggcgttttgtggtattgtttcaaattttttgcatgatgccacttcctttgttcaaagcttaggggcaggtacgagtaggtgctaggcccatgatcaatcaatcatcatccccgtccagctcaagacgttaaagaaacgctcctaggaggtagcctagtatctctaattttgttctttaaaatttttgctttatacttg

SEQ ID NO: 123111 - DNA, 306 bp, Glycine max
tgtttgactggcttgtagaacttgttaacaagtcacttgaagtgggtaaacaatatactgggaaatccataagtatcctagatatttatgggtttcagactttccaggtgtgcaatttgtattgatgtatttatttattcttcaaagaatgttgtatacgtactgatagtttcttgtatcacttttcagaaaaacagctttgaacagttttatataaattatgccaatgagaggattcaacaacattttaatcggcatctgtttaaacttgagcaggaggtcagtaactatgttatgtgttaatat

SEQ ID NO: 123112 - DNA, 299 bp, Glycine max
ggtattctcagtagtatgtgatcgactcccttgagctccatgtgaaccagagcttcactcatactcaacttagattcttccttcagagagctcccattctccagaaagacaccaaaaggcttctacactcgcagatagctataaaatgtgacaacactcataaaggtggtctacacgagtgactgtatacgcggtaatcttacacgcctaccattgtcttacatttgacacaacaatggcctttactccacaagacggcgctctagctaatttaagctatatactacacgggcacttca

SEQ ID NO: 123113 - DNA, 60 bp, Glycine max
  unsure (1)..(60): unsure at all n locations
tactctctagagtggagacccntctgtgcttggacacacgtgggctgagagacatctgtg

SEQ ID NO: 123114 - DNA, 292 bp, Glycine max
tctccccctatcatactcgggagcacactcccctctttctacaccttgcaatctaatcaagcctctcagacctaatgctaatcaactaacctgctctgatgcaatcagccaagagagacttctatttcaaatgccagctgcttgctgaattcctagtataacctggctcttaacttccagcttgatctttcaactgcgtgatgtatcctcctgaagttaccatcagttgtcttgtctctactgaagaaacattttggtggtgttatgagtaaccttgcttctagactgctca

SEQ ID NO: 123115 - DNA, 83 bp, Glycine max
tgccgtcgaaagtctatgaaactgccaagactgagtgttgtgtatctcaaggggactccatgtggaagtcgaccattactgta

SEQ ID NO: 123116 - DNA, 229 bp, Glycine max
ctgtagtatcaacaacctgctcttatgtatccaaattgttccgccactaatggcattccattccgaaagtagaggactttccaagccttgtgcgtgttctacgataaatccatgacagcacaacactctaccaaatcgcttgttgccttatatatgcctataactgatgtgctcactcataccttaaaaatgctgtctaatgcaaaactctattcctttttccctctgt

SEQ ID NO: 123117 - DNA, 302 bp, Glycine max
ggactaacaccgaggcagcatgactttcggactgggcagctataatgaagccaagcgcaatcagtacaaaaactgctctccgatgaaaactcgatacggattaatagctactgggatacgcaaatgtactcacagctctagggtaacatcatgaccactagcagctctctcaggactaaagaattgaacactaccccactacgtgctcactctaatgggagctcactcgtaaaatactttattagaggagacagaactcattcggttatgcaacaagagtttggaggagcacccttagaatc

SEQ ID NO: 123118 - DNA, 248 bp, Glycine max
  unsure (1)..(248): unsure at all n locations
tagtgatggccttgtgtactagtntctatgacagtgaacaaacactccaacaactcaggcacgcatactagcttctaaacctctatgacatgtgaaactctatccctattctccatatagagtttttcattctttgttatactgcattctgtatatgttacttatgctctagacagtgtagtcgggggctgttctttcttttgtatgtttaaatgcatgagcacttcacttagtaatttgccctcgag

SEQ ID NO: 123119 - DNA, 113 bp, Glycine max
atctctgtgagacaaccaacgatcaatcatatatactgcgcactacctggtgttaaggaaaattataaaccctccctatattgcaggtgctcatactcccacactattttttt

SEQ ID NO: 123120 - DNA, 357 bp, Glycine max
tacactgctttctgtaaaaccacccaatatctttagttcttgtgagcataatttgtaaactcacatttctttttgtctaattagccgcttattgcatgtccttaagtaataaaactctgtctggtactatactgcgtcagtttgtttgtgtatactctaatgatgatttgctggtctcaacatgaataactggtggtctgattatcctctttgcatggcatacattgtacatcattcattataggtacacatatagaagtggtgatgtgattttttaaacgtgaggattgcgcttgtctcacaacatgggcctttttcaatgtaaattagagaggtttttcggtgcttttatttcgc

SEQ ID NO: 123121 - DNA, 177 bp, Glycine max
ctgcgtacttcgaaaaaaatgattatttattgtaagaaccaggggaaaatggttgaattattgtgattacggccttactagcggggcgggatcaaaaactccacgggaggaatttttggataaaacagtctaaaaacaaatgatgaacgtctatattttgcaaacgaaatatttttg

SEQ ID NO: 123122 - DNA, 169 bp, Glycine max
ctctactatcagaaaaactctcttatcataaaaataatactacgtaaaaaattttcagttttttttaactcttcagtaagatttgggaccgttttaaaaatatacttttattctctaacatactctgcttcgattttacctgtaaatttataattaacggtcttctttc

SEQ ID NO: 123123 - DNA, 313 bp, Glycine max
  unsure (1)..(313): unsure at all n locations
ctctgttactcatacagatgataatgatactcttctgttaagtgtcagaacaacagacacctatcatacctagcattattgatcatgtctgatgatntcaatgtgatgaccttataatactgatatcaacatctatgaaaacatcaacatatatgttctttaatacactggtcctcaactgaaacatgatcactcttcaaacttactaatacaattgctttggaaaataaaaacttgaccacttatttaaactttgaaggctcaaaaatgtacaccttggaatgtgggtaacgtccttataggcttaatgttt

SEQ ID NO: 123124 - DNA, 280 bp, Glycine max
ctctcttattctataatctcacattttacattttactgctgttctgcaagtctactgtcaattgttgcggattgaaacaagggatttctccttcttcaaataagaccgcgatcttgttctcccttgcaataagaacgtgatcttactcttctacaaatcagcacctgatttgtcctcaataggcacccaatgtgtcctgaccctggcagagctctgtgtctacaagctctggcacagcgccctgtgcaaaagggactggctgtgagatcgtgaaaacggt

SEQ ID NO: 123125 - DNA, 308 bp, Glycine max
  unsure (1)..(308): unsure at all n locations
tcaattcacctgtaacaactatgaaatctcaaacatctgaaacccggtgtatcctatttacatccaccttatgtaccgccttgangtngcacaaatattctattactgcacttacccttagtgttcaaccctctgctcattcatcaaaaagcacactctgaaaaatttacagctcagaatagaacaggaataatctacactgctggactcttaagtagttacatatctttccagaccttatgcaatcaaccaacatgcaaagcactaaatagattggcttgtctttgaactaaaccactaagtctgat

SEQ ID NO: 123126 - DNA, 314 bp, Glycine max
ggtatgtatctctaaatttgcctaaaagtccaattaggtacgtaataatgttttgtcatgaagttactggcttaaactgtggaactatgatgcctaccatcattatatgtgtttagcaaagtgatactactacttaaggcattggagagacatgattcaaatgcacacagaaagtattatggcaccttgggattagctctacatagtgttgacaggggcctacacctgatagtgctgtcaatggaatgtcgcgaaccttgagtatgggggtatgaaataatatagtgctatatgtatcaagataaagtacacac

SEQ ID NO: 123127 - DNA, 209 bp, Glycine max
gtaaggcctctagaactgaagctaccaatacctgtaactgagtttatggaaaaagaaaaaaagggccaatagataagctatgattattttcaatttttcatcaaggtcctctttttactgctctaactctgaactctgactttgaatctgagaagttccccccttatacacttgagttaaatctaatactctcactttattatctctaa

SEQ ID NO: 123128 - DNA, 92 bp, Glycine max
aacactggcagtctcacaacgctacctaagtatcttgagcttgatctgtcttctgtgacaccagctacaaactgatccttctagactgactt

SEQ ID NO: 123129 - DNA, 143 bp, Glycine max
gattaatatgcctatataaaaaatgtagaaattggtctatattatatatagattttatttaatcatgaaatattattttacaatgtatagcggcacactttgtttacaaataattgagagttagaaagcaatctgagtttcct

SEQ ID NO: 123130 - DNA, 308 bp, Glycine max
  unsure (1)..(308): unsure at all n locations
tcaaatatgtgtggatgcaaactcagttcgtgggtgagactgaaacactctgcactttctataatcaaggcctatgacttctaagtctatctccttaaggatttactaaatatttagtacgtgatcatgtgaatcctctcgataagtaaccttatangaacctataaactagtggtaggggtgtctttggatgtcttaatcatagcctggggtcttgaaaactagatttgacatggaccctgtaaaatgcctttggaacactactagtgagtgtatcttgtgtgaatattgtacctccgtttttatat

SEQ ID NO: 123131 - DNA, 304 bp, Glycine max
aatcaaacttgagaacttgagaactaaataattgtcaatttattatccttgttttaaaaatatgatctattaaatataattagtgcttatagattatatttgtcaaaatactaaaaattactaatgggacttacaattcgaatacttttttttacctgtctctaataattgctattatatttagaagaaatattaaaataatatcttacttgaaaaaattttagtagaactgtcgctaatatcttaaaaatcaaacttttaaatacctattatgaaataacaaatacctgctgagcctcttgac

SEQ ID NO: 123132 - DNA, 359 bp, Glycine max
catgatattgagatctacatatgcattatctggttactgtacatctaactactataccgaacccctactgtcataactaactgtaactagctagctgaaacaaacacgtttctatcactcattcgctagtgcagcactcctgataacacatgcactcaaactgaaatacatattttttatgactcataatcataatcatgcccacctgtatctacttacacggacgagatatacttacagttatcaattgagcaaataaataggtgatatgagatttaagaaagtatacttctttaacttgcaaagaatgaagctatcatgttgctgtagcaaaacttactgtccatgtttaccaacga

SEQ ID NO: 123133 - DNA, 263 bp, Glycine max
  unsure (1)..(263): unsure at all n locations
ctagctgccactcgccacagctggtctcagatgcttgaactctgangcaatggtgggattgccttttaaacaccccgcttgtgctttctcgacaactcaaagacactgttctctagtatgactcgatacaactcttttggtcgatgcaatacgagccacctcttattgctgagatccgtggccagctcttactcgctgtcaatacaatgctacgatgtgcagcctcagtgcaacaggcgntcacatgaggcccgcaatatgat

SEQ ID NO: 123134 - DNA, 219 bp, Glycine max
tttcatttgctgctgcaatgcgctatgaaacttactgctgtgtgttctgcagcacttaccgtttcgggaaaccaaataacaagtactcggcaaatgtctgccaatatctgcacctcttaaaacaccattgcataatacatcattagaggaggtcttattcgatttaaatcagttcgtagtgaatcacatgtattgctctatacgtcatctctacactgt

SEQ ID NO: 123135 - DNA, 153 bp, Glycine max
cacattatcgtgtgacttctcaaatatagtcattgcacctctggtaaaatgctctatctaaaatattgcaacattaaataaataagcattagccacattataatctttaaaatgatataaatgatattttcagctacacactgaaaacatgat

SEQ ID NO: 123136 - DNA, 279 bp, Glycine max
aatatagtgtatccatctatgtaattgatcaaaaaaacaaaatactctaatattatctgctaagatctgccgaaatgtcttactaatcatcttgatttttttcaaatgtccaaatcctatctgttgaatcatctattgatatctcataactgtctctaaactgtgttatgatattattcttttatgaaactcgatatgtctcaaatgcacttttgtctattcttgtaattaaacaataggtcttttttattataaatacataaggtggtgagtaaattt

SEQ ID NO: 123137 - DNA, 80 bp, Glycine max
atgatgtgagcttgagcatcaacacatactttactcgtgcgatgatcctcttatcaacctcaatgatgtgacttgacatc

SEQ ID NO: 123138 - DNA, 64 bp, Glycine max
ttcattaaaccattcttctccgtagagaccgtaccaggctaggggtacaaaaatcctttaaaga

SEQ ID NO: 123139 - DNA, 310 bp, Glycine max
tactatctatgaagtctattatctagacaacgtgaagcaatggtgctctatctccttatcactccacagtgctctatcagaaaggttgtgactcacaccataatattcatgactgattggacactatatgagaaatccaaattcagaatcaagctcttaagctaaagatagtaaaatagaaaatccgaaaaaaaacttacaattcattttgaaagaactagcgcatgagtgccgatggattttctaccatactctatatacattgtacgacaagtagcgtgagttacaataatgtcatttgactaatgca

SEQ ID NO: 123140 - DNA, 319 bp, Glycine max
ctctttttgaggttatattactattgaatctgatcagtttcctcttcaccaatactctgtattgtgtataatccatcatgctagtgccgataaatgctctacgttaattacgttatgctcatgatcagtcattatgataatggagatgcgtgctatacatataatcctatgcaaattcctataattactatggtggatagggtgactgcacggtcatcttaacctggtaaactgctgtatagggacacatttatctattttataattctgtgtagacaaaaaaccccctcatctacgtttcaacgttactctgctccta

SEQ ID NO: 123141 - DNA, 348 bp, Glycine max
aaactccctacttgtcattctaaatgaaatgacaccatgaccctgatgtctcccattaaaatcaagaaaagaaaatataaggaagagagaaaaataaatctagaaaagaaaactacctttaacactccacttttaatatgtcacattaggaaggcactactattaggcaatagcatggttatctccaaagatttaaaaattgctctatactttatattaccataaaccctgccaaatttatcaacctgatccaactctaagattttataaacaatctaaatattatgcaaaatatacaaactaattattatacattatagtaaattacaatgatcaacatagaatctc

SEQ ID NO: 123142 - DNA, 237 bp, Glycine max
taactagcttaagtttgtttaactgaacaactggcatattttatttctctcttgcaaagatcgcaggctaccgctgatctttggtttcttcctttcaaaaataagactaccaccgatctttggttgctttcctgcaaaataaacaccagcgagatcttgatttctttctacaaaataaagagacccgaatttttgtccattccagttaaggtacgctgattattaccttgaggctct

SEQ ID NO: 123143 - DNA, 241 bp, Glycine max
aatcatcacttttcaatgagctttcaaactatatgacatgtaagagatcaggattcagtccacatgcagacttatttcaacataccttctgacttctatataagaaactcaagcgactccacaatgccaaattaatgaatcgcaactacactacaataccactacaatacaacccaacacgaccagacctccccccccatctaacacctgctatgtccatacaataaacatatctcaaatc

SEQ ID NO: 123144 - DNA, 152 bp, Glycine max
agcagctcagtcttctgaaataggcgaacccaagtgatatctaaagtttaatccagttggaactttttttcctcatgtaggtggcagaaactctctgatccttacctggctataaaaagcaatgcactccagctgtaataaatgcaacagag

SEQ ID NO: 123145 - DNA, 311 bp, Glycine max
agtactctgctttttttcattagaatatcgaaacaccaggtcgagtctagtcgatataccaattcacgtcttaaatatcacgtctcgttttagcttactggagactaaccactttcatttttatgccgggggcgattgtaggtttattgttatactttccttgcggtacatttagatttctattaaaaaattccgcgtatgattctattgtaagatcacgcgctccacctgataaagaaatatttaaaatcttttaaaacaaacaacactttttggtttattatatgttacaggacagtaacccctcaccc

SEQ ID NO: 123146 - DNA, 225 bp, Glycine max
tacttagtgatgttctgctataataacaaaccctacccttatctgtaattataaatataatatataataatattgagaagtgaatttcttgtactcaatatgcttaaaatatatggtttgtactaaatattgattttttgtgttcataaaattataatgataaattatatttgtattaataacgatattatatttataattaatacacgctcaatatttactgct

SEQ ID NO: 123147 - DNA, 268 bp, Glycine max
  unsure (1)..(268): unsure at all n locations
ctttgatggatatgcgatattaacagataaggtcattctgangactattacttctatgctaaatctttggtctcttactatgtcctcagttcaagctcanggaggctgcttaatgtattcccatatgtatcattgtggcccttcgactcttctaagaacatgagcacctaacagccattgacggtngtcaacaangagagatnatcatttgcagcataactgaactgaatatgactgctttatcatcacgctataatatctgtgttct

SEQ ID NO: 123148 - DNA, 219 bp, Glycine max
cctcagtgttctgttcgcctaccaccgtcagctaggtgtctcctaaaacctcctagcacatccattcaagatctgcggtgctctgaccctgcatcatcagatctattatcctgtgctcagaggtcgactcgctgtaggcggatcttatcaccccgcattggttcgttatgagaggcagatcattgtgagagaccgcatgctatagagcacctactgttc

SEQ ID NO: 123149 - DNA, 281 bp, Glycine max
catacttccttggaagcttcatgatcttctcttgatcttgaatcatcttctcttgatcttgaagtcaactctcttgttcttgatcttctgattcttctcatgaactgagataacatgactgacctgtgactcactgaatcatcttggcttgtgctcatttgcatctcaacactgatcactgatatatataacttgtcatgagtactccaccatcatactactactctggaactctagagctctgaactactactcccccttgcaaactgaagctctccccc

SEQ ID NO: 123150 - DNA, 222 bp, Glycine max
tccacacacctaatgacatgtgaatgtctcaatgtgtcatgagaagtggtgagaatactttcatgcttctgttttctctagaccgttaaaagtcttccactaagttagtgttcctcaaactctcgattgtctgaatgcactcaatggtatatttgactcatgaagtaagcacttctctaaaataccacttttacctgtgctgggatcaaatctagcacttac

SEQ ID NO: 123151 - DNA, 90 bp, Glycine max
  unsure (1)..(90): unsure at all n locations
gtcctctctctgtcttctaaagtactacntagatatattcatgtgcaatgatgtaatgatgtatacttcatcagactatatatgctaaca

SEQ ID NO: 123152 - DNA, 250 bp, Glycine max
ctctttaactcttggtggatgtcttctctccactggtatattgtcctaagtccaattgtcggctctttctgcagccttgtttgtcgggcttgcgaatgatctctccgtaccgccactctcgacgggtacgcactgactctctgcagtttgcttctactgcttgaagctgatctcgctctcgggttaaacttttgtgcacttactggagcactaacctgttacttagctctgccacatgagctcatcttac

SEQ ID NO: 123153 - DNA, 346 bp, Glycine max
  unsure (1)..(346): unsure at all n locations
taccacgataggaactgtggacgcaaattcgatgcatatgacatagtatgcacttgtcctgtggttaaataagctcttcttaactgcagggttatcaccaacatggcaacaactgtctgatttttagtcttacatctagacataactgtcttattactgcttggctggcgcacacacaagaatttacccacattgtgattgcatgtgttcattgtgacatctcaactatatacttgaagtgtgcatggaatcaccttctattacccnctttcttatgacacagtgttgtgccatacgattttatttaaaatctgcggggcgcgatttgcccattagttgactttcg

SEQ ID NO: 123154 - DNA, 297 bp, Glycine max
attggtagctaacgtgttttacatcacttgtcttatacccttatatagtgaacaatgcattccttgggatcccgataaatatatccaaagaactacttgacttctggtttatgttgtaagctaagattgtttttcatccacatagtgtgatcacatcaagttcttaaactgtcgggaggacataacttcttcaagatcttaactactttggcagtaatgtagagcttcctcctcataatggtgtacacatgataatccatctttaagtgcattgacaatgtttgggacactatattt

SEQ ID NO: 123155 - DNA, 300 bp, Glycine max
gattttcttacgcatgttatggcatacgacttttaagaatctttgaggatgttttacttttgcgaatcaagtagtacgcaagctaattgtacgtctaagctctcaaacacgctaaactgaatagatctgcgggtaacacatctgctatcaataactctgtgtacttatgttaccagcgctgctggtgacacataaataacattctgcttctttgaagacctatttcgtgtgtcttcagttatcagacatttgtttcttcaaacttttctcttttaacctagacttgtcagattgtattgc

SEQ ID NO: 123156 - DNA, 60 bp, Glycine max
gaacgtacggagcgtcggaacactcatcttgattctctcttcttctctctcaatagttaa

SEQ ID NO: 123157 - DNA, 369 bp, Glycine max
  unsure (1)..(369): unsure at all n locations
taactagctgtctgatttctagtctgacagctagacataactggctctctattgtcttggcttgcgacacatcacaagactttcgccctactatatgtgacttgacacgctgtatggaatgctgcgacatcttcacaccttatgaccattctgataggtgggtgcatgtgacatatcgtcgccagatgatcgtaagcatgctcatatttctttgaatgcatcaatcatcttgtatgctggactagtgacgaattttctaagtgtgacaacacatctngcaggagtgacgctgatcaaattgtatcatcaaagtgtcgtgacatnactcaatatatatgttaaacacctaccattctgacacctttgtcc

SEQ ID NO: 123158 - DNA, 171 bp, Glycine max
actgccgggatgcatctcctttctataaaagaatcatacgaagaagaattctcagaagatcctcaaggagcaaaaaaaatcctcaatggaaaaaaaagaaaaaactcgtcaaccaaatgcaagctgactacattacatctatgccatacaaaaaatgactcctcatgtttc

SEQ ID NO: 123159 - DNA, 190 bp, Glycine max
gttctcaaaatgaccaccttacatttgataatcttcaggactatttgagaactaaattagcaatctttagggaggtatcatctcagaggacgcctacctacaagtcaagtactacttaaaactggtttactagaaattacctgccagtggcattttgcttaacagagattttgctgttaggctagagaga

SEQ ID NO: 123160 - DNA, 276 bp, Glycine max
tataaaccctaatgatgtagtatatctgtattatgatgaaactacacggttactaaaatcgattcttctcattcccaaataagccctactactctctacagtgtcgcgttcattttgcatctctctgtctaatacacagcctatcaactaacacatggtgatagcgttgcgcgcgcaaaagcctctctctccccttatctgctgaccgcatcgaaagactagttctctctctctttagagaaagcacaaagcttctcattcctgcaagaaattctt

SEQ ID NO: 123161 - DNA, 122 bp, Glycine max
attaacatactttatatcactgtattaaaaataaagttgtactgccattaaatggtgtaataaataaaatacaagggtaaaattaaaaaatgtgatgctaagaatgggcattatcttattaa

SEQ ID NO: 123162 - DNA, 141 bp, Glycine max
ataacacaactcagaggtctacctctatttgtacttctctgggctattttctgtcctcagctggcaatttacagatttagttcacgtactgttgactatgattatgtaattgttgttacaaaggtagagcttattgctgat

SEQ ID NO: 123163 - DNA, 108 bp, Glycine max
taatatcatacactttaccaacagagtctctaatatatcttcaggactctggctttttgtaactggctttattgctttagcaactattaatactcatgcacttcttct

SEQ ID NO: 123164 - DNA, 337 bp, Glycine max
gggcgcagtccatttcatccagccaacactccggcaccagatctctccacctactttttcccggcctatctccactccaatcaaaaactaaaccacttacagcacaacaacaagcaaattgtcccatacaatcagttcttctatgccagaacatctcatcatcgtaccgtgacatcaatactgagattctacactgacgtgacacaaaatcatattgcttttccacaccacactttgcagcaattgtgcattaacaattgaagcattaatcatctatcctgcatactagcaatgtcttacacactaccaacatggcaaccaatgttgtaaaataaga

SEQ ID NO: 123165 - DNA, 231 bp, Glycine max
tacgtgtgcgacctttaccctgcacagcccctttgactccatcatcactatcgcgcatatcaagacggactctcagcttcgatacccctcagatacaatttgctctaccacttgcggactcgaggctcaccttcagtggtacaccacgatcagggtcagctctaaactgtctatcagcacttatactgatgtcttagaacgcattaacacctccctggggcgtagtatctg

SEQ ID NO: 123166 - DNA, 152 bp, Glycine max
taaactggtagtttttcatctcgaattatacgcttttgataaagcgatataaaggtctcctcaacaaatattgcccgagctagttcatataacagacattactcaatggtgaggacaagggagtgtatgtaatatgacttgagctacaactg

SEQ ID NO: 123167 - DNA, 134 bp, Glycine max
tttttttttttccatggggatggcatatcaaaaggagagtatatttcacagccttgagggattctctaagggaaaactccttgccagcaataaaactttcccaaaaatagggtgttgcgggagatagcatagta

SEQ ID NO: 123168 - DNA, 276 bp, Glycine max
acctttttttatattctaagcaaaccctagagaactctgaatacccaacccctgttttaaaaaaaaaaaaaacccccaatgaaaaaaaccggaaaactatttattccaggaaattggaagcccccggaaaaccgattgggaagaaaagacgggggggtgtttgcaagggaaaaaatttccataataacaaaaaaaaattactaaaataaacaactctctctattatttaccaaaatagacaaccttattatttatagaataaaatccggggggggg

SEQ ID NO: 123169 - DNA, 415 bp, Glycine max
  unsure (1)..(415): unsure at all n locations
actaagcttaagagagtccttcactgctgatgtctactgcttcaagtgttgcctctcctatttcagctctcactattaataataatggttctactgcaatgtctgatattgtttcttcttctctcagtattgctaatctctggcatgctaggttagggcatcctaatgatcatgtaatgaaacttgttctcagtcattgtaatatttcttaatcaaataaaaattccacagggttntgtgcttcttgctgtatgagtaaatctcatagattaccttctcatacttctacttctgtctattctcctttagagctcatttttacagatttgtggngaccttctcatattacctcatattctggntataaatattatgtctctttcattgatgctttctctaggtatactnggatata

SEQ ID NO: 123170 - DNA, 263 bp, Glycine max
acacatgagcctgccttaccttaaaggactattttatcactatcgtatgtgaaaagaacttatgcccggattcttttaggaaaacttagagttgataagctgatgctatttgaagaatagccttacattgcgattgcaaacacaatattgacttgcctgaaaaacctatctgtagactgagctctatgaggatacataaccccactctctatatgtgtaaaactcacgttgagaaagctttaactatcttaaaagttgccttg

SEQ ID NO: 123171 - DNA, 441 bp, Glycine max
  unsure (1)..(441): unsure at all n locations
ctaagctggaggaatcttanacaactagtagagataccgctatcactacctgaatactcacgtgagcctgcttaaatntaagggatgagtttatcgcaattggagttagaatgaacatatgtagggatccttaaaggattaaattgagtttattttgggatgtttattgaattataattttcctttacgattataaatacgatattgttgtgtttgtcgaacaaatagatgttctgatgtgaatnggttgacaaacttgagtgctcttggtgttttcgtgtctttgacatatgattttgattcgctgatcttaatatgattatgtacaattgtttaaggggttttactccccatattgtgagaagtatattatataacattgtatatcgagattctgaaatggtgattcaaattgtttgttagtgacgaaattgacctatg

SEQ ID NO: 123172 - DNA, 297 bp, Glycine max
gcaaagacttgatgcaatggcttaagcttaccgagcgctggacatctactatgataatccaatagcgaaaaatgatgcgcatttgctaacctgacatgagcatgaatctcatacattgtatgatatataagcgaaggctcaactcatactgaccatgtactagctatagctaccaatgacgatcttattacacgaaacagaataacttcgtgatctatatatctgacacgatacaatgtgggcttaacgcgtcctcgagacccataactatcggggcgagaccctgttcacggtgac

SEQ ID NO: 123173 - DNA, 424 bp, Glycine max
  unsure (1)..(424): unsure at all n locations
ctaagcattttaannacaaatttgactagattcaatccttaattaaacttagcgatggagttttactatgatatcaatataggaaaaatgaaatgcatttactagcctaagatggatgaatcacatacattctagcatataaagcttgtaacaaacatactaagatatactagtattcatactaatgaggagcttattacacattacaaaataactcatcatcaaaatattaaacacaatacaatggggtcttcacgtgtcctcgtgttctatacctcccgtggtgatctcatgtttttggtgactatacatctttttggttcttttggaaggctttggatacttangcaggttntgtattggcttccttcttaagtttcacttattctacagatcgtataggtctagtggtacctatttttta

SEQ ID NO: 123174 - DNA, 272 bp, Glycine max
ggacatagagcctgcccatgtaacgatgcatagagcgttatgctcctcgtattgtgtcatcttggatgactgctaatggcggtctgctcccggtgtgcgaatcctgggaaatacactattttccagcatgagtggagtatactgctcgtgattgacatactcatgcagctatactctaacgaatacttatttgctccctcatttgctgttgcatgcgcctgaatcctgtatttccgcattcgggaggaactactcaactcgcctattcatat

SEQ ID NO: 123175 - DNA, 419 bp, Glycine max
  unsure (1)..(419): unsure at all n locations
cgtctctntggtcattattgacaaatgcattcaaggtttacatatgctgcacatagaaaagtacaatgatataaaacaacataaaaatattaaaaatagataagctgttaatggctcttatctccaaatatctgattcctgtgaactaaaacatctcacgcttagtntattgtttccttcgcatgattgtcatactcatgcaactatactctagccaatccttaataaatatcacatatgcttatgtagctgacagagcactgaatttccacatacaggaagaactccagaactcacattaaaaataaacatataatcaaataaaagatcagaacttagaanacgctagacgcacttggtaatcatgagttcaaaatgtggattgcagagacaaaaagttattcatggaacagaaaact

SEQ ID NO: 123176 - DNA, 261 bp, Glycine max
tctaccgaatatgtaacctgaaaacgctactatttacatacgcaaaaatggccatacaactgtctatggctggatacaggaaagcatcatcctacatctttctatcatctagggttgactagacctctccatggaaggacatgagctacttactagagcacctttctcacagtccagtggcaatgaaacaaattacgtggagcctatatacataaagaaactctctctctcgtgggcaaatatcttacagggaagatgaaa

SEQ ID NO: 123177 - DNA, 488 bp, Glycine max
  unsure (1)..(488): unsure at all n locations
tgatggtcatgttggacaagccanaaggggccatatatgggtattctttctattgaagttttaaccagaaatggctaaagttgacttaagcaaaaatggtaaaaaaactatttttgctaaacaaggtaaatcttatcctaatcttctagattagtgtgctagtcttccttgggatatgtgtacttagagtgaaccttgcacacagtccaatggcattgagacaaattacgttgtgcctcaatgcatagtgcaattcttgcacacatggaaatctagcttagatagtttcttcttcttttgccaagtttactagaccaatcccacacacacacacacacacacatcatgaaattctatgattaanaacatctaaatacttgaaataaattcgcacatgccacagatacacaacatagagttttctctatactctaagatgtaattttcaagtgtacaactctaactcattttaactatctacatcatat

SEQ ID NO: 123178 - DNA, 243 bp, Glycine max
cctgttttgaatcataatcccaccccttattgaaaagacactgaaaaactatatccttccagagaatttgaacccccgacaaccgtctgtaaggacatactctattgtttctgcatgtgaaattttttccataatatacaaaaaacaattactaaaatatacaactctctctattatttaccaaaatatacaactttattatttatagtataaattcgggttggggggcccgaatttacactg

SEQ ID NO: 123179 - DNA, 286 bp, Glycine max
  unsure (1)..(286): unsure at all n locations
ctctagccacatggacttacctcgagataattcctttgatagcccttttgagcctctgttccctttccttgntttgaagctcactacaagccttaagtgaaaaaccatgatatcactatatccttaaggaatnttggagctttggaattgttttgggaataagtgtggagggttcttgtttcattggacaacttgttttgttggctatgcttcatgatgtattttgggccatacttgatgtacatagtatattggttaaatgttggacatgctgaatgacatgttg

SEQ ID NO: 123180 - DNA, 302 bp, Glycine max
aatgtgttcaacgtatcgccatgagacatctctacatgatcctgggacgctcacaagactatgcgatatatcctcggcgtcataagacgatatcgtgagagtccgtcacaccaacaatgtttatgctgctgtcagcaaaatcaagcaactgatcataccagtgtcttctctcgaggacctacttgtactcgtcaaacatagtgtaatgaactaccacattcgtttatgggagtagtcttctaggcatagacatatctgcatacctctcgcgagcctcttgagatgtgaacttggatctgtca

SEQ ID NO: 123181 - DNA, 65 bp, Glycine max
tttatacacggctgttgcgtttgctccgaacttaaattagactcttgaactctatccgaagccct

SEQ ID NO: 123182 - DNA, 323 bp, Glycine max
tctcgatatattacgggactcaaccagacatccgtgtataaagttattgtcatttcaatttgctcagagcttctagtctcaattatgagcgtctcaatatattacccgatacaatcggacatgtgagaaaaaagttattgtcgtctgaatttcctacgagtctccgttctcaatatggagcgtctcgatatattacaggactcaactggacatccgcgtataaagatatctgcatttcgatgtgctcagagcttctagtctcaatattgagcgtctgaatatattacgcgattcaatccgacatgcgagtaaaaagtattgtc

SEQ ID NO: 123183 - DNA, 393 bp, Glycine max
  unsure (1)..(393): unsure at all n locations
tattataaggaaantaatcactttgttgacagcttctatggagttgttntgaanaaaggaaagaaaaaaaaaacgaatttctagataaaagtgttcccagacatcatgtatttttttactattttccacactctctctctctctctctctctctctctcattcattntttaatacttcccttcatcaccattatcatgcttagcccgcttcatgacaaattacagaatacaaagtacagacataaataattattacctacccaagaaacaagataaagccatgccaaccatgcctnctccaacaatagcctgcttcttctcatgctcttgcaaatattcaagaaatataatttgcaatnttcattcaatataaactagaataatatgaaaatg

SEQ ID NO: 123184 - DNA, 253 bp, Glycine max
gcaaaaaaacaacgcaaaaaggcccacaaaagggggacggtgaacgaacccggcataaagagccagagagaacacccggaacaagaaaaaaacgcccccaacagcgaaaaaagggggcagggaagaatgcggacacgaccacaaacagagcaaatacatcacagccgacggaaacggaaaaagaaaactggagggaggaaaataaaagaaagcccgaccacggggaacgagcagagacaggaccgaagagacc

SEQ ID NO: 123185 - DNA, 406 bp, Glycine max
  unsure (1)..(406): unsure at all n locations
aagctanatacattnttcatccctgcaatntagcacttntttaatntatgtccttacaaaaaaacatctttttagtccttacaaaatgtgtttgttttatctttcgttcttaaagtgctatagataacactttgaacagtaagaaaatgcttcgaacagtgaaaaaagtgttatctaaatagtgctttaaggacaaaaaacaaaacaaatacattttgcaaggactaaaacagaaaaagaaatttttcagggacaaaaatgaaagaagcgctaatttgcagggacgaaaaatgtatttaaacctaattaatatgatgttggaggataagggatcctgctcagtatatataaaggaaaataaaacagcaaagcanaatcatttatcanaacataaatagaacagagc

SEQ ID NO: 123186 - DNA, 361 bp, Glycine max
  unsure (1)..(361): unsure at all n locations
cgagatgagggaagtgtgaagggtgaaactctcctgctttattgttgaccacagagtggtacctggagatatgtcgcggnggtcaggagaccttgnggacgtcaggtggggtgctattgcccaaaaccaagcttgaccaatctccgacccaacccggcatagtcggtcagtgagaacatgtgacgtacctaagcaggcgagctcctggcagtcaacagataaaaggaaaacaagaccacagagcaaggaggcttgtggtggctggccagctgtgaattntgtgtaatatgtggattgtggcctctggtaatcgattaccaaaggtgggtaatcgattacaaggcttaaaattgaagacagg

SEQ ID NO: 123187 - DNA, 160 bp, Glycine max
gcatagtaaacttcgcgaaatgagaattgatgggaatcaatgtaatgattgtgaaaacctaaataacatgccagaggtgagtgcctaatgcgaaatgatggcctaggatatcgtaacttcttgcacatatgaatcttgctattagacgctataaggcata

SEQ ID NO: 123188 - DNA, 203 bp, Glycine max
  unsure (1)..(203): unsure at all n locations
cgcagagagtccatcactgctggcgtataccgctacgagtggtgtctctcttatctcgacagccactaactaatattgaggcattactgcaacgactgatcatgaccacaactctctcagtattgngcatcatgcgacgctcttggaaggcatactaatgaccacgtcatgactcctgctatgaatcgatgtagaatatgtta

SEQ ID NO: 123189 - DNA, 231 bp, Glycine max
cgctaacacctattgcacccctcaaatgactatggcacatatgttggagctaaacaggagggagctataagccatcttctatatggcattattggcccctgacgagacatgacaacaagggctccaccactggttggacatataatacacctgtccatattactgataccttgctgaaatatgagcaagaagctgttgcgaaatccgaggtgggggcaaaaggcgcatctg

SEQ ID NO: 123190 - DNA, 473 bp, Glycine max
  unsure (1)..(473): unsure at all n locations
cgcaatggaagacattgtatatatgttngatgaatttccattcactaacacaaatttgtacgctcaaatctattagctcatgtgttcaatttgaaatatgaaatttctattntacatcttttatttggcattatgtaaccttgtccagcacatcacaattttttctttaatttctcttcgccatagattagacctgttttatatagttctactttgctgtagttaaaatcaagattaaagttgcataagccatcaattaagttaaaaattgcaactgaaatatcgaacacatgattntagcaaagcagtgatagctacaaaaatggagtgataacattcatgggcaacacattccaaataaggaaatacgatgtcaggatagaaactttgattaatttaaagagcacctcgattgagaaggaanactgaaacttaaaaattaacacaatcctctgcatgctatntttttctta

SEQ ID NO: 123191 - DNA, 283 bp, Glycine max
agaaggccggggcacaaacctcagagatctgctggaatgatcaccccatgggctgacacctctgtgagccttacggacgaatcatcattttcataacgcagccttttttctcacccatgaggcaaatgtggtttttgagacaccattttctacaactctacatgacttagcgtatagtgatatttacgcttagctagtgattttactctctggtactctcactacatacctcaaagcctttgttatcttgaggctatggtctgccaaatatcggatatgcctc

SEQ ID NO: 123192 - DNA, 361 bp, Glycine max
  unsure (1)..(361): unsure at all n locations
cctctgatactaagctcgtacaaccaatattctctttcctaccaagccattgttggccttatcatattatagaaagatntgctggtctgattacacaatgactaacactctatcgtcttacagacgaataaacaatattatcacttagccttttctctcaagatgaacaaagtgttttgagaactcttctaaactttacaagaatttgcatagagagcatcttacacaaagaatgaaataataagcgcttaataacacacttcatacttcaaagcgtttgttatatatacgcgtgattcaatcaaatatccggtatctctaaacgaacatatttcctctcttacgcttgggtcttaattaa

SEQ ID NO: 123193 - DNA, 273 bp, Glycine max
tcaccatccgggaatagagggtaattacccgccccacgggccattgttgatgacggtgcccacatggatcagggaccttttcccattccttgctcccaccctacctgacaaggacaacacctgggacaacctactacgcgtactagacaaatcaacaagaaccctaccccgccccgatattgcccaacccaactctagactacatcagccccggagcagccctacctaagttcgaataaccccaaccctgacccattttgtaaacactccacc

SEQ ID NO: 123194 - DNA, 451 bp, Glycine max
  unsure (1)..(451): unsure at all n locations
tactaagctaatggtacctttgctctganagatcttgngatatcggattactttttgtgcatngaggttcgttctctgtccaatgggtcattgatgatgactcggtcaacatatatcanggatcttttatatttttttgcacagcaaaaatcaatattgtattataagtaagattcagtactacgtgtactgaaatacataacaagaagttacagatgcaatgatatgcccaacccaactatagaagacaaaagcacatgagctgaacaaaaaaggtcaaaanaaccccttctagaaaattctntatggcatccagctcaaactgtcaagcatggctctaacctataaggatggtcctttacagtccatagtggtgcttacatatgtacagaactatcctgactaacactcttaataagtttcaatcattttctctctgaagtactggact

SEQ ID NO: 123195 - DNA, 290 bp, Glycine max
tcaatatatatataggcagattagtgacaatgacgaatcagattccacagcgattatacatcatctgagttcaaccattgagatcgaccataatgggataaacaagcttggactgtcctacttcatgaggccttacaataaccattggatgggtcgggttatcccatattttatacttgactcatcattagtatatccccccatcgcggatgaccctcgagccagcccatattgtaccttttaacttttcagccatatttcatttcaagcgttatgatttttcatattta

SEQ ID NO: 123196 - DNA, 298 bp, Glycine max
  unsure (1)..(298): unsure at all n locations
tgatcacacataacacactatagaatattattcgtcataattaacaaacaattctgaaagctatagcgtcatggtactttaagatgacatatagagtattatgtttatcaaagaatttcccattacaaatccaggactatatcccagcattgcaaatagtacaagagcaagcgatcaatatactttagaatctcacacccatattccatgtcaagcattatattttttcatatttagacataacttggcttaggttctaggcccatattggactntattntaaaccagcttattggac

SEQ ID NO: 123197 - DNA, 256 bp, Glycine max
  unsure (1)..(256): unsure at all n locations
gaaggagagagagggagaggaaaaaacagccccgacacacaaaanaaacacgggggcaggagagggagaaagaccccaagagcccccgaagaaacagagacgaacgagggaaggcccacaaggagggggcaacgaacaggaacaacgagggagaaaagaagcaagaaaccgggggaaaaacaaaaaacacgcgccgaaaagggaacaaaaacgcggaaagaaagagaaaacgagaaaggaaccataccaggaaaaa

SEQ ID NO: 123198 - DNA, 429 bp, Glycine max
  unsure (1)..(429): unsure at all n locations
tctgcatgtctagagagttctagagagnaaaaggtctcttttctcttatagttgagagaatttattgtgtgaagatctgcagagaccagagcttgaagaggaagtcgtcctgagagcttgagatgagtctgtgagtgattgtgaggtcctatacgtggatgagacatccccactacttgtatttctgcaatctttcatctntctcttttctttgctgtaaaggaagcttcccagctatggaaagttaaatcattctgttggatcttcttgtaggtacttgatgtaaatatctttttatctatttaatgactgtttgtgtgttcattgtgctatcagaacttcattctagcatgcttttgcttgatcacgtagatgcatgtgtttctaggatcattcaacaatggatactgtctaattcttataacttga

SEQ ID NO: 123199 - DNA, 208 bp, Glycine max
agccttggaagcccaatacagaaaaacacaaagggcgagtagcagggcgaaatgtagcaccatggctacaacaaaagaagctccacgagaaagagacgaacatccccggagacgaaccacatataagagaacccaatgaaacgttcagaaaaagaaccggacaaaacgggacggtgaagacgtaacgtatcaaactgaacaacaaaaa

SEQ ID NO: 123200 - DNA, 385 bp, Glycine max
  unsure (1)..(385): unsure at all n locations
ntnntgtcatcacctttgtcatcatcattgttatcatcaaaacactctttgaatcaccttgattcatcatgaagctttgcttctacaataaatagtgtgcattcttttaatcccaatacaacattcaattntcccttgtagctntcaaatttagcacctccatacaacaaaataagctccaccagtataagactaactccccaaataataaccatatataagactatnttatgtttcctccagcataagaacctgaaaaaactgtgtgttgttgttgtattcttttaagctaaccatcactaaccacctattcgatactatgccactttccctttgagcaaaatacattgtattcaactcttcattgacacctctgtcttcaaac

SEQ ID NO: 123201 - DNA, 313 bp, Glycine max
  unsure (1)..(313): unsure at all n locations
tgctacgtaagttgttaaacattntcactgatgccacttcctgttgtgcctgttttgtcacttcactatgtaatttacgtgatgtggaaatgatgctaatggctctgagtacactatgacaattaaaagaaacaaacacatcttaacataactcttctaattaagaattaatttgaataaacatttttctatatatcaaccgacacacgtctttgtcggcttctcaaagaagctatgcaatatacaaaacttaggtattaattatactccagctgcgtttgtttgtatctgtttctatatgataactataacg

SEQ ID NO: 123202 - DNA, 285 bp, Glycine max
  unsure (1)..(285): unsure at all n locations
aaaatttttttactcgggggnaaaggggggacccgaaaagaacccaccccccaagaaaaaaacgcagacagaggacaaaaagaaaaggggggcactcccaacccgggcagacgcccgagcacgcaaggataacccgagggaaaaacctgtaggcgcgaaggaaaaaagaaaagggaaaggaaaaaagagccgagatgggagaaccgaacgggaaccgaaaaaaaaccagaggaaaaagaaaaaaaggcgaaaaaacccgaaaaaaaaaacaaaatcaaaggcagg

SEQ ID NO: 123203 - DNA, 297 bp, Glycine max
ctaagcttgagcaactcaatgacaaaaactgatttactctggtgtcttattgagtcccgcaatatgtggagacgctcgaaatagaataccgaagctcagagcaaaatcaaaggacaatatacttttactcggttgtgtgactgagtcccgtaatatatcgagatgctcggacttgaatgccgaagctctaagcaaattcaaacgacaataacgttttcactcggatgtctgattgagtcccgtaatatatctagacgctcggacttaaaagccatacctctgagcaaattcaaatga

SEQ ID NO: 123204 - DNA, 278 bp, Glycine max
tggaagctggatcttttctccacaaagaggccctcttggggatattttcaatcttttaaagacctgggcataacggggagagacagcgttacgatgcttcttccacgtatggaaatgcgatggtgaactgttcttccatcaccactaagggccatgaccttcattctcgattggaagcttgaatctaactatatatattggggcatatacacactggggggtgcacaatcttattggtgcactctagggagatggaagagccaatccatggtgcctca

SEQ ID NO: 123205 - DNA, 372 bp, Glycine max
  unsure (1)..(372): unsure at all n locations
tctatggaggctgngatcttgagcttcaatgaggtcctttaatggtgattttccaccatggagatgcagcggaagacaaaggagaagaggtgagaggaggcgtcatccactatggaataagccatggaagaaggagcttcaccaccaagatgagccttggataagaagcttggaaggatgcttcaatcgaggaaaagaanaagggagagaaagagagaggggggagcacgaaattgaaggaataaaagagggagagaagtggaactntgaagtatgtctcacaagactctcattcatcanagttacaataagtgttacacatgcttctatttatagactaggtagcttccttgagaagctttcttgagaaaa

SEQ ID NO: 123206 - DNA, 201 bp, Glycine max
gagaggcacccgcaccagaatgcggcatgcccacgcagagccgtgggggagaaacattaatgccccacgcacacgcggggaagaaacacaaggggaggctacacgaagagggacttcactgaccaaacacctcaagtagcccctgagaacaaggactatcataaaaacacccgcccgcgcgcgcacatataaacatatata

SEQ ID NO: 123207 - DNA, 338 bp, Glycine max
  unsure (1)..(338): unsure at all n locations
tctaacatcctcggacctaggttccttgngccccttgcgataatgatatattggagcttctgttngctttatgtcatggctgagttgtgggggagtgtggttatctccgtactctttcgtgggtttgctaatcaggtaatgctttttggcttgattcttcgatgatgtgtgatggcatcgggttatgatcttcaattctgttgtcataagaatgacatcttgattgccttagttggattttctgttgtttgttgtacttgagagcatattccatattgctcgaacctgngtggatggaacttagatatggctattntatccatctatcagcatgattc

SEQ ID NO: 123208 - DNA, 269 bp, Glycine max
caactttggtgcaaatatagtaggaaaattgaaacatgcaggcgtcaactggaaaatgtcaaggaatctaacaacgatgatgtagttgtagcctacaatgaattaaggaacaaactctcaagcctccttgcacaagaagaatcacattggaagcaaagatcaaaagtattctagttgaaaaagggtgatttgaactctaaatttttccattcctctgcaacatcatggaaaaagtcaaattacactacttttatgtcacgtgaagatgg

SEQ ID NO: 123209 - DNA, 425 bp, Glycine max
  unsure (1)..(425): unsure at all n locations
ngaacactgctccaaagacacaaactcgtaggctaagcaactttgttgcatatatagtangaaaattgaaacatgcaggcgtcaactggaaaatgtcaaggaatctaacaacgatgatgtatttgtagcctacaatgaattaaggaacaaactctcaagcctccttgcacaagaagaatcacattggaagcaaagatcaaaagtattctagttgaaaaagggtgatttgaactctaaatttttgcattcctctgcaacatcatggaaaaagtcaaattacactacttttatgtcacgtgaagatggttccattgtgcatgatcatagtgctacgtgtnttggtgccacctattatttcaatattctttgtctattgacaacaattgtaatgactttctgccagctctcaataataattatacatg

SEQ ID NO: 123210 - DNA, 274 bp, Glycine max
  unsure (1)..(274): unsure at all n locations
aggaaaaatgaccgggtggataangagacatggagcccaaaactctatatgttaagggagacttgagatgggaagtgggaccctctaataatcaaagatgaaaaagagcacacacatggcatctatgtatagcctaagtgacacaaaaatggcggagaattcgaatttctattcaaatttctctcgaatttgaaattctatttgtggagccaaaattttactaaatatgattagtgaattttagctatgttttaacccactaatccactatcac

SEQ ID NO: 123211 - DNA, 370 bp, Glycine max
  unsure (1)..(370): unsure at all n locations
gagcatgaaggtaggagatgatgagtggagggataaggagaaaangagcacgacatcttatgccttcattgaaggctaatatttgaagagtgattctctaataatcaaagttgaaaaatagcacacacatggcatctatctatagcctatgtgtcacaaaattggaggaacatatgaatttctattcaaatttcacttgaatgtgaaattgaatntgtggagccaaaatcttactaattatgactagtgaactttagctatgtttcaacccactaatctcagagcnagtncaagattcctcactaagtgtgcttatgtgtcatgtggcgtctaaagcatgaaagacatgcacatagtgtgactatatgat

SEQ ID NO: 123212 - DNA, 243 bp, Glycine max
  unsure (1)..(243): unsure at all n locations
tgcagttggaattgcgatagnccactccatcatatgattttatctgacatctcanaccaacaaatcaaacgtaacgagacaattatagttgctgtttgaatacctcacccactcaagtgtatcacacaattatggaatttctctaatgaaacactcttgccttttaccactctaattcaccttgagttcttaggcagatcaagagaatatggccacaacacagaacaattcaccactatgtgt

SEQ ID NO: 123213 - DNA, 454 bp, Glycine max
  unsure (1)..(454): unsure at all n locations
agcttgagttacgtaatcaggaatgttcataggntncttgtttctcttactgngactgctgggattggggggtgcctaattacgttctgtctgaacaagatgnggaataaaagtgattgctgtgtgtctgatttaccagttgaggtgccaataacggttccacaatgatattctatgtcctaaacattntatggtcgagataatgttggtcatgtggtaacactttgctttcaagtttcaatcatattttagaggagaacaagtataaatggaagcgaaagacataggaagaaaaaaaaacatcttagcctacattggtcaagtgggcttaaactctaaaatattatgaaacagcagggaatcacattgttcacttgatggtgccacatgtctctangactttcttattccatatgaattgaggattagatgtgctgtttagctgctactaatc

SEQ ID NO: 123214 - DNA, 264 bp, Glycine max
tgtataatagaggactgtattatatctagacgctcgaaattgtaggtggaagctatgagccaaatcttacgactataactttttactcggatgtctgatagaggactctaatatacctccacgctcgaagttgtaggcggaagctctgagtcaatgcttacgactttaactttttacgcggatgtctaatatagggctgtaatatacatgcacgctcaaagttgtaggctgaagatttgggccaaatcttacgaatttaacttt

SEQ ID NO: 123215 - DNA, 466 bp, Glycine max
  unsure (1)..(466): unsure at all n locations
cgacaataactgtntactcggatgtctaattgagtcccgtaatatatcgagacgctcgaaattgaatgttgaacctatgagccaattcaaacgacaataactntttactcggatgtctgattgagtcccataatatatcgagacgctcgaaattgaatgttgaacctctgagccaattcaaacgacaataactntttactcggatgtccgattcagtggtgtaatatatcgggacgctcgaaattgaatgttgaacttctgagccaattcaaacgacaataactttttactcggatgtatgattgagtcccgaaatatatcgagacgctcgaaattgaatgttgaacctctgagccaattcaaacgacaataactntntactcggatgtccgattcattgacgtaatatatcgcgacgcttgaaattgaatgtcgaacctatgagccaattcatacgacaaaacat

SEQ ID NO: 123216 - DNA, 389 bp, Glycine max
  unsure (1)..(389): unsure at all n locations
tctccccctatttgctataaataggggaagaagtgattataaattggttcagccncttangcacttctctctctttcgaattcgcttggaaaaattgtttccgtgaagaaaatctataccgaggcgcttccgaaacgtttccgtaacgtttctgtaaggaatttcgcgaaggtttcgaccgttcttcgacgttcttcattcattcttcatcgttcttcgatcttcaacgggtaagtacctcgaaccaagcttttcaattcactctatgtacccgtggtggtccacatttcgtttcatgtatttctattctcatttccatttaccttttatacccccttttgacgtgcttaagccatttatttaagtcatttctcgcttaatgtaaaaat

SEQ ID NO: 123217 - DNA, 210 bp, Glycine max
actctcatacacttatgatagccgccgatgatcccattactgcttctcctaagctctcttgcctttcttcacgccgcatcacatgccttgcgaactccttggagtacctctgcattgaggtcactgaaaccccgtgtaatgaaaggcgtgatgctttcatctaatggcgctgctctcatggagtagccaagctgtcttatggcgaggaca

SEQ ID NO: 123218 - DNA, 259 bp, Glycine max
  unsure (1)..(259): unsure at all n locations
gcccgagagagacggccggaacaaaagaaaagaccaacagcacacctcgagagacgtcgagggtcaagaaaaagcaggcgcgagaagcagacgcccgagagagacgtacgngcgaaaagagctgaccaagagaactcggcgagagacacgcagcatcaagatagagcatgcgccagaaaaagaaacccgagagagacgcacgagcacaggaaatgaccaagaggaaccgaggacagcaccgagggccaagaaaaagagg

SEQ ID NO: 123219 - DNA, 416 bp, Glycine max
  unsure (1)..(416): unsure at all n locations
tctcgatatattatgcgcctgaatcggacttccgtgtgacatgttatgaccatctgaatttctcgacaccatacgttgttcaatttcgagcgtctcgatatattatgctcctgaatcggatgtccgtgtgacaagttatgaccatttgagcttctcgagagctttcgatgttcaattttcagcttctcgatatattatgcgcctgaatcggacttncgtgtgaaaagctatgaccattggaatctctcgagagcttccgatgttctatttcgagcgtctcgatatattatgcacctgaatctgactcttgtgtgacatgttatgaccattggactctctcgagagcttctgttgtcaatttcaagctcctgatatatatgcgcgtgatcggacttccgttgaaagtatgaccattg

SEQ ID NO: 123220 - DNA, 264 bp, Glycine max
cccaggcacgtccacaagaggagcccacaccgcacacagcaggacacgaggagactaacaacaacaatacgagccgcgccgagcgacacacacaacgctggatgagccacggcagccccaggaaataccaccggctgcgccgagcacatccccacccaagaagcccgcaccaagaggagccccaaaaaccgaccccaccaggggaccatcacccagggacgaaaagacccccgagggaaccaggaaaaaacactcggccaaaac

SEQ ID NO: 123221 - DNA, 78 bp, Glycine max
  unsure (1)..(78): unsure at all n locations
gctatagnctntacactctcatctcatgtattgaatattcatatttatgttctctacatgcaatatctgcatgcagca

SEQ ID NO: 123222 - DNA, 253 bp, Glycine max
gcttattacaagagataggccctaatagacggcgcctgctctacattttatttcttaggcatccgatgggtctccatgggagccttaccccgtataacgactctttgtggacccttagaatcagtcctcataatgtccacccatgctgggtcctatcataattggtgcgatgaaatacacagcctcagatatgctgattgctacactatggagatggaggccactggggacgtggcttaacaaacgttggggt

SEQ ID NO: 123223 - DNA, 396 bp, Glycine max
  unsure (1)..(396): unsure at all n locations
gatactcagcttttatccaggctcatcttggtggtgaagctccttcttccatgacttattccttaatcgatggcgcctcctctcacctcttttcctttgtcttccgctgcatctccatggtggaaaatcaccattaaaggaccccattgaagctcaaagatccagcctccatagaagccccacaagcaaagttctatcatctttcatcctctcacaaacacatctttgcttatttggcttccaccggaatgtgggtgcaagccattggtctgtttgctcaagagacctgcgctcctgagtttggacttccaacaccgttcaatcagaaattactcgtcttgcacgttggtggnggtgccataaaacaacgagtaaagttcaaaacaaatatgtttc

SEQ ID NO: 123224 - DNA, 274 bp, Glycine max
ggcatcctagacttatataggcagaggacaagcacacttctcattctctcattaagtttcatatatatatgacactcaccccaacgttggcatcgcttgaaacacagaagtggagcgtggtttaaggactcaaaatgcactagagggatggtaacacgtggtggtgtaaaatacaagcacaggtgtggaatgcgacctccatacctgaataaccccatcgtatctttagaggtcaccatgcgccacattcccgctgggctaataaagatgggac

SEQ ID NO: 123225 - DNA, 363 bp, Glycine max
  unsure (1)..(363): unsure at all n locations
actcaagcctatgcacaagttaagtagatactattctaaaagtaatataagatataataataagatagtaatcaggcatacttctcattcactccttttgtattagatatctatgacattcaccagattgttggaatcatatgtaacatgatgtggtgtgtggctcacaatcacaaaaggcacaagtgggaaggtttcaagtggtgctgtcataactaacttcagttattgaattcagntattataactgaattcagttgtcataactaaattggttttttggcaccataaaaaagcttggctcctagagttaggagagaggttnttcctgatcatgttattcttggagaagaagttttttgc

SEQ ID NO: 123226 - DNA, 253 bp, Glycine max
ttgcccgatctggaatgtgatggataatgggcatgtctcgatttgtgataagtaacttgagcctgtgaagaatcgactgggcgtgccttaccatactatgttgacaatcatggatcactatctccgagaaggcgagcctacctggtgtagataagctcgcgctgagagaacacacgctagggggtgatcctagccatgttgaacatatgctcgggaatatgcgaaagctctgcccgaagaaggcatgacctgg

SEQ ID NO: 123227 - DNA, 478 bp, Glycine max
  unsure (1)..(478): unsure at all n locations
tttgtgtttagctctattatagccagatcttcatttgtccattctgctntatgtttgataataggcatgtctccatttgtgattattagctagagcctgtagtgattggacttgatgtacatttccattctatctttccaatatggatagtcttctcctgtgaagcatggtagccttgtgagagaagctccctcaatgatgaactgactattgttgatgttatctgccattaggatcttttcctcaagacattgtcaagtgctcaacccttagaggctaagccctgataccaagctataaaggcaaatatcacaagaaggggaaggtttgaattgtgatttaaagtaattgttgaaaaaaatntcaaaccaaaaagggcttttatctgagaaaagaactntgtangaaagagaaacaactctattttaagaactcttaagatgatgaaaaaatgaatttgacanagagtagtttatct

SEQ ID NO: 123228 - DNA, 274 bp, Glycine max
gatactttgaagttcgtacccatataagtcttgaaagagcttgacatactgaaggacgttattctggccgaccctggtgacttggatcgagagaccaagtacgtctgatcggacaaactcgcccaaaacacattttgcggggctttatagagcagaaatggaagagctgctactcctaatgagcgtcgaaagaatttctcaggtcagccgcttgatctccaatgacaagctagaggcttgccttgagtctaactgagatatcacccgccagatc

SEQ ID NO: 123229 - DNA, 470 bp, Glycine max
  unsure (1)..(470): unsure at all n locations
agctgacatacagacttgtaaaatgactggagaatggtactctgatatttgagctgatattttaactgaatttctagacatctggaanaaagttatacacaaagaaccaagtgatctggataataggaaaagatactaatgatcacacaagttggctgaacaatcagtatccaagaaagaaaagaagtganagggaagtgtgcttgttgttttggctcagaatttattccataattggtgcctatgttataccaatcttagttcggaaattcaattgaaattactgtgaaacaagtgcccagctagaggtttgtgagtcttttttattagttcttactctactctgagccatctagtttctttgagtctagcggtttatgtccttttatactttatgtgagaatcttgaacatgcttgtaaactcatggntagcttcatcattntttttggcttggtatgctgctcttgt

SEQ ID NO: 123230 - DNA, 305 bp, Glycine max
gcgcattttttttttcaacattattggaatgagaactttcttgagacaaaatcagtacctagaatggccatataaacaacaaaatgccccgagatgacatcttacatgtaacagctgtatagtgctattttaagactatatggataataatctacattatttcgagcccagtcatatttcacaaatttatgagctggactttttattagccagctcagtctatcaaagctgttgactatgactcttgtagtgtatgtgttgttaggtgaacagaattattctctctccatatttgattctattat

SEQ ID NO: 123231 - DNA, 212 bp, Glycine max
tacctctactactgatgcagagttatcatccaagattatttatctgaactttctttcgcaacttctgatccttggatgcccatagaaagaccaatatctgcctaaattacataatagtaaaacattgtataaactataataaaaaaatggtcaaattacattcttgatcccagtttattttcagtttcggatttggtacccccacatcttaa

SEQ ID NO: 123232 - DNA, 168 bp, Glycine max
aacaaagacgcccgccccgacaaaaatgatgaagaaggcaacagcacagcgaggatacagaaaacgcggacaacaaaacacggagaccccgggaggggagccatcacaagcgcacacagagagacagacgagggaaacgccgccaccgatgagggcaggaaaccagaa

SEQ ID NO: 123233 - DNA, 356 bp, Glycine max
  unsure (1)..(356): unsure at all n locations
actcacttgacaagccctctactcaatttaaagattttacagaaacaatctcccagaaaatgtgggaagcactgcatgctgtatacaaaaattcttcacccaacataagaccctgaatgtactattcctgctcaatcggtgaagtcactgtgggaaaggctctcattgatttgggagccagtatcaacctaatgccgctctccatgtgtagaagggtagaagagttggaaatcatgctcacgagaatgactntacaacttgctagccgatccatcacaagaccttatggngtaattaaggatgttctgatangtgtgaaacatatggtctttccagctgattttgtgtcatggatg

SEQ ID NO: 123234 - DNA, 262 bp, Glycine max
cttgataaacctgttttccactttaccgcgcaggagatttgtaaccctttcaataatttgcttgtgcaacacatatagaacattcgacatgttatgaggtacatacgtgagcaagaacgatcacagctatggaggactctgtcaaacgtcccatacatggaagggtacacataagaaacgttgttttccacactgcaaccagatttgagagacaaaaaaaagactctcactgtatctatgttgttaaagtggagagcaatct

SEQ ID NO: 123235 - DNA, 493 bp, Glycine max
  unsure (1)..(493): unsure at all n locations
ntgtatctctatagatacccatcagatatggctttgatcttgtttacctaacgagatccatttgcaatttttccaagaggaagaaaggcaatgtcccaaatatctaacttgtgcaaagtataaagttcatttgtcatagtcttctgccaaaagggatcaagaatgacctctttgtaggaagagtgttcaatcatactatgaatgaaggttaataaaaaagctaaataattggaataaaatgaataaacaaaatctggtaattcaatggacttatagtcacaatgaggataatgaggagaagaatctacaattctaggaaggttcttgcngagccatagagatagaagaggcatatngaattgaagatctacttgtgtcaaacctgctaaactccacatcataatgttcagaactaagaacaactnnttcctcaaacttatttaanatagaagcatacaaaagagaggaaccaagcattcaacaatatgacaac

SEQ ID NO: 123236 - DNA, 296 bp, Glycine max
cctcccccaatttacttttgatgaggcgtgaatgagggcgatgactgatagcatcccgaattcccctgatgatgaatggcccactaaaactgaaaaaaaaatgtttgccttaacaagaatggcgccgaggagcctttgtctcacataggtacatgattgacaaagcggtccaaggaacgtttttccgccccagagaacgacagtcaccggtttatgagcattgtacaccaacagtgtttcgaagccctcatggatggtcttttgtacccgagcgacgcgtccatctcatggacgac

SEQ ID NO: 123237 - DNA, 418 bp, Glycine max
  unsure (1)..(418): unsure at all n locations
actcagctnggcggaacctcctccnnccttttcctataaataggctgaatgttgctattctaagggtcttggatcccnctgatgctgtatttcagctgttntgggtgaaaaaaattgtttccgtgaagaaaattcaagccgaggtgcttctgtaacgcttccgagatgtttccgtaagcaaatccgtgaaggttttcctccgttattcaccgttcttcatccgttcttcgttcttcaacgggtaagtttccaaatcgagcttttcaattcattctatgtacccgtggtggtccccatttgtgttgtgtacatttattctcgtttcatttactttccgtacccccttttgacgtgcttcagtcatttgcttaagtcattntctcgcctaaataanaaataaaataaatatccaccgatc

SEQ ID NO: 123238 - DNA, 410 bp, Glycine max
  unsure (1)..(410): unsure at all n locations
tgtggtgagacattctatagtaagggtctttcagatcatagtttcaggatgatgntngaagaatccctccttgntcagcaccaggaccccacgttttagctaaatgaaaattgatatctgctcatccactgcaggaagatataatgtattaataaaatggaaaagaaaaaaagacaattaccaacctgacaatgttaaaaagatcgtataactctgagcagtgtgagcaatcaagtgcatcctgccagtaatttcttgtcctgccatgacatatattggctgcgagagaacacagcgtaactgataccattgggttgtacgtgaaccatgggcagtggtaagccaccttcctgcagtactgtggatttggaatacatcgagtgacaaattaactgattaattaactgatg

SEQ ID NO: 123239 - DNA, 133 bp, Glycine max
gccagggcggaggagcgacagcgagggccaagggggcgcccacgaaaggacggaagaggcacggagacgccaccaacgacggacccaggagaccgccggaaaaggacaggagcaacaggcgcaccggaaagga

SEQ ID NO: 123240 - DNA, 271 bp, Glycine max
agaactgcactatgtaacaatcgcggctgtaacttgctgccgtttttgcgatccttgacattgagggtaactgtgtctgctttgatttgggggcagatactcggagtctctttctgcggcgatttgaggtgaacgtctgtatagcccatgattaccggccatactgacaattctgcgctgggagttgtatttacgttgatggatgattgaatgcctataacgtttgtagtatatgacaacggcctattttttaaagttgtggcaattgtgt

SEQ ID NO: 123241 - DNA, 447 bp, Glycine max
  unsure (1)..(447): unsure at all n locations
tcacanatccacaattccttanaataggcctaactcacaaaaatttcccaagtggagtcgccaactgtcacaacgtgcccttttgcgggcgagcgaaggcgaggctcacgggcgcgctttccaaaggaggaaagatgcacggagtcgccaccaacgtttatttgtggaaaacgtcgggaaaaccaaagaaaaccggtcaaaatgaaaattctaagttcgggagttgtatttacgtttgaggaaggtattagcacctctcacgtntgtctcaaaggacaacagcctatttttcagaattgtggaaattgtgttatcttaacttttagttctttntaatttttgaggtcgaaaaaagcggggctcttgctcctacataccctncatcgaagaggaaatcagacctacgtagttcttttttatacgtgaatcaagtgattcttttacttg

SEQ ID NO: 123242 - DNA, 245 bp, Glycine max
cgacccaccgacctcgccgaccccccccccaggcagcaacaccaaaagcaacgtggccgaaggcccataccgcagcaggcgcgacccccaaacccggtgaggagccacaagccccccccttcgcagaagacccgacaacccccccccaaaaacaccgaataggatggacccaaacaagaccacccctgccacgccgccacacgccatccccccacccctactcaacacaccccccccccgaaccc

SEQ ID NO: 123243 - DNA, 255 bp, Glycine max
agacttatttcatataccaaacgttaaaagtcattgccttacttcaagtataggcaccgaatttcagcccaccacatatttctttgaccaccaaagcaaccttataactcctataacagaaagaatgggaaaatgctttaggtaccattttccagagattaattaaatgttaacaggctatgctttctttatacgaaatgatgaagggatatgatcaatcgaatcatactctatcttggactatctgaacaaatg

SEQ ID NO: 123244 - DNA, 370 bp, Glycine max
  unsure (1)..(370): unsure at all n locations
cgggatcgacaaacccatggcatccctttatgatcttaatttatgatagtntcacttagtcatataccaaattgtaacaatccattgccatccttcaatagtgtacgcggtcagtcccaaagccttacattgtcttgctatgtagaataatcaaagtcttttaaaacaaaaagagagggaagaaccttaggatcaatattctagttgattgattaaatgtcaaatggctccactctcatcatacaaaattttcaagtgattaaatcaaacacaacatacactctgagggagtctctatacaaatttgtaaaaagataggatgaggtttcatgactaataacatcttttagaaagagacagtctatatgtg

SEQ ID NO: 123245 - DNA, 248 bp, Glycine max
tgaaaatggtcgacacttttcacactgacgagacgtttcgggggcatattatgaggcgaagcttgtattataaccccgaaagctccttacaagtgaaaaggtcgacctttgaaactgacgtgagcattcggggttctatatatgccacgcgcaaattatgcgcccgaatctctcatcacagtgaaatggtattaacatttgaatctgttgtgcgattccggcgcttaattatgagcgactccttatat

SEQ ID NO: 123246 - DNA, 328 bp, Glycine max
  unsure (1)..(328): unsure at all n locations
ctcagccataaatatcgatcgctcgaattaaacatcgganactgtctttatattcatatggccataacttttcacacggatgtccgattcgggcgcataatatgtcgagaggctcgaaattgaacaacgaaagctcttgagaaattcaaatggtcataacttttcacactgaggtctgattcatgagtatactatatcgatacgctcgaaattaaacatcggaaactctcgagaaattgaaatggtcataacttttcacacggatgtccgattcgagcgcataacatgtcgagaggctcgaaattgaacaacggaagctcttgagaaa

SEQ ID NO: 123247 - DNA, 210 bp, Glycine max
atgacaacctcaaatttgagtttgtttaaacttggtcatgcaatatgctataataaaactacgggaaatccagcaaacgcgtaagatataggctgcaaatgttttttccgtaacaccaatatcgcgattaaaagaaaaatactggaacctggaacgtgtaatgcgatcagcttctcctgacgcaaataaaggagagtatctatctatcaa

SEQ ID NO: 123248 - DNA, 336 bp, Glycine max
  unsure (1)..(336): unsure at all n locations
atactagttgacaagcgaagctagcgtctgttaaatcttggtcataaatcatgttaataaatagaataccagactttatgataaagagtaattcttcaactgtaaatgctgcataattaataccaatatcatgactaaaataaatatactctttcttgtcattgcgaagtgcgagcctgatttttaagaccaagaaatggaaagaataactatctatgattntaactcatcatttaatctatattattattattatttaacatatataattatcatagatactgttttctattatcttatgagaattgagtgtattatataccagtttatcacatc

SEQ ID NO: 123249 - DNA, 259 bp, Glycine max
gttatatagaccgacaagggatagggaacgcgattgggacttccattttacatgtccgtatgaagtctctcgctgggaatgtgcgcaaactgactcctaaggtcgttggaaaaaattttgcattgaactccagggaaacatgtctatgaaaagtttgatttcctgttcttgagtggaggccttgaacagtaaaacatgcgtatggcacaagtagagccttgcgactcttggtaagagactctctacatatactggcttt

SEQ ID NO: 123250 - DNA, 197 bp, Glycine max
ccggagcatgaaaaggagtgcgaaggaagactcaacagcaaaccggccacagcacaaaccacggaccagagagaggccaacgcagggaaagaacgaccaacaccaacgggaacagccgcgaaacacgccgaaaacataaccagcaaaaaaaagcccgagcgaaaggaaacgaaaccccacaacaggggaaggagggg

SEQ ID NO: 123251 - DNA, 191 bp, Glycine max
  unsure (1)..(191): unsure at all n locations
gcgtagaaacagaaaaaaaacgcgcaagcgggacacagacgacccaccccgccacaggaaaaagagaancagggggaccaagcgaccanagaccgcaacaccgcgcaagagaccaagcgaagccgagcgacgcccanngaagccccnggccggcgccaaaggggcccgccgggagcaccacgacgaacaag

SEQ ID NO: 123252 - DNA, 469 bp, Glycine max
  unsure (1)..(469): unsure at all n locations
taagcgtgatatcacatatattntaccaatattgttttgaaaaattctntactactntntcattgatgaattaatatctaataaatataattattcatggtgaccaactgaccattactccatcaacatcttattaacttccaatctcaaccgtgtgactntcatttcattctcttgctggcgccattgaatcccccctgcatcaccaccatgaacatttatatttgtgtcacaacctctatttttgtatacacttgttgttctgcattatatacagtgatttcaattgtcctaacaatattgcttattntctctaattaatattaattgctcttcatctagtgaccttaacgatcagtttatcaaacattgatctgaattctttttcacaatatntatcagctgtggcaatctgcatgcttangcagagaaaaaaacacacacaactagtcaattgctaaaatgggtc

SEQ ID NO: 123253 - DNA, 167 bp, Glycine max
  unsure (1)..(167): unsure at all n locations
aggaaaaaaaggagaaggaggaggggangccaacgcgggagcacaacagcgggagagccggaccccaccaggggagggagagccagggaaccacagaggaccacccgccccggccaaccacggaccagaagcaggaacgcggggcagggaacacaaaccacggaggc

SEQ ID NO: 123254 - DNA, 378 bp, Glycine max
  unsure (1)..(378): unsure at all n locations
ngagatgaggaagtgtagaagggagaaacttcctgcttttattcgttaaccacagagnggtacctggagatatgtcgcgggggtcaggagaccttgtngacgtcaagtggggtgctattgcccaaaaccaagcttgaccaatcctgacccaacccgggcatagtcggtcagtgagaacctgtgatgtacctaaacatgcgagctcctggcagtccacagataataggaacaaagaccacaacagcaggaggcttgtggtggctggccagctgtgaatattgtgtgatatatgggttgtggcctctggtaatcgattaccaaggggtgggtaatcgatacaaggcttataaatgaagacaggaggctaagatggtctct

SEQ ID NO: 123255 - DNA, 130 bp, Glycine max
caaagaagcacgaaggcgcaaagagagaaaccgaaagcacgaccaaaaacccacaaaaaggaaaaggggggaaggccgcacacggaaaagaaaaacgaaaggcacacccaagcgaggagaaaggggaacc

SEQ ID NO: 123256 - DNA, 375 bp, Glycine max
  unsure (1)..(375): unsure at all n locations
cctctacagccttgtatgtccatgcattcttatgatcatgcttcatttatccatgcgacaaanacatgggcatctttttgcatgatggtgcatatcgggttaacgaatgatagctcatcacctcttaaaaaagagaaggggggaaggcctttcatggatattaaaaatgatatgcacagtcaagcgaggaatctttgtcccattgctcttcgtgtcattaatcatagatcttgatcattcatcgcattctaatttgtctgagtaggttactaaagaatgctaattggaaacactgctctaaaacatgtgttcanatcaagctttntcattcaccaagaggttcatagatgctaaggttctgacttctcgcttatc

SEQ ID NO: 123257 - DNA, 328 bp, Glycine max
  unsure (1)..(328): unsure at all n locations
ctcagcttaannattgaataagaacgttcagaaactgttggtaatcgattaccatatatgtgtaatcgattacacagtgcacactttgaattcaaattctaatagctgttgtaaatcagttttggccactggtaatcgattacatcctctggtaatcgatcaccagagagtaaacttgttgaacaagactttttaacttaaaattcttggccaaacttgttactacttcagatggaatacccttcctatttaatataccccttttaagactctagagactgtcgtgatcatccatcttgaatatctttaatttctttgtcttgaataa

SEQ ID NO: 123258 - DNA, 187 bp, Glycine max
agaaaactaacgccgttaaagcaccctgagcaaaatgcccacagcaactcaatgagccccacaaagggacccaacagctgccaacagccaagacgatggacccaaaccaaccctgaccccctcccctataccgcagggagaccaccccaaaccaggcgctgcctctaggacaacaaacaaccatcac

SEQ ID NO: 123259 - DNA, 342 bp, Glycine max
  unsure (1)..(342): unsure at all n locations
accttgaaactaagcttgcacaaagaganaagagtgggttgttagataagaaattganttctatcttctttaaagcacaaagagcaaaatgccaacacaactcaattaaatcaaaaatgatatttgtaaaatcaaacaaccaaataaaataaacaaaacaaaaaatgaaaccctacataataaagatgggagaccaacctaatagagttattgctctaaatcaagatagaataagcatcctctccatctcgaaagagcgagatgcgagggtttcaaagtcgcaaggaataaaggtgacgaaggaatatgtttagcttgcatagagaaaaatgagtgagtcgc

SEQ ID NO: 123260 - DNA, 253 bp, Glycine max
aaatagaagccatccataggcaatgccctgcacagaaattttaaccttgggcataatagaacctcattcttagcttttcatggaatttatctaccgcctaaatggcttattggaaaccttgcgtcctaaggcattcaaggcacaagttaatatatgtatggagttacacgttgacacacaacaagatcccttgatactctatttctatgacgacgccgaagtgggtcactttcaggaaaaagcttacagacct

SEQ ID NO: 123261 - DNA, 513 bp, Glycine max
  unsure (1)..(513): unsure at all n locations
actcagctattctaacaggngtatctaaggaaaatgcttgttgtggaagataatatattgttacaaccatangcaaggcacanaacaacacataggaaccaaaggcaatagcagaaccacattcagaaacaattcaaggaatanaattaaaggcccaagaggccattgtcaagccttcgtacctaanggatttcgtggaaaagtgagtggaggcagggtgccctgcactgacacgcagcatgatcctcanattctcanattctgtttgtctgctgaggtggcacgtatccgttaaaatgcagaattncgtttggttgttttgtttggctttttccttcaaggcaaattgccaaaagcaccattaggaattgtagaatcagagaaaaactctatataaagagtagcaatggtacttaatggaagcagcaaataatacaaattttcccttcttaccttgtttcttgagacacctangtctcgaaagctnggttctttcgtacacataacattatg

SEQ ID NO: 123262 - DNA, 224 bp, Glycine max
acttcctatccgagcccgagggcctgttcaagctcttgcctaaggctagcgctaaccaactcttttttaagctaactgaacgacatcgcgtgagtcatgttaccgagctcacctgataggatgagttttactcttgactatgcgtttacaccttacaaggggaaagttctagattcggggcgaggtcgcatagcggttctgttgcgtgtgatgcttttgcggga

SEQ ID NO: 123263 - DNA, 450 bp, Glycine max
cgacagtattacaaatctcaatatatgttgccaagtgtgagtatgtatcttcatttggtaaaccatgaaacaaattgctctatattagttgtatcagtgaaagtgggtaagttaagttttgtgcctaaacctctggccgcgcaacacttgagaaatattacggcactggagtacttgagtaatcttccaaggtcactcgtcgaggttgctctttagccatgactttggcttcaaattttgctgtttgagattccttggatgtaggtgaattagaagatgataactcagaaaagtgagccttttcaaggattgatgctactattctatcgtgcaaaagctttctttttctctctgcggtgtctcttctaaaggtggcttcaatttctaaatccaatggaaccaattcacctgcaaaagatctacgcatgcaaacactaacagtaacaacag

SEQ ID NO: 123264 - DNA, 328 bp, Glycine max
  unsure (1)..(328): unsure at all n locations
gagcttctatggaggctggatctntgagcttcaatgatgtcctttatatggtgatttccaccatggagatgcagcggaagacaaaggagaagaagtgagaggaggcgccatccactatggaataagccatggaagaaggagcttcaccaccaagatgagccttggataagaagcttggagaggatgcttcaatggaggaaaagaaagagagaagggggcaacacgaaattgaaggaataaaagagggagagaagtggaacttttgagtgtgtctcataagactttcattcatcaaagntacaacaagtgttacacatgcttttattta

SEQ ID NO: 123265 - DNA, 273 bp, Glycine max
ggacatgtgcacaatacacggctaagagaattgtccactaccgccacagctcctgcacctggagaccagtaagtgctcccaagtgccaagcctcgtccccatcaaacactttggagccttatgcagtccttgtgaagaaacctcttatctgcaggtggaatgagaccaataccgagcccattatctgggcctgaaagaggagtacaatgcttgctcaatgacaaagacaccattgaggtatgatgcaagaggtaatgtcaccaacttgctatc

SEQ ID NO: 123266 - DNA, 481 bp, Glycine max
  unsure (1)..(481): unsure at all n locations
agaagttcaagttggccgctacacacgttctgaatgagtgtgccgggttacaggaagagaatgcaattaccgcaagagccctcgaacaagagaccaagagggctcgcaaggaagagtatggccggaacatatttcgcggagctctatggtgtagcaatagtgaactcaagttgcggagggaagaaagagaccagtcgcgagcccatagcatggttctgaaagaggagttaattgcttgttcaaggtccacaagaagtttgtctcagcgtttatgcgagacggagaccaacatgctagctatcatcgccaagtaccaagaagagttagatctagccgcgcgccacgagcataggatngcggacgaatatgccccagtatacgcggataaagaggctagaggaagggtgatcgactctctacaccaagacgcaaccatgtggatggatcggttngctcttaccttgaacgggagtcaagaact

SEQ ID NO: 123267 - DNA, 254 bp, Glycine max
tgctgtggagaggcataaagacctattggactaacaagcttgaactcttgttagtgggcgacaagtccaaaaaacatcaagttaatgccgagagtaccacacgctgtccttcaaaagtgactaaggaatattgcatacctatcactgtcaaagctcctcggtggtccatgaacccgcactatttctttgaagagcaaatggtgcacatgacgcgcgtcatccactttcttgcaagggatgaagtgtgccatctt

SEQ ID NO: 123268 - DNA, 479 bp, Glycine max
  unsure (1)..(479): unsure at all n locations
tacggacactatgaaactaagcttacacaatntatgtttctcanacttgaacacctcatcataattatgttgtggagaggaaaaatagatctcttgaagaagaagctaatactcttctaaatgaaacaaagctaccaaagtacttttaagttgatgttgtgagtactatatgctatactttcaactcttataagacatattttaaagaaaactccttatgagctttacaaaggaagaaaacaaaatatttctcatttaagggtatttggatgtatagatgctctgttttaaacaatagagaggaatctctttttaactagatgattgagatgatgcatgtttacatgcgtagccctacgatgccatagccaanaatcatcaatcttgcttaccacactactaagttcatgaaatgatgcatgttncatgttaagcatgtagatattacctattcttttacttatatgaacaacctcacc

SEQ ID NO: 123269 - DNA, 374 bp, Glycine max
  unsure (1)..(374): unsure at all n locations
gatgagcagagtccattgtgtaaacaaagcatcttcctcttggaatgaagttgcactgtgtgaaaagctagcaattggttcaattaaactagaatttaatcgctttttctctcgttgtaaacagtaatgggatgtgctctgtctctgtagtgagattatgtatgtacatgacacgggattcttagctattacggaagcaactataagtattaatttccatttattgctttgtcgattggacttgactgaatgtctccttggacccttgtcanaattgcatactgctctctaaaaaaggatgatcttgtagaaaaaagagtgggggccagagacaagcttgagacagttcacagtcgggtataatagtttatact

SEQ ID NO: 123270 - DNA, 399 bp, Glycine max
  unsure (1)..(399): unsure at all n locations
taccatggattntgagattcacaactagcagcacaaatgcattgtattcttcacaacgaancacgaactgtcacacgtaagagcaaagagtaaagtaagggtacactagactctctactctattactcccatgtatttatccccgaatattatagaccaacatcactctcatgtgggtcccactaatgtaaaatataatcatctcatgcatatgtcgagagacttatgcctctgcctttcaataaagcgtgcaattggttgagattcacaactagcaacattgaggcatcgctagcaacacaatgaagtactcattatcacacatgaaagcatagagtaaaagtcaggacaaatgggactctntacatcttagccgccattactctcatattcacccat

SEQ ID NO: 123271 - DNA, 334 bp, Glycine max
  unsure (1)..(334): unsure at all n locations
cagcttcttcccaatttctataaatagggggagaagagaagtanaatatgggtttttctctntggcacttctctctctattcgaattgcttacgaacactgtgccatgaagaagatacatgccgagacgcttccgtaacgtttccgtgagtgatttcgcgaacattttcgaccgtgcttcgacgttcttcattcgttcttcattcggtcctcatcgntcttcagtcttcgacgggtaagtacctcaaaccaagcttttcaattcattctatgtacccgngggggtgcacatttggtttcatgtatcgttattctcgcttcattcactttttata

SEQ ID NO: 123272 - DNA, 271 bp, Glycine max
gaagaaaaagaaaaagagaggaaaaaaaaagagaccaaccccccaaaggaggaaagaaaaaaaaagggagaggaaggaaaaaaaaagaaaaggcggaaggaagaaagagagaaaggaggaggaaaagagagagaggaagaaaagaagaggaaagaaaagaaaaaaaaacaaggggaggggaggaaaaaaaagcgaagaaaagagaaggaaaaaaaggaggacgagggaaaaaaaaaaaaagagagggaggagcaaaaaaaggagagaaaaa

SEQ ID NO: 123273 - DNA, 485 bp, Glycine max
  unsure (1)..(485): unsure at all n locations
tctccagtgatttcttcgagaggatctcttctggcctctgcgactgcactctacggagagnggagtctcagcgtgaaggaggaaaacctaagctagctgcttctgctaatactatgaaccattgcatgaaggaaagagtgagatgtggaggaatattcagtggcttcgttatgaattcgtcttcatcaacaacgtcttcttcgtcttgggtttcttcttctgttgatgatggcagaggaaggagttggggttgggcgtttgctagtcctatgagagctntcaccaccaaagggtctcctccttcttcttcttcgaagagagatgcttctgataagaacaacgccacgcctaacttatcagccattcctaccttgctcactggtagaggctgaaagaagaataaanatgataaactattcggacgctttatttatttggttatatgcacatagcatgctctgttatcttcgtaatataataatgaa

SEQ ID NO: 123274 - DNA, 177 bp, Glycine max
acacgaaacaccggtgatattctcagcgagaattgtcctgttcgagctgagatatcagagtctacaactgggcataatgctcttatttcaaagatgtcactgactatctaggactcactgtctatggaataaattcaataccaaaggtccttgcacttttctctgctaacccgaaat

SEQ ID NO: 123275 - DNA, 478 bp, Glycine max
  unsure (1)..(478): unsure at all n locations
acactcagatactaagctcgcatntcagacaatagttatcttaagcatgagatctttaccatatctccttacganacaccgacgagattctcaacgtgttcactcctgatcaagcagagatatcagagactaaaagttggcgaagctcttttctttcaaagattccactgtgtctctaagactcacttcctaaggaataaattgcatccccaagggctttgccttctctttggaaacctgaaatgttggtacataaggcttatacgctgcacacctacatgaatgagaaaatgctattagtcttagaaaaataaaaagatagtttttggcacaagaataatattcttaactataatattgcatacaaaaaaaatgacctttttcattcaaaatgatggccattatgttcaataaccaataatcaccatgatttatacctcaggcgagactcacatcggttaatacccaatatataaat

SEQ ID NO: 123276 - DNA, 253 bp, Glycine max
gtgactttgatactgagatgatacttgaagagtgcctaaaaactgtacatgctgtaaatggaccacgcaaccccttatctaatcttgtgtgggcgacatttgtctatatgtatgatatagccacccttgggagagaggaagattatctgttcacaaaaatgtgggattacttgagctatgaatggcatctatgagctaatcttattgagaaagacacaggtctttccttggatggggtgatttcaaacgttgc

SEQ ID NO: 123277 - DNA, 436 bp, Glycine max
  unsure (1)..(436): unsure at all n locations
ctcaagctggtgagatgtctctcaatcaagttcctgtgaaagaaagaagcataatgttgttataaaatactgagattatgttgaaagtgtgcatagaagaggtgaatgctggaaataaacctcacaaccacttcactaagcttggttgggcaaatattgcagaanagttcaataaggcaacaaatttgagatatgaatataagcaattcagaaataggtgggattctttgaaaaaggaatggcaattatgggctaagcttattgggaaggacacangtcttagctgggatggggagaagaaaaccattgcagctagtgatgaatggtgggaagccaaaattcaggtatgtgttattcaacgaaaaccattgcaaccttcttttggtcttctggtttttatgtgtgattctcgattntgaatttgaattttatgtgt

SEQ ID NO: 123278 - DNA, 245 bp, Glycine max
cataaacatagatactgccgatccaagaagtaggatttatgcttaggaactagaactgatatactacaaaacttgatttgtccagcctatggaacaaatggactatgacataaataagtcagatacttcgagggcttatcagtaaaaccgactactggggtaccggtaccatgggccaaccctgttcatatgactcttaaatgggggctttagctcaagaaatcaaatatgacaggctataaacc

SEQ ID NO: 123279 - DNA, 487 bp, Glycine max
  unsure (1)..(487): unsure at all n locations
ctcagctatgttattgaggaatgcattctgcagttgaatggttgcagctgatatcattntcaaatatcttgaggatataataatttgctcttatgtttaggaactttcactactctataacaaaactaggtttgtaatgcctatgtttcaaatggtctatgcaatatttaattagtatccttcatggtctttccagtagagccgtcaaattgngttccggcccatgggccagcccggtccactgcggattagaggtgggtcgagctcaattaataaaaaaggtaccggcaatttttttagtccgtcccacctaattcgcgggttaagtgggctcaatccgtgggttggtggatcagtcccgcaacccaccacaattaaatattattctatgttatttaactattattataaatntataattattaaaacaataaacttttatattgtagatagaaattcaagtgacaattcacactcagtagtatag

SEQ ID NO: 123280 - DNA, 251 bp, Glycine max
tgcagggaaagcaccttccgccagtgttttttgttacaacaagagcaccgttgatgtatatctgaccccaattctggcttacaaaacccaccgcatgaacctgtagtggttttttgacgcagaaaatgctggcgactgacaaaatccaagagcatcaggtgtttaatatcgatattgtacaatactcggacaatcactaaagacgcttctcactgacaaggttgacctgttagggagccccccgaagagat

SEQ ID NO: 123281 - DNA, 334 bp, Glycine max
  unsure (1)..(334): unsure at all n locations
nggctctcgctactgcgtgaaggacctgaagacagactntgcttcttgatttacagggcangcacactacagccgtgcgttttgtgacancctgagcacaggtgccttagctcacaacccagctctgcgttccagaaccaagcacatggacgtggacttgtcttttgatcgagagaaagttgtggagaagagaatacaagtggttcatgttcctgctatcgcatattgatcgctgtgcagacattcactaagactactaccccatctgagttagtctgttagggacgagctcatagtggagacagagatggttctacccctcaggagcttggca

SEQ ID NO: 123282 - DNA, 264 bp, Glycine max
taaagttcgtactgatagccaaatataattagcgaggaacgttttttcatgaagagagctaacaactaatatttcttttccttggatctcatttcattgattgaaggaggaatgaaagttattctaattgtaatatgagagactgtgagccgctgaaaaattttcggatatattctgaatcttaccgtgactagaagcattgcactatgtcttgaaacaaaatgaacagcatgaaaaaatttgctacgaaccacattttatttt

SEQ ID NO: 123283 - DNA, 477 bp, Glycine max
  unsure (1)..(477): unsure at all n locations
ctaagctttctatagttttacaaacccagttgttgtgtttagagaaaaataaagtttttactgatgccaattatatattaggaagaacatagttaacaagaatgtatcanaatacanataaagttatccaggagatttatttcagttgattaaataatgaataagagttattctaattnttntagtaatgtatgtgaattgttgtaaattttttggtatttattttttatttttactgttaaaaaaaataataaagtttgtattgaaacttatgaaaaattatcttaaatnttgctactaaagtcttaattaatcgtgtatataaaaactggttatgcaataattagtttgcggtttgtctggttatttatacaattaatctatttctgtngaatattacaaaagacaatactccatcttagtggttacgttatnnttacctatttatcctctaatgactaatctatatatgtaact

SEQ ID NO: 123284 - DNA, 241 bp, Glycine max
tgcaactatgatggttggcattgaactcacaattcgcgtgacgagaactctctaagagcgacaacactgctcttatataaccattggatggagcgaagaacatatacaggacatgcagtctgctgctataggtgggtgcgacccagatgcaataccctgacacacataacaatattcagattgcgcgtactggattcaatattattgatactctagccctgtgtatagagagattgatacc

SEQ ID NO: 123285 - DNA, 483 bp, Glycine max
  unsure (1)..(483): unsure at all n locations
tgtcaagcccnncgagcctagaaagtgttgtctaaactgcttctatctatttgttcggggtggacatgcttttgggtttgtatgcaagatctaacgagtcangtgagggaagtctctacgtttgacaactctgcacttttctaaccattggagggtgcattgaagatagacgttacattatgtctgctactataggtgtgtatgacacataggcagtactcttgcatacgtgtcactcatggagtaagcacatactggagtcatggtgtatgggtgagtggggctgcgtcatggtgtgaaattntatggcaccacttcattttctactagttaccagagactctgtctcctcttcaaatagaggggatatttgatttcaggtcaccatgcactgtgattcctacctctttaatcttcnttgctttcactcttaccattccttttcttcttcatacaccttctttgatccttcaaagtattctc

SEQ ID NO: 123286 - DNA, 226 bp, Glycine max
agaggacccaacacatgtgggcgaaactacacgcaatcacaaaagccaccgaaaatcacaaggggagggcccagaaactatcagcacaagaaaaccgcgccgatcaaagcacaaagaaccccccgaaagacaacttgaatcacagcccggacacgaccaagcgacgaaaagcctaaagcagaaaggtgaaagcgcacccctgaagggaaggcatacactcgcagag

SEQ ID NO: 123287 - DNA, 406 bp, Glycine max
  unsure (1)..(406): unsure at all n locations
gtgcctntagcgctggtacctcatcactatcttccgaagctttattcttattgtctctcacgggctttagatttgggagccaatccaatccttgtgtccggactctcagccacttatgatagccgncgatgatcccattactgcttcccctaagctctctgtcctttcttcatgccgcatcccatgccttgcgaactccttggagtacccttgcgttgtagtcactgaaaccccgtgcgatgaaaggcgtgatgctttcgtctgatggcactcctctcatggggtagccatgctgtcttatggcgaggacaggattataattaatacaaccccttgttcccatcaagggaacatctggacatncttcgcatgaagatagaatcctgattcttccttccttctagcg

SEQ ID NO: 123288 - DNA, 501 bp, Glycine max
  unsure (1)..(501): unsure at all n locations
taagctccttcaactgcacaagactcttaatatttgaagagtgttcttatggaaccttcacctgacgaagacactgacaaaaacttatcttctccttcttggacaaagtatggcaggctgggggcaagtaaatnttcttcccatcagaccttggatgcaactgtgatcgtatacccatatcagctagatcttgacgggtattcaggccatccttcgtcttgccttgaatgttaaggagcgtcccaatcacactgtcacaaacatttttctccacatgcataacatcaatacaatgtctaatgtcaagatcacaccagtacggaagatcaaagaaaatggacctcttcttccatatgcagctctgactnttatccttcttttgggtcttcccaaatacagtattcaggtgttgaacccgctgatatacctgctcaccagtcaatggtatcagcgcaatatcatgctcttgacttctattannaagcttnttcagtcgtctat

SEQ ID NO: 123289 - DNA, 487 bp, Glycine max
  unsure (1)..(487): unsure at all n locations
tattaggacctatgaaactcagcttaaaagcattctggtcatcttcctcaatgagcactccatatctagtttcagaggtaaaatcaccttttgcttagtgaattacattgcacattattgtagcacaccttttaatgtagaaagaggttttattctttgacttccttcacttcaatagatcctatgaagaatatgctagtatactctacacaaaggataaaacaaatagagcattaactcagtcttaaatgcttaagatccagctnttgcttggctaccattgatacatcatcctaaataaaaagacccaagtccatttgggtacatacctaaagataagataattcttgttcgagatatgcttgacaacatgaaagaaaccccaatatggtagtggctcctcataacacttgacacgagaaaggtctatgttccaagaaccttgtcanagaatggtggatcaagtgaatggtcctatagaatatat

SEQ ID NO: 123290 - DNA, 491 bp, Glycine max
  unsure (1)..(491): unsure at all n locations
tcttttggaccttgaacaagcaatcaacttctcattcagaaccatgctatgtgttcgcgactggtctctttcttcccttcgcaacttgagttcactattgctaccccatagagccccgcgaaatttgttccggccatactcttccttgcgagccctcttggtctcttgttcaagggctcttgcggtaattgcattctcttcccgtaacccggcacactccttccgaacgtgtgtagcggccaacttgaacttctccttggcaagatttgcctttcctaactcgctnttgagagcttggacttcttcgtcctcttccggtgcttcaaaactctctttgctgacgactnttaacttggcgagccaatctaaacctcgtatatgaactttcagccattcgtggtacccaccaatgatgccattacgaatgcctctaagctcttgatctttctntaacggngtttcccacgccttatggattctttgatagtctt

SEQ ID NO: 123291 - DNA, 477 bp, Glycine max
  unsure (1)..(477): unsure at all n locations
ntattntatatattntaatcttactttctataaatttctttattcataanaaatgaactcaagtattaagagtttgtaataatntacgcatatggttcaattaattgaactaaaattcataggaatggatgtcaacacgtataaggcatctatgtttctttgttaaccacacataaaaaacaataaagacccattggttacttctaattcatctatttgttttattcctttatcatttttttgcacgaatgttcttttcgtttggaagtttttcttaattaacctcattatcatgaaactcaaacgagtgactttgatttagaaattagcttctccaccaaattttttatgttgaccaaaagtaaaatgctcattattttcactttcattaatcaaattccggtctgttttgggtaattntataacagcanacgcaagcccatacttgaaaagcacaccaacgcaacattggtaaat

SEQ ID NO: 123292 - DNA, 354 bp, Glycine max
actaagctcttatgcaggcacattcatggaggcgaagctccttcttccattgcttatacccaagcggagggtgattactctctcctcttcttcttcgcctttcgctgcatatacatagttgaagaataccattgaaggacctccttgtagctcaaagatccagtctccatagaagctccacatgcaagcttccatcatctagtgtcaacggaaactgtcttgtgtcaacggagaatgctcactgtcgatggtggtacactatatgaaaagctgcatgattgtgacgcatgtcatacttcctcaactcggacgagtgtagattacgcttcttagagatgcttggggtggacatgc

SEQ ID NO: 123293 - DNA, 274 bp, Glycine max
ttgctgttttattaattccacaacgaaaggctcttgaattttcaccagagaatttctggatgttactagatggtgctcttgggttcttactggtacaaggatgacgctcgcgtggacccgaccctcactaatatccggaccgtgaaagaagcctttacctccgagtacacttcatagttcccaaacatatggtgacccggaggaaacattcgtccgggaaatttatgggactagtaaatacaaatgcctgtggagaacatcttgtgggctacca

SEQ ID NO: 123294 - DNA, 441 bp, Glycine max
  unsure (1)..(441): unsure at all n locations
tgctgtgaaattaatttcaaaatgatatgctttataatttaaccagagaantttcgtttgtaacagatggatctctggtgtcctcgttcttgaaggtatgtttctcatgtggggaggacccaagccaagttccagaaggtaatttgagtcatttcaactggatatctttcatttttcccagacattgctgaccttgttgagtaaattgcccgtctaattttttggtaatttagatattcatgcctgtgtttcggctgttttgtgaattcaacatataactattccattcatcttcttagaacctgctcaaaactcggttaagtacttaactaggcatangacggtgtcatctcgatcctcctcatccagaaaccctttatgagcaaactcaattgacaatgctgaggaccatgcacataatctctttgataattcttgtat

SEQ ID NO: 123295 - DNA, 274 bp, Glycine max
agggggccaagggaaacatggatatacgccaagcaattgaggacatggaatacgtcaggggagattggcatgaggttggggaattcatctgtaggctgaatgtaagtggctaaggacatattgctcactgtcaattgcagtgagacattacgagtatatgagatacatgcatctattaaaagggacaactggaatgcgcgggaagacatgggggaagcactaggaaggttttaaaccaatacaatacctctaaatggtttgaacaaaacatttg

SEQ ID NO: 123296 - DNA, 310 bp, Glycine max
gtgctgagttgggagaggttgcgattggaaacatggagagactcgaagcacttgctgttatggaattcttcactgctgtttggcatgtggctgggctattatatctgtattctgtatgtatgcggctaaggtcttgttgttgattgctggctggcgtgagactcaccgatttcatgagtgagatgatccagcacatatatactacttttatatgtggtatgacatggcgtgagcttaataattttaaaacaaatatttattttcacagataggctctgaaataactgtgaatcataattgttgcacaaac

SEQ ID NO: 123297 - DNA, 295 bp, Glycine max
tcgaaaggttgttacatagaacaccctgtgagtaatcgagaacagacctacacactcccttctcaaaacacatatcactctacgggactaggattcttaatgaggtggctgaagaagcttgagctgaggagacacactccctctctaatttcataagcgtgaccttgcttagaggatgataaaccagagcttagcgtctctcccggactacatgctgaattcaccgcgctgacgtcatacatggagatagtggatatcccctcgacttagactactcacaatgcctagacttaca

SEQ ID NO: 123298 - DNA, 425 bp, Glycine max
  unsure (1)..(425): unsure at all n locations
ctcttgagagaacttccttgagaagcttctntgaganaacttccttgagtagctagagcttagctacacacacccctctcataactaagttcacctccttgagaagcttccttaagaagattcctaaagaagctagagcttagagacacatacctctctaatagctaagctcacctccttgagatgagaagctagagcttagctacacaccccctataatagctaagctcacccncatgacaaaatacatgagaataaaaaaaatccctactacaaagactactcaaaatgcctcgaaatacaaggctaaaaccctatactactagaatggccaaaatacaaggccgcaacgaagggaaaacctattctaatatttacaaagataagcaggctcatacttagcccatgggctcaaaatctaccct

SEQ ID NO: 123299 - DNA, 326 bp, Glycine max
  unsure (1)..(326): unsure at all n locations
ggagattctctaaaactcaacctctntnttaagcttaccgattttttattaagagattttcagaacgcagtggaccatcatgtagggctgatgatatcccttagcgacctattaaagggatcactactcaaaattgatctggcatgtaaggcttgtaaaccattttttgacactcactctagggaatgcgctgaaattgttagaaaggcttgagcttcttgtacctcttggggaactatcgggaggcggacaacatgctgctagatcttatgctggatatgatcgagctctgcgaaaccctcaatgatgggcagaaagagcgatat

SEQ ID NO: 123300 - DNA, 475 bp, Glycine max
  unsure (1)..(475): unsure at all n locations
ctccactaagtttcctgatgccaaaaatgtcttttctgatcgtagtggtcctagatgtagggaagaatttctccaagagcaccctcttaaggtcatcccagctgaaaatggacctgggagcaaggtagtatagccaatcttttgccactcccttcagagaatgaggaaaattctttataaagatatgatcttcttggacatcacggggatttatggtggagcaaacaatatggaactccttaagatgcttatgaggatcttcacctgcaagaccatgaaacttgggcaacaaatgcattagtccagtcttgagaacatatggaacaccctcatcangatattgaatgcacaagctttcataagtgaaatcaggtgccatccatctcctaagagtcctctcacaaggtgganggtgagccatattntcagtatgaaaattaatagccgaatgctcaaaatcagaatattcagaatc

SEQ ID NO: 123301 - DNA, 237 bp, Glycine max
atcttattgagctgatgaattctaaatgatcgacggattcaagaacaccccggctgtatctatagacggacacaatcttagagtgttgccacaaactgtgaaagacgggataatttgatttctgtcttccttctccctttgttcttgcgcgccactatatcacaagatatacctgtggccccaattataaagtggtcgtagcttgcattttgcgcattctaactgagtgaatcttga

SEQ ID NO: 123302 - DNA, 499 bp, Glycine max
tctatataagctgaaccattgtatcaataaacacacgttgagttttattcagataattagagtttatctcttttatcttagtgagtgattctcctaaattcttgagtgattcaagaacaccctggctgtatcaaaggactttcacaacctttgtgtgttgccctcgctggaaagagcgattctttccttcctttcatcttcacccttgttctttcaaaccacaattgcacaaaatacacctctgcccagaattatctcgtggccataacttccattctacgcattcaaattaagtgattcttgagcctaaattgaatatcaaaacgagacctttcacctcgttttggaatcacctcattcggatccctgtagcttcaattattgccattgctatatttgtgtccagccaccacttaacctacggtttaccattccattcattcattttatgccaagaaccgccttattaagacccacgagattaaccaccttatttttc

SEQ ID NO: 123303 - DNA, 254 bp, Glycine max
tgttaatcaagaaccattaattaaaatgcaaccatggctattgcgcatgctatattaggggagaactcgccgaatgataatgacgaatggtggctcatattctcacgaaaagaagactctttgatttccaattgtgctttcctgacatatcattacggggtgaggagaatcaataatttctttacacaatatgtcgaatactatgattttcactgcaattacccctttcttgaacatatactataatgcaaaga

SEQ ID NO: 123304 - DNA, 394 bp, Glycine max
  unsure (1)..(394): unsure at all n locations
tgagtcagattanngcattgagagttgttcactagctgtagctattgtctgcaattngtcgattactattagttaacatgcaatgatggcaattggagtttatatattatctntgtttttggtgaatattagggtcttattgttacaaatctcggatgacaagaagaaattatgatatacatctatttagcctgatattttctatggtgtgtgtggaattgctactttctttaanatatttattgattattatgtagttagctggatttcaaactctcattactttaagtattaaagtatgtcttttatttgatagtaattacttaataataatttacacataatatcttgtagcgcctggttctcgttttaatttgcatggttggatatgtcg

SEQ ID NO: 123305 - DNA, 279 bp, Glycine max
tttttaacgggaacacgggaccgcccaacaaaagctgcactgcgcttggcggagacgctctacaaagaacaattgacagctagtgaacattgatacggccgatgctgcgctgggaaagccgcgaccaaacaaggaaagggtactgagacataatgagacggaggaagaaacgccggcgtagcgccgatcaaaagagtcgttggccaaatgacaaaaaaacagtgagggaagatcaaggcatgaggataaagtaggacggccatcacaaaattagacgag

SEQ ID NO: 123306 - DNA, 447 bp, Glycine max
  unsure (1)..(447): unsure at all n locations
ngttcttgattntntctaagttctntaacaagctntgaacaatatacttgcccttcatttaactgtctctgcgcttggcggtcacgctcaacaaagtactttcgacacctactgtacgttgatttgaccaatgctgttatgggaatgttgcgacaatccttcaaaaccttattgatacattctgagaggttggttgtcatgtggccatatcgacatccttctctatcataagccatcatcccattttcctttgaaattcgatcaatccatgtggctatggctggactcagttcacgaaatttttctaaattntgatcanaaatgtgcttgcaaggagtgtaggctgcataaaattagttatgaataacatggataagtatatatgaaaggtaataaatgggaccatcaaatatgaaatcttacccaattcctcaacatgtctttttg

SEQ ID NO: 123307 - DNA, 340 bp, Glycine max
  unsure (1)..(340): unsure at all n locations
actcaagctatatcacatgaatgtaaagagtgcattcttaaatggctttatctcttattgtgtatttgtagatcacccccctagattcgaatactcacataagcctaaccatgtctttaaataataataggctttatatggcttagaacaagcctctatggcttggtatgagcgcctgagtaagatcctcttagacaagaatttctctcnaggtcaagtggatactactcttttcctttctaggaaaataaatgagattttattagttcaaaactacgttgatgatattatctttggagctactattgcatctgtattgcaaagaatctcttattacatg

SEQ ID NO: 123308 - DNA, 399 bp, Glycine max
  unsure (1)..(399): unsure at all n locations
cgcgcggccatcaacananaaattgatttaagttacttgggcttagcgattcagcctcgcttatccataggtagttcaacaagaggatgagtgttcatcctcaaaaaatgaactcgcttagcgcggtaagcgcgtttagcgagttcatcgcgttttccagaaaacgcagaanacacaactcattntctcgcacttttcaagcctctaaatggcatattagacttgcaatgtgtgcgccatactcaattcagtatacaagcttacatagccctaatcttanactaaatctaacaaaacataaaaaccctaataatctaaagctacagttgaagttttctaccctaaagttaagacatgaaanagagaaaaagaatcaaggaactaacttggatgggtaat

SEQ ID NO: 123309 - DNA, 281 bp, Glycine max
  unsure (1)..(281): unsure at all n locations
ggcctgcccggtgcagcagaatgatggctcgagctatgttgtggaacggntacgaacccggaatgggtgtaggcaaagacaacggcggcataactagcctgataaatgccataggagatcgtgggaagtatggggtaagctatatacccactcatgcagatatcatgagaaacatcgcgggaaggaagagcggtagtctaagctcgcggttgagacaacaatgtgaaagaagcccaccctgccacataagtatgagctttataatcgcacgtctgggggac

SEQ ID NO: 123310 - DNA, 351 bp, Glycine max
  unsure (1)..(351): unsure at all n locations
actaagtatttattacctatacttaatagaaaatacttataacactacaaaataaccataaattaggagaggttgataaaatttatacaaagtttatacacaaaagttagtcattttcaccgactaacagtaatcaacctggacatncaagagttgattgggccagtttcaagaaaaagaatggagaagtctgacaagaaaaatntcaaagacaagaaaacaaagaaagcttacatcacttgtgaagataacgatatagattcatcaggagattcagaaaantaagtcatgaatctaagtctcatgggcaaaaactatgatagcgaagaagaaggaacatcttctaacaat

SEQ ID NO: 123311 - DNA, 249 bp, Glycine max
  unsure (1)..(249): unsure at all n locations
actatagcatcatttctggcgctaaactgctangagttggaagccatcttctcaattaaatntctggcttcagcaagagtcatgtctccaagggctccaccactggtagcatctatcatacttctctccatattactgagtccttcataaaaatattggagaagcaactgctctaaaatctgatggtgaaggcaactggcacatangtttttatatctatcccagtattcatacanggctctctcacta

SEQ ID NO: 123312 - DNA, 147 bp, Glycine max
cttcttctctgctcttgactatcgtctagaagagagctgtctcacttgtctgtccctaagtctattcatatttaacctatgtgtagcttagcagtaaccttctgttagcaaacgagcgacagactagctttagtaaagaatgccact

SEQ ID NO: 123313 - DNA, 314 bp, Glycine max
  unsure (1)..(314): unsure at all n locations
tattcctatggatgggcctcctctctctttctttgcttcactgcattcatggggaaataccatgagactatgactaagatcgctctaaactccagaactnctatgcatcgtaaatctaggtttagcataggacataatgaattatgaagataagtatgggcagactgagacccggagtaagatactatgtactgtgactacaaatagcaatgacatttatgatttggtgatggtaggcncattcttctcacatcatatttttacccatcatttaaaaaaatcaagttcctgtactcttgttgacgccttatttc

SEQ ID NO: 123314 - DNA, 314 bp, Glycine max
tcgaacgttccgtgagtgattccgaggtttcaccgtctcacgtcttattcgtcttcacattcttcatcttcaacggtagtcctcaaccagcttttcatcattctatgacccgggtggtcacattggttcatgtattttattctcgttcattacttttatcccgctttacatgctaaccatttattaagcattcttgttaactaaaataaataatttcaccgacgttgattgatatctgtaacttgtgaataattcaccgactgcgtccgaaccacgtgaaccaaaaaagagtaatatattatagaataaaatcc

SEQ ID NO: 123315 - DNA, 65 bp, Glycine max
ctgtcacggcgtatcgtgtgcttttagagtcatttcatggcatgtttgagtcttataataattta

SEQ ID NO: 123316 - DNA, 542 bp, Glycine max
  unsure (1)..(542): unsure at all n locations
atgtaaaagtactgacatctgctgttatatacattanacgtagctntactcttagtaagaatattagaacaacacagcanacaaaacactttctatgcattgagcaaatgtattcaaaaaataattatggattagaactaagttttcacaaatcttaagcaagcatcagtaacatctttacctgcagcactagaaagaacccaattgtcatcataaggaactngccacacagcatagccaagtaacttaatttcccttgcataagaaaaccttcatttgacaacctcaacatcatcataacctatccaagtcgatccattggagaagtaattaactacataagtagcattgtacttgacatggcctncatattgntgaatataagccttgatgtccttatnagtcatagctccactntntccaattgctggacctgttgctgatgcacctattgcatttatctctgngttcctaagaatccaggcatatncatagaanggcaccnncaaccaacttgctaccgtactcactaccaatcattc

SEQ ID NO: 123317 - DNA, 339 bp, Glycine max
  unsure (1)..(339): unsure at all n locations
atagttcataacagtgtgtatactaaagctatcttcgatcgtgatggcattcaaggccctgtaatctgngcaaaatcttcaagtgccattcttgttcttgacaagaatgattggaggtgaaaaagggcttctgctatgggcaataatcccttccttgagcatgtcaactatcattaattacttcaatctgatccttttgcaccttcaaccaatgggattgaatgattgtgagttcttctatgggggtaaacctgatggcacaataacagactgttctatatatgtatagtatcatggccagttctggttcatatcatccgtatatctataactgatcct

SEQ ID NO: 123318 - DNA, 438 bp, Glycine max
  unsure (1)..(438): unsure at all n locations
tctcatttacgactaccaactccggttaagtattgtattcatctgtcgagctctaatctcaatttgatcgtctcaatatattaccccgattcatcggacatgtgacaaagacgtgatcgtcgatngaatcttctacgagtatccgtcttcaattcggagtgtctcgatatattacgggactcaactggacatgcgcgtgtagatgtattgacatatcaatttgctcagagcttctagtctcagtcttgagcgtctcaatatattaccagattcattcggacatgcgagtaaaaaagtattgtcgtatgaatttactacgagctttcggtctcaatgtggagcgtctcgatatattacaggactcaacttggcatccgcgataaagttatagcatttatgattctcacagcttcattctcaatttgagcgtccaatata

SEQ ID NO: 123319 - DNA, 376 bp, Glycine max
  unsure (1)..(376): unsure at all n locations
atcttttccattattcaatacgaaacatntacaaccaaagatatgaagatgtgagatgtntggttgtctaacattgaacaactcatatnggagtttctttaaaatgggtcttattaaagccctatntaaaatgtagcatgcagtgttaacggcttcagcccaaaagtgtnttggaagaagagtatcatntaatanagttctagcaatctctttccaagaatctattntccctttcaacaacaccatttgttgaggagttcttgtgtgcagaaaaatatgctcaatcccatgcttatcacanaataattcanattctttatnttcagactcacccngcatgatcactctaatagatataatctcgagattttcttat

SEQ ID NO: 123320 - DNA, 407 bp, Glycine max
  unsure (1)..(407): unsure at all n locations
ttgcaaaaataaaaaatatgctgtatacctaaaaatatctggaatacacacaagttctaatgcaaattattngaataaatagtcacttttgtcactgaatgtataatntaatgacanatgtgtatatgaaagatgaanatataatatntagtcccaaacatgtataatgtacaaatatatatggtagttacttttcatccatcanntcgtataaaataacttacgtgacacatatagacaaattngtgactgaaatgattgttatgtgactcatatgctagatagacgaaatgtcataatttctgttgaaaaaagcaatattttattgagaaaaattcataatttttggactaatgtagacgtccttaataaatgcatagtatatataatgaatatcgaattttatt

SEQ ID NO: 123321 - DNA, 376 bp, Glycine max
  unsure (1)..(376): unsure at all n locations
cgagcctctcgacatctaatgcgatcgaatctgacatccctgtgaaaagttataaccatttgaatttctcgacagcttccgatgttaaattttgagcgtatcgatatattataagcctgaatcggtcctcagtgtgaagagttatgaaccactngaatntctcaagagcttccgttggtcaatttcgagcctctcgacatattatgcgcccgaatcggacatccgtgtgagaagtatgagcatttgaatttctcgagagcttccgatgtttaatttccagcgtctcgtattatgtgagcctgaatggacctcgtgtgaaacttatgacctatgaattcacgaaagcttcgtgtcagttcgagtgtacttatgtgtg

SEQ ID NO: 123322 - DNA, 222 bp, Glycine max
  unsure (1)..(222): unsure at all n locations
caatagaagttcaagtccatagccatcaaagtctgaagagagtatgatgaactaanggacgtcaatatggccaccgctgaagccttggaacgagaaaccaagaaggcctgataggaagaacacgaccaaagcatagttntgaggggctttatanggcagcaatagtgagctcaagcttcgaagaagtgaaatgaatcatcacgggtcaaatgcatgatcttg

SEQ ID NO: 123323 - DNA, 200 bp, Glycine max
  unsure (1)..(200): unsure at all n locations
tctcagctgtcgctctttcgatctcctctctactcngtcnatccgccgttcttatttttttatcggatgtgaacaattcgcgaaattgatgcaatcttttgtctgtccgatggtgttccctttggttgttntaagatgaatctggttaaggatgtagcagactttgctttttttattgngtgagggttttcttactttta

SEQ ID NO: 123324 - DNA, 423 bp, Glycine max
  unsure (1)..(423): unsure at all n locations
ctcagctgtacgagcccaaatttctaatggtatatcacaatctttgttcgtcatgatgcgacaatatgttgaaccttggatctaactatctaagaattctctccatagntcttagatcatcaacatattcaccatttctcttaagttgattggtgactggttaaattctagagacatagttggagatgacttcattntatctcatatgcaatggtttaaacttggctcttaatgttntaacgcataccttcttgactgggatcactcncttgaatgtcggatgaagcttctcccatgcttcctttgccgaatatccttttganaccttctcacaagaattgtcatctaatccttgatagattagatagaaagccttcttgtctctcacatcatccgtttgattntgagagagactacccttat

SEQ ID NO: 123325 - DNA, 450 bp, Glycine max
  unsure (1)..(450): unsure at all n locations
tcattactagttgccaggtccactaagactactcctatgggctattgcttcctgctccctactntntgcttcatgtaccccatagggaagtaanaagacatgattggacaaaaattccaccacaaccttagcacttcctcttncttatgtactgcacaagcaccccttattctccttcttttcttccacctcccnccttngtcaatttgttggagaaggccatcganaacttggagagagcctntgttagggttctcaaccggatagccatctgatacacaatatgcattacanatcactcaacctatgaacttacttcatgactattcatgtaatatagttctatattgagcaatctgaatgcatcttgtgttgtgattaacaatccaaactatatatactntggatatctattcanaatatgtagataattttgattgatatctgtat

SEQ ID NO: 123326 - DNA, 307 bp, Glycine max
  unsure (1)..(307): unsure at all n locations
ttgaactacttcatatggatntatggatntatntggaccatcaagaactatgagtttagatggcaactactatggcttagtaattggtgatgattattctaggtacactttggaattgttcttgagaaccaaaaatgatngttttgatgctntcaacacactngccaaagttattcaaaatgagaaacgtttgaatatttgctcaattagaagtgatcatggaggtgaattgcaaaatgcgttttttgaagagttctctgaagaaaatggaattcaccataattntctcgtccaagaacaccttcac

SEQ ID NO: 123327 - DNA, 209 bp, Glycine max
  unsure (1)..(209): unsure at all n locations
atgcaaatcatcaagcctatgtatatgatgcctatatttaatggtgatgttattaatggctctacaatcagaacacatgcgccatgtnccanntccttttatggaccaaaatcactaggacagcacaaggactcatactatctctaccaccttgctatgagtcatcacttgctttaatctcttggtttctggaatactatggctggcta

SEQ ID NO: 123328 - DNA, 342 bp, Glycine max
taactaactgacttgaatttaacagcctaaaggactttaaactcaacagcatggatggattgaagatttgaatcgcctgtatcataccatagtgatcatacactccaatgacttattaattgaataacttaaacttgaatatcagatggtatcaaccattaaactaaatgtaactatatacttgaataaactagttaacactgtatatacacttggatcatatagagaactttgatattgaaactttctctatgttaacttagctattatagctttgattattattgattactatactactgattaatattaatactgactgatgtattattgcataaactg

SEQ ID NO: 123329 - DNA, 450 bp, Glycine max
  unsure (1)..(450): unsure at all n locations
aagctatcgtatcgatagatannntattttagacantgactgggttttcaggagtctctactttaatcaattaccaggtgatgtaatcgattacttctctcttaaaagtgtttctgaagtgatcaataacactntatcgattatatcaagaatctaattgattacattgctcttgaaagttttccagaatttgggaagaatactctaatcgattgaaatgataatataatcgattacttctttgaaataattgattacattgtatatgtaaatcgattacatgccgatataactatnttctctataaatagccaccttgtgttctcacttcaatgtggaacaattaagtgtgaaattatatgagttgaagtaacagataaagagaaaagaaganaagtgcttagatacaatgtgactcacaacttctaatcttntgttatgaagatcata

SEQ ID NO: 123330 - DNA, 303 bp, Glycine max
  unsure (1)..(303): unsure at all n locations
actcaggtgtctgantgagtctcgtaatatgttgagacgctcganatgaataccgaagctcagagcanaatcanaggacaataaccttttactcggtggtctgactgagtcccgtaatatatcgagatgctcggacttgaatgccgaagctctaagcaaattcaaacgacaataacgtattcactcggatgtctgattgagtccctgaatatatcgagacgctcggacttgaatgcctaagctctgagcataatctaatgacaataactntgtactcggatgtctgtctgagtccctcaatat

SEQ ID NO: 123331 - DNA, 419 bp, Glycine max
  unsure (1)..(419): unsure at all n locations
gcttgcggattggtcttgcagtgaaggatcatgtggtctgaaagaagcanattagtcatcctgcttggacgaatgagataactggtgcaaatgaagagggtgaggatgaaggagaagcccgtgctgtgactgccattcctatacagccaagtttcccaccaacccaacaatgtcattactcagccaataacaaaccttctgcttacacaccgcccagttattcacataggccatccctagaataaccacanagcctacctaccgcactgccatgacaacaccacctttacataaaccaaaacaccgaccaagaaatgaattttgcagcgagaaagcctatagatatcaccccaattccagtgtcctacgctgaacttgctccatatctacttgataattcaatgggagccataacccta

SEQ ID NO: 123332 - DNA, 204 bp, Glycine max
  unsure (1)..(204): unsure at all n locations
aagctttagtgtgctagtgctagactcctcttgtgaatatcagatctattatttaaagantgaagtattattgtgactatctgcattcanncaaattattgggaaagacacttgatcaaaaagtatgtggattgttgtaatgcatcaaattctggctgccttcctcttgtgtgaatggtttggtctcttttctacctgacaaca

SEQ ID NO: 123333 - DNA, 366 bp, Glycine max
  unsure (1)..(366): unsure at all n locations
atacangttgatgtatagntgcaccaagatcacttttatcaatgataatngatcattccccactccatngttaacttaaagcttaattagtttgttcccattaattatgttagcttcaatttcttatttaatagatctaccgctatgaacccactttaattgatagctttaacaaacaatatgaattgacttgattggttgggtctgtatgattcaaactatgataatatcagggtctggattgcatttctgaaaagcatacacttttgctttaatcatccatagatcactataactatcacacatggaattgacaatatgttgtaatgttcatcatcctatatatattgtataagtgctcatgtc

SEQ ID NO: 123334 - DNA, 331 bp, Glycine max
  unsure (1)..(331): unsure at all n locations
tactctcttgtaatcgaataccagaggatgtaatcgattaccagtggccaaaaatgagttacaacagctattaanattgaattcaaaatttcactgtgtatcgatacacatatatggtatcgataccaacagttattgaacgtntaattcaaatttaaagctcgtatcgatacacaatactgtatcattaccgaggagatttagaaatatctcacagcacatctttattgatctaatggcatcaagtattatttactgaacacattgctaagttcaaaggaagctatcttaaagcaaacttatcttacaatcttgcaacatggatatagat

SEQ ID NO: 123335 - DNA, 417 bp, Glycine max
  unsure (1)..(417): unsure at all n locations
ttatttntggcttatcttttacaactatttacattcatcttatcaaaaaaattatggtgtgcgacaagaatctattttntatgggagtaaaaaaatatttattctatatattcaattaaaaatatttagaacatggtatgaactaaataacatgtatgaattagactcanaattcanaagatagggttagaatgacaatantacatgaacatatatatctagaattcaatcaaaaaaataaaaattcaacacanacttagaacataatatgacaattattatgactaaacatgactctaagacaacatggattaagtgaattacacttagatntntgtggttctttttctaatcaatattgtggaagaaaaattagatctaaaggttcagtacangaagattatgactggaaaatga

SEQ ID NO: 123336 - DNA, 242 bp, Glycine max
  unsure (1)..(242): unsure at all n locations
agctcanagatcatagaacaactcaactgactcaagaacaagtcaagagttcaagaatcaagagggattgaagatctcaagaatccagatctagattacagactcaagattcatgaatgaagaaaagactcaactcagataagtattagagaggttcttcagaactctgaatagcacatgagtttctgacgaaatctttaccacagagtttttactctctggtaatcgattaccataatggt

SEQ ID NO: 123337 - DNA, 315 bp, Glycine max
  unsure (1)..(315): unsure at all n locations
taaagaaggtgaggatgaaggagaaacccatgctgtgacttgccattctgtacngccaagttaccaccaacccaacaatatctttactcaaccaataacaaaccttcttcctacccaccaccctattatccacagaggccatccctaaataaccacaaagcctgtctactgcacttncaatgacgaagaccacctttagcacataccataagaacaccaacaaaaaggtaatttgcagcatatagcctgtanggttcaccccannattccgtgcatatgctaaactngatcccatatncactcaataattcaatg

SEQ ID NO: 123338 - DNA, 350 bp, Glycine max
  unsure (1)..(350): unsure at all n locations
gtctttcttntgctaacatacacacttggtcaaactcatgaaaagatacacaaattccatcacaatcatgcattcaatccataatcacaccatacaccaatgttcacaaaaagataaaagtggtctacttccatatcatcnaaatcaagtcaaactgttccatatgcttcagaatgagcaaaccaattacccataaataaatatagccgtgggtatatacataaaagagatactgtactcgaaccataattatacatataataatccacagagagaaccaaaagcatcatcaggaatctagaattcctgtgactggtcttaagtgtcctgtgtctgcacatcctcctcat

SEQ ID NO: 123339 - DNA, 433 bp, Glycine max
  unsure (1)..(433): unsure at all n locations
tcatctcgtcaactttcagtattctttttcttttgtnntaagcgagtttgaccgatcgttcataccataatctcgcttaatcaccatttaaataaaantcaaccgattggttgtgttgtaatcttactttaatcaccgttaaataagtttcgaccgatcgtttgtgttgtaaactctttccatcaatgtanaataagatttagcccggtcaatattgccgcaagttatctttataaaaggatngaagaataatgagccacaaccaaatanaaaccaactcatanacttcttcatttcatannaaatcaagagatcgtttcaaggtccaacaccttaacgattctctcctttcataaatcaagagaatgttcaaagtcgttgacaattctcgcctgtcaaatctgagaagatggttcatggtccaatgccttga

SEQ ID NO: 123340 - DNA, 434 bp, Glycine max
  unsure (1)..(434): unsure at all n locations
cattatacanacttaggagagagagacagaacaccaacgaacccgagtaagactaaccaaacaagactaattctacgattcgttagcgacgccctctcccaaatcctctatctctctctaacacacacacttggttatataattccctctatcgacatttattagatatatcgaagaatgcggtatatctcacttagcactgacatattttttcgacgcactattagctagtttttgcattgcataacgacattcgttgtggacactgactactcatgatcataggtcgacagttttcataacgttcgatctaatttgtgcattgtcttgacgttgtgatgtataatgacttgcttaacacaactttgtcatatgaggaacctaatcccgtcgagatgatgcatgatctgcacagttgattatatcgatcatct

SEQ ID NO: 123341 - DNA, 202 bp, Glycine max
tcacctatatgaagagtaagtggcgccacttgtataggatcctggcaagatctctaacacactcatgaatatccagtgcgcatatgtgctcctagcacgacacaatgattataacatctagaatcgttggtgtgcatgtgaatgatagaccactgacacacatccaagtgtactgcgttcaataacttattatacgcactac

SEQ ID NO: 123342 - DNA, 522 bp, Glycine max
  unsure (1)..(522): unsure at all n locations
gctctcatatattatgcgcctgaatcggacttccgtgtgacatgttatgaccatttgaatntctcgacaccatacgtgtgttcaattcgagcgtctcgatatattatgcgcctgaatcggatgttcgtgtgacaagttatgaccatttgaagttctcgagagcattcggttgtcatttccagcttctcgatatattatgcgcctgaataggacttccgtgtgataagttatgaccattggaatttctcgagagcttncgatgttctatttccgagcgtctcgatatattatgcacctgaatcggactttcgtgtgacatgttatgaccattggagtttctcgagaggtcctgtgttcaattcagcttcttatatatatgtgctgaatcgacttccgttgcaagtatgccatttaattctcagagttcggagtcatttcagctctcaatgtatcccgatcgcttcgggaagtataccttaattttaagcgtgtgtatttagcgttaaatagcgccatgattcg

SEQ ID NO: 123343 - DNA, 162 bp, Glycine max
gagagcaagaaagctgctgaagcttgcaagatggtatgtgatgagaagaataatgctgcggaaaaggagaacgaaatgagtacatcgaatgagcttatataggtggagaatagaaaggatgattctgagaggaaggaagacactgatgtttgcaagtacttg

SEQ ID NO: 123344 - DNA, 266 bp, Glycine max
  unsure (1)..(266): unsure at all n locations
acgaatatgcncaagtatacgcggaanaagaggctagaggaatggtgatcgactctttacaccaagaagcaaccatgtggatggatcggttngctcttaccttgaacgggagtcaagaacttcctcgatcgttagccaatgccaatgcgatggcagacacctactccgctcccgaagagattcatggcgtcttggctattgtcagcatatgatagacttaatggcccacataattagaaatcgttaggaaacttgtatggtctctc

SEQ ID NO: 123345 - DNA, 413 bp, Glycine max
  unsure (1)..(413): unsure at all n locations
gtctgtatcaccccctagtatgagcactgtcacatttgttaagcagatctgataagttaaaacttaaaatatatgctctctaacttctttctgaggaaattataataacctctgtgtcatggtagggtatcttatcggaaaccctgatgcagatcattatagaagccatagatntaatatatgtgagccattgaaatcggcccttcattcctacaatggtagtgagaaatgtgatatataaaaccatagaaaatgggagatatgaagaagaacgtcatacattaaggcaaaaatatactctcttagctgaaaattaagctaatgtaatcaaaaatgggacatcttacctaagccctggtaaataataccttcctattaacgtatgtcttaactacattcgaaataattttact

SEQ ID NO: 123346 - DNA, 372 bp, Glycine max
  unsure (1)..(372): unsure at all n locations
acattcattactgaagatgtcaacttctggtatagggttatgccctttggcatgaaaaatacangcgctacatatcagagattgatggaccagattttcaaatagcagattggacgaaatgtcaaggtccacatcgacaacatggtcatcaaattccatagcatagcccaacacatggcataccttgaagaagtgtttgaagaaatctacaaacacgatgtgctccttaacctggaaaaatgtactttcatggtcggcaaaggcaagttcttgtgctttatgatcacacatcggngaatagaagccaaccncaataaaggcatacccatactggagatggatagtcctaccagcatccaaaaagtccaaaag

SEQ ID NO: 123347 - DNA, 388 bp, Glycine max
  unsure (1)..(388): unsure at all n locations
catatttcgatctgatgacggtgaatatgagaatataatcccatgcatcaaagtagtggtgctcacacaaggcacgatccaaacgcantgtcaatctgtggtgacataacgtaccattggtccatgtatattccacccatttggtggngatgtgggtgagctcattaatggaggatcaattatcaaaatcttgacaagagccattaaaggtggtcttccacccatattctaataggcccctaagacaagatagaaatcaccaatanatgtccaatgactagggtggctatgttgcaataaagagagcttctgtcacagtctgcttctttgaatgtatctcatggatctatagatacttaccatgtaatagacaacatcattgaaagta

SEQ ID NO: 123348 - DNA, 346 bp, Glycine max
  unsure (1)..(346): unsure at all n locations
cacttcgaatctaatggtgtcctatgtatgtanactgtcccacaaccncgatctttacaaatcacatncatatgtcattggngcatttcaccgagcacttggtgggcgcgtgttaggcataaattgcaagagaaatggggcaatgtggcatgccccattgtttcagagtaccacatangcctgatgccatnctctacaacccctcaactctaacaaattaagcatanaaaaccccataactgccccacanatatgagcacattcttacaatntagaagctccaaagatgaacanaatacaccaatggaaagcanaaactcaaggattgaatacttacttgtggatg

SEQ ID NO: 123349 - DNA, 360 bp, Glycine max
  unsure (1)..(360): unsure at all n locations
tgagagaaccatacaagttcctaacgatnntctaatatgtgggccattaagtctatcatatgctgacaatagccgagaagcccatgaatctcttcgggggcagagtangtgtctgccatcgccttggccttggctaacaatggngaagttcttgactcccattcatggaagagcanaccgatccatccacatgngtgcctcttggtgcaatgaatcaattaccctttccctttgcttcctttctgctgatatcttggcgtactcatcctctagcctntgctcgtgagtcgccgctagaattagcttctctttgcacttatcgatgatggccccacatattcccttcagtctcgcttaact

SEQ ID NO: 123350 - DNA, 383 bp, Glycine max
  unsure (1)..(383): unsure at all n locations
ttacactgtaggttcgtaactcaggtcttcacagtttgaaccgtgggaattgcanaataacacatnttgacatgcgctaagtgtagtttcaacccaagaggaatngcgctcaacatgaaatgtcgctctcagcacaaatcccagcccgagaggagttgcgcttagtgtgaaaagtcgcgcttagtgccaaaagtagattctcacttagcgagatttgtagagtataaatacgttattcagcatggataaacatatttcacgcctctttctctcaaaactccgcccaaacaaccctagaaactcctcctgcatcacccaagaccactggtggtcaccacgagttgtcgttgcttgcccatgaaccaccgcatggagaggaacac

SEQ ID NO: 123351 - DNA, 353 bp, Glycine max
  unsure (1)..(353): unsure at all n locations
atcacgaatatcgtctccctttccattatnnggggtaccacctgngccgccagatccctccaccttttgngcgtgattcttgaaagattcgtccncctttttgcacatgttccgtagttgcatcctatccggaaccatatcaaaattgtactgatactgcctaacaaaggcaaccattangtccttccaagaatggactcnggaaggttccaagttagtgtaccangtaacagctaccccagtaagactttcttggaaggaatgtatcagcaattcctcatctnttgcgtattnccccatcttctgacaatacatctttagaatggtcttgagacaagtagtccccttgtact

SEQ ID NO: 123352 - DNA, 488 bp, Glycine max
  unsure (1)..(488): unsure at all n locations
gctttacgctacccctgcacgctgctgagtgttttattgctgcctgcgaaaagaccaagcacccctgtatactttattttttttcatcattttgaagattaaagtcaaataaattgttctaatatttaaaaaatagctcgattttaaanattgagaaacttgttagtcattcgatatacttgtgggtgtcaacgtttgggaattttgtcattttactctttaaattctaaatgaatcctaaattcacgttatactaattattctttatttgatatcatttgacaacaatgagaatgtcacataggataaagagtgagttgataagactacaaccacaacaataataatattataattggaaagattagcaacanaatagtgatttgatagtttataacataatatcatacatagtataaggatatctatgagatagtgtatgaaagataagaagtgcggtataatatacataatatatatattgtatg

SEQ ID NO: 123353 - DNA, 386 bp, Glycine max
  unsure (1)..(386): unsure at all n locations
ttcaccgatcattgtgtgaatctcgttaatcactgtaaaatgaaatctatatcgatcgttcatgtgtaacctcggnntaaaccaaaaaggcataataataataaaataatcaaaatatctnttgataanataatcaaaaaaatcaatcggatggttttctttgaaagtttccttgaatgaatngactaataaccaaagtgaaactaaagctaanatcaactcacanatcaagctttgtccgcanaagtcacttannaaccgtataaggtccaacgccttaaaacgaatcctcttgctttatcggtaacatggaccgncanaaccatanaacaacacataactttaccgctntcgcaagaactacgtangtctgagttcctcatcac

SEQ ID NO: 123354 - DNA, 118 bp, Glycine max
tccttgatctgcttcaggatcatatgagacgtcatcatgcatatctaaatgtttgacggtcctggcctgcctgatggttctatatacggtatcgtctatagatacaagctagccttgg

SEQ ID NO: 123355 - DNA, 414 bp, Glycine max
  unsure (1)..(414): unsure at all n locations
tctttagttgaggaccaatgcttgacatagcttctaacatcactttcaaagctactcacatctatangaaagacnatcactataacattagagaaatacttgagtaaagattctattcttgacatatggtntggcctagtctaccatggtctntntgtaactcttctcttctttcattaantaactnntgctcaatntgctacattnatcgattattcagagtgggcattgatccccattgtgtngtcataccctgcatttatgaaagaattctttactangaaagcatctgntngtccctggtcgtgagttgtaactatgtccctgtgctaatcaacattattaaatactttnttataagcatcaatattattaatggatactacatatgatattctagctnttgtgtacatc

SEQ ID NO: 123356 - DNA, 325 bp, Glycine max
  unsure (1)..(325): unsure at all n locations
gagtccaaaagcacaatgagaaaactttcaatattgaactccttagataattctaatanaaaccctgccaggtccctatatgaaaagggatctaatatatcataaatataaataaagacaagacagtcaaagcacagtgattatgcatatgttgagcagtttgaggaagactaccttatattctttaatatctncagagcttcaatgggagtatttcaacatttngagactaagaaaatctcacagaacaaattacaatagaaatatagccagattcagaaatagatattgcacaatgaaaggaaattggatgaatataccatta

SEQ ID NO: 123357 - DNA, 312 bp, Glycine max
  unsure (1)..(312): unsure at all n locations
gtcttagtgaacaccatctatatatatcacgccaacactttcanaaatcacacattctctctcagaccaacttgacaaaccanattntacaacaaactatggcatttttgggagaaacaagtagtcagacgattgtgaactccagaatagcttttctttctccaaatggatcgattanttacaatgannactngtgttattttcaaagttccactccaatacccattcgagtaccttacaattgtggttttcanatgcaaaanagcagaatgcataataccattcagctaaccgatgatcaatatttggatg

SEQ ID NO: 123358 - DNA, 310 bp, Glycine max
ctcggcttgcacatcttatgcttctttgtctgacattggacatatggtgtctggcgctgcaatcggaaaaacgcctgtctactagtaaagtcacgactgtgaagattactctgctgaagaactgtggcttatatggctcctcgctaggagactgcggcatctactgtgattcaaatgaccgtagtcttttaagcagttacgacatcgccgtgcagtctgcttcagttgattatctcgtcccaaaggcataaggagccctacaatattgctacagctctacacatagcctgctctgattccgtagactatg

SEQ ID NO: 123359 - DNA, 375 bp, Glycine max
ctgctttttgctttattcaacacactttgtgatttataacgtaactgtacatggacttctagcctaattaatgaataagtgttgttcgatcataaatgtcccagataggactctgattctgattcaagtgttagttatgtccttgacatcctactggaaaagctggtgtgatttgataaccatttgtctttgatgacttatctatgatagttgctcggctataatgtgtaatttttagaaaatatcttgacatgaatgtgtctaaataggtaaatgatttaatgagaatataactctaggcaatcatatctaccaatctgaatgacttgattctcatgactattctcaggagttttgttgaatgaagtctttttt

SEQ ID NO: 123360 - DNA, 343 bp, Glycine max
  unsure (1)..(343): unsure at all n locations
actaatatatatagnnactactcacaaggaagggatgatcctngattagactcatgtactctaccanattaaaataattacacaaagtaaagtccaaagtcgtagcccaattattcaagtgcagaggttctgacttccaagtccaacttgatccttgaaatgatagaattagcccaagcttatctgtgacaaaattgaagaatttatttcttatctttgtagggattactcacacgctccatctggagttctgtagtatcttatanatcctgcacaaggaagatatgtcaagtaagcacaaaaatctgagaataagtcacaattattaattaagtccaatcat

SEQ ID NO: 123361 - DNA, 351 bp, Glycine max
  unsure (1)..(351): unsure at all n locations
agacttcaagatcaagcatcaagaatccaatccaagattcaagattcaagagaagaaatcaagaagcaacaagtcaagacttcatatanggatagtattaaaagatttnttcagaaaccaaatagcacaggtttggttttacaaaagaatttctcanattntctaaagttaccaacgtgattactctctggaatcgataccagtagcaatatcaataccagtgccagattgttttaaatatttcaatgattgaacattcaaatgattttaatagtgcatcgatacacttttagtatcgatacagtgatatgacgtgaatcgatcattggagagtacactttataaaacatg

SEQ ID NO: 123362 - DNA, 418 bp, Glycine max
  unsure (1)..(418): unsure at all n locations
ctatctntagggagtctaattatagtaataatcttggagatctaatcanaatatttatctatagtacacctaattaaagtaattatctntagagatcatattagaatatctatctatagtgtgcctaattaaagtaattatctttagaggtcatttcanaatatctatctatagtgtaactaaataaaataattatctttaggagtctataaataagatggtgggagttgtacttgaatacattcaaaattcaataattagtttaccgttttgagagggttttgagcgtttgaggcgtgggcatcaccgtgaggacaaatcgtgatcatcgntcctttcctaccggtatgctatgttaatttcttctaggctttctactttggcttnggccatgagccggctagtctccttatagtct

SEQ ID NO: 123363 - DNA, 363 bp, Glycine max
  unsure (1)..(363): unsure at all n locations
tctagtactctcatgccacagtggttgtcttttataccacatataccttcttaacagaatatatttattngaacttgataggattactntanatgatgcaactctctctgtaattatttaacatagttgaatatcttgaattcaaattcaaaacatctaattaaaccgaaataatttcatgtgaattgatcgagacttggtggtgtcacaatgagtttatacccatttaagttgacaagtttggaagttgaattagccagaactcttgcaaaggcaaaatcgactatgtttctttctctcttgtttatctgtaatcccagcgaatatacgatgaattngtgtagtggcaatgtgaataaaaat

SEQ ID NO: 123364 - DNA, 497 bp, Glycine max
  unsure (1)..(497): unsure at all n locations
tatctcttgtgaatggcacaagaactgcgantaaaggttntgagttntgccggccgctaaatgagtcntgccagtttgtataagtcggaaaagatgtagggcattcatgtgaccatatagagagaaaatggccgctcaatgagtttggtgttataagacattattgtttcttttgggtgatgctatttcgtatgaacaaaacttgcacgaaatganatatgtgaggctgacgatatgttaaatcgaatntaattaataaagattgagaaataaacagtgtgattngatataaatcaggattcatttcctttcacgagaaacctctcgtagaattatcatttctctctcttttatttacttctgtaaatgagaagtaacctacnacagaagtagaataaatacacatttccattaatatggctaattagactgcatgttctctagaatattcctttgaagagtaatgtgtatcattattcattatataataacatttg

SEQ ID NO: 123365 - DNA, 387 bp, Glycine max
  unsure (1)..(387): unsure at all n locations
gcttctatggagactgaatctttgagcttcaatgaggtccttcaatgatgnattttcaccatggagatgcagcagaagataaagganaagagatgagaggaggcgatatccattaagaaataagccatggaagaaggagtttcgtcaccaagaatgtgccttggataaaaagcttggagaagaatgttcaatggaggaaaataaagagagagagagagagagaaaaagagagaaggggagcacganatngaaggaggaanagggggaaagaagtgaactttagttgtgtctcacatgactctcattatcanagtacaacaagtgttacacatgttttattatagcctatgtagtttcctttgaaaacttncttgagtaagttctttg

SEQ ID NO: 123366 - DNA, 313 bp, Glycine max
  unsure (1)..(313): unsure at all n locations
catagtatatgttaaggatgttgcgttatattagattacgtaaccgttgactgcatgtggctgtgatctcctggcgcatacttagacgtggtcaaatcatgtgacttgttatattgtgtacacttggataccaatgtgaaatgctgccgataattaatcatatttagcatatcatacttaaacttgacatatgaatgacgtcaccaatagaaagagttcctgcatgggatacgaccatcgctttntatgaatanatgagattatcatgcatatattgatacatacccggtattacagaacataatacatgggt

SEQ ID NO: 123367 - DNA, 264 bp, Glycine max
  unsure (1)..(264): unsure at all n locations
atggatatgccgtgttgtgaagaagaaagagattgggaatatactgtgtgtggtgaanatgtgacgtgaaggcgatggaacatgaggctgggaacttggctgtgaaaatatgaaggatggatcttcttaccgcctcaatagactgtttatgttctctatacacgaggtgataaggatgaaatgaaaatntttattcgtaccttatctttccttctcttatgaatcaatgtcatgtaacttccttatattattattgatcgggtt

SEQ ID NO: 123368 - DNA, 224 bp, Glycine max
  unsure (1)..(224): unsure at all n locations
cacagctcatgcagatgcagtattaagaaagaagttgttctgtatatagtggaagaactacgggaanatggtactatctccatcgacagggatactgctgctattcccgctggatgcacaacctgcttatcaaacattatgtgtataattacttatgttatagaataatggcgagaacatgtgagatttccagattgatccatcatgaatgggattgttcttgt

SEQ ID NO: 123369 - DNA, 360 bp, Glycine max
  unsure (1)..(360): unsure at all n locations
gtctactgctgcgncgagtcagaaccaactttcatccaactcaccagttgacaatcaacctgaagagggtagagaaccaattggatgctttgtgatgaaacaatatctagagcctacatcatatgtgatcctatggacaaagtccaaataatgaactctgttaataacacaacactaatatccgagattgagcgaaaacacatagatgatgccatgtctgatgaatactgggtcaaagcaatgcaagaagagctagctatgtatcataagaacgatgtatggacgcttgtagaactctccatagataaatttgttgatgaagtaaagtgtgtggtcagaaataagtntgatgaaacatgt

SEQ ID NO: 123370 - DNA, 393 bp, Glycine max
  unsure (1)..(393): unsure at all n locations
atgcattcgtcattgattagcccggctangtgtcgcttttgccgtgactgctcttatccacctttttacctgcttcagatgcgcgctgcgggtcattcttganattacccncgctgtgctgtccaccttttttacctgcttctgatgctctttcgcggtcttctgcaaaattgccggaacacgctcgatgggttgcattactgactccgttgggataacatatattgataaataacgcggatggggtgcatatttcctacggggactactgctgctgcagcacttagagatcccggtaccgactcaattcccttagtagtcgatacaatactggcgcgttacacgcggctgaaacctgcgtaccataacgctgacaatcccttgcagtgcgat

SEQ ID NO: 123371 - DNA, 198 bp, Glycine max
  unsure (1)..(198): unsure at all n locations
gctcactacaagccttaagtgaaaaccatgatattaccatatccttaaagaatantggagctttggaatngttttgggaataagtgtggagggttcttggttcattggacaacttggtttgttggctatgcttcatgatngtatttgggccatactcgatgtacattgtatattggttaaatgttggacatgctgaat

SEQ ID NO: 123372 - DNA, 398 bp, Glycine max
  unsure (1)..(398): unsure at all n locations
tgcatcattcgacagaatactgctcatcatcaatcctaaactagtgataactctacatgcattaacaagaatgaatagatcactactagaatgatagaaataagaatactacttgatttactctacttacaattggaaattagctcatttggatcatgaatgaccaaataaacctcaaagataatacaatgaagaaattagaagaagaattaggatttattttgaaatacaaatgactanagccttacatgatgtacagctttaataagaataatgctactttttgccaaaatttatgacgaatcattgtcatgattcatatacaagacttcataatttatgcttatctgctatggggaaatactatggaagttactactagactacctctatcatat

SEQ ID NO: 123373 - DNA, 492 bp, Glycine max
  unsure (1)..(492): unsure at all n locations
ctataagtcccatctataaaccanatgcanagatcataactactcatgttactccaagaatcaattaacaagtgatcgtccagacctaacaactantttggaggcttcattnggttaattgttgaactcaattgattatgtttaaaantaattttagatgggattntctaatacaatngagatgttntaaaattgatgacaatgggaatntctaatacaattgagatgttaaaaataaaattaaaaattatcattntctttattaganaaaaatgtaataacananaaaaaatgcaaacacacaagtacaacaaagtcatttcattcacctttttctttctcctccttttcagggttaatcaataggaaaaaaanataatgcattatactnttcctttcattcttaatttgtatataaatagctctgacatatctagaacaaaatagttatgttcttctcttctcttgatcataattaacatctgttttcat

SEQ ID NO: 123374 - DNA, 365 bp, Glycine max
  unsure (1)..(365): unsure at all n locations
tcttgctttgtgtgttntcatcttcatctcgtctactatcggtatttcttttctgcgttataagcgagttntaaccgatcatttangtcgtaatctcacttaatcgatctttanatgaatttcaaccaatcgtttgtgttgtaatctcgtttaattccccataaaataaaatccagccgattggtcattgccgaacctcagttaataacccaaaaaataataataaaatatttgaaanaacaatatataataaaatatttgaaataatgataaataataaatttctaaataatagtaaataataaataataaagatctaaaagtacaatgaatataaataagtgtcagcaacattcactttgaag

SEQ ID NO: 123375 - DNA, 352 bp, Glycine max
  unsure (1)..(352): unsure at all n locations
catatggggaaccttattcttttgtanggaatcggttcaacaagtaacaggcttgcaacatagcctcaccccanaatccttcacttgaacccgaataggataacatgaaattcaccatttctttcaagggttctattcttctttcggctacaccattcntgtgtggtgatanggagctgtagttngatgtattattccangagaattgaaaatanactgggatcataatactcaccttctctatncgtacgaagaagtttgatagcccattnttgatgaagtctacctctntcttatanatntanatctatcaaagcttcatcttttgtattaataatatacatacaatacc

SEQ ID NO: 123376 - DNA, 313 bp, Glycine max
  unsure (1)..(313): unsure at all n locations
tgataatataacggttgactataaattatcttctaatgtctagatcattggtttatactagtaagaagtaagagagaatagaattaaccaaagtaaagcatattaaagtcacgcggaataaagatgtnggaaaagagacaacacagattatctgattcgcacaactgtgctactcagtcccaaaaactgtggtctgagattcttcaccttgtaaatctttcaaccaagatcacagggatgacctccttgtctattgataaccagggtgtcccccacttaatgtcacaaaatgaccttttgtctatatacaatc

SEQ ID NO: 123377 - DNA, 327 bp, Glycine max
  unsure (1)..(327): unsure at all n locations
gtgatgaacatatgataggacataatgttgttgcacctataatccctcaacaaaatggagtagttgaaaggaaagatagatcattagaagaattagcgagaaccatgcttaataatacaaattatcaagaaccatgcttaatgatacacatcttcctaaatacttttgggccaaggctgntactactgcatgttatataatgaatagagcattaattagatctattgtaaagaanacaccatatgaactatatatggtgagaaaccaaatatttctatcttatatgnttgatgaaatgcttggtagatatggaaagaaacttggaag

SEQ ID NO: 123378 - DNA, 288 bp, Glycine max
  unsure (1)..(288): unsure at all n locations
tgatggtgttcctagaccaaaccgaattgatggtattaaactcaacattccttcatttaaaggaaagaatgatccggaggcctacttggagtgggagatgaaaatagagcatgtnttctcatgcaacaactatgaggaggaccaaaaggtgaagctttgccccgcacggagtttccgactatgctcttgtgtggtggaagtgattatgcanngtgaagtggacgtntccattgggaaatacaattgataggtactnttgtgatgtgtcctatggangcantcacttac

SEQ ID NO: 123379 - DNA, 342 bp, Glycine max
  unsure (1)..(342): unsure at all n locations
tatgttcttcaatgtatttatcttttcaaatatggtttggtcaacatatacagccatcaattgtatataagaacccacacctttctcattgaccagtntagtctggaacctttccatgaattatattgctctctaattngtagcatgtcctatattcaattgatgagtgattacaagtacactagtgtaagaatgaaatgtgcgtaaacatgatcgttgagagagcttcaatggatcccaaaggtgtcatatctatctaccagcgataacacaattgtgatgtactttgccaccaaaataatatccacaaatattgtactactttgcaagtcatgaaccgta

SEQ ID NO: 123380 - DNA, 240 bp, Glycine max
  unsure (1)..(240): unsure at all n locations
tgatccacattcgataactcttgatgcacatcacatggnatctcacatccgcctgtgatggtagagagtcttaacataactagctgcaatcatatggcgcatactgtacacatgtctattgtggaggtaatcattatcatgagacaacacttacataggcgagagaaaacttagtgcagtcacctgtattgttttgaatcacattacagatcacctcggtagccatcaataaaagataca

SEQ ID NO: 123381 - DNA, 332 bp, Glycine max
tacatcggaattttgtatgatataaacaatgagataactgagatttatgtctgaactctgatattggcctcgctaactatggtatcataaaacttataatggcacgcagttgatcgggatgatatacactctgtttttcatatccaatccgttctcttcgcagaggtcatcactcaagggatggcatgtactcattaggaatatcagacataataatcactttcatgcattctcttcttgtctatttgtcctactgagaagtactgtgtgcactgtaataccagtggtattgtctaaattaagctcacattatacatgctctgatcttatta

SEQ ID NO: 123382 - DNA, 110 bp, Glycine max
  unsure (1)..(110): unsure at all n locations
tatacctntcttggatcgagaaacctccatgctcaataaatacttcaagtcacccacatatataatctgaatcattaccagttatgaggatgtcatcaacatagatcaat

SEQ ID NO: 123383 - DNA, 287 bp, Glycine max
  unsure (1)..(287): unsure at all n locations
cttaaccttcaagaagaccattgctacaccgctggtcctaagtcgacctatgccaggagtacccgtactcctatatctctcagtagttgacgaagcccgtagctcaacccttgtacaagaggaaggaaagcaccaactccctatcttcttcaccaaccgcatactccatgacgccgagaagtgataccanatgatagaaagggtggtgctaacactcattacctcaactcaatgactaaggccctacttctaaagtcatcaagtggtaatcaaaatgaactacccca

SEQ ID NO: 123384 - DNA, 150 bp, Glycine max
  unsure (1)..(150): unsure at all n locations
ctctctcctcttctcctttgcctttcgatgcatctccatggctgaaaatcaccattgaaggacctcattgaagctcaaagattcaatctccatagaagcntcacaagcaagcttccatcatctagtgtcaatggaaatagtcttgtgtca

SEQ ID NO: 123385 - DNA, 301 bp, Glycine max
  unsure (1)..(301): unsure at all n locations
ctgtgtatcattacacattatgaatcgatacgtgtangaatttcgaaataactccaagagtctaactgtcaagaagttttgaatggcatcaaggcctataatangtacttcgacatgaaatccttagagttttctgacaacattgcttatcctctcaaacaanaatgtctataactctcaaaatattccttgccaanacaactccaaattcaataaggaatcttgatcgatcttcaattgtaatattcttctcttaaagagagaattcttcttcttcttattcttattcaaagagatatgt

SEQ ID NO: 123386 - DNA, 381 bp, Glycine max
  unsure (1)..(381): unsure at all n locations
cccttatagaccttacctaanattganatccattaataagatttccttatacatacaacttcaatcaagcttggacaatttaaacaaataagtggatgtcttcaattggtttggaacgcaaagaaccaagattnntaagttgtaactctagatacacttatccaattactgtagctcttattgtccagtaatatgtatctgtattatgcctagacatctangaaatntagatttaactgtcttattgtattttgcgattntgtctagactcattcatgactanngctaataactttttgtcaccaccagctttttaacaagatgagaaaaangatctcacctcgaagtccttcccaatgatattcatttcattcagatggg

SEQ ID NO: 123387 - DNA, 108 bp, Glycine max
gaagcaaacgagttaagatgtgggaactgtgacaactcaccgaccgtaactaatagtgatgtgaactaaggagacctacctgtttcactattgctttgtgaaagtctg

SEQ ID NO: 123388 - DNA, 153 bp, Glycine max
tggagatatgtcgcggggtaggagacctgggacgtagtgggtgctttgccataccagctgaccatccgaccacccgtcataatcgcatgagaactgtgatgtcctaacatgcgagctctgcagccacagataaagaacaagacccaagcagga

SEQ ID NO: 123389 - DNA, 368 bp, Glycine max
  unsure (1)..(368): unsure at all n locations
tctgatcgcagtggtcctagatgtanggaagaatntctncaagagcaccctcttaaagtcatcccagcttgaaatggacctgngagcaaggtagtatagccaatctttngccactcgctccagagaatgangaaaattctttagaaagatatgatcttcttggacatcacggggaattatggtggagcanacaatatggaactccttaagatgcttatgaggatcttcnacctgcagaccatgaaacttgtgcaacanatgcattagtccagtcttgagaacatatggaacaccctcatcatgatattgaatgcacaagctntcataagtgaaatcaggtgcatccatctccctaagagtcctctcac

SEQ ID NO: 123390 - DNA, 455 bp, Glycine max
  unsure (1)..(455): unsure at all n locations
aagctggtgtattactaagcatgtatatatggtgctttttgtggtgtctgtcattgttacaatntcacatgctcaacttagaagttataaagtacatttctttagcaatgatctatctagcttttatcttatgttaaatcgttctgtagcttcctgaaattctattagaattttaagtaggtcataatacggtatataagctattaacgtgctctcactgcttngcatacttctaataatgattaaataggttctttgctggcctacgaactatatagagtaagtcaatgtattgttacaatcatgaatcatcaatatgtcattcggtgtttctggtacataaatntaacaattatgtataagattattattaagaacttaattgaaacattaactaatttagaatataaacgccctaaaactgcacatatatagatatgtattaaaatatcacg

SEQ ID NO: 123391 - DNA, 415 bp, Glycine max
  unsure (1)..(415): unsure at all n locations
gtattttaaatatatgttgtaattgagcattatcgactctaagtgagggttcttaattatcgatgcattgacggcatatagcaagagcataagattcctcctncttctctctgtattccagcttgatgatctttcttttatggattagactccatggctatgtgccataagtcatctctgctatggaattaacgcattgcactctacacttcgctaagtaatctaaatagtcanagtttgttcaatctttctttaatctctctagtgctttatatatgctgaactagacctgttgctatgtaaccttcgatcgatgaaagaacttattgtgacctagaagactagttatttgtgaactatctatgtaatgatatattgaaattatgactacccacgtggatcatacctttgttaa

SEQ ID NO: 123392 - DNA, 307 bp, Glycine max
tgcgctggttcacttgctttgatcgggctaatataaaggggggtgatatatatgcctgactataactatctctaagtctaatcatagcttctctagattacttaaaagaacgtaagaaggccacaaataaaggttggaaaaaaaaccaattatctggtcgccaccggctcttatcccacaccccgtctgaattttacctgaatcttcacaaataaaggagcctctgttttgcccaagtgcctcactgctgtccaaagcctttgttagtcactcatatgtctttgcccagatctcaggtaaaaattag

SEQ ID NO: 123393 - DNA, 71 bp, Glycine max
cctcactgacgcgatcctaagagggttgacgcggccctcaacttcagtaccattccacatacgcttctccg

SEQ ID NO: 123394 - DNA, 340 bp, Glycine max
  unsure (1)..(340): unsure at all n locations
ttccactaataatatagagtgaatactctanaggaagggataggcctngattangcccatctaatcttcctatataaactaattacacnaaacanagcccatactcacaacccaattattcaagtgactgaattggccaagcttaattngaccctggaaatngctgaatnggccanagcttatttgtaaaaaatngaatatattnnttgtagacttccaaggacaactcacatgctccanttggagttctgtagtatcctctagaccctgcactatgcagataggtcaagtaagaacaaaatccannaaatagctacaattcttaattaagctcaatcat

SEQ ID NO: 123395 - DNA, 334 bp, Glycine max
  unsure (1)..(334): unsure at all n locations
agatgcatgggagatcctgaanatcactcatgaaggaacctccanagtgaagatgtccagatgcaactctnggctacaaaactcgaaaatctgaagatgaaggacgaagagtgtattcatgacttccacatgaacattcttgatatagccaatgctttgcactgcctgggagagaggataacagatgacaagctggtgagaaagatcctcagatccttgcctaagagatntgacatganagtcactgcaatagaggaggcccaagacattcgcaacatgagagttgatgaactcattggttctcttcanaccttcgagctaggactctcggata

SEQ ID NO: 123396 - DNA, 460 bp, Glycine max
  unsure (1)..(460): unsure at all n locations
ccctagtggatggcgcctcctctcacttcttctncattatctttcgctgcgtctcccatggctgaaatcaccattgaatgatctcattgaagctcaaagatccagtttccatagaagcttctcaagcaagcttccatcagtgccctagttgaagacaagggcaactcacgctatcccaactatccttgagaaatcatggactccacctctcaagtcactagtgcangtgatacttctactagtgattccctcatttcaatagaagaattatgtccaccttcttcacctangaatcatcaacctatgtcacttcttcatttagacagattcccacattatgtgaagcagaatactcctctatctgatcangaaagatatcatgtggctttctcactccaatgctaatatgaaaaactcactcancatcacagcattggtctatgctgttacctctgagtag

SEQ ID NO: 123397 - DNA, 189 bp, Glycine max
ggactaacactgctctcatagatctataactgcagacccccatgtgagtaggctgaactcatagcaatgagcaaccagcattttcttctactattgcgccttgatgtccttttctacgactcaacccttataagtattgcgaactctctctgtatctacgtggctctcctatactggtcgtattcagga

SEQ ID NO: 123398 - DNA, 172 bp, Glycine max
atctacatttactctccacatatactgcactattacgactaaactactgccccaccatacgccccactaacccattctatgtccaaaaataacataactcttaatgcttgataatactagtggtaaactctctcggagagtgcggcgctcctcccaccacaatctagtcctt

SEQ ID NO: 123399 - DNA, 75 bp, Glycine max
tggctaatactgagtctgtttacgtaacgagatctcctaaatctcttcaagactacagctccgcgatctttattt

SEQ ID NO: 123400 - DNA, 344 bp, Glycine max
tgacctaatataaatactgaataactaacgtcaaatgataattaatgtcactatgtatgctctggcagctatgaatcaaccagacactgtaatctaggatagctgtctctcaatgctggcaatgcatgatataagttgtactggatgctctgatctgcatgaaactctctctaccatggcactgctaacaaggctaaagaggacctctccctcgtgtgtgggtcttactagtctggtgcagcccccttcaaagaagcggtctgcgcccatctaatacatgtaatgtgagcagctagctctatagcccctcacccaactgtacctgggaccattattcctaaacc

SEQ ID NO: 123401 - DNA, 116 bp, Glycine max
acgaagacaagaacaaatctaatctataaagattcgtactcattgccaagctttcatatcgaagatggggaaggtatgaccatctaccctctatcaaatgtgttcggatcaaccat

SEQ ID NO: 123402 - DNA, 323 bp, Glycine max
gactaacacgagcactctgaagcagatgcacgcattcttatatacaactgtaggctcctcattggtgttaaaacaatgtagcttactttccggaataagtgtggcgtctctcaaatgccgtttacgcaagataggaacatactcgctgcctctctctatttgctgcaactctgggcacatgggtttgttgagcttcctctgcagcgcttttttctttacctctgtttcagcaacttgataaatgcttcggaaaatccaccaacgggcgcactgcgaggtagttcgagatctttcttgttgagctgattttttagaccacctta

SEQ ID NO: 123403 - DNA, 94 bp, Glycine max
gctcactttatgtctgtgagaaataaatgtagtctatgaaactcaagacgccatcatgaggtgttgcaactaacgcatgtggtattggggcgat

SEQ ID NO: 123404 - DNA, 140 bp, Glycine max
aactactaatttatgcagtcgagtccttatattaatactaatgagaacaatgacaactgatgaactataacacagcatatcagattcggagaggatgcaacccatatctgttcgcaccctttgctactcagctcagcacc

SEQ ID NO: 123405 - DNA, 278 bp, Glycine max
gaagtgtccgggaaaaagaagattagggacatgataagaatagtggaggacttagtggcgacaatcatatcatacacaggctgctcttttatactagactctggaacttttgaactcttcaacctttaaactctgtaataactactccccccttgtggaggtctctggacttctaagatctagagtagtactaccctttatctactctctgatgaagtactatccccctttctcctcctcaaactaataaatcttcaacctcagtaatagtacttctt

SEQ ID NO: 123406 - DNA, 123 bp, Glycine max
gatcgctgagtgtgattggcacgctctgaaagacgctcattcttaagcacaccttgttgggctcaccgattttggttgtcagctgagggtgcgctatttgtctaacagattactagagggctg

SEQ ID NO: 123407 - DNA, 64 bp, Glycine max
acaaacttgctcacttgcgtttatttcgaaatgagtcatggtacggtcaaagacctatcacgct

SEQ ID NO: 123408 - DNA, 148 bp, Glycine max
gactaatacggagctacatgaatagtatttaaatttttgtttatgggaatgcacgaaaccttgctatattcttaagtgaagaggatgcaaaatatagcgatactcttcggactagctacctagcgaattagctcttgatgccttaaaa

SEQ ID NO: 123409 - DNA, 301 bp, Glycine max
actaactacgggagtgttatgaataataaaagggatcttgtttttctttccgtgtatattacaataattatcatccgatgtgatccccacttacaaaacaggtatgctagttggtttataagtatggctccctctctcatataccgttaaacctatttcccatgctattgatgaacctccttagtatataccctgatttcaaacccaccaatctacctattgaaccctgcactatacttctttaaaaatgcttataaattcgttaattgaacccacgtggctgttaaaatacttgtagcga

SEQ ID NO: 123410 - DNA, 82 bp, Glycine max
ctaaaaaacagtgccaagcatctactactgttaaatattgcatgccctctaggtgtgtctccattcccaaagcgtacccaga

SEQ ID NO: 123411 - DNA, 173 bp, Glycine max
gactaacacgggtctctcttttagaataaaatcctaatttttgtcatgagaacgctgaactcgatcaaatgctagagtatgtagcatcaatatcgcgggtgctaagacacctactagtcctaatctcactgaacgcgcagacacagcagctttggtacaaaaccagtaaatgt

SEQ ID NO: 123412 - DNA, 306 bp, Glycine max
  unsure (1)..(306): unsure at all n locations
ccatacggacctaagtacctaggtcactacttctgaagaagatctgcaatcatgtacacttttaacccgcgtatctactgtcggtacgtatgcttatttattgtgtcctgagaggcgagaatagcatcatcnatcattatgtaacgaaactagtcaacgcctatgtcttatctgattcctatatactgactattactaatctcacatcatacatccacaattcgtaaccacacttgtagtgtaactaaaccatcctacccttcctatattaactactttggaaagcatcttgattgtgtttcatga

SEQ ID NO: 123413 - DNA, 103 bp, Glycine max
taaaagaaagaaggtaaccataagctgctatccccccacatatttgtggctctcataatagtgagttttaaagtggactacgaccaattgagcatatattttt

SEQ ID NO: 123414 - DNA, 286 bp, Glycine max
tttaagtgtggtggataagtctgtgattatgagaatcccgttgggggaacacagttttaacattggcgatgttaaacactccgtgtcacttcaggctgcagcacttgggattatcaagtcctgaaaattttaggctaaggtggagaatatctatggcacgtgcataatatatattagtatgtgaaaagttttagctttcaacaacaaaggttgcttctaagggatattcaaaggcaaactgttgatatacttggatacttgtattgaagacaaaacgtgctatatt

SEQ ID NO: 123415 - DNA, 285 bp, Glycine max
tgaagaaagtgacagttgagagattttattttaactacatttgcggaatcgaaagagggagggataaagaccacagtgtgaggactgagagcaaatcacgctaggatagatcctcagaaaccagaatgtctgttccattttgtctttatttttttacttggagtagtagaagtgattgacagctacagaactcatttgcaaccacttacgcatgactaattgagttaaacttcttcctttgtctattcgactttgtttcgtaattaataagattaattgcatttt

SEQ ID NO: 123416 - DNA, 169 bp, Glycine max
cgactaactacgtgctcggcagtcgttctgtgctgccaccagctgacggtctgtgccatctatgaggcatggccattctaaaattccgttcatgagtgagccatatacccagctactaccgtccggaaacgacgcaatagccgcgtctactgtgatgtagaagtccaaa

SEQ ID NO: 123417 - DNA, 267 bp, Glycine max
tctacttatgtggcagggcaggctttcttcactttcttgtctccgacgcgagctttgaccactgctcttccttcccgcgatgcttcttttcatgtccgcctgaatgggcttatagcctaaaccatactttccacgatttcctttggcatttatcacgctagttatgccggcgatgtctttgcctaaacccattttgggttcataaccgtttcccaacataactccggccttcattaatgttgccttggacagcaaggttccccaaaa

SEQ ID NO: 123418 - DNA, 117 bp, Glycine max
ttagtacctaaatactgctctagtcgatactaaagtgccgccatgtactctaaactatcacggaatactcttatcacagacagtctcacgatgtgtcctaaaatgtcatagatactt

SEQ ID NO: 123419 - DNA, 273 bp, Glycine max
tctcccccaattttctataaatatggggagaagtgaagtggaaaagggttcatccccttaggcacttctctctctttcgaattttcttagaaaaattgtttccgtgaagaagatccaagccgaggcgcttccgtaacgtttccgtgagtgatttcgcgaaggttttcgaccgttcttcggtgttcttcattcgttctacatcggtcttcagtccttaacgggtaagtaccttaaactcagcttttcgattcattctatgttcccgtagtggtc

SEQ ID NO: 123420 - DNA, 219 bp, Glycine max
ttctcaatatgaaatcattgtagtcatgtgttctaagattgacgagctccaccagaaaatacactatctctggtaaccatttgggttaaaaaaattttaaatataagtagaatagaattgatataataaaatattttataaatattagaaaaaatttttataaaatatttttatttgtgagaaattttcttatataaaaaataagaatgtgagtatatt

SEQ ID NO: 123421 - DNA, 265 bp, Glycine max
  unsure (1)..(265): unsure at all n locations
tggagatgcaatagtgctaatgtttttgtttttgaggacnccatattgtggactataaacttggggccccgtctttatgatatttaagtcaaatgtgccaccctgtttcaagtttggtctttggctaatgggttaaaaaatatgcctgttgattattacgaactattcaacatctatatgaaatgaaaagactttaatattggcgtgttgacaaactactgatttttgaatctgattccatgcttacttcaatgatatctactcc

SEQ ID NO: 123422 - DNA, 284 bp, Glycine max
tcacaaaagtttatatggcttgatacaagcattgaggcagtggtacaagaagtttaatgagtttatgagcaactcaggattcaaaagatgtgacatagaccattgctgctatgttaagaaatatactaatagttatgttatccttgtcgtgtatgttgatgacatgttgattgcaggatctagtatggcagaaattaacaagttgaagcagcagttggcaaaaaactttgaaatgaaggatcttggtccagctaaacaaatccttggtatgagaattcttagaa

SEQ ID NO: 123423 - DNA, 280 bp, Glycine max
tgggtatttatattttagacttatgtcaccctccctccatttatctttccagaacttgagtcttaacccatcacccaccttccatctcaaattattaatgatgttgttgctgtgatgttggtgaaaaacagacctcaagtccttccaccattgagagaaatgagcactgtccctaccagaacatagggtattccaccctccatatttagataacaagactctagcccagagctgattttggttgtttgccaattcccagccccatttaccaagcaaggct

SEQ ID NO: 123424 - DNA, 275 bp, Glycine max
tttcgattcattctatgtacccgtagtggtccacattgggtttcgggcatttttattctcggtttggttactttttaaaccccctgttgatgtgcttaagccattttacttaagtcatttctcgcttaacttaaaaataaaataaatttccaccgaacgtttgaattggattatccattaacttcgggtaaaataaattccgaccgttcggtcgtgccgtaaccacgttggaaatcaaaaagaggtgaaaaaataatataataatcaaaaagaca

SEQ ID NO: 123425 - DNA, 279 bp, Glycine max
tatgaccattcgaatttctctgtttttccgtcgttcaatttcgagcgtgtagatgagttatgtccccgaatcggacatatgtgtgaaaagttatgaccattcgattttctcgagagcttccgttgttcaatttcgagcgtctcgatatattatgaccccgaatcggacatctgtgtgaaaacgtatgaccattctattttctcgagagcttccgctgttcaatttcgagcgtctagatgaattatgttcccgagtcgaacattcgtgtgaaaacttatg

SEQ ID NO: 123426 - DNA, 278 bp, Glycine max
gtgagccaaaatcctaactcaccataaaccttgacccagggtgagaatgtcaatccttaccctcggaagcaaaaaagaagagaaggaaaatttccaatcaaagaaaaaataagaaggaaaattcccaatcaaagagtgggagaaagcaaaaagaaaagaaagaaaattcccaatcaaagaatgggagaaaaaaaaaaggagaagaagaagaaggaaagaaagctcctgatcaaggatcgaaagaaaacagaagaaatgtgcagagaggtctttggacc

SEQ ID NO: 123427 - DNA, 278 bp, Glycine max
ttaaagcacagcaacacagaatctatgtgtccaacacccctccattcaatggcttttctaggtttgaaaggtgaaatttagaatgaggtgaatttgaggcaaactctcacctcacaccagtccataacgtcaatctaaacttgcccaaactggaattacacctaaaattccaccaaatcaaaatttgactcttcaacacccaattttgccctagaaatggctcttggttcactttggtcatttatttttctctctagctcagcctaacctttctcaca

SEQ ID NO: 123428 - DNA, 263 bp, Glycine max
tgaagaggatgctttaatggaggtttttttttgacaccaggggggggcgatagttttaatccctacccttgggacagttctaaggaattagacactgagatggacaagaaaatccccagtatggtgagtagcattttgaaagaagcctctgtgcctgaaactgatgaagattttccaacatctttcgccccgaatgtttctatgcctgatgttgagaaagatgtttcaacatctttcggcccaaatgatgacgtactctcttt

SEQ ID NO: 123429 - DNA, 286 bp, Glycine max
tctcctgttggtggtatactaagttctttttagcgttacagagaaggagaaaggattggagcctcaatttcactatctctgtgcgagggacatttatctctttacaaacattattttgcaaattcccactgtgggaatgtgcaaaaatgagttccaaaggtggtgaaaccaagacgatccaacaattaacgagtttgggatcgtaattttactatgacatgtttaagtgtctgcgggaaaaagagaggatttttggagaggaacaagggagaacggatttggaagg

SEQ ID NO: 123430 - DNA, 55 bp, Glycine max
cggactaactacgacgctctgtccccctctctaagatatcgctgtcatgctctaa

SEQ ID NO: 123431 - DNA, 282 bp, Glycine max
tatacaaacattcattagtccaacacacactcaacaaatagtcatcatccgtccataattccaatcaatcatgctcagtatgatgcatgcacctgacctcaactctcaaatgcgatgtagtatcatccccaaggaaatagcctaagcgtgtccacacgacactctcacttaggaaaactaggcaataagtgtcgaggtcactatgttgtgcacaagcaactcccccccccccccctgcatggagatcagcctgagtctcaagggagttccaaaccgagtgac

SEQ ID NO: 123432 - DNA, 280 bp, Glycine max
tcggagtttccaactgccaatttttcttcttctttagtccactcttcttctggcttcaattcttcccgggctttccttctgtgtccagcatcttgggatgttcccagcctttgatgacagctttccaggtcctgctatccagtgatctgaggaaggccaccatccttgctttccagtattcatagttggttccatctacgattggtggtctgatcactggtccttcttctttctccatgttcatcagaatttatctccctagatctcactctgtgatttc

SEQ ID NO: 123433 - DNA, 283 bp, Glycine max
tcctcttgatggtgagattgagattttttttattatatcacaagggagacaagaagaatatctttcattctttcctcatatgtcttggcctagccgtctcgtcccccaatttttaactatcccaattacatagattgctgaaaaatggcatctttgcaagctgctacaataaaatatccaactctatggagcatgcatcataatagaagctcttgtctggaagaggaggcgaggagctgtttcaattcataaatagaattcagattatgaacttgtctgtcca

SEQ ID NO: 123434 - DNA, 284 bp, Glycine max
tctgtccctgagaaactggtttttttaagacaacagggagtgaagattgctgaaaaccctagccttgcaacaagtcctagggaagtagacacggagatggacaagaaaatccgcagtatggtgagtagcattttgaaagaagcctctgtgcctgaagctgatgaagatgttccaacatcttccaccccgaatgtttctatgcctgatgttgagaaagatgttccaacatcttccggcccaaatgatgaagtactctcttcccccagcaaagagagatcaacaga

SEQ ID NO: 123435 - DNA, 280 bp, Glycine max
tgtgcttgttttatttaaatttttttgatcatgagcaactaggtgtgtcctgctatgacttgagaaacaaaggtgatcaaataacaagcagagatttaaaaggtactaggttgcctcctagtagcgcttctttaacgtcttgagctggatgcttgatggcttgtcggtcacggacctagtactttgcttacctttggctctggacttggttgcctattggtcggccatgggtcgtaagcaacgctctaacctttttgtggatgagctgaggtgaactcta

SEQ ID NO: 123436 - DNA, 280 bp, Glycine max
tcctcggggccatttcttgttggtgatgaacaaaagcgcaaaacagaatcgaaaaatgatgaccctagggctgcaaactcgtaaatcccgtgggtatggcttttgaaaaggggggaaaagaagtttttgaatgcaaaaacgtcccccctttcgtcattcttatattttggtgcatgggtggctcgcccaggcaagctcagctcgcccaggcgagctaacctgcattttttttttgagaggaacattaaccatgtcccctccttccttatggtttagcgtt

SEQ ID NO: 123437 - DNA, 278 bp, Glycine max
ttgcatttctactacttctactcttataccaagtgcagcaatttcaggcacatcagcaactaccatttggttctcaccattgttttgtcctccaacatattcctcatagaccatatgatatgccccattctctcagaaaaggattcgtttatcagttacacactgctgcaatagcaatagaattcgattccaatgccggattttgtcttgtgcatgcttccttctttctatatgcacacttgccatttgaaattaaaaatttaagggggcaacttagt

SEQ ID NO: 123438 - DNA, 268 bp, Glycine max
attacaaagttgttctttcataaacccatggaagaatcatcctcactttacatggattgtattctagaccactgttttgagaggccctccaggacctttttgaactataatcttacctcgaaatgtaccataaacccattccaacccgtttattgatacattcaccactatcccagatctaaacgtagttatcgctttggtttgaagagcattagacctagctacgtagaaaaagtgcagccatgcaacacaaattaccttgctagat

SEQ ID NO: 123439 - DNA, 276 bp, Glycine max
tctatataagctgaaccattttattaataaacacaagttgagttgtattcagaaaattagagtttatctcttttatcttagtgagagtgattctcctacatccttgagtgatgcaagaacaccttggctgtatcaaaggactttcacaacctttgtgtgtagccctcgctggaaagagtgaggctttccttccttccattatcacccttgttctttcaaaccacaattccagaaaatccacctctgcccagaattatcgcgtggccataactccca

SEQ ID NO: 123440 - DNA, 283 bp, Glycine max
ttttgacttgtgcacaattccttatttttattttaagttactgattatgcccttcttttgtttaatgcagggtacacaatctgtggtattagcacgattgcttgcatccctaaaattaattggggggaccttagctgaccatacgtttttattcctgggtgctaaagagatacgagtctgagggagattggtttgcatttgtgttggaatttcccctgcggttactttttgttccattatttcttcgttcaaatatattcaagggaaatccggtttaccggaa

SEQ ID NO: 123441 - DNA, 282 bp, Glycine max
tctaaagtagtataatgaagtcatttacaatgaggagttaatatctgaccttcaatactaaatgtcgattcataagctacagtggagatcggaatagctaacacatcccttgcaattgcttgtagtgttggatactttagctcattcaatttccactacattaagatatcaaaatcagaacttcttggtaaaaattcatcctctaagtaatgatctaactctattttcatagttgaggttcttgcccttttctttctttcaatgtatctatcataatcacac

SEQ ID NO: 123442 - DNA, 280 bp, Glycine max
ttataagcgtgggtcagggagacaattgtcaagtgttcgcgatatgcgaagatgatgttccgagtactttggatttggtacgaccatgccctcttgatttccagctgggaaattggcgagtggaggaacgccccggcatttacgcaacgagcataatgtaaacctttacggttttaaaagctctatagttgggcctaggctttagagtttttccttttgttaaggctttgtgtcttttgtttttgaatttataatacaaggatctttcttcatctgttcc

SEQ ID NO: 123443 - DNA, 286 bp, Glycine max
tacatctcgtctatgattattcgctataatgcttcatggttcctatgccttgagcaacttctttctgaagcttttgaacataacctcttgattaaccaagaaatcatcaactgcttcgaccttcgatgaccccataatgtattgagggggacttggtgatttcttgccgaatgtaattcataaggtgagagtcctatactcgagtgttgggaagtgttgtagaaccattctgcccatagcaagaaccttccccaagaagaaggatgtttatgaacaaatgctcgaa

SEQ ID NO: 123444 - DNA, 284 bp, Glycine max
tataagaacaaaattgcctaaattatttccaaatatgcatgtgaattaggaagcatcaacaagaatcaagccaaggctattgtgtaagcaatcaatggggcaaaacacaccaaaagattatgatgatggatggctcaaattctcacaaaggtaaacttatcactttcaaattgagctttcaaaactatcatgacatgtagaggaaaaacaaggatttcaaatcacaaaatgtcaagagacttttattttcagaacaattacccattacttgaacatatcctata

SEQ ID NO: 123445 - DNA, 281 bp, Glycine max
tctcaaagaagccacgaggaagcttctggaggaagcctcttaatgaagcttctagagaaagatacatgaagcttcctcaataaaaacgctgccccgtcttcgttaaccgatggatcttctcgaaatttggtcttcaacttcacaagacacttgtgcatgatctaacggatctttgagaagatgtctggagtgtgctagaagcttccgtttccgagagcatctcttatttaagcatttcagcctttgctttcgtgtagcttaagaaaaacgtcatttcttct

SEQ ID NO: 123446 - DNA, 281 bp, Glycine max
tcatgatgaatcaagattgatttttatgatgttttgatgataacaaagatgatgacaaaggtgatgacaaaaagctcaaaggtcaatcaaagaatgagttcaagatgttcaagatagaattaagaacacttcaagattcaagaggaaagttgaataacacttcaagattaaggaggaaagttgatttcaagaatcaagaatcaagattcaaggatcaagcttccaagaatcaagatcaagattcaagagtcaagagaagacttaatcaagataagtatgaa

SEQ ID NO: 123447 - DNA, 277 bp, Glycine max
tctttaggactttgaacaagccattaacacctctttcagaaccatgctatgtgctcacgactggtccctttcttcccttcgcaacttgagttcattattgctaccccatacagctccgcgaaatatgttccggccgtactcttccttgccagccctcttggtctcttgatcaagggcttttgcggaaatcgcattctcttcccgtaacccggcgcactccttccgaacgggtgtatcatccaacttgaacttctccttggcgagatttgcctttcct

SEQ ID NO: 123448 - DNA, 283 bp, Glycine max
tatgaagaattcttgacgaggtttggtgtcaagcacctcgtgacttctgtcgagcacccctagaccaatggtcaaatggaggctgcaaacagggttgtccttaaatctgtgcgcataagactttacaagtccaagggtctatggaaggaggaactccctagcatactttaggcttatcattgttcaccccaaacaacaaccaacaaccaacaaaactcctttccaccttacatatggcactgacgccatgatccaagtcaaagtcgaggaactgttgacaagg

SEQ ID NO: 123449 - DNA, 278 bp, Glycine max
tctccctcttttccctataattttagggagaagggaagaacaaaaatgttcaaccctcctggtatttgaggatcacttgaaattagtgagaaaaatcgtttctgtgaagaaaatccaagccgaggcgtttccgtgggtgatttcgtgaagattttccgccatccttcgttcgttcttcggtcttcaaccggtaagttcccgaaattgaacttttcaatgcattctatgtacccttggtagtccccacttgtttcgcgtacttttgttttcatttcatt

SEQ ID NO: 123450 - DNA, 277 bp, Glycine max
tcctcaaggattgtagtttatttggtcgtcaaggatgtgtagcgcttaaacctgggttctttccggagtggttggcgcttatccaacttatgccttttgtttgacttgtgtgagtcagtctttctacctccttctctcttgtcacgctttgatttgtcttgtcggacctcatttttgaacctagacatctcctccatttggatgtagcccttggctcgttcgcacaactcgttcatgctgttgagaggttttttgcatagactatttgtgaacttgt

SEQ ID NO: 123451 - DNA, 285 bp, Glycine max
ttgagccaaaatcctgactcaccatattatcttgacccagggagagaatgtcaatccttaccctcggaagcggaaagaatagaagggaaatttccaatcaaagaaaaggaaagaaggaagatttccaatcaaagagaaagcaaaaaagaaaagaaggaaaattccccaatcaaagagtgggagaaagcaaaaagaaaagaaagaaaattcccaatcaaagaatgggagaaagtaaaaaaggaagaagaagaaggaaagaaagctcctgatcagggatcgaaggaa

SEQ ID NO: 123452 - DNA, 281 bp, Glycine max
tgttggatatagtgatagtgatttttttgtagatgtggatgaccgcaagagcacaaatggttttgtgctctacatgggagacactgctttaacatggatgtcaaagaagcagtcaattgttactttttctacatgtgaagtagagtatgtagctgctaccatatgtgtttaccatgcaatttggttacgaaaactactaaaagagttaggtttgtcacaagaagagttgacaaaagattttcgtggacaacaagtcagtaatagcgttggctaagaaccca

SEQ ID NO: 123453 - DNA, 278 bp, Glycine max
tctcctttcagacaacaaccacattttttttaatagtttacacctccacctatacaacttgtttctggaccttccttagaggaggtgatgaatcaaatggacaccaacaacattcagtttcaacagaatgtgagcaccaccatccaagacttgtagactcagattggataatttgctacaactgtcaaccaattgcaacaatagggttttgcaacattcccacacaaccaattatcaatccaaaggggaatgtgagtgctattaccttgaggagtggt

SEQ ID NO: 123454 - DNA, 283 bp, Glycine max
tcttgcaattccaagacactagagtatttttctgataggtggcatgtcccacttgtgctttttctatctaatttgcaacctgtaaaatcagaatttgataagcctgttagatttaaggaggtacctttgggataccataaacctacattaattgtgctcttaaggtacttaatgatccttttaatggcagttaagtgagattccttaggattggcctgatatcttgcacataagcaaacacttagcatgatatctggtctacttgcaagagttatgactacta

SEQ ID NO: 123455 - DNA, 284 bp, Glycine max
tttaaggcacggattggtgcctttttctgtgctccaaaggttgcctggtctttgggcatgtgttatggttggattggaaccacttctttatgctttccctttcatatgtctacgataatcgcaagaaaacaattttgtcagtgtcatatatagaaaaaaggcctcagatttcttcattgaactccatctaccaaacattagctgttaaaacaacatgcgtgatgcctttcaactaagtgcctgtttggtttaagtttattttgaagtaatatattttcaaacat

SEQ ID NO: 123456 - DNA, 282 bp, Glycine max
tgcccaatggctggacaaaatttttttatggtccgggttggtgcaagggtaaaaggaaatatcccacattatttccctgacacaaatgccacaattatgatttggaaattgtatgcaaaactagtcatgcatgcacctatgcagacactcaagtgtcgaaaaacttttggacgcgtgatgcttcggctcataattcattgtctctatttttagtcaaccccgtatttccaaaatatgttcttttatcaatttgtgcattcatccgactctattttgggtgtt

SEQ ID NO: 123457 - DNA, 281 bp, Glycine max
tctacttatgtggcagggcgggctttcttcacttccttgactccaacgcgagctctgaccactgttcttccttcccgcgatgcttcttttcatgtccgcctgagtgggcttatagcctaaaccatacttcccacgatttccttgggtttttatcaggctagttatgccgccattgtctttgcctaaacccatcccgggttcataaccgttccccaacataactcgggccatcattaccgccgcatcggacagacaaggttgcccaaagagggagtccacgg

SEQ ID NO: 123458 - DNA, 281 bp, Glycine max
ttcacgctctagcaagttcttgttttgatttggcatctcaacctccatgatgttgtttttgaaacaaattgtaaaatgataaaagataatatgacaacctcaaaaaataccaaaatgttttccatgtcttattagctaaatgtagggttttcctttcctccatccaaaactcttactatttgtttggatggggaaattaaagaagacaaagtattttaacaaggatattaaaatgttttcctataatgtaacctgtttgaataggatattttaaaagtaat

SEQ ID NO: 123459 - DNA, 280 bp, Glycine max
tttagttaattttgatttcttactttttttattagtatatatatgtgaggggtagaaggtgtcatactaatcaacaccttgagacacgcaccccccccccccccttcacacccagagaaaaatgcatgacttttgtaagtgatcatatgatcactaactaacttgtaatttcaactatccatgtatgattgaatgccctaaatatatagttctcaactctcaaaaaaattctcacttgacaacatacctgacaaattaaggaaaattatacactaagggt

SEQ ID NO: 123460 - DNA, 284 bp, Glycine max
tgagatgatgaagtggtgaatggtgataacttcctgcttttattggtgagcccagacaggaccctgaccacataggtgagagatcacgaaaaccttaggacatcaggtggggtgctattgttgccaacaaaaattaacggggaccaaggcgacctaggcctatgggttcgttgcacacaggggaaggccctaacatggcgacctctaggctttctacctcccttaggagtacaagagggagaagcccagtagcccggataggctgctcggaagcaatggaaatc

SEQ ID NO: 123461 - DNA, 280 bp, Glycine max
tagtcaacttcttcaatcttatgttttcgcgccagaaccagcaccaccagcaccaggcatgtcatcatcacccggaggaacatctccaccaggtctagcagcagcaccctggtacattttcgcaatgatggggttgcagatcccttccaactccttctgcttgtcctcaaactcatccacttccgccaactggttgccctccaaccactgtatcgcatcctccacagccttctcaatcttctccttctcatccgggctcaacttctctccaatcttctca

SEQ ID NO: 123462 - DNA, 278 bp, Glycine max
taaccctataggggaaggaccttttcaagttctggagaggatcaataacaatgccatatatgtgggacctcccaaaagagtatggagtcagcaccaattttgacatttatgatttaatagtttttgcaggtggagctgatatagaggaggaggaactaatagattttaagtcaaatcctcttcaaggggaaggggatgatgcaaacctccataggaagggaccaaacactagagccatgatcaggaggctccaagaggattgggctatagctgctgaa

SEQ ID NO: 123463 - DNA, 282 bp, Glycine max
tgctcaagtcaacaccatcaaaagattatcctatccctagagggtttgcattatcatatgtgcattcttggatatattgtgtcatctatttgttcacatttgatatatgaaaataatgtgattttgtcgagaaatcatgtttagttgtttttaagcagtttcggctataaaagcacttctgactaaaagtaaaatattgcagtttatggctggattgaaattttcacttcatattttctaaataagagtttttaagcacaaactacttcattttaaatttaa

SEQ ID NO: 123464 - DNA, 284 bp, Glycine max
tcaatggaggaagagaataagggagtttagagagaaagtggcctggaaaattgaaggaagaaagggagaaaagttgaactttgaagtgtgactcacaaaactctcattcatcaaagttgtgacaagtattacacatgtttctatttatagcataggtcactaactaaatgaaattcactttgtttgtgaatttcattttcatttcatgtgaatataagaggaatattccaaggatatgtcaaaggcatcttagcatattccaaggatatgccaaaggcatctta

SEQ ID NO: 123465 - DNA, 283 bp, Glycine max
ttagtcaaacagaataatccgaaaatgtcaaagaattcggtgttgaaaaagcataacaagactttctgtgattggtttaaagatacaatctttgaagatgagaatgcttcaaaaacattaagaaagctagcagatgggcctaaaagaaatgttataacctggcaaggatatgacataaacaggtattcattttacacaaaagcacaagatgacaaaagtacaatgcagaacctcggggtcaccctaagggctgaatctcaacactttgcaagtgtcaatgacg

SEQ ID NO: 123466 - DNA, 282 bp, Glycine max
tcaagaaaaggccaaactcccttcaaaaatctgatttcaggcttaaatagttggctttgtttgtgctcatgcgcttagcgcaactctgaaccgcttagcgtgcattagtgaattttggcttagcgcggcttttctcgctcagcggatggaccaaagtggtgcgcttagcaggatgaccctttactcagcgaacatgcacagctcatccttcttccaaattcttcctcgcgcttagccgaggattgttgcgctcagcggacatctcgctaagccagcagattg

SEQ ID NO: 123467 - DNA, 164 bp, Glycine max
taacactcacctaagtaatgctatgatgaacactttggtaacttctacctatcacttaaacacttcaactctactctgtgagatccatccatctcttctttcagggagctacgatcttcagttgtacacctacatgaagactctctcggctactttaagaaacc

SEQ ID NO: 123468 - DNA, 284 bp, Glycine max
tgaacgactatcttgcaggagtcctatgcttgccagctttacttggcattgcagagcagtgacactcaccccagaggtgagagatgacttatacgttagaacatcgtcccccacccactcatagccaacaacagcaagtggggacgatggcgacctagcgctatggcttcgtcacacacagggaaatgccctaacatccccaccactacctttcctcactcccttagaagtagaagagggagaatcacattaaccgggataggctcctcggaagcaatggaaat

SEQ ID NO: 123469 - DNA, 282 bp, Glycine max
ttgacggagcttcaatggtgaggttttaagaagagaatagcaacgagagagagggggagaaaagcttctgaactttttggctgagtgagtgaggagagagagaacgtggctttgtgttttaagaaaaggctttctctctctctttttttttaaaaaaagttgtgccacatgtctttttttgagtggagcaaaaaggggcccactttttctcttgatgtgactcatactcagccacaagaagagaaaaatctgaccttttgaaatgctaaaatcctgcctcgg

SEQ ID NO: 123470 - DNA, 58 bp, Glycine max
actaactaccgggctcactgaaattctgttagacaggagagaaacctttgataagatg

SEQ ID NO: 123471 - DNA, 279 bp, Glycine max
tgatactaatttttttgaaaatttattgattatattaaaaaacaaatgtagttactaaagattttctatcaaatgtatttctttttttctcgaattctagataattactattacttttttataagtattattagaaataagagaagggacatataggtaaaaaaaagagagcgcgtgactaatttcaaattcttacttttttgttgaacttgaaattctaattttatcataaatcactaaaatttcaatttattttaaaattctctatccaaacatgtt

SEQ ID NO: 123472 - DNA, 283 bp, Glycine max
tgagtgagccaccatggagtgtttttattttgtaaatacatccttgtaaccctactatcattttgtataggggaagaatattcatattggcgaattataatggcgtgctcccattactacatttaattactaaatgtctatcttaacttcacgaaacgggaaagtccaagttttcccaacaccattatctctttgttcttggtagttttaggagtggtcaaagcatttgaccccaaggtgggctttaattgaccattagtgataacacaaactcttttttttt

SEQ ID NO: 123473 - DNA, 279 bp, Glycine max
ttcatcttctactcaatcatcaattggattacaattactcacttttgtttgtgtcaatgctcacttttatagtggtcttgcatcaaatttcataattgaacattccattgatcctctgccccttcacttaaatctgtgcaataaacattaggttccatttactaacaatagccaaagattgtatgtgaaaagtttctattctataagataataccaaactgatgaaatcaactaaaaagttcccatgtgaaaaataaataatgttaaaagtgtcataaa

SEQ ID NO: 123474 - DNA, 279 bp, Glycine max
ttgagggtgcgcagaccaccatcttttcatagtaaagtaccgataatgtgactaccatcaccatgatcgtctccctttccattattggcgggtaccacctgagacgccagacccctccacctttagggcgagatatttgaatgaacccccctcctttgagaaaatgttctgtagatacattctatacacaaccatattataaatgtaatgatactggctaacaaaggcaaccattaggaccttgcaagaatggactcaggaagatttcccgctagtgaa

SEQ ID NO: 123475 - DNA, 283 bp, Glycine max
tcaagaaaaaaaatggcctcaacatacttcttatttccagaaggaaattcaatcaataggcctccaatctttaatggaaagggttaccactactggaaaacccgaatgcaaatttttattgaggcaatagacttaaatatttcggaagccatagaaatagggccttatatacccaccacagtagaaagaattacaatagatggaagcacatcaagtgaaagcataacaatagaaaaacctagagatagatggtctgaagaggataaaagacgagtacaataca

SEQ ID NO: 123476 - DNA, 282 bp, Glycine max
tcttctacgacaggctcccctcctaatccctcagactcaccgtcctcaaactcgacggttcatgcttccgtacgcaaccgtcattcattcattcctatttattattatttttttaaaaaaaaattgatagatgatgcatgcgtttgtttgtgtacgacttcacgtttctcagatattcaagtttcgaagatggccaccgttgcggaactgaaggacgcggtggaggccgtgtttagtcacgtgcctcacaaggggccagcaaaaatttcatggtaagctgac

SEQ ID NO: 123477 - DNA, 283 bp, Glycine max
tgaagacaagactatacgaggtatcttccttgagtatagcaatatctctaagggctaccgtgtctacaacttgcaaactaagaaactcgtcatcagtcgagatgttgaagttgatgagtacgcttcttggaattgggatgaagaaaaaatggagaagaacgttcttataccctctcaactacctcaagaagaagctaaggaagaagacccaggtgaaccaccttcacctccaccacaacaacaagattaagaactatcatcaccagagtctactccaagatga

SEQ ID NO: 123478 - DNA, 282 bp, Glycine max
tgtaagagttgcaagatcatcttttttgacaactccgtgaaaaaaattgccgtcaatatgaagagataacaatttaaagagtgatcgaagactttcaaatggatttccactgaatttattgatagagagatcgagatatcttaatgatgaaagttttccaaatgatctaggaagagcaccaccaattgagttgttgtaaaaccgtagctgctcaatatttttaaatgccccaatatgatctgtcagattgcctgaaagtcgtgaactctgaactgcaagtct

SEQ ID NO: 123479 - DNA, 287 bp, Glycine max
ttgaatgctctattcaatggagttttttagaatatcttcagactgatcaacacatgcacagtggccaaggatgcatgggagatcctgaaaaccactcatgaaggaacctccaaagtgaagatgtccagattgcaactattggccacaaaattcgaaaatctgaagatgaaggaggaagagtgtattcatgacttccacatgaacattcttgaaattgccaatgcttgcactgccttgggagaaaggatgacagatgaaaagctggtgagaaagatcctcagatcctt

SEQ ID NO: 123480 - DNA, 279 bp, Glycine max
tatgaccattttaatttctcgtgtgtttccattgttcaataaccaatgtctcgatatattatgcacctgaatcggaaatccaagtgaaaagttatgaccatttgaatttctcgagggattttgttgttcaattttcagtgtctccatatatggtgtgcctgaatcggacctccgtgtgataacttatgaccatttgaatttcttgagagatttcgttgttcaatttcaagcgtctcgataaatgatgcgcctgaatcggacatccaagtgaaaagctat

SEQ ID NO: 123481 - DNA, 280 bp, Glycine max
tgggggctgctgttctcgtactttccgtgagcttgggggtttttgaagtgatggggaagagttttgggtgaagaaaacgttccccctccacccatttatattttcgtacaggggttgctcgcccaggcgagctaacctgtacttttttttttttgagaaacattaaccatgcctcccccccttacgggttagcgtttgcctactcgaacctacttaagttataatcaggcgacgattactttatttaaaacaaataatagtaataaaatactgtgaattc

SEQ ID NO: 123482 - DNA, 281 bp, Glycine max
taggaagatctgatgcagcattgtagttaacagctacacttaccaatggtgacacagaaaacttcatagctctaatggggtgtgcttcaatttctgtctcatttgttatagtagcattcttggtgatgaaatggtccaaaccagccaaggcaactgtgtttccacaaggaacatcctcaactgtttcatatttcttccccatccaaattgaagtcccctgaacactcttcacatacaggtctttcttctccccaggaacaaaatttggccccataattcta

SEQ ID NO: 123483 - DNA, 283 bp, Glycine max
tttagaaaaatcaatcgacaattactttttactcggttgtccgattgtttcccgtagtatatcgagatgcttgaaattcagaatagaagctgtgagcaaaatgaaacgataataactttttgctcggatgttcgattgtgtcccgtagtatatcgagatgcttgaaattcacaatataagctttgagcaaaatctaacgataatatctttttactcggatgtgcgattgtgtcccgtagtatatcgagacgctcgagatttagaacagaagcttttttaaaaa

SEQ ID NO: 123484 - DNA, 267 bp, Glycine max
tgtcagcagtcttttctccagagatcttctccaaacttcatcacctaatgataataatatggcactatatgccctttttcattatccccattttttgtgcagctgtcattccggttggcacaattttttctccttccaaccccaactaaaattttgttgcgtgaagaaaaccaacatttttacccgccctaaggtgaaattatttttggcacaaaaattcttaacctcaaactttgtagacgggatagctctgataccacattggtg

SEQ ID NO: 123485 - DNA, 279 bp, Glycine max
tagcttctgcatcaagcagtttcttatcaaccgccaaagacttctcttcaattccatcaaccaatgcattagcttcagctagctttgtatgagagaaagactggacttgggcatgctcttcttgtattgcacgcagagctctctcaagctgcaattgattgatttccaaaacatcaacatcagatcaaggaacatctaaacagacgtctcaagcgacaaccttaacaaatccaaaaatgccgtacaaatcttgtcataaaattgaaatacaaataaatt

SEQ ID NO: 123486 - DNA, 281 bp, Glycine max
tgatgataggatgatcctaaaagaatttatgtaacaaaggattcccttggattcaaaaggaaccctagggactttgtgtgagtaactgatgttggatgtaccctactatcacaattgtctttgggcatcctttatgagctcctgtttaatgagttttcttctcaaatgtgcaagtgcaaacctcgaggacttctttttgtttttttaatcataagtgggtgcgtattccattatagaatccaaactcaaaaataaaattagtccttctttgatccacatgg

SEQ ID NO: 123487 - DNA, 283 bp, Glycine max
ttagaccaaagcaactcaaaatctatgtatctaaaacccctcaatttagtggattttcaaggtttgagaagtgaaaatgagaatggggtaaattttgagcaaactctcacctcacacaagtctataaccttaatctaaacttgctcaaactggttttatgcctaaaattccaccaaatcaaaatttgactcctcaacacccaaattttaccctagaaatggctcttgccttcactttgggtcttttgtttttctctcttgcacagcccaagctttctcataag

SEQ ID NO: 123488 - DNA, 282 bp, Glycine max
ttctagcttttcattggtgtatttttatcttcttttggtgctctaaattgtgggagtgggctcaaatatatggggcaattttgatttgttttcttgcttgattagggtgaattaggggttggtatgagatggccctacgcctataatgcattttgaaacaataggacatgccacattgtccccgttctcttgctattgatgcctaaacgcgcgcccaccaagtgttcggtgaaatgcctcaatggcattagcgcgtgacttttgtaaggagacaacccatgg

SEQ ID NO: 123489 - DNA, 284 bp, Glycine max
ttaggaataagattaagaggcatttttcttttgatagaattcaaattcacatgtccaagcctagcatgtcacatatcagaacattcaacatttgcaacaaaagaaaaaatgctagatattttattaatagaaagaggcataaggcttaacttaaataaaccatcagaaatgtagcctttacaaataaaaacaacatgtctattaataacaactctattcaactcaaaacaatcttgtacccacgttggattaacaaagaagtacttattaaattttccaaatat

SEQ ID NO: 123490 - DNA, 284 bp, Glycine max
tgaagcacaaaaccaaagatccgttttttatttacgatggtttgacctgacgatgcaactatttatacgttgggacatacggacgaacagatggccgctattaacttcttttaatcactcattaagacaccgtgactttgataccatgtcatattctattggttatcagaaagacctcttaaatcagtctcatgtatcataatcacacacattcattcaaacattgatcattcacactcaaaagacttaaaacgtttaggtagtaaggataaataatatttgaa

SEQ ID NO: 123491 - DNA, 166 bp, Glycine max
actaactaccggcgcaatgctatagaggtgtggtagaggtttatttttcgtgcgcctggctattaggtgcttgtgtgaagatctactgagggagatatgaaactgattgctatatacttgtactggggaatgcacgagacacatacaatggtctcctcttattttt

SEQ ID NO: 123492 - DNA, 277 bp, Glycine max
tctttgctggaaaattccttcctttttggtgttttggtttgtgttaaggtggtgtttggtaatggatgtgcggctggcgggccttgtggctgatttaagggtggcctttgtggttgattaggtattcttagctgatagggtgatgagtaatgagaagcgttgatattggcttaataatgacattgttgagctggtggggaatttggccacgtaggaacgacaatcacaacatgggttcctccctccttctcatcttttctaatagccacaggctttc

SEQ ID NO: 123493 - DNA, 278 bp, Glycine max
tgcttctacatgattgatatggcattctactctgtactcactttttgcttatgatatggtaatttgatggattaagctaattatgcaagatcatgtagggatgcaaatcaagaggtattaaactttgtggggcacttgctgcagctggaatgattgttgcatgaacctctaaatgtcttcctaattatcaaagagagaagtatgttgtagtaacacttgtggattgccgctcgcttcttgatccagtccttcccagtaaccatgctggtaagccatat

SEQ ID NO: 123494 - DNA, 281 bp, Glycine max
tattcaccacagaggcatattggcttatcgagcgtggctcgtttagccgcaaccagaatactaaaagcctctgatacacagacctaactaagcttactcgctaagcgcgacacgccggcttagtgagttcatacgaactcagaaattaaaaacttgaaatttaaatgctcgctaagtcgtagtgcaatggcttagcgagttcatacaaatatgcataaatttaaataggaatgatgaactcgcttagcgggatagggcccgcttaacgtgttcatcagaaa

SEQ ID NO: 123495 - DNA, 280 bp, Glycine max
ttttggtcaattggcttgtatattctatcatggccttcatcatgtcctcattcatacatttcattctaaaattcagagattgatgcaaagactattactcaaagctagtcgttcactcacagtttaagatcacactctcaccggttatggttcaagcttttctttctcaatcaacctgtgtactgactaccaattctaattgcaagttcacattcttgttcattctttgtctaacatacatacttgctcaaacttatgaaaagagacacaaactccatca

SEQ ID NO: 123496 - DNA, 282 bp, Glycine max
tgtgacatctatagcattcaacattttctttactctgtcttcccctaccccttcctctaccaccattcctccctcttcctcgattaccaccccttcctgcagaagagactttcaaggcctgttcttcatctttctcaagagtatactgcattctttgttcatgcactaagaggctactttgcaattcatcgatggtgagagcagtgacatcattagactcttcaattgaacatacaacataattgaattttgatgtcatggacctaagaaccttctctacca

SEQ ID NO: 123497 - DNA, 275 bp, Glycine max
ttgatatcttttaaaactctattttctatattattttttttgttttaatcttctaagagattttatgtttgttttgtatctttatcattattattattattattattattattattattattattatttcatgatataagaatttcctatcaagtaataatggcaaatagttactagaaagagttaactatggatttagtccttgaacttttttgagttttcacttttaatttttgaataaaaaattaatccgtcttaatcattaatcttttatt

SEQ ID NO: 123498 - DNA, 309 bp, Glycine max
cgccacttttagtgaccttagaatactccgcttcttatccaggctcatctttttggtgaagctccttcttccatggcttatttcctagtggatggcgctgcctcttacctcttctcctttgtcttccactgcatctcaatggtggaacatcaccattaaaggacctcattggagctcaaagatctatcctccatagaagctccacaagcaagcttccattaaacctacatgtattgtccatactcaaatagtttaatattctgctatgttaactatgtctaacatgctaaaaccaagagcgttcattca

SEQ ID NO: 123499 - DNA, 281 bp, Glycine max
tctcgatatattatgcgcctgaatctgacttccgtgtgacaagttatgaccatttgaatttctcgacaccatacgttgttcaatttcgagcgtctcgatatattatgcgcctgaatcggacgtccgtgtgacaagttatgaccatttgagtttctcgagagctttcgttgttcaatttccagcttctcgatatattatgcgcctgaatcggacttccgtgtgaaaagttatgaccattggaatttctcgagagcttccgatgttcaatttcgagcgtctcg

SEQ ID NO: 123500 - DNA, 282 bp, Glycine max
tacctcgaacccaaacagtgacattttttgtgagatctaaaacaatggcgcgatgacttgaagctttcctcgtacctcgattaggtcaccacgaaatgtacctagggttaaccgaaacaacacaaacctagtaggttatacgaaatgaagcttagacatcaaatactttacctcactcaaaatgacacaatgcaagaaaaaacctaatccttgcagcgagcacgacttccacaaaccaactccttgcaacacacacaaacaaacatccttgcagtgagcaca

SEQ ID NO: 123501 - DNA, 216 bp, Glycine max
tcatgctcagtatgatgcatgcacctgacctcaactctcaaatgcaaagtagtatcatccccaaggagatagcctaagcgtgttcacacgacactctcacttaggaaaactaggcaataagtcgtccaggtcactatgttgtgcacaagcaacttccccccccccccctccatggtgatcagcctgagcctcatgggaggtccaaaccgagtgaca

SEQ ID NO: 123502 - DNA, 283 bp, Glycine max
tctcagaagcattggatgaggaaagaacttaggaaatttttagtcatccaactcgctcagcgtgccccatgcgctaagcgagatgtaccctatgcgctgagtgagtatcaattctcgctaagggagccaacccccatccattggttgttggggtctcgctaagtgagatagtcgtgctaagcctaagatcctctggggttgtgcatttattgaaattgggctaagcgagtcatcttgctaagcgcgacatagtctctcgctaagtgcgcctatgcgctaagcg

SEQ ID NO: 123503 - DNA, 282 bp, Glycine max
ccagctaggaaaaatgagaaactgttctttttcacccgttgcaacgaggcattcaagacagagaactatgggcagataagccagctaaaagcgggaacgaagctgaaacaaaggatgcagggaggccagctattggcccaaaggaagaaggagcattagctgctctgagctcggacttccatgcctgtggaaaattaactgattggtcattcgcattccacagtgccttatgatataagctaagtcaatggccagccttaagtttacataggaggtaaaggc

SEQ ID NO: 123504 - DNA, 83 bp, Glycine max
gacaaaaacaacgagggaaaccccatttcaaaaggggagaaaacagaccacccaacgaaagccaacgaagaaaaacccgaaaa

SEQ ID NO: 123505 - DNA, 278 bp, Glycine max
tctcaggggacccgtacagactttttgctcctctgtcataaccatgccatgtgcccgccactggtgtctttcttcccttagcaacgagagatacctatagcttcaccatatagctccgctaaaattgtaccggccatactttaacttgcaagcccttttggcctattgatccagggctctcgcaaatattgcatgatttttccgcttcccagagcactactacctaacgcgtgtatcaaacaacggaaactcatcctttgacaggattgcctttcata

SEQ ID NO: 123506 - DNA, 282 bp, Glycine max
tccttgagaagcatccttgagatgtttccctgagaagattcctagagaagctagagcatagctacacacacccatgtatagctaagctcacctccttgagatgagaagctagagcttagctgctacacaccccctataatagctaagctcacccccatgcaaacatacatgaaaatagaaaaaagtccttactagaaagactactcaaaattccctgaaatacaaggctaaaaccctatactactatagtggccaaaatacaaggtccaaaagaaggaaaaa

SEQ ID NO: 123507 - DNA, 278 bp, Glycine max
tctttgatgctgtaaggttgttttaatgtatgcatgagatagatatgtattcatttgatgcacacaacaccaacaccctttttgcacacacggtgagttgaaaaggggccctatactcaagccatgggaacataaggagtggaggtgaatctatggtcatgctgggtctccgacttgcttgataacagtgaaccctcatctagagtttttctctttgataacatattgctgctggtagtccctactgtcgtaatatgtttgtcgaaggggatgatacc

SEQ ID NO: 123508 - DNA, 303 bp, Glycine max
ggtgaccctatctaatactcctgcttgaaggccaactggatgctttgtttaacttggtgacccagctagccttgaatcacaaatctgttcctgttgcaagggtttgtggtttgtgctcctttgctgaccaccatacatacctttgcccttccatgcaacaatctggaacatttgagcatcctgaagcttatgctgcaaatatttacaatagacctggttaacctcagcagccaaaacaaccactgcagaccaatttatgacctttccagcaacagatacatccctgaatggaggaatcatcct

SEQ ID NO: 123509 - DNA, 278 bp, Glycine max
ttatagccatgtaaacacttatgctcagggtttgtttccccattcagatcgaaccaatgtgctccattggatcctaggctctttcagagttctgataccacatgatgtaagcttcattggagcttgtaggcctaggatcttcttcatcaatggattcctttgcttcttggaagatgaatggcaacggaatggatagggaagggagagaggagacgccacttcaaggagaagatgagtttataaaaagctcatcaccatacgaggctatggataagagc

SEQ ID NO: 123510 - DNA, 454 bp, Glycine max
  unsure (1)..(454): unsure at all n locations
atctagatctagctcctagtgtaagctactgtttagttttttttttgctcagcanaagtataagtagtattaaatgagtaccagaggtactaagcttacaaatattgatatcaagcactaggttccagatcagactngctgcagtcttgataggaacccaagcctgaaatcagaattacataatttgaacacaactgtaacatgatactcctactctaactcctaaaagctaatcgaatattggtcgaccaatggttaaagcttgtctcanaatccttctctaagttacgaagccaagtccataataaaaataatgcatcatccatgattntgttagcattgaatatgtcgttagaaaagataatgttgttccgctgctgccaaatagaccatgtcaacgctagccaccaacacttncacctgctgaccttacaagctcagccacccaaatata

SEQ ID NO: 123511 - DNA, 412 bp, Glycine max
  unsure (1)..(412): unsure at all n locations
gcggattggtcttcgccagtgaaaggatcgatgtgggtccgaatatatngcaaattgatcatcctactangacgactgagaaaacttgggcaaatgaagagggtgagaaagagggagaaacccatgctgtgactgccattcctatacggccaagtttcccaccaaacccaacaatgtcattactcagtcaataacaaacctcctccttacccaccacccagttatccacataggccatccctaaatcaaccacaaagcctgtctaccgcacttccaatgaagaagaccacctttagcacaaaccagaaaaacaccaacaaaaaggaattttgcagcaaaaagcctgtagggttcaaccccaaattccgtgtcatatgctaaacttgatcccatatccactcaataattcaat

SEQ ID NO: 123512 - DNA, 440 bp, Glycine max
  unsure (1)..(440): unsure at all n locations
gatgagtcgcaccaagctgtgcactactcggagatggcaggggangtgaagggtccaaggagttagagtggtatatgagaaccaatgatgacnaccagattaaacccattgaagaaacatgtaccttccatcttggcattaaagaggaacaagttactcaagttagcaacccactttcaatggaagataagaacaacttacaacaagttatccgagagcatgctaacctatntgcatggcccgcgaccgacatgccaagcatagatccaaccttccattggtgtagattatccatatgcagagacaccaaacccatagatcagaagaagagaaagatggnggaagaaaggtgttaggtagtgcggaagagggtcgccaactaatggcgacccaatttatcagacaggtagactacaccacatggctatcaaatatagtca

SEQ ID NO: 123513 - DNA, 343 bp, Glycine max
  unsure (1)..(343): unsure at all n locations
ttttgcaaagatgtacgtcaactacataattctacaatattgactcagttcaaggatcttacatttgtatcctatataatttaagctcatttttctattggacatatatttgntataatcttgaattagaagtcaattactttgttgcanaggagaccaattgttagcatcgtgatgcttacacattgtaatgtggcttgggcactacttgtgctcaaggcctccagttatctcattaataatattatatgntttgctgtngtacaatataaatgttcaccttaaaagtagtcaaaattttatgtaacataaacaggtttataatcatatctcgttgtcaatg

SEQ ID NO: 123514 - DNA, 384 bp, Glycine max
  unsure (1)..(384): unsure at all n locations
taaagtcccatctaaagtgactacgtttgcgtggaggttactcaatgataggctgccaaccaaagataattngaggaggaaacacgtagagttgaatgatcacttatgtcccttttgcagcagcatcgaggagagcgcgagtcatctattnttccactgcagtaaagtactttcgctgtggtgggaatccttgtcttgggtgaatatggtggttgtcttcccgaatcacccaagacagcactttatccagcacatgtatcaatcgtatgaaggtctgatggcgactagatggaaatggtggtggttagcattgacatggtccatttggaagcacagaaatagcattattntctcttgcagcaccnttcatacannataaatgat

SEQ ID NO: 123515 - DNA, 473 bp, Glycine max
  unsure (1)..(473): unsure at all n locations
ctagcttagaactgatatgaaaggatcatggtaaaccatagtattactcgattggatatacttattttttagtgtaataataataaacatgtttctatantagaataataataaacctatttgttagatctaacacattctctcagattaattatgtggtagtataagcctctgacaatcaatggagcacaaaggctcggtgtactttttccatatttttatattttcattcttagtaatatatataaggtgtggggttgatgtcactacaagaaaatatatttttttgtgatgataatattcatcattaaaagctaaaaagctcataactagatatatttaatgataaaaatatgattgttcattagttggcactgatatgtgagtcactattaaattagtgacgatatntttagggtcacaaaagaatatatttattgtgatgcacatcgtcgcactaatatttatatata

SEQ ID NO: 123516 - DNA, 466 bp, Glycine max
cttgaactagctttgcgtgcgtctgggctacatatccaacatattccttcataccactattagatcttagtctgagacactcaatgtgctcgtcctcttcctttctaagaacatctatcagcaaacatgagaagcctagaagatgatctcataaaaacctggtgatatccgcttcaccagcaccactacctatatctcacagtgcttcggacacttcgtctcgcctgcttatgtggaggagattcgtataataatcagatacttgagccttccatatacatcttatctctatgacattcctcatgcatccacatatgtatggtatcgtatacaatatcatgtggacaacacactgctccacttctactacatctcacaagaatctcacacttcgatcaagatataataacacatcgaatagcaagcatatgcaatagttatgctaagactcaattctatatgcaat

SEQ ID NO: 123517 - DNA, 369 bp, Glycine max
gaaagtagaaacaaaaacaagaactttaccaaaagtaaaacgataattaaaagtccacatcagaaatttaagagtgtcgggaagaagaagacaaacacatgaattatactggttcgaccacaaactgtgcctacatccagtccccaagcaacctgcggttcttgagagttctttcaacctttgtaaatcctttacaagccaaagatccacaagggatgtacccttccttgttctctttgaataaccaagtggatgtacccttcacttgaactgatccacaagagatgtactctctcttgttctcagtataacaatccccaagtagatgtaccctctacttgtaccacaaaggatgtaccctccaatgtg

SEQ ID NO: 123518 - DNA, 414 bp, Glycine max
  unsure (1)..(414): unsure at all n locations
gctaagctctattgagataggagaggagaggcnanaggaaatggatgaagaatagaaatttgacagcaatgaagttacttgcgagaatattcctgatagtgatattgacttgaatacgaaatgagtaaaaaaaaagaaccataatggtagagtgaagatcttaagattattgtattgtttgggtactagcttgggtgtggtatacagggctcaatcactttcaagctaaaatatttggtatatgataaattatgtaattagtgcttcatagttaatgcatacatngatcacataaagtcggattttatggattggttagcaaaagctagttagactggtgatgtatcagagaaaaagaaccagtactatggcgaccttttattttgtgtgactaactagtagtgtatgaccttg

SEQ ID NO: 123519 - DNA, 431 bp, Glycine max
  unsure (1)..(431): unsure at all n locations
caccttaatggtctctttcacttttgtcggntaaaatgaacatttcaaaagtctaactgtgtaatcgattactagaaacctgtaatcgattaccagtgaaaaatttcagaacaagattgttgaatagacacatctcttcaaatcantttgaaaaggaacgaagggcctatatatatgctgttgttttcaaaatgcaagagagagatattccaagagaaattcattgtcaaatgctctctcaacaactcttgggcaaacacttgcaaatctattgagagttcatctaggaatttcaaattgtagtatacactctaaaggaggcaaatgtttctgttcttctcanaaagtcaattgtaatcaagagactggntgtctcttgaatngtgaatntcctgaacacaanggaaagggaattccttgggtgtcaaaag

SEQ ID NO: 123520 - DNA, 303 bp, Glycine max
  unsure (1)..(303): unsure at all n locations
gtgatgtgaaccttacggtgaggaacatttgatacaggctatggagttctggatgacaccacttccaaanagggaagataagtcanggtagacgccacaaggattaccttgataaagttgagaatggttcaacaaggaacccanagagaagctctcatccaaatttatgataatgccaaaagtccttttattgaaaacaaaaaccaatacttatagtgtatctgaacaacaagataaaaatagacatggaccttcaaaacagtatggggccaaaaaattattacataaaaaatagaacatatt

SEQ ID NO: 123521 - DNA, 187 bp, Glycine max
  unsure (1)..(187): unsure at all n locations
aaagaagaacanntatacaacacttgaaaacatgtgaaagtcgctgaagttatcattcatgtcatgccattattttgagcaataaaacaaataagctttaatcagctagacaagaaattatgtgcgtgtgtgtgtattatttagaccaattcctattatcctatagtattaactatttaaatgacac

SEQ ID NO: 123522 - DNA, 492 bp, Glycine max
  unsure (1)..(492): unsure at all n locations
tactaagctgaaggaaactagacgccttgttaacatggtaaccgaactgccatgaataaaaatctgacctatcgcaagactctatggtttatgctcctcttncgaccaccatatagacctttgcccttctgtgcagcaatctggagcaattgaacagcttgaagcttatgctgcaagcatctacaatagacctcctcaaccttagcagcaaaatcaaccacagtagaacaattatgacctctctagcaacagatacaatctcgaatggaggaatcactctagtctcagatggtcaagccctcatcaacaacaatagcagcctgctccttccttccaaaatgttgctagtccaagtagaccatacgttcctcctccagtgcaacaacaacaacaacaacaacaacaacatcaacagagacaataatccactactgaggcccctcctaaccttcattggagggaatagtgaggcaaatgacaatacagaacatg

SEQ ID NO: 123523 - DNA, 292 bp, Glycine max
  unsure (1)..(292): unsure at all n locations
aatttgtttgggaataaatgtggggggtttttggttcattggataactttgtttgttggctatgcttcatgatgtattttgggccatacttgatgtacattgtatattggttacaatgtggacatgctgaatgaaatgttgtttctcaaacgctatagagctaaataaaaacacgaataatgaaaaaaaaagcagttagttgagtgaataagatcttaaatggcacaagaatgatgaaactcttgcgtctactctttatgtntaaactttatctttacttctatttattgtc

SEQ ID NO: 123524 - DNA, 335 bp, Glycine max
  unsure (1)..(335): unsure at all n locations
aatgaagtggaagaattagcctctaatagaattttgtccgaggatgagctntaggcttagaaatccttacagtaagatctgtgggatgcttcanatgcctatgaatctctattgaggcanaaatctatagccaagtggttaaaagaaggtgattgcaacacagcttatttccacaaagtcataaatttcagaagaaattacaatgctctccaaggaattctcattgatggtgtgtgggttcagcaacctaatgtagtgaagaacgaagctgtaatttcttcctaagagattactgacaacatttttcagaacatggtacttgcagagtccctttg

SEQ ID NO: 123525 - DNA, 207 bp, Glycine max
  unsure (1)..(207): unsure at all n locations
tgttctttagtttaaacaccgacgtctcttcgcgggggctatacccaattngaactttaattttcttcctttgcggaaaaggctttgtgtaggagttggcttctttgactggcgtgcatggtgaacgtatgtgtgtatatgaatgatgaagaacgatagagaaaagggtaacgaggttgaccagagttacatacagcagcaccactc

SEQ ID NO: 123526 - DNA, 277 bp, Glycine max
  unsure (1)..(277): unsure at all n locations
gagggagagagaaagctgtctgaanaaaaaaatgagggctgagtgaacagagagaaacgctttttggttttaaataaaagggtttcctctttttctattatnttattcaagctctgccacatgtccctatntgattggagccaaagggcccactttctctttttgactgtgacccatactcagtcacaaaagtgagaaaaatctgacctttgaaacgctaaaatcctgcctcggtttgcgtgccatttctctggttccagtttctcgcgtttctctg

SEQ ID NO: 123527 - DNA, 416 bp, Glycine max
  unsure (1)..(416): unsure at all n locations
actcagctnganggcaactggatgcatgggttaactgggtacctatctggcctngaatcaaaaatctgtacctgtcgcanaggtttgtcgtttgtgctcctctgctgaccaccatacaaacctttgcccttccatgcagcaacctggagcaattaagcagcctgaagcttatgctgcaaatatttacaatagacctcctcaacctcagcagcaaaatcaaccacagcagaataattatgacctctccagcaacagatacaaccctggatggaggaatcaccctaatctcagatggtccagccctcagcaataacaacagcagcctgctccttccttccaaaatgctgctggcccaagcagaccatacattcctccaccaatccaacaacagcaacaaccccaaaaataaccaacag

SEQ ID NO: 123528 - DNA, 406 bp, Glycine max
  unsure (1)..(406): unsure at all n locations
actcaagctggatattatcctgacgagggatcgagagtttagtaatttatgctacagcttagaacacaagaacatgattgattagagaaatatatttccatgcatcagctggttagttagaaagacccaacatacctacctactactgtcattgtatttaccttgcattttatnagttttagcatacaagtttagtttaaattctatttgaaattatcacttatacatgttctctcaacaatgcttcgattctgaacttaattcaggctaacattagttccctgtgttcgatactcggattcatccgttttaaatttaaatacttgatgatccggtgcactttccgataaacccccattgaaatttccttgagatataaatgcacaaaaagtaactgcaatgggga

SEQ ID NO: 123529 - DNA, 315 bp, Glycine max
  unsure (1)..(315): unsure at all n locations
gaactggcgctaacatgctaatagaaagaggtgcacatgtacaccttgntaagtgtaagtgattcagtcttctacatctgtatgagactctgtgtggactacggtgtctgatgtactgatgtactactactgtcatttcatcctggcacatacctgtgtttgatacatgattatattactaacatcttagatgccaatgggcatgtgattctttcatcaattataacacggtcaggctgtatgaacttaaattaccattctctctatagatcaaacatgggctatgttagatgccactgtaactngtatcataca

SEQ ID NO: 123530 - DNA, 463 bp, Glycine max
  unsure (1)..(463): unsure at all n locations
tatcaattgctgaaagatcccaatgaaaggaagtggctaaagtcagaatagttctgattgttataggtttcacaactggggaaaatgtttctttgaaatcaaaaccaggttgttgatggaagccttttgctacaagacgtgccttgtacttactgacagacccatctgaattatgcttgactctaaaaacccacttgcaaccaattggttgcctattaggaggtttaggaacgaattcccatgtattgtttttgagtagtgcaaccatttcttcatccatagcatctttccacttaggatctttaagtgttgttttgacagttttaggcacaacatgagttagaagcaaggttggttggagtctaggcttgaaaattccattttttgatcttgttgtcataggatgaatggtangaggtatgactgaattggtagaggaaactggttgcatattttcataatt

SEQ ID NO: 123531 - DNA, 296 bp, Glycine max
  unsure (1)..(296): unsure at all n locations
aaactcttgccaaaacacaactcaaaatcacaacttttcacatacaaataccccaataacatttccttcgttccaattcgttaaccattggatcgactcgaaaattttactggaagtctcaggtacataagtctacattttgaccgttgggatctgctagcaaatgtccacaaccccatatgtactacccttttcacaaccatccatacacaagcattnttctgcacttatacaaaattttgttgcacatttcaacagcaaaattctgcataaagtgcagatntcgaanaccactc

SEQ ID NO: 123532 - DNA, 392 bp, Glycine max
  unsure (1)..(392): unsure at all n locations
tgatcatatgcttgataattgcaaaaaaaaaaaactggggcaagtgaagagggtgagaatgagggagaaacccatgctgtgactgccattcctatacagccaagtntcccaccaacccaacaatgtcattactcagccaataacaaaccttctccttacccaccacccagttatccacaaagtccatccctaaatcaaccacaaagcctgtctaccgcacttccaatgacgaacaccacctttagcacaaaccaaaacaccaaccaagaaatgatatttgcagcgaanaagcctgttgaattcaccccaattcggtatcctgtgctgacttgctcccatatctacttgataattcaatggtagccataaccccagcaagggtcataacctcc

SEQ ID NO: 123533 - DNA, 469 bp, Glycine max
  unsure (1)..(469): unsure at all n locations
gaagcatgagcacatattatagcattctatgctacagtatcaggtttatctatagccaaanatgcttgatgtgcatagtccactgtgccgcattttgagtacatagtgatcatagcactctccccagagaggtatgcaactagccccttctatattgcatctgcatggatttgagcaccgcaaatcaaatctgagacagcagagcatgcttggaaaatgttgctatagatgaatgaattcaataacactcctttacttcttattgtcttaaaaacctcaagagccctgtcaaatttaccactntggcaatatccagcgattaaagcactccatgagaaatcatttggttcatgtatgctctcaaatgcttgacgcgcagcttcaaaccttgcacacttaacatanaaatccactagtggagtaccaactgagacctctgattccaagccaagntttatacagtaactat

SEQ ID NO: 123534 - DNA, 299 bp, Glycine max
agacctccataatcatggcgcttctttatcttttccgatggctggccaaagcatgaagctcttcctttgacgtcacaagataccgttcattgttcgtggcggcttgaggagtacggatcgcatttgaataggttgcagccgatgggtcgacacgattaacgtactgtttatatgcgtggcgagatgcaacgtttgacggagggatagatgctatcctatgccccaagggccttgtgtacaacactctaacagacttgcctacacatcatgggaagcactatggtctatgagcctacggt

SEQ ID NO: 123535 - DNA, 449 bp, Glycine max
tacagcagatgccactctactctaagtgttgaagtattgttttcaggaagcatacatatctacatcacgaaaacatcatagtggaaaggaattgctgtgctgtgatccagaaaatccttccacccatgcataaagatcatgggagtgtaactactcctttttcatcggagatgtcaatgtgggatagctcttattgacctaggagccaatatcaatgtgatgccaatctccatgtgtagaagattgagagagctggaaatatgcctactcgaatgactttacaattagttgaccgcttcattaccaagccatatggagtaattgaagatgttttggtacagtaaaacattgtatcttcccgacaaacttgtggtaattatatctctgaagagaatacattcctataaattgggaagccattcatgtgaccgtagctgatattgatatgg

SEQ ID NO: 123536 - DNA, 449 bp, Glycine max
  unsure (1)..(449): unsure at all n locations
tcgtacaagaatgatgaggtcccacttacacgcatattgtggatagcattccaaggtattatagaatttgggaatacatttttatatttcatcaacattttggtaaccccaaatgtattaaatagggtaaaagccattttcaatctcaataactgatgttcttttatttagagaattaggagttcaaaataagataagaggtttttcgttgtttactacaagtcttagctagaatcacatgaaattcaaaattaaatatatcttaccaacatcaaactccaatgttgcaacgttgaagtccaacacaagctntctggtggagtctctttggtccaattctggagataacaaataagtgattgagccatagtctangtgtagaatgaactagttatagacaatatgctagttgcagaatgactaggtattacaacatctaaagaacatgg

SEQ ID NO: 123537 - DNA, 397 bp, Glycine max
  unsure (1)..(397): unsure at all n locations
actcttaatactcaagctcggtactccaatctttcctgcttggctgcacaatcttctctataattctcttgatttccttgttagaaatatatgcctgtccattagtctggnggtggtatggtgtggataccctgtgtaccaccccgtactctctaagcacggcatgcattgtcctattgcaaaaatgggttccttgatcactaacaattgctataagaactccaaacctgcagaacagattatacctgacaaagtctgcgacaactttagcatcattacttctagtgcgctagcttctcaacattttgaaacatactcaactgccatgagaatgtaaacatatcctctagagacatgaaaaggacccatgaatctataccccaacatcaacaccttc

SEQ ID NO: 123538 - DNA, 203 bp, Glycine max
  unsure (1)..(203): unsure at all n locations
tcttcgacgttcttcattcgttcttcagtcttcaacgggtaaataccttaaaccaagcttttcaattcattctatgtacccgtggtggtccacatttggattcatgtatttttattctcgtattcatttactttctataccctcttttgacgtgcttaagccatntatntaaagtcatttctcgcttaacctaaaaataaaat

SEQ ID NO: 123539 - DNA, 437 bp, Glycine max
  unsure (1)..(437): unsure at all n locations
cttgcggatntggtcttcgctggagaaatgatcgaagtgggtcttaatttatgcatatctgatcatcatgctttgataatngcaaaanaaaaaacaactggggcaagtgaagagggtgagaatgagggagaaacccatgctgtgactggcattcctatacagccaagtttcccacccacccaacaatgtcattactcagccaataacaaacctttctcttacccaccacccagttatccacaaagtccatccctaaatcaaccacatagcctgtctaccgcacttccaatgacgaacaccacctttagcacaaaccanaacaccaaccaagaaatgtaatttgcagcgaataagcctgttgaattcaccccaattccggtatcctgtgctgacttgctcccatatctacttgataattcaatggtagccataacccc

SEQ ID NO: 123540 - DNA, 441 bp, Glycine max
gctagcgcaagaaggcccacgaagaagctagaggcacgctgagtgttttttctgcgtctagcgcgtgatcatagccatactcactaagcccagaaagcccgctgagcgcgggatcgcgtgaatattaagtaccttatgcctataaaagaagtcgaaagccttggagaaagacacaccaagactgagatctctctattgaatacacccaaagtctaagcatctctcttagggaaaattcctctctctctagccattctcccctcgttctattaccatccattttcttcttctatctacattaaccgctaaagtgtaaagtctatcatgacaacgagaggttaaaccccctctgtgggagcctagtagccaacaccccggtaatgctacttctattactatattaaatgcaatctctgatctattggctatttctagtcttca

SEQ ID NO: 123541 - DNA, 464 bp, Glycine max
  unsure (1)..(464): unsure at all n locations
ctaagacaatcctaacagtccttgtgatctattctctaaatattnctattcctatcacatagcttgcctcacccatatctttcatgtcaaaggtgttagagagaaacttctcagtctcacttaatagaccaagatcattagttgcaagcaagatgtcatcaacatacaaaataagaaatatataatttctctcactgacctttagatatatacaccgatcaataatgttttccttaaatccaaacaacgtaatagtatcattgaacttaagataccattgttaggaagcctgtntaagtccatatattgatntcttaagtttacacaccatgtattcctttccatcttcaatgaaccccactgggtggtccatataaatatcttcctctaaattcccattcanaaagggaaatttaacatccatttgatgcaactcaagatcataatgagctactagtgctatg

SEQ ID NO: 123542 - DNA, 441 bp, Glycine max
  unsure (1)..(441): unsure at all n locations
agctgtatgaagatgggaattggaggtatgggtttcagacaccttcatatttttaatcttgatatactacgaaagtaatattagaatttgatgaacaaccaagatactatagttgttaaaatttacaaagttaaatacttttccaataataataatgtgtttatattaatatatattagtttaaaaagtaatataatttctctctttgaaagacagtaaatagtttcaagacatagttattattattntctggagggagagatattatacgaattaacattattaataaaaaaatcttttatgagaaacattagagaaacgaacttatataataaacaagaaagagatatntattattctggaagtaaatctattgatctgagcganaagatagtcagtatgttgaaagaaataatttttgaactatgttaaaagaatcat

SEQ ID NO: 123543 - DNA, 487 bp, Glycine max
  unsure (1)..(487): unsure at all n locations
ctcagcttctccacactntagttacaatgtattccttcacatactatttccataggactnttcaccaaanaaaactatttcactaggactatgttttctacaaaaggcatacataattggctcttggatgtgctcaacaagaactttcattagcaaggcgtgaagataacagctaaaaaatgatcctgccatatgtttgaactttgaacaccagttttaaccccccccccccggttcatacatattcttgatcattaaacttcacaaaaaggtatacagatttcacaatagataagggaatataagaagacggngggaaacaaaaattgaaagaaattatcttcaacaataacatacttgatttgctttcgtctagacccattaaaaattgtccgctttatgtacggtgaaggaacctcttgatgctatattcactctgttatctgaaaatagacagatattagcaataaactttgttacttttaag

SEQ ID NO: 123544 - DNA, 422 bp, Glycine max
  unsure (1)..(422): unsure at all n locations
tagaaaggtccacccctaactcattgctcttacgaacatgannatggacatcaccataatcaaatccatgtgtcccacactcaaagataagcttacaaaataattataattaaaacaatttaagaaacatcaattaactatgacataaactctatcatctttagatcatggtatttgaaagtaaataaaaccaataacatccagctcacataagccaaacatctcatattcaactatcatgaaacaattcaagaatcaacatcatgcatcaactatcaagcattatcaacatgagttcatcaatcatcatcaacatgaacaccaaacatcaacaccaacgacagactctactncatggatatntacaccacatganggaataaccaaagtacatgccttaacatgggtgtccctttgatcat

SEQ ID NO: 123545 - DNA, 472 bp, Glycine max
  unsure (1)..(472): unsure at all n locations
actcagctatgctgaacatcacataacctataacctgttggtttattctgcacaacagaacgattatgacctctccatcgacaggtacaatgcccggtggaggaatcatnccaaccctacatggtcgaatccttgacaacagcagccacgatcacaacaaccttattgtcataatgttgctggcccatgcagaccatacgttcctccaccaatccagtagccacaactacaacagttacagccccataaacaacagacagctgaggctcctccgcaaccttcccttgaagaacttgtgagacaaatgactatgcataacatgcagtttcaataagagaccagagcctccattcacagcataactaatcaaatgggacaattggctacacagttaaatcagacaacagtcccagaattttgacagagtaccttctctatctgtccagaatcccataatgtgagtgcattacat

SEQ ID NO: 123546 - DNA, 362 bp, Glycine max
  unsure (1)..(362): unsure at all n locations
tgtaatcgattacacacatactgtaatcgattaccagtagagtttttcatanaacattctcaacaatcacatcttttacttggntcttgaatggccatcanaggcttatatatatgtgactcgagacacaaatttgccaagagttatgtagaacaaaaaggtcttatcctcttaacaagcaaaatggttttatcctcttacaaattccttggccaaaacacttgtgattcaataaggaattatttgagtgctcaaattgttcaatctatctctntcaagagagatatcttcttctcttcttctttattctgacaagggattaagagaccgatggtctctttgtgtgaaaggattctaaacac

SEQ ID NO: 123547 - DNA, 422 bp, Glycine max
  unsure (1)..(422): unsure at all n locations
cttggtctagtccatctttccttactaaatgggctntcatagatttttcttgccttcaccnngaccctattgggttcttcaacctaacaaccttgtattcaaattcctctaaggttacttttccttttcttccaattaacaacattatggaagaaccttgngttactatcaccttccaaatttcatctcattattgccttttttttcttaaaagcaattcattgcaacttgaagttttccaaaactcttcttgaaagtctctcctcttctttatctctttcgcattatgtgcgtcaacttcccctttcaaatctagccctttcatcacgtcttgtacctcttttagtctcatctctgtgtttctaaacaagtccttatttgatgcaatcctatccaccaaggacattggatagaagacttca

SEQ ID NO: 123548 - DNA, 255 bp, Glycine max
tacaactgcggcataactagccttgatcatgcgcaatgaaattcggggaaacatgggttaagctatatgctcactcaggcagatattaagagaagcatcgtacgagggaatggcacgtgtcaaagctcgcgagtgagacaagaatgtgaacgaagcccaccctgccacataagtaggagctctataagcgcgggtctgggggacgaaggtcatgtggtcgcgatatacgaagatgatgttccgagtacattggat

SEQ ID NO: 123549 - DNA, 275 bp, Glycine max
gatcattgtaatattaatgcttaagcagattatgagtaaatacacgtgggtatgtggttcaatatagtaaattatgctttcgagcgtgtgtgagtgcatcatattccgcctcgtgcgtaaggaatgtattatagtcttatatgttcgacctattttgatttattgacgaaatacttatactcgtgtaatatattttaaatgacttcgaaatcaagttatgaataatactcgtgtgaacatgattatttgtacttctgttctgatatttatagagc

SEQ ID NO: 123550 - DNA, 248 bp, Glycine max
  unsure (1)..(248): unsure at all n locations
tgcaatcaatatagaaagcatgctctngctggatttttgactcacttatagattgataaatagctacttactaatttttctatggcttccttaaaacaaatattcgttacagaacaaattgtttgaccatattatctcataccatcaattttacatgaatgtcttgatcaattatacaagagccatgaaataaagaggcaagctccatttgctactacactttcaaaacgttctcaggtattaatagt

SEQ ID NO: 123551 - DNA, 445 bp, Glycine max
  unsure (1)..(445): unsure at all n locations
acttcaaatattattcacccatattgtgaatcaccttcttggtcttagaanaacgtttgaagatgatgagttaaacgtaaaaatcctcaactgcctttcaagaacttgggaaccaaagatcacagtgatcaaggaatcctanggattagcatcattatcgatggaagctctcttttggaaaatgcttgcatatgaacatgagttgatttaacaatctcatgcagaagaaacagaagagaaaataaagggaattgcactcaaagtaaattctttaaaggaagactacaaagaaagctctagtgatgacgaagatgcagagaatttatgcttgatggtgaagaagtttggaaaatttctcaaaatattcaaagacagaaaattctctanaccttcaaagaagatagaaagcaacaacaacactttcacatgcttcgaatgtggaaag

SEQ ID NO: 123552 - DNA, 401 bp, Glycine max
  unsure (1)..(401): unsure at all n locations
gaaactttctanacaggtcttcttcacatcaaacttttgttattgtataaatccccttcaaacttccgctcataggtgtgatttattngaacaatttctgaattntcaccactcatactttgatcaaattccaatntttcttttggatttttttaacagattgtaaaacaatagttagatgattcatagtttgacatgtatntgcgtattgttggcanataaactgtttcaaactgtattgcatgaatttgntgaggcattccattatcatagaagggttgcctttggttccttctattgctgtcacctttcacaagatcaacattgttcccttttcattttatataatggaatgaaaatggtcgctctgaaaaatatttctgtgattgggattctctttt

SEQ ID NO: 123553 - DNA, 440 bp, Glycine max
  unsure (1)..(440): unsure at all n locations
agcactatatgcgagtaagagcagttcttcttcatggtcattgaatgaagttttaagtgttggcactttttgttaacttatataacgttgctctcatgaatatctgggaaagactgctancgtccttgggtttagttatcctactggtttattcattagccctaaatatatgtgaattatacttataacatgagtatattaataactttgttgagtatattctaatttgtgtgcctttaccagaatatcttctcgcgatactggaaagacaatggtagatgcctctttaggagaaataatgacaacatgtgagaagaataatggctactatcagagggtgagcagtgcctaaagcctgagtaccggtatacacctcgaaactttttntctcatttagacctaanaattagtaccggtatccacctcaaactagtgttttc

SEQ ID NO: 123554 - DNA, 418 bp, Glycine max
  unsure (1)..(418): unsure at all n locations
tactcagctagcctctttattttcagagntcanaagcaccatacattngtgtggattcctncaaagaactatctactttagcttcaagagctttttccagctctttatgatctttgaacagttttttttaacttttaaaagaatgaatgagtttgaaagtaattcatgataaatgaacttatagtacttttcgaaatgaaagtaattatataaataaagtaagtttttaatctgattatctagtaacaagagttgtcatctagtaattaataaaacagtgatttgaaaacaatntaatatataaaacttgtgtgaaagttgtgtcaatgttaagccttaaagaatactcanataagcttaaagagagtagtaaaaacacttagtttatatgtgttcactcaatctaagctacgttcag

SEQ ID NO: 123555 - DNA, 440 bp, Glycine max
  unsure (1)..(440): unsure at all n locations
tcanaccacaacaacacanaatctaggtgtccaaaacctctctattaatgggttttctaggttggaaaagggtgaaattagaatgaggtaaatttgaagcaaactctcacctcacaccagtccataacatctatttagacttgttcaagctggatttacacctaaaacctcaccgaatcaaaatttgactcttcaacacccaaattttgccctagaaatggctcttggttcactttggtcatttgtttttctctctagctcagcctaacctttctcacatgttctaaatgacatttcaagctagtattaactcactctaacctccatttaccacagaattcagacttagccttccaactctcaaagtctcactcttttntcactcataacatcacaatctcactttctaactttggttagttctacccttcatctctaac

SEQ ID NO: 123556 - DNA, 441 bp, Glycine max
  unsure (1)..(441): unsure at all n locations
ntctgngtccttgacttagttcctattctaggctagttccttggttctaagtatatgaagattatcctattctacaccggagttcctacatatactaagaggggaaggagctgcatcaacttcttgggaatttggcagatcttggagctttaatctcgctgagttcattaaggattgtggcggatttatctacacgtttgtgtcatccagaactttctttttagttttttttttttattttacatcattttttttaattatattattgatacgaaagtagtggttaatttttattatgaactgtgagaacacacgataaatatttntcttcctatatgatttattntatatctaanatcaacattncaaatttaaattacttgatcaatcaagaaacacataacattattaattatctcaactagtggtggtaactcttat

SEQ ID NO: 123557 - DNA, 365 bp, Glycine max
  unsure (1)..(365): unsure at all n locations
tgtaatcgattacacacatactgtaatcgattaccagatgagtttttcagaatacattctcaacaatcacatcttttacttggttcttgaatggccatcaaaggcttatatatatgtgacttgagacacaaatttgccaagagttttgtagaacaaanaggtcttatcctcttaacaagcaaaattgttttatcctcttacaaattccttggccaaaacacttgtgattcaataaggaattatttgagtgctcaaattgttcaatctatctctttcaagagagatttcttcttctcttcttctttattctgaanagggattaagagaccgatggtctcttggtgtgaaaggattctaaacacaaa

SEQ ID NO: 123558 - DNA, 505 bp, Glycine max
tcagacaaatattgaagatgatccaacggttaacgaatctgttgtatcaatttactgaactaggtttaggtaaaatatgaaatctcataatttcaacttatctcaacaaaacaccacataactcaacatccacatcaagaaattcacacatgaataattcaagttaaccatatagttaaataatatgataaatacaattaaacatcaatttataactagtaatattgtaggatgttacacaggcagtccccatgttgtgcaaagcaagaacatactcattgagaatgtcaataactccactccaatactcattgagaaatagatgataacaatgatagtggacatgttaccggtgttctactatgaaaagatggaggttacatgttagttggataatacgactaactttggtgtaagaaaatgtgtaagctcatctggaagaataagctcaatcctttgattcaacatcatggagattattattctatccaccaatacttatggg

SEQ ID NO: 123559 - DNA, 414 bp, Glycine max
  unsure (1)..(414): unsure at all n locations
ctgaaagagtgaatctatagttgtagacagatttttgaaaccttgatctgttgacttttttcattntaatttaattcattttactaaacctggtattattaatatttaaaactaaaactcttacaagttaattataaactntctctagtttactttgaagtggtaatgctctatcatacaacccctttactttcatttntgtccttttgtgtcatcattttgcttagcgaaattcttgcttagttgatattagtcactggattaagattgcatgccttcaaagatcatatntattactcccgtggctagaagaagcaaacttgtgtgacatggaatgttgggctatgatttgattaccttttattatgagccctggctactatacatggttctttgtaattgttcttttattta

SEQ ID NO: 123560 - DNA, 311 bp, Glycine max
  unsure (1)..(311): unsure at all n locations
ccctatttactaaatacacccccttaccttgttttgctgattctttttccgtaacgttacggaactttacgaattacgtaacgatacttgttatcttttcgtaatgacacgacaccttacagattacgtaatcatcccttctttagcttccgaaatgttatgaaactttacggattgcgcattaacacttccttttgacttccgacatgtcacgaaacttcacggattgtgcaacaatgcattcttttgacttccagcatgtcacggtaactcacagatngcctaacgatgggtgctaagtacctcgaagt

SEQ ID NO: 123561 - DNA, 273 bp, Glycine max
attgcagcaaggtgtcaccacagctgctgtactatcaatgccagatttctcaaagaaaatctccatagaatgtgatgcatcaggaaagggagtaagggctgtgttaactcaagaaacaaggccgattgcttatttcagcaaggctttggcagatttaacactcactaaatcaatttatgaaaaggaattaatggccctagttctagcaattcaacactggaggccttatctcttaggtcagaaattcactgtgtttactaatcagaagagtct

SEQ ID NO: 123562 - DNA, 387 bp, Glycine max
  unsure (1)..(387): unsure at all n locations
ttattaactcttcatgtctggtccaagagaacccattttggaagagntatgacttttagaacaacttaaaaccaattggaaaaagtcaaaaaccatttgaagagttatatagtttgatttattcagaaataatcactggtaatcgattaccaaatcagtgtaatcgattacacaaagcttttatgtaaaagaatgtgactcttcacantttgaattgaattttaacgttcaaagacactggtaatcgattactaaaatattgtaatcgattaccagcttttgaaattaatgggaacgttgtaaattcatttgaaaactttttcaaattcattntgctactagtaatcgattacaataatttgggtatcgattaccagagagtaaaac

SEQ ID NO: 123563 - DNA, 307 bp, Glycine max
ctggaactacttcacatgtgttcttgatggggcctatgcaagttgaaagccttggatgaaagaggtatgcctatgttggtgtggatgatttctccaatttacctgggtcaactttatcagagagaaatcagacacctttgacgtattcaaagagttgagtctaagacttcaaagagaataagactgtgtcatcaagagaattacgagtgaccatggcagagagtttgaaaacagcaagtttactgaattctgcacatctgaaggcatcactcatgagttctctgcagccatcacaccacaacaaaat

SEQ ID NO: 123564 - DNA, 493 bp, Glycine max
  unsure (1)..(493): unsure at all n locations
gctcagatcttgactagttataactgtctgaataaaatgagntttgtcccatgttttactccaaaagtcagtacgaatcaaatcactcccgcattntatctctagcatgcattcattattctttacctactccacacgtttggtttttaaggaaaaacaccataactaaacgcgccccaaggcatccctatcgcaccagatccaaatctagaacgatgggtgatcatgaggagacattggaacatatgaaagccgacatgtcggctttgaaagagcagatgacttccatgatggaggccatgttaggaatgaggcaactcatggagaaaaacgtggtcaccgctgcctctgttagttcggctgccgaagcagacccaactctcctagctaccgcgcatcnatcctccccanacacggtaggatgagaaaggggcacactgnggcacaacagcaacccccatttgggatcaaccgggtgaatacccttatggat

SEQ ID NO: 123565 - DNA, 491 bp, Glycine max
  unsure (1)..(491): unsure at all n locations
tctntgggagtcattactgcaaggacacattcataaagttagtttgcgtgaaccgcacaaccatcatttcatttatcttaagcatgtaaagggcaaagtaatttgaatggtgaatatttcttttaaccaaatgcaagtgtcaccgtgcaattagaaaacaatcatacattggtgcatgccattntattatatatttttttgaaaagcattntagctacctagatgcaaggtgcccatcatagtgtagcaagctcaaatattagtctaaatccaaacaatcattctcccacatttatgtaactcatacattntgcatccaagacacatgctcttggcattttaatctaacaacctaagttgttcacacctcccaactaatggttgtacatgcacaaactcatttcacaattcaaatttcacaataacacatgcaatgaacattgaggcattntcaccgaatggttgtggggctcatgttagcatgaaaaatg

SEQ ID NO: 123566 - DNA, 413 bp, Glycine max
  unsure (1)..(413): unsure at all n locations
tactaagctatntctaagttttatttccattcatctcananaattgtatactacngagaacaccaacaaattctgtggacaacaatcaagtacaaaatgaatgcaacaacaaaggaagacaatttaattgccagctatgcaagctgattcagtcggcaacacaatcaattatttcacaaagtaagctacagtgtatcaatgccgactaaactaactaatttctgtcacaactacttctaaccaacaccatctagccttcaaaaaatcatgtgaagagaaaatccataattacaaaacctcgagatccgatcattgctcatctagcgggtctagttcagttggttgaaaaagggtgtgtgaatggttgaaaactccatgactctatcttcaattctcaggaataaaanaaatca

SEQ ID NO: 123567 - DNA, 330 bp, Glycine max
  unsure (1)..(330): unsure at all n locations
tgtatgaccctaataatatgatcgatcttcgtaggtcacaggacaataagttgagtggtcatgaatgactgaaactcacctctattgtcttagtcatatgaagatcccacaaatgtcgcatttcccaatcagaagtgttggagattatgccttcaggtaatgcattgattccaccaggcctgcactgattctactaagcaaaatataagcatcagagttgaacattccaaacagtagataatcaatggctcacatactttctaatttacgtgctgagtaagagaatgaaccttgcnattgtcatttcccaatttcttggtgttcattttc

SEQ ID NO: 123568 - DNA, 498 bp, Glycine max
  unsure (1)..(498): unsure at all n locations
tgcggnttccatgcacaatccatgangaccacgtacaattcattcccatggcggaataagttcaaaacgaccccaaatggggaataagtttgcaaaaggaccccaaatggggaaatttgcccttctagcacgctccagaaatcttctcaaagatcccaacggtcagatcctgtaaaattgtcttgtgaagttgcagaccaaatttcgagaagatccaacggttaacgaagtctagaaagcgtttttaccgaggcagcttcatgtagctttctctagaagcttcattaagaggcttcctccaaaagcttcctcgtggcttctttgagaagctttctcaagaggcttctttgagaagctagatccttatctatctacacccctctattaactaaattaacttccttataataattacggatgaaaataacgccacanataatcaaacatcaaacataattactaataatatatagatatatatatcagggtgttacattg

SEQ ID NO: 123569 - DNA, 125 bp, Glycine max
  unsure (1)..(125): unsure at all n locations
gaccagacatgaagagtctataaaagcgatgctttgtttagcatttcaacacatcttgaatactantccatcgatctctcaccatcctttatatgcctcgaatctctttgaactatctcttcttc

SEQ ID NO: 123570 - DNA, 150 bp, Glycine max
gataatagacatgcgacaatttgatcagatggtttactagaattcaccatagaaagatgctctttcctcttagtagcggagaaggaaatactcattcttgtgttggacagacaacacttctttgttgaaggaaacaatcagggcatgatc

SEQ ID NO: 123571 - DNA, 359 bp, Glycine max
gaattatgacttgaaatggtagtcacgttgccagaatgattgtgaaggaatgccttaaccgtatcccggtgagagtgtgatccttaaattttgagagaaacgactatcatttagtactgatttttgcgtgaatctctgaagtatggactgaatgcatgaaattgaggatgatgaaggccatgtttgattgtgatagccacttagccaaaaagctgaccatgtgcttgaatgatttaccccttgcacccagtttgagctgaataaattattgattgattgaatctggactctatacagtgttatcttctgctaccttgacttaggttgtaggagagcatcatccacagtaagcgtggttc

SEQ ID NO: 123572 - DNA, 202 bp, Glycine max
ggagactcttaatctacccgtggcatgctagccatgttggaatgattgatgcctacccattctggttactgggcttgcgattatgatagagatgcatatgccgcagtggctcatggtatagtgtatgatactatgcgtatcaccatacataggtttgaacgtgatagtgcggtgtggaagtgaaaacaaactgaagcttatg

SEQ ID NO: 123573 - DNA, 478 bp, Glycine max
  unsure (1)..(478): unsure at all n locations
tggatgagttaaacatacccattcttgttttagggttttgtgattattgttgtgatgttatatgctgaaattgctcatggaaaactgttagagacgaaaggtagagttaacctagggttggaaagtgagaatgtggtgttgtgagtggaaaaaagagtgaggctttgagggttggaaggttaagtctgaattctgtggtaaatggaggttgaagtgagttaatactagcttgaaatgtcatttatgacttgggaaaaagcttggactgtgctagagagaaaaacaaattatcaaagtgaataaagagccatttctagggcaaaattgggtgttgaagagtcaaatattgattcggtgagatnttangtgtaaatccagtttgaacaagtctaaatagatgttatggactggtgtgaggtgagtggttgcttcanattacctcattctaatntcacttttcanacctagaaacacattg

SEQ ID NO: 123574 - DNA, 198 bp, Glycine max
agctgcagctagacaagattcatgagttgcccgcatgatggattactcgcaacatacgagccatgataccttctagtgttgacgatcctctcacagtaggactaaccttgacatagcttgtggggggatatcttacgcttaaacatctgcttagatccatatacaccattgtatacttgcgcttcaatccctacaacg

SEQ ID NO: 123575 - DNA, 439 bp, Glycine max
  unsure (1)..(439): unsure at all n locations
ataccagtaatcttggaagttctggtttgatagaaacctggaacttcttgccatgagaccttgctgtcttggtgagtttcccattgaaggcctcaccttggtagatcaacttcaactttcgcttcagcatttctatttgctcatctatttttccacatttctatcatttcaacaaataagaattaatgtagaagttaattataagacccaagtataaagacactcattcattgtaccaacaaagaataaaattaanagacacacgtacatcgtaccaaataaaaccaaaaaaagacatgcgttcacagctagttaaaaggaatttcaacgaataaaatacaagctgtacacactatagaacaactcttcatatagttgaccttcgaagatattgacaaaacttttcaattatttgagttctacatctacanagaataac

SEQ ID NO: 123576 - DNA, 205 bp, Glycine max
ttgcccttccaacatccattggactccagctcttgagaccatatgaccaagatatgccacctcaagcaacccaaatgaacactgatagagccgagaaagtgagacttgttgccgtctcgtcgagcatacagactctcatcgacacaactgagcgaacttggatgggctacactccattatgtcgtggagaatatccaactgaaag

SEQ ID NO: 123577 - DNA, 351 bp, Glycine max
  unsure (1)..(351): unsure at all n locations
tctaacaccgcttgcaccttcccaacatccattggtactccagctcttgagactatatgaccaagatattccacctcaagcaatccaaatgaacacttagagagttgagaaaatcagacttgttggtgtagtgtctgtaagacagactctaaatgacacanatgagtagactaggaagggctntaaacaagtatatcattgaaaaaaacaagcaaaaattttcttaactccttttgaaaaatagagttcattaaacattgaanagtaactagtgcatttgtgagtccaaatggcataacaagacactcataatggccatgatgaatcctaaaaacaatcttatatcgatca

SEQ ID NO: 123578 - DNA, 194 bp, Glycine max
attatctattactcgtcttcatgggtactccttatagccggcttataaacgtgctgaaagacatttagtaagactcatctgatctttgatgagctatggacaaaatggacgaccgggagagaaattcgtcctatgctgattcatgagtaacatggatgccgaccgttcggtcgtgccgtaccatagtcggattc

SEQ ID NO: 123579 - DNA, 483 bp, Glycine max
gcttgttgcctacattagactttccagtcatcacatgattgagtggaacatttttgagaattatctatatgtcttcatgttgtcttgaagctgatataatcctttgaaagaatttgaagcctttgctgatattatgataagctttggacataatggatgagttggagagaagttcatcatatgctaattcaagagtgtcatggttggttatatttagctcttcatcttatcagagtctgattcttctgatgtcgagtctgccatcggataaaggttggcttcttcttcctctcttgtcttcacatcgaacgatgtgtcatcaagttgttcccttatgctcattaataatgtcttggcctattgtttgagtacttttcttgtgatttgacctatcaagatcttggacattttacttgaagtgtcctggcttcttaaacgtctagcatatgatgaagcttctatccatgtgctttctttctctat

SEQ ID NO: 123580 - DNA, 188 bp, Glycine max
  unsure (1)..(188): unsure at all n locations
cgtgcagccaagtcctacctgtgtgttagtgaatgatttgatccaaatacggaagatctgagctggatgcatgacctcatgggtcaactagcctacattgattacggagccaatatggnggtattgattagcccgagcgagcctttctcctgtgtagtgatgacgcggtggctgatctatctcgattt

SEQ ID NO: 123581 - DNA, 446 bp, Glycine max
  unsure (1)..(446): unsure at all n locations
gttatttctctgatgttagtgaatgatttttacctagacggaagatctgatctgcatagatgacatcgtgggtcaaccagatgagagagaaaatgaacctaatattggggaaaggaaactaattacgagccatttaccttgaaactgatgatgcagtggctcatcaagcacgatttggatagacccaaatttgccatgatgcgtcgttatgtttggaagacgattgcacatcaagtacgagtcagatagaccaaagttgatcatgatgcattgccacgtgtgatggaggccggcgatgcatgcataaccatgtatgcccaagaatagcatgtgaaagtgcatcttaactttgatggtcctgagatattgtggactaatatatngacatatacagcagttttgatgtgatcttgctggaaaaaaattcctggtatggaatcagtgta

SEQ ID NO: 123582 - DNA, 172 bp, Glycine max
ttacagacgagacttcctactataacaggtacaaatcctccactctatataccgttcacaacagtgtttctctcgaagactcgctcgctggagtgcaaagcccgtgttacactgttaggagcatctctggccgctctgtagctgacacggacatatgatggatgagtcatat

SEQ ID NO: 123583 - DNA, 444 bp, Glycine max
  unsure (1)..(444): unsure at all n locations
tatcgaaacgtgctngngcccattctgattcctttaatctggattctaccaagatccttaatgacgagacttncacctaatacagtagcatagcctncactccatataccaatgagaacggtgttgccccggttgacgtgcgcactgatgttctgtaaccgtgtaacacgaataggagcatctcgtgccaatctttgtatgacacggtcatcttctggataatcttcttgatattcttattggctgcctccacggctccgttcatctttggtcggaagggcgtggaattgtgatgttggattttaaactcctcgcacatttcccccatcatcttgttatttaagttggaggtcgtgtccatgataatctttctcggcaaaccatatcggcagatgattccctcttaatgaacctaaccaccacactcctggtgacactagcata

SEQ ID NO: 123584 - DNA, 286 bp, Glycine max
gctaaccgtgagcaagcagctgtatgtatgggccttaggcattctgtgttctacccaacgcatcgtatcactattcagctggccttgatatggaccacctgctgagatcacagcacagaggcaacatacgactatgcggatagtacgctacatatttgagatcttaccaggattgatgctattcggtacacgtcagacacacgcaatctgacataggttgtgcgcatgatcgccagatcttcacggtattggaacgtgcggcttgtatatgagcggtgctggcgtg

SEQ ID NO: 123585 - DNA, 465 bp, Glycine max
  unsure (1)..(465): unsure at all n locations
ctcagctgaatacccaatgatgtctcgtatcaggcgtcatgtaatctgtataaagcattngcatcaatggtcacattaggtccattggagaagggagccatgaagtctccaggaacaacaagctattgttggggaagcaaaatggctatcagggagattatgctccaaattgcatttaaaccaaggattgagttntattggntcatggcatatacaagaaattacatagagtctctttgaatcatttcttgatctttgcctttatggaacctgcggttattttctttgctatctttgcttgtggttttcctcctgtacttctacctcttttctttccggcaccctgcatccaaattttcagcaattaagtatacatgcaccagcattttcattcactagcttagtactcagcattctcatttgatcagttggctagttgacttctagatcattgccagcctctca

SEQ ID NO: 123586 - DNA, 251 bp, Glycine max
ctgagcttctatatacatgtcacctactgtgatgaggacgcactatgaacgtattggtgtacactagcatacatgacacactctgactgtcattttctggcaacatggtggagtgtcattcatgcatgacaccgtgcgtggtctattctatacaggttcggacacgcactagtgcctatgaccagtggcgaaacatccgcttgagagccctctgtatagtaataccggatacgtctgccagcgctctggga

SEQ ID NO: 123587 - DNA, 356 bp, Glycine max
  unsure (1)..(356): unsure at all n locations
nntatactgtatacaacaatgaagctctgataccacttgttatacaagtggcctcagatatcttaagaagggggggttgaatttagatattccaaactgtttcccctaattaaaaatctatttcactctttactcaagttatgaattcccttaatgacaatcttcttaaatattaattcaaatgaaacaattttgatatgaatatcaagcaatgatacatcaaggagattaagggaagagaaaatgcaaactcagttttatactggttctgccacacccttgtgcctatgtccagtccccaagccacccgcttgagagttccactatctcgtaaattccttttaccagttctaaac

SEQ ID NO: 123588 - DNA, 282 bp, Glycine max
cgcgcatgctcttacttgcggattgttgaactctaccttgcataaagccatgaaagctgcacgacttatcctccattgcctcatctgcacctacatgagttacacactctatcaatgcgcatatggaacctacatcacacacgattggcttgggtgactacccatatctgcatacatattagcattgatggggcaccaaagaaccgcacatgtggcagtcttggtatatatacctcctatactttcgccgactcctagactaatgttgaatgtctacacaat

SEQ ID NO: 123589 - DNA, 448 bp, Glycine max
  unsure (1)..(448): unsure at all n locations
ctatgcgcatatntccttacanacgttctcttgcacaagacattctattaaccgaanaaaaatgcacccatatacaatcaaggcagcttcgttacctagattatttacacgtacttccaaggtgtatttgttacttacatcacacacatctccttggctaaattcacatacatgcatactcaaagcattttggggtaccaaaaaatgcacatgtgcacatcttggtatttctaatacctatacatacacaaacttcatgatgaatcttgactatctacacaataaggtgctacatttcatgctcttttcaagtttttgctacctaaggccgcatgcaaattcaagtatattttccttcgttggctaaaattgtattcaaattaaaaggtatacatntttttggtaatgtatcttctntacatagcatgcaacatatnntatgtatatt

SEQ ID NO: 123590 - DNA, 255 bp, Glycine max
gcggcggaggcaactactcaactacaggtcgttgtcgaaacacctgccaggagaacttctgagagcgagagcccagctgtattacacgctgattctaataagaacaccccacagcaattccatggagaggcgactacagaaacgagagccattgattacaaatacctgaacgatacaggccgagataacggaatgccatgagacgttgcggttatcacaaactagcctaaagtgcatctgcagatcttaaagata

SEQ ID NO: 123591 - DNA, 446 bp, Glycine max
  unsure (1)..(446): unsure at all n locations
actcagcttctataatggaggggagtgtanactactcgaatntactcatgtcttatggaggagttgaccatttaccaagtatatacaatctcacgaaatgaatagcaagaactagaatatacatgaatgattcttaaatgaaaacaaaacacaatttccatctattggtgactaaataatcagagtcattgattaaatagacctgaatcagagaggccgagataattgaataccaatagatgttgtaatataacaaactagtagaaagtctatctgtaatttttaaaataaaaagtaaaaaagacaaagcagttgaagacagtagtgacaataattatattttgaaggttcatgataganatgtaaacaggtatatattgaagaataattaatgaataggaaatgtgtacaccaaaagggggcaattggctttattaatagttata

SEQ ID NO: 123592 - DNA, 73 bp, Glycine max
gattcattccagaagcattctcatgtgcatcaacttgtgagtgagaataacacgtctctttccacttattgct

SEQ ID NO: 123593 - DNA, 254 bp, Glycine max
tgaaactgcatgctgctggtgacacatgcgtcgtggagagcgttatgcgctattatttaccggctgagctgggtgagatgacgagcttctctgtggccactgcagatccagcggaaagtgtcgcacatactgaccagaaggatagatctgctagtctatgccgtcactgagtcagtgttgatgatgcctctgtgctgactagatgggtgggacaggtgtctatacgcttggagcacactctgataatatgtggt

SEQ ID NO: 123594 - DNA, 406 bp, Glycine max
actctctagtagctatccgtcatgcgtgctagcgtaatcgagaatgacgttttacgtatcgatttctgaagacacagtgccataccagtgtcaaagatcttaaaaataattgcagctttcataggttaaaagagaaatattatgttcgtccaagagatgttcatgattaacccctacagccactgtacagagacaagatctagacatatatgtatctatatatatatatatacatatagcttcacttaacccctcaactcacatcctatactaccaactacttatgcaatggcatgcctatagaagtgtgtcagatgccacaaagaaccagtgctttgagtatattatgtgaagatatctctctactcaaatctatctctatcttataggatgattcataacgagt

SEQ ID NO: 123595 - DNA, 261 bp, Glycine max
cagtgaaccttttcatttttgatttctgatgacacaattatataactgtgtcaaagatcataaaattaattctagtattaatactttaaaccagtagttctcgttctctaagttatgtcttcacattagtctttatcaccactttacgatgacatgatcgatatatatatatatatatatagatatatatcaatatatctatatatatatatgataccatatatcataaatatcatctcttctaaaaatgttaacatttaa

SEQ ID NO: 123596 - DNA, 175 bp, Glycine max
ctgccgccttgaaagatctgattactgtcttcctttgcattaccaacctaactccactatggatcctatctgcactcagctgctcaccatgttcatcaaaggatggcgaaactcctcccagactacgcactttcggtggacacatcttaccgccgcactggatgatcccatggat

SEQ ID NO: 123597 - DNA, 352 bp, Glycine max
tcagctcccgatccgacttggaggatctgattactgccttcctattgctataccagtataattccgatatggctcccgatcgcactcagctgcagaatatgttcaagaaagagggcgatacctttaaagaatacgcacagcggtggagagacctagcggcacatgtggctccttccatggcagaaagagagatgatcaccatgatggtagacactctgccagtgttctactatgagaagctagtaggttacatgccgtccagcttcgcggaactagtgttcgccggggaaagaatccaggtatggttgaaaagaggaaagttcgattacgtttcctccacgagtgcgaatgc

SEQ ID NO: 123598 - DNA, 148 bp, Glycine max
tccacgactcactcctttgtacgtttgtggccgtctctatctaatcgaagagtattattacgctgtaacacatatttgatctgtttagtgtgaaactctgtagagataccctctcaaacttcaattttatacttgttgtctatgcata

SEQ ID NO: 123599 - DNA, 430 bp, Glycine max
tctcagcttttatccaagctcatcttggtggagaagcttcttcttccatggcttattccctagtggatggcgccgcctcttaccttttctcctttgtcttccactgcatctccatggtggaaaatcaccattaaaggacctcattgaagctcaaagatccagcctccatagaagctccacaagcaagcttccatcagaagcattgaacacagaaaacataatcaattagatattaggtatttacatcattggttcattagaaatccccaactagggtgcttagccagccattacaaagaaacccaaacaataaatcttacaaaacctaggcttcaatgcacaagctactcctcttgatgcttctaaggctcttttcccgaaataggcactatggtgtgctctaaaatctgtgccaatcttcttgctacaa

SEQ ID NO: 123600 - DNA, 309 bp, Glycine max
ctcttacactaaaccagctctccccatagcttgatattggctccatcattctgtcatttaccaatatgactatgactctagacctaccaacgcgacttgtgaggggaggggcaactgtgtactagatcatgagctaacaaacgatgatgtcacttaacatcgatagacactggtcgatccatcgctatacatcccagacttctcttatgaccgtgatgaagatttatatataattgtttgtcaacccttacgtggcttgtaagtatataaggttgatgactgaaagcaactgcgtgtgagacctatgca

SEQ ID NO: 123601 - DNA, 505 bp, Glycine max
  unsure (1)..(505): unsure at all n locations
ctcagctttgctactatcaagttcagtattgtcaccgtttcttctgtctcttacacttaaaagctctaccccaagcttgaattaaaaccaacattctttattctaccaagtcactattgcctctaaacaaaccaacaggatttgttggaagattgcccactgactaaaatatcatcatctaacagacaaatatatcacttagcattgttagacactggacgatccatcactagacaacccaaacatctcttaagaatttgatgaagataaaaatataaatctttgttaaccattttgttgcatgtaagtcaatanggttgatgactggaagcaacagcatgtgagacttatgcattagtggataccttatctactagaagcaggaagtgttcgcccagtccatccanatattgattggtatatatgcttntatttaaattattcatttatgccagtttatatgattctcgttaanattacatatttgtgaatcaatcttatattt

SEQ ID NO: 123602 - DNA, 326 bp, Glycine max
  unsure (1)..(326): unsure at all n locations
aagacagcattaatatacacaggatatatgattgtgacattacatgcgctagacgcccgaacatacacacgagtctgcactcgatgtccacacatccaataattctactcattacactcgaacagncgaatctgcgaatgtaccatcagatgacgaaaagtggctcaatggatggactacatgggaggaacgccctacacgaccctcaactgatggatagtaccaacagagatcagcctcccacgcttcataagatgaggacacaatgaggctaggcactacccattgatacgagacactcacgccaacaaatactcatggacaat

SEQ ID NO: 123603 - DNA, 442 bp, Glycine max
  unsure (1)..(442): unsure at all n locations
acatgcttcaagccaaccaacaaacaccaggtattgctctctattttaacaaagccactaatcctactcattacacttgacgaagctaatatgtgatagttccatcagtaaccgataagtggtacaatggatggactccatggagggaaccttctccccccacctcaacttttggaaagtataaactaaaatcaagctccgatattcaattatatgtgtacactataaggctaggtactagtagttcatacaaatcactcacaccaacaaatactcatggtacaattgtgggcttgtcaggttcaaggagtttaatgggccaattgaatcaatatggcattgggggtgtacacactcatgacaagaanagccctaacctagcacgtcaaggaagagagctaaagattttatggggacttacctgtttgaaatgatgaccata

SEQ ID NO: 123604 - DNA, 346 bp, Glycine max
acgattccccaagcaaaagaacaagcttccacaacttatgatccaacttggatgttggaagccattctcggatgtcacaaacttcaatacagtcagcatctccacatgcacaaacagaaacattaaaagatgatggtctatcacgattttcattgaattgatccatcacctccggttcagtgctctgaagctgacgcatccatctcagagacttaatggcctgtgaaacatgatgtacggcagctaacttggatgagattggatcagcaactgtctgaaccacaggtgtggaaactggacatacttcacaagccaaagagctatcatcatgatacatgcttggtgc

SEQ ID NO: 123605 - DNA, 338 bp, Glycine max
tatggctggaacacttgacgcgtcttctcaaagacgctatgctacttggtcacggggcgaaggagcgactatgagcacatacagatatccttatgaggactgcaacaaggacgcccgacgttgcgttctagctcacatcatgggcctgaaccatgattctaattctgaaggaatgcactctatgacaactatgaagtctctggacttgagcgaatctataagatgggaatcaatatattaaagatgaaatgttgtctatacattaggggcgggagatgcctatatgggctttataggagaggggagtaattctcttatacttgagtgctgaagaacta

SEQ ID NO: 123606 - DNA, 464 bp, Glycine max
actaagctgtcgcctgagctggacctgacagctaatgcttttatgttgataagattatgggtggtttatatgatgcttcttctgaatgcccacatactactaagttacaggttgttgaggggactattaacaaagaatgaaatcagtttgaagactgcgaagaggccaaccatcaatgggttcttgcgcattccatgggcctgaaccatgtatcagattctgaaggtatacactctctctcagctatggagtctcgggacaggaaagaagcttaaagatgggaaacagatatattcagagatgaatatcttgtcctataacattatggggctgggtagaggccttaaatgggcttctatcaagaatttggtgggtaaatataacatagatcttctgtgtctgcaagaaactaaataggatgtgttagacaaagcttcgtgtcatttcttatgggggccatctga

SEQ ID NO: 123607 - DNA, 269 bp, Glycine max
caggagacattgtgtatgggtgctgatgtacgctatgtcctatgctcacatagcatgatctcacccgctacgtccaatatcactgttggggtgctcatgataggatacaatgccctagatcagacggacataaatggatgacagcccatagatcagacggcggctcggacgtgcaacagctgatcgcatcttggtcgatctatggatggcacgcgctgagtatccgactataagttcgatggcaagtcataatagctataaggcatcat

SEQ ID NO: 123608 - DNA, 364 bp, Glycine max
  unsure (1)..(364): unsure at all n locations
tgggagtccgtgaccttagatggaggtggacaacaggggatggtgggtttatgcgcgctntgtggatgtggaaaactntntgtgcaccatcgcccgaccgccacctagtaccacatgtgatgggtaccccataatcctacaagcttgagatgaggaagtgttgaagggtgaaacttcctgcttttattgttgaccacagagtggtacttggagatatgtcgcgggggtcaggagaccttgnggacgtcaggtggggtgctattgcccataaccaagcttgaccaatcccgacccaacccgggcatagtcggtcagtgagaacctgtgatgtacctaaacaggcgagctcctgtcagtcaacaga

SEQ ID NO: 123609 - DNA, 419 bp, Glycine max
  unsure (1)..(419): unsure at all n locations
gagacaattgtgtgggatcctgnggaatggtgaactggatctacataacaggaaaggagagcatttccttatatatataagataatccgatgtaggtagtcttattgcggtcctacacattctacacccaaaataactnttccacaggttggggggacttaattggctctcccacaatagcctgcttcaccatgggagaagttttccaacctacctataattctcggaaaataaaaaacttactctaagagagaaaataaatcttatttaattaaaacataaaagtgaaagaataaatgtgaaacaacaaaattgtgtgtattttacatgctgagaatcaatcattcctggaaatactnttattaaactngatgcacattgatgcaaatgagatccacancgtgtgtatgtcaaattga

SEQ ID NO: 123610 - DNA, 454 bp, Glycine max
  unsure (1)..(454): unsure at all n locations
aaaaattcctagaagctacggttttgactgatgtatttccagcatgtttagctatttttcagactttattntcacttcctttgatgtaaatgtattatcttctccaagcgaaaagtgtagagatatgtaaatgtatttntcagactttattttcaacacttccagcttgcaagttgtatagagatatagattactaacattagttaattacaagttaattattagtttagttagttgcaagttagttattattttagttagttacaagttagttattattttagttagttacaaattagttactcttgtaaccaatcatgtaacaaattactagcattagttatataagactcacgtattcatgtaaaaactgatttgctcattgtgagcattatccagagtaatatatcaattctcttttctcttctatccatctctctaccttgaacttatc

SEQ ID NO: 123611 - DNA, 384 bp, Glycine max
  unsure (1)..(384): unsure at all n locations
ttccgttcccaagtatgacagtcaccgctttaggagcgctgtacatcagcagcgcttcgaagccatcaagggatggtcatttctccgggagcgacgcgtccagctcanggacgacgagtatactgatttccaggaggagataggtcgccggcggtgggcatcactagttacccccatggccaaatttgatccagacatagtcctcgaattttatgccaatgcttggccaacagaggagggcgtgcgtgacatgaggtcctgngtgaggggtcagtggatcctgtttgatgcagatgttatcggccagcttctgggatatccgttggtgctggaagagggccaagagtgcgaatatggccagaggaggaaccggtctgatgggtt

SEQ ID NO: 123612 - DNA, 389 bp, Glycine max
atagatagttactagttagttacagttagttaccttgtgtatctatgcttcattctcttattgttgttgttgtatgatctcctcgagttcatttattagttttggataaactgagccaattacttaaatgtttgtagtactgtatttctatacaacaaatgttcgtagtcctgttcttcaatcagaatcggaatttgtaatccacttaataacattgtataaagatgaaattccaattctgattagacaggaccactaaagcacataagagactatatctatgttatgtgctactgtgttttatgatgcattattaatgtcaccacttgctttgattgtctgaatgatgtactcagttcttgtctacacacactaaccaattggctctg

SEQ ID NO: 123613 - DNA, 341 bp, Glycine max
  unsure (1)..(341): unsure at all n locations
aagcatcaacaagaatcaagcgaaggctattgtgcaagcaatcaatggggcaaaacacaccanaagattatgatgatggatggctcanattctcacaaaggtgaacttatcactttcaaattgagctttcaaaactatcatgacatgtagaggaaaaacaaggatttcaaatcacaaaatgtcaagagactntattttcagaacaattacccattgataggggtcgtagtcagtgctcttttgaggcaatgaaagttctctttgcatttatcattaaagtcaaactccacctnctttngcaataagttggataatggaagggctacattgctaaaatctct

SEQ ID NO: 123614 - DNA, 484 bp, Glycine max
  unsure (1)..(484): unsure at all n locations
gtctcagcgtntatgcgagacggagaccaacatgctagctatcatcgccaagtaccaagaagagttaggtctagccacgacccacgagcatagaatcgcggacgagtatgctcaagtatacgcggaaaaagaggctagaggaagggtgatcgactctntacaccaagaggcaaccatgtggatggatcggtttgctcttaccttgaacgggagtcaagaacttccccgcttgttagccaaggccaaggcgatggcagacacctactccgcccncgaagagattcatgggcttctcggctattgtcagcctatgatagacttaatggcccacataattagaaatcgttaggaaacttgtatggtctctcagaccttgactagatacgacttcctttttgaaataaaatgagttggtcccatgtntctactccaaaaaagcttgtgcaaatcactcctacatttcatctctagcatgcattttctt

SEQ ID NO: 123615 - DNA, 412 bp, Glycine max
  unsure (1)..(412): unsure at all n locations
atgttgtattgatgggaggaggttacatngccattttgctntaagagtaacgtcccactggtaaaactaactntccaaatgtttgccttcgcaggaatggccccgaggaagcttgcctcatagaggtccaggaaggacaaggcggctgaaggaactagttccgccccggagtacgacagtcaccgctttaggagcgttttacaccagcagcgcttcgaagccatcaagggatggtcgtttctccgggagcgacgcgtccagctcagggacgacgagtatactgattttcaggaggaaatagggcgccggcggtgggcaccactggttactcctatggccaagtttgatccagaaatagtccttgaattttatgccaatgcttggccaacagaggagggcgtgcgtgacatga

SEQ ID NO: 123616 - DNA, 351 bp, Glycine max
  unsure (1)..(351): unsure at all n locations
caggaaatattctcaacagtcacatctttntatgtggttcttgaatggctatcaaaggcctatatatatgtgacttgagacacgaatctgcttagagtgggtcagaacaaattggtcttatcctcttataaagcacaatcgattacttgtgttacaaattccttggccaaattacttgtgattcaataaggaattatttgagtgctcaaattgttcaatctatctctttcaagagagatttcttcttttcttcttcttcattctgaaaagggattaagagaccganggtctcttattgtgagacgattgctaacacaaacgaacgattgtcctcgtgtgtttagaacttgt

SEQ ID NO: 123617 - DNA, 467 bp, Glycine max
  unsure (1)..(467): unsure at all n locations
ntctctntacatntaatctccaagagagactgtgtgcatgctntgctatactnggctnttctgttcttaatatcagagaaataccggtgttgcctacatagtttgtcaacgacctctagagtgaattgatggatttgtcccatggacattgtagaaaaatccatctgagtagctgctaccattttgtttaactctggttgtgtttcttctggtaatgaagccgcataagtattctttagactaggatcattagaccattgagaagataaaatctctgattcattgtttggaagtgtctatccaagtcttttatctntaacgaacaacacctcatctcananaattattggctgatcttcctcttaatgaattttccttctccaataaattcctgatggagaagtcctagaacaattacagtanatcccaatttcatggaactggtttgngaataagaatctggagtg

SEQ ID NO: 123618 - DNA, 378 bp, Glycine max
agatataatctttcaacataatgagaaagctatttgtttcagcatgtcctcttcacacacatgattataatatataaacagcaaactgacactatattatctaagctcaaactttgatgaatatatatatcgaccttacagaaatgatgttcactagctaagattgagggtcacagacatttgcaaagataaaatccgtacagcaaaggttgctatcaagccttggcaacacaaagatgagttgtcaggaaaatagataggcgagctaatacataatgtctatagtctttcatgattctcgtctcgatttcgataacggggaagctcagacttgtcatgctacaggtgctgattctattatgaagcattccaaaaata

SEQ ID NO: 123619 - DNA, 410 bp, Glycine max
  unsure (1)..(410): unsure at all n locations
gtacaatatcatgaatacactccaacatatgaccatggtagccattgcttaccaaacatcccatgagtgttcggaagaaaccattattgatatcctagtggcaggattttctggacaattgaaagggtggtcggataattatcttactaatgaggaaaaataaaaaatttacagcgcagttaagacagatctcaatggaaaagtcattactaatgacaataataaggagattcctgacgctgttaataccctaatctttacaatagcccaacattntattggagacccgtctctttggaaagataggtctgcagaattattatcgaatcttaagtgtagaactntggcagaatttaggtggtatagagaataccttcctgactagaattacgccagagaagatagtcaac

SEQ ID NO: 123620 - DNA, 424 bp, Glycine max
  unsure (1)..(424): unsure at all n locations
gtcagcagaggagcacaaaccacaaacccttgcaacaggtacatanttttgattcaaggccagctgggttaccaagttaaccaatgcatccagtttgccttcaagcttcttagtttcagatgatgcagatgggtttgtagctacctcatgcactcctctaatgactatggcatcatttctggcgctaaactgctgggagttggaagccatcttctcaatataaattatggcttcagcangagtcatatctccaagggctccaccactggcagcatctattatacttctctccatattactgagtccttcataaaaatattggagaagaagctgttctgaaatctgatggtgggggcaactggcacatagtntcttaaatctcttccagtactcatacangctctctccactgagttgtctaata

SEQ ID NO: 123621 - DNA, 444 bp, Glycine max
  unsure (1)..(444): unsure at all n locations
cgtcctgaacgcccaccaatgaatattctttgttattaatcagtccattattggaaatattgactgtgccattaccgaaatatccattatagagtctgcgtaccgtgatgacagagtcttgatcctgcacattcagggttccgataccggtggcattgccaccgataatcgtattttcagccgtaaccaaccccccctcgcgaatagtcgcctccccagttccttgattaccaatttgaaattcaattgaggaatcattattttttattagccactcgccacccttttcaacgacaacctggccattactgcccgcctgatagcctaaaatggcgacgattgaactcgtgacgtaacccttatccgtaatatttaatgaacctgtgccatagctacctatntcgaataattcggtcgtcagaacagagtcctcttcctcaacat

SEQ ID NO: 123622 - DNA, 403 bp, Glycine max
  unsure (1)..(403): unsure at all n locations
ataatgatcnatttagacaatcttgacgcgttatttatctatagattacactatttgggtcatatnttccacggtatggatttaaattcgataataaatcctcttaagtcttaagtatgaatattttttttacttgatcttttattaaaaacttccaccatcaaaatctgatataatctttttctactaattaaaatgtatttcttgtttataactaatgaaattttatggacagaaatgtcattcgaggagattcaaaccgttctctagatgccatatttttaatcgagtgaattgcttgctgattgagcctatacagaactttctagatgaaattctatggacaccctcaagatattattaacgtcctatttcagttgaaatgcttttcttgtctactact

SEQ ID NO: 123623 - DNA, 442 bp, Glycine max
  unsure (1)..(442): unsure at all n locations
tatttttttttatcgaagtcactagtttatcaaagattnttcacgtaactctcacattttcaaaactcaaaacaaagatatgcgtgcaattattaattatgttatgtcttcatgaaacatgaactcaaatgaaaatgtaacataatctgtagaatcagttcaatgaatttccacagaccgataactccagttcactttaatttgcaacaatttatggtggctttacggtacaatcctcaaatccttcagtttgtatttgcgtatagtatatatttcattcaaaccaagagagaaagggagtgaataactctttctataaattcatcaatgtttctataaaccatgtccacattatgtgatcaaattacatttgaactaatggaggtcacaactcacatagccattggttcagtcccagtatacagccatctacgctcaattc

SEQ ID NO: 123624 - DNA, 408 bp, Glycine max
  unsure (1)..(408): unsure at all n locations
gtttctcaagaaagcttctcaaggaagctacctagtctataaatagaagcatgtgtaacacttgttgtaactntgatgaatgagagtcttgtgagacacaactcanagttcaacttctctccctttntcttccttcaatttcatgctcccccctctctctttctctccctctttcttttcctccattgaagcatcttctccaagcttcttatccaaggttcatcttggtggtgaagctccttcttccatggcttattccctagtggatggcgcctcctctcacctcttctcctttgtcttccgctattatcacccccacgcgctcgtcataagggacnggcagtattaatcgagtgtgcagaatatgactttaaaaatatgtattttcccccctttattttatatatt

SEQ ID NO: 123625 - DNA, 356 bp, Glycine max
  unsure (1)..(356): unsure at all n locations
tgaggatggagaattgcactaagcaatcactacgcacggttccaagcttccaggtggaggacgcatgatacgaaaagcaattcatggngcttccgaaaagggttgaggatggagaattgcactaagcaatcactacaaacggctccaaactcgtgggtgaaggacgcatgaaccaaaacgccattcatggngctcagaaaaagggttgaggatggagaattgcactaagcaatcactacgcatggctccaagctcctgngtggaggacgcatgaacgaaaatgcaattcatggtgctcctgaaaatggttgaggatggagaaatgactaacaatcactatgcatggctccaactct

SEQ ID NO: 123626 - DNA, 468 bp, Glycine max
  unsure (1)..(468): unsure at all n locations
gaacacggtcgtgtttctgtttatgcccggattcaaggcgggctgcagcaccggctccgcttccctaattgtactggaggcagttgcggtggctttatcctctatggttntctggagtnttaacatgacctccgagatggaagccacttgatcttttaaggccgatagatcggccttcatctgttcctgcacgccctcttcattatccatttttctggatcgagtgttataggggtgccttggtgttttcttagttatgatgaaattcctaaagaaataaacaacggtgagtatgccaccaaaacatgagtatgcaaatggatgatcggagcacttggatccaccccaagattttagataacataatgagtccagaacttctcatttataaaaagacaaagcttcatctaccaagatatacaaggtgtacaaagaactacgattctattattgggcatcaattatatg

SEQ ID NO: 123627 - DNA, 500 bp, Glycine max
  unsure (1)..(500): unsure at all n locations
tgtcgttaaacatattattcttgtgatccattgtgaanatctcccctttagcaattgcctcgctgggaatcgaactcgtgaccttggctctgatacatattactagatcgaacgcttaccactaggccaaaagttatagctaatagttagggcgtaacttcttctacttaagagcgtaacaacccaagggccatgagttaactntgacttaacccactcgggtctccaccacgagacaattgatgccacaacccgacaaacaacacatttctaaatgtggtctatgtcccacccttgatcaatatgttgatattctcaccaaggctctatctcttactcactnntgattgacaaaaccaagcttacagtgtgtgattcttctacttttgctcanaatcacccatcatgagcatgcaggggagattagagtatacttactccgtctagtgagcttncagttagctataatttaagttgtnnagtagtacccaataagtatt

SEQ ID NO: 123628 - DNA, 439 bp, Glycine max
  unsure (1)..(439): unsure at all n locations
aatgtcggcatgaagtcactcgtgaagtatgttctataagagatngtgtttacagttccttgaacctgattgttaattntacattgaagaatatgtggggaattaaaaataataacacttgtttaaagcttattgagaaggtgaattcaatatcaaaatattagcacatttgatcttctgcaacacttatagactagagattagagattaattcacatttcgcaatcatggttagcaactcttggacagcttgtggattgatagaacaaaagtaatgtaaaggcaaaaagaactcgactagatacatatgtgatgaactaaggtctacgctaatactggcaaaaatgtcactgttntattttntaaataatgctattataaaccattctaaaagctgctcaagataatgtatntntgtactagtgatagaaatttacta

SEQ ID NO: 123629 - DNA, 384 bp, Glycine max
cgaacacgtgcggatcagatatatcacgaaccgctataaattcatatcgacggaacacattgcgaatgaacctcttctgaactgagtctaggacacagacctcgcgtgaaatcataactactaatggcctgattgtaagaaaggaattgtgttgtcggtgacactctatgaaacaatggcatgcacttacgctttagccagtagaggtgatacactagtactcaccacaaagtcactgcgggcgcccatagagacgatatcctctgctgtacgaacactagacctctcttctgtgccatacttgtgaatgatacactttaataatttgcatcatggaaatgcaggtgtgcatagggataatatcccctactacaaatcagacat

SEQ ID NO: 123630 - DNA, 164 bp, Glycine max
taacaccgcgctgcacgccgctacatcgcgcgtcatgtggtgtgtaagcaacctgctgattgtttgttcacactgagaaaagctcctatacctaacatgagatgaggaaccgatggacatactacctgtctacaggaaggcctcgactatctagcttgtgccgc

SEQ ID NO: 123631 - DNA, 402 bp, Glycine max
  unsure (1)..(402): unsure at all n locations
gctgaaagattccaatgaaaggaagtggctaaagtcagaatagttctgattgttataggtttcacaactggggaaaatgtttctttgaaatcaaaaccaggttgttgatggaagccttttgctacaagacgtgccttgtacttactgacagacccatctgaattatgcttgactctaaaaacccacttgcaaccaattggttgcctattaggaggtttaggaacgaattcccatgtattgtttttgagtagtgcaaccatttcttcatccatagcatctttccacttaggatctttaagtgttgttttgacagttttaggcacaacatgagttagaagcaaggttggttggagtctaggcttgaaaattccattnnttgatcttgttgtcataggatgaatg

SEQ ID NO: 123632 - DNA, 489 bp, Glycine max
  unsure (1)..(489): unsure at all n locations
ctataattgtgatctggaggacttgttaagagcttcagctgaagttcttgggaagggaagttgtggaacaacatacaaagccatcttggaggatggaacaacagtggttgtgaagaggttaagagaagtggcaatggggaaaaaagagtttgaacagcaaatggagattgtccagagacttgatcatcatcaaaatgtgattccccttcgtgcttactactattccaaagatgaaaaactaatggtttatgactactcaacagccggcagttcttccaagctattgcatggtaattactctgtgagcttttccctgattactcaagtgtcaaggctgacaatgtcatatagctttcttttcttattatagatatcagaacaacatanactactactcattccatccctaattctntcaattaattcacatcccttgaaaaaataatttaggtaatcacattanatgtactaagtattttgattatcatt

SEQ ID NO: 123633 - DNA, 400 bp, Glycine max
  unsure (1)..(400): unsure at all n locations
gacgactgtcatgtatcattcgtaaggatcatgcaatgccttatgagtccncctgtgcttatgccaccggtgcccgggagaccccttatcctatacatgactgtgttggatgagttgatggggtgtatgctgggacagcatgataagttcagaaatagggaatgggcaatctactacttgagcaagaagttcaccgctcgtgagatgaactactccctgcttgaaaggacgtgttgtgccttggtgtgggcggcccatcgtctaaggcagtacatgctgagccacaccacttggttggtatccaagatggacccagtcaagtacattttcaaaaagcccgtcctcaccggacgtatcgctcgatggcaagttctactgtcagagttcgacattgtttatg

SEQ ID NO: 123634 - DNA, 450 bp, Glycine max
  unsure (1)..(450): unsure at all n locations
cgccgatgtccgatgaacggcgctcgctgttcgtggtcatgcctctcggcgtcgagccctcgttgtcgactataggcgctggggccgccgccgctacctgcaagttagtgatgtccgatgacaggcgcgcgctgtttgtggtcttccctcccagcatcgagcccacactgttgactgtgggaactagaaccgtcgccgctacctgtaaggcaggtgaggtttgcaacgacgacgctgtgactgactgcggcgaggccatgtcactcctccgagaacacttcctctgatgaactagcctctcttccacgcctgcaatagggtgggtctgctaagcttgcgctntcctcgatgatgtgcacattgaggatctncccttgcatgtgtacgctgactgtatggntgattannggggctcaaggtgttttatcaacacccgtgccacgtccagct

SEQ ID NO: 123635 - DNA, 368 bp, Glycine max
  unsure (1)..(368): unsure at all n locations
gtattcctaactagatgattaagatgatgcatgtntatgtgtgcaaacctacgatgccacaaccaagaatcatctatattactcaccaaacaacccaactcatgaaatgatgcatgctcaacatttagcatatagatattacctattctcttggcaatgtggacaactttaccagacatgaattcacttataagacaacaatttttgttgaattcaattntgaagcctttggcataaagttgactaatgcttaggaggttgtgctttagtccatccacatataacacattctttatctcagttntgtgttgatttcctatatttcccttctcccataattttcctttggtattggctctaaaaattat

SEQ ID NO: 123636 - DNA, 400 bp, Glycine max
  unsure (1)..(400): unsure at all n locations
gtcaataacctcactcgtgatccgattaactacatccaagtagagattntattttttttatctcaatgctagctaaagtatgcataattatgaaatcaggggttcgaacccaagtctctgcattntaaaaaaatatttcttgggatcacgaaataataatttataattatgtttaatgctntattntttaaaaattatgtttgttgctntattaaagctcttagaataatantttaattgatttgtatttttattactctttcggccctaaataanttgcatcttaggttgtttttaccaacaaanaanatataaaatagtaatttacaaaattaatcttacatcatcattaatttctttctaannataatttttttntatacgaaaaatataatgggac

SEQ ID NO: 123637 - DNA, 402 bp, Glycine max
  unsure (1)..(402): unsure at all n locations
acatgttacaggaacatgaaggaagggttattaaacttcacaaagtcattacaaataactttttgtttntacctccgaggataccaacattggccaagggatctaggatcaatatctgcgtgggatgaaaacactaaatatataaaagataattatgcctaaatgcaattgtaagcatactnttccactccatacaaaataagagtttatatacatatctcatgtcaatatgaagtatcaagtgaacatgtntcatacactacatattagaatgtcaaggccaattgcaactacccaatataagaatgtaaaggttaatngaaactcctaaatccaatgatatttgacaatcaacctcgtaatataatgcttaacctatgacaagaaccatataaagaagta

SEQ ID NO: 123638 - DNA, 90 bp, Glycine max
acttccaagcccgattattggtaaattcattgccaagttggaaatgattaacatctatttgccaacttgaggggggggaggcggaatcac

SEQ ID NO: 123639 - DNA, 472 bp, Glycine max
  unsure (1)..(472): unsure at all n locations
attacaagcctanagtggaaaaccatgatttcaccctacttttatgannatttggagccttggaattggtttgggaataagtgtgaggggggtatgtttcattggatgatatgtttttgttgaccatgcttgatgatgtattttggccatgcttgatgtatatacatatattgcctaattgttgctttttttttcaaataccttcaattgctactgttcacgttcaaaaaaaaaacaaaaaacaaaagctaaacaaaaaagaatgaagttgaataaataaggtcttggtttgaagacttggattggttgaggacttggttgatcttgttctgggtttactttntaaagcttaatntgtaattttgattntgggggttatntacttttcttacttcccacttatttcccattgctcctctattccttgtggtttagctactnatccatactttcatctaccttgtccttggcc

SEQ ID NO: 123640 - DNA, 363 bp, Glycine max
agtgcaagtgttagaatcagtgttgtttattgcacaacgccaaaatccgtcatagacatatgtgtgatggcatggtggacaggaaaaaaatacacacacacataaatactaaaaaaacatcagtgtgggggaattaaactcttggggcaaggaagcaagagtcgtgcattgtacgcctgtggacaacttcactcaacacttctcttaggctgcttcgagggctactaatagatagtggaagatttggtggatagcagccacagtttctatttggaactatatgaatgatatgatttttaaaaatcaacagtatggcatctctaagttggtggataatgcaatatttctcacctgttcttggtt

SEQ ID NO: 123641 - DNA, 376 bp, Glycine max
tttcgaaattggtctgcaacttcgcaagacaattgtccatgatctgaccgttgggatctttgagaagatcgctcgagtgtgctagaagcctcttattgaagcttctggagagagcttcttaccgaagcttctagagaaagctacatgaggctgccttggtaaaaaccctgtcaggcctttgttagccgttggatcttctcgaacattggttggcaactttacaagacacttgtccatgatctgaccgatgggatctttgagaagatgtttggagcgtgctagaagcatccgttcccgagagcatctcttatataagcatatcattccttggctttgtgtagctgaggacacacatcatttcttcgtctttctttct

SEQ ID NO: 123642 - DNA, 88 bp, Glycine max
tatgacctgtgatgcgtccatgcgccgctatcacctgcatgtggatgcctattgattgaaaacatagacatgctgaaacccgtcctag

SEQ ID NO: 123643 - DNA, 474 bp, Glycine max
  unsure (1)..(474): unsure at all n locations
tcacgtnctattgtctcgtcatgagttgcttcaccgatgttatgaccgcgacatacttatgatgcaccaccaaatcaccttgaataatagagatcacgtganaagagtttgaaacacataaaacttgtctgaaatccctatcctaggctatagataaaccaaaatacatagatggggtaaagacaacacatattgcaccagcctgtggccaatggtagaagaaccaccctccacattaaagggcttggaaatgatcttaaaccaattggagaactacctctgaattcacttaggagaacaaaatttggtgggtgaaaattgagtttcctagctttcaaatctcccaaagagttatgggagactttattccacaccatactatcaaccaagccgacaaaaaagccatcttagtatggtaccaaccacaatggccgaacccaaaccatgccacacattaccaacactgctacacaa

SEQ ID NO: 123644 - DNA, 499 bp, Glycine max
  unsure (1)..(499): unsure at all n locations
tccncaacatcaaagtaatacaacattcaaacagcacatactatcacagccaagaaaacagagcaaaggcagaaaactctgccaaaacaccaaccaaaatcacagctnttctcacttaaagaccccagtaacaattccttcgttccaattcgttaaccgttggatcgactccaaatttttactggaagtctctagtacataagcctacattttgaccgttgggatctactagcaaacatccagaactcattctgcactgctctttccacaaccagcaaatgcctagtattnttctgcacttgtgcaaaatcctgctgcacaatttcacagcaaaaatctgcacaaaatgcagatttcgaanaccacacttccnctcatccaatcttgcccaaatcaaatcctacaagtcccaaatcatgtatcaatcatgtctaaaccaaggtcaagcttcaaaccacagcaacacanaatctaggtgtccaaaacccctcaattcaat

SEQ ID NO: 123645 - DNA, 306 bp, Glycine max
tccagtataattccgatatggctcccgatcgcactcagctgcagaatatgttcaagaaagagggcgaaacctttaaagaatacgcacagcggtggagagacctatcggcacaagtggctcctcccatggcagaaagagagatgatcaccatgatggttgacactctggcagtgttctactatgagaagctagtatgttacatgcctgtcagcttcatgggccttgtgttccctgtgaaataatcatcgttgcgtgaaagatgtagttttcgtctgttctgtctcttcatctctattgattggattc

SEQ ID NO: 123646 - DNA, 468 bp, Glycine max
  unsure (1)..(468): unsure at all n locations
ctgaaattctcataatatcattattttctttnttgttatctcattnttatatttttatcacattatttatcaaatttgacanccttttttttaaaaaaaaaaattctttctttctttcttccaatcatatataccaaatcactgctcttatattntatcttaaactgaaattgcatttcaaaccctgaaagtttaaaagataattctgcttacagatgtgcataattaagatatatgtatacacttaaggctcgttagcttaaatcatttaacataattaagatgttcattcaaattaattntattataaattntacatcaaaatatatattcatatgggtaaccaaaacaaccaattagcttagatgtaatctgcatgtgcctgaatcttgaaacgtacgtacaaaacgtaaatatcatttntaaaatnntttttttggtaaagcgtgtagatgtcaagagttataa

SEQ ID NO: 123647 - DNA, 454 bp, Glycine max
  unsure (1)..(454): unsure at all n locations
tagggtattaggagtaaattagtatataaatcttggtttatggttaacgctgtctctaaaacatttccattagatttaatgatgaaatctgtgcattttcaggtgaaaaagaggctaagtttgaattgcaaaaagtagcagttgagctaagctcagcagttgggctaagcacatatccaccgctaagggtagcttcagcatgcttagcacanaggagaatttggcagagcatcaacatcaaagtcgtgcgctaagcacgagatcagtgcgctaagcgcaacagatgccttcagccacgctaagctcgagactggcgctaagcccaatttcacttactcgcgctaagcgcgagggtggcgctaagcgcagcgtcgagaatttagagcctatntaagcctattttatgcagaatagggtacaaggcccagngcatagaattctacaacaaccacag

SEQ ID NO: 123648 - DNA, 426 bp, Glycine max
  unsure (1)..(426): unsure at all n locations
tatcttcacttgatcttcgtttgatgaanatggtcgttgggagcatttaaagctagcattaaatgtgcgtcctttcttcatgccgaaagtcatctcttcaatgcttgcgtgttagagaattgtagccggtagtcacttctttgtgttagagtaggtcatgcatagcagaactcttcttttatttttttagagggtttgacagattctagaagaatattctgcaaataaaatctcagataaaatattaaatgaggtcttaaatatcatcacacaagttgtatcaaattatgactccatctgcttattgtctgaaacatcagatgcatactntattagatacgaaatgtcatagcataacacacaacttttaatccttgtatttgttatatctaataaaataatgaggatcttgattngctttaagat

SEQ ID NO: 123649 - DNA, 290 bp, Glycine max
  unsure (1)..(290): unsure at all n locations
cacttgttgtaactntgatgaatgagagtcttgtgagacatacttcanagttccacttctctccctcttttattccttcaatntcgtgctcccccaccctctctctntctctccctctttcttttcctccattgaagcattctctccaagcttcttatccaaggctcatctnggtggtgaagctccttcttccatggcttattccttagtggatggtgcctccttgcacctcttctcctntgtcttccgctgcatctccatggtggaaaatcaccattaaaggacatcat

SEQ ID NO: 123650 - DNA, 463 bp, Glycine max
  unsure (1)..(463): unsure at all n locations
tgatgtatgctaagcctcacatctctagctaagcgcatattgttataaagattntggtgttgcagaaagtgctaagcgctgctgttgcgcttagcccaaatgcttactggattntacaacttcaagatgggcttagcgcgaggctaggctaagcgctagtgttttaaactcaaacgtcacgttggcacactaagcatagctgcgcgctaagcccgacatacgaatttcagtttttaaaaagtagaggcagagccacttgggttgctacctttgcacccaaacctttgcaacctctcatctctgagcattctttagtttctgctgtgtgcttactactcttctgcatcctttacttccttatactctgcattacacantccaagtaagttctggatttccttttgctttgtatttcatgcttcacaccttacgatagaggaattatgntttcttagctagtatt

SEQ ID NO: 123651 - DNA, 274 bp, Glycine max
  unsure (1)..(274): unsure at all n locations
acatgctttatcgagcaaatgaagttgttctgcttccactactaagagtacactactaccatagagaaatccacgagtatctgattgaactatagaagactgaatncgagatacaatctttgacatgggttccttgagtgcttcagctggtgcatactttgtagctttagcatattttccttttcatcttggtgccatttggactcacataatgagtcaacagacgtgtcagaaccaagtcaatcacataggtaatggcaaatgataagaaaat

SEQ ID NO: 123652 - DNA, 402 bp, Glycine max
  unsure (1)..(402): unsure at all n locations
tgtgacgtgcattcacccacttccattacatattatattatttgtgtcaaagatgctaaccttctattaaaacctaaagattaattatctaagattatgagattcatctcttttcatatatatatcttctataagtacaaattaaagatcaaatacaacatatttaaaggataaaattatntattaattatgtcatataccatgttcattagatattatattattattatgttattttcttaatatatgtttgtctttgttcttatttttatttgggttttgtaaaattggaaattctgtttgcatgtgaagagtttggactttggtaaggtccccaaatctagtcgtatcttttagaagatagttatgggatgcttgtcgctcttatgtggagaaattaat

SEQ ID NO: 123653 - DNA, 499 bp, Glycine max
  unsure (1)..(499): unsure at all n locations
tctctcctctcaattccaacatggtggagtcttaagtgtgtgtttctccctagtcttatttgtccccctcactccatcttcttcctagtgggctctgatttctccatgtttgcaagtggtagttctatgcattttctggtatgtagaaccattcgccaatgccaccatggaagacgtgatactatttgaactacaagagtaaggaggaacctaggaaggttattctatacttgccattgtcccaaacagacccagataactgtcaatnttttcaatgggtagaagaaaaaaaccaagtttctaatccttcttctgtcacaagagaatcaatgatagtggctgatttgaacctacaaattgaagcattgcaaaagagaatgaagaaattaacaaacattgtgttgttatgtttnntcaatttaattataatggtagttntaaggtgaatatatnttangaaaaatttgtagtagcatcttctaatattataaaagtgtat

SEQ ID NO: 123654 - DNA, 371 bp, Glycine max
  unsure (1)..(371): unsure at all n locations
ntgtcctcagatccctctggttggactagacttagaccatacatcattattgtaacaacatatataaaaccaaaacttagtccgcaaatccctcttgtaagactaagtntcaatcctgcttcaatcaagttctaaggcaacaatacatttcccaatgctaaagtcacctaactatgcacacaaatgggtgatcagaccaagagcatacagaatntaagcattgaaagaagcattgaacacaatgaacacaatgaattagatattaaagtaattacatcagctgttctttagaaatcctcaacaagggtgtttagccagccattacagaacaatccctaacaagaataagaatacaaaacctaggtatctct

SEQ ID NO: 123655 - DNA, 433 bp, Glycine max
  unsure (1)..(433): unsure at all n locations
acattgacttagacaaagtaagttacttgctacttattcgtccaacacccatttaattgtnttttactttatctttgngttttcttgcatgtatgatccatgaaccataataattgaaccaatgatctatggttgaataaatcgttcaccaaatagatatatccttgcaattgtctacaggaattgttgaatctatacgaggagggagcaagcagagggaatcatgttcccagattntcaatgaaaggaagactaganaattggctgttggaaaaaagggaacgctgcacaagtacaactacaagtacaaaggaggagaganaaacgcaatatactgtaagattaaactataaataatttacatgtaaaataagattatatatctctaatgaatttcttattccatcattatagtccacatcttaacatcatg

SEQ ID NO: 123656 - DNA, 387 bp, Glycine max
  unsure (1)..(387): unsure at all n locations
tctagacttggagtcatcacatgcagtcctcttgaacccttaccacccaccctgtcatcatgccgagactaaggaaggccaacaagtttagccttctcaatgtattctgaacaaaattcaatggcttcttttgcaatgtacctctcaacaatagatgcttcaggacgatatagattnnttgtatacccttttaagatcttcatgtatcgctcaaccgggtacatccatcgtagataaacaggaccacaccatttgatttctctgaccaaatgcacaatcaagtgaatcatgatgtcaaagaaagcaggggataaatacatctccaactggcacaatataaattgcggcctcattttccagctcatcaaacttcacaggatcaatgac

SEQ ID NO: 123657 - DNA, 424 bp, Glycine max
  unsure (1)..(424): unsure at all n locations
atggtttttgtattttattctcgnttcatttactttntatacccccttttgacgtgcttaagccattttatntaagtcatttctcgcttaacctaaaaataaaataaatttccaccgatcgtttgaattgtattatccgttaacttcggttaaaatgaattccgaccgttcggtcgtgccgtaaccatgttggaaatcaaaaaagaggtaaaaaaaataatataatggtcgaaaaacatcttttagtaaaataaagcggaaaatcaatcggacgttntctctttgggatttctcattcttaattgaattgactaataactaaagtgaaactaaggctaatatcaactcgcctagtcaagctcgtccataaaaatagggtttttgaagattatcatttcaatttcttactaagtaaaatggatca

SEQ ID NO: 123658 - DNA, 76 bp, Glycine max
gtgcaattcggaactcgttcatctacgcaccttattacttccacacatgtaggttatggaagagcggttccgcgtt

SEQ ID NO: 123659 - DNA, 452 bp, Glycine max
  unsure (1)..(452): unsure at all n locations
atttggattatggtgtttgtaatcatttaactagtaatccttccttttctcaaaattattattccccanaacactagatcataccattctcgctaacaaccaatggctntaaggtattatcttgttgagaaatctgaggggataaacaccgaggatatttacaccaaagggttactaatataagtgagtctaacatcacaccttaatccaaaatcttaaggataaagtttatgggtcctatccttacttttcaaccttcctattcctacccgatgtgggacctcattntacacttatacttcaacaatctccccctcaaatgtaagtctcttccacatggtagcttccccctcgagtggaagtcattntcaatccatgagtacctagtggtagcccttagagcttaaccgtggctgctccagctcatctnagtattgctgccaacattctct

SEQ ID NO: 123660 - DNA, 427 bp, Glycine max
  unsure (1)..(427): unsure at all n locations
gtcaaacatatctataacttgatgtcactttctaaattcattggaggtaaagatgtaaactntatattagatgcattataaatgaaaaacacagaaggaaagggttcaagttattaatatacctgatgaacaagcacttgattattatggatgtaaagagtagtagtagaaatgagaaaaaaagtgaggaaagatcatggtagaataagtaactgatgaagtcgtcaacataaagacctccaaaactctatacaattttcatactcaaaaatataatttgaaacacaattacttggtcatggcagacagtgttaataatatacactctcaaacattaatagtgaanaaagaaaatatttcattgcttaagaaaagagaanatatttagaccaaacaaagtcagaaatgctattattcttttggcatc

SEQ ID NO: 123661 - DNA, 77 bp, Glycine max
tcactgatagaggcatgtaacctcgttttgtgacccagggcctgaattgtacgggcagagacttggcgccgtggtgc

SEQ ID NO: 123662 - DNA, 438 bp, Glycine max
  unsure (1)..(438): unsure at all n locations
cttcgctcggatgtccgattcaggtgtatgcagcatatngagacgtttctanatngatcaatggaagctctcgagatattcaaatggtcataacttttaacaaggtggtctgattcaggcgcataaaataacgagacgtttgttattgaacaacggaagctcgagagaaattcaaatggtcataacttttcacacggaggtccgactcaggcgcgtaatatatcgagatgttcgtaattgaacaacggaatctctcgagaaatccaaatggtcaaaacttttcactcggatgtccaattcatgcacatcacatatctagacgttcgcaatggataaacggaagctcttgagaaattcaaatggtcataacttttcactcgaatgttcgattcaggtgtatcacatatcaagacgctctaattngatcaaccgaagctc

SEQ ID NO: 123663 - DNA, 112 bp, Glycine max
acgctctgagatgctcgcggctgatcgtggtaagcctgaagagatgatggtatgtgctcctaaggctgataagtcagaatgtcttgatatcagtggaaacgtgtcctgctat

SEQ ID NO: 123664 - DNA, 375 bp, Glycine max
  unsure (1)..(375): unsure at all n locations
attgaagatgatccaacggttaacgaatctgtttgtatcaatttactgaactaggtttaggtaaaatatgaaatctcataatttcaacttatctcaacaaaacaccacataactcaacatccacatcaagaaattcacacatgaataattcaagttaaccatatagttaaataatatgataaatacaattaaacatcaatttataactagtaatattttaggatgttacacaggcagtccccatgttgtgcaaagcaagaacatactcattgagaatgtcaataactccactccaatactcattgagaaatagatgataacaatgatagtggacatgttaccggtgttctactatgaaaagatgganggtacatg

SEQ ID NO: 123665 - DNA, 398 bp, Glycine max
cccacagaagagtgatgaagagggggaggtgtgcttgatgacatgagatgagagctgtgaaaatgatgtacttgttgccaacactatctacttgattcacagaagataaatctaaaggctttactgctccatattttcatccaatctccagacacagcatccttgatggcttcaaaaactctattcattaccaacttctagtaatgttgatgttatgtaaagggtaagacgaaacattgatttcatgtgagaactaacactgaactgacggcgagcgatgtacgaatcacattataccttccgtgcatacattaacacttgctgtgcgacgtaggaatgaatggactaaaatgacatgtcccgatggattatccatgtcatcttttaagaatccatgt

SEQ ID NO: 123666 - DNA, 181 bp, Glycine max
ctgagactatgaactgcgattctcctgtctgaccgactgaggcgatgcctaacgtctatatgcctgcgctcttcatgatgaacctgatccttggcaggcgtatcgcactatggctatctcaccatatgtagacgtatgctagactaatgatgacatcatatatcacacctctcaaccatat

SEQ ID NO: 123667 - DNA, 474 bp, Glycine max
  unsure (1)..(474): unsure at all n locations
gtacgcacatcgttcgcgtgtatgatatccactcctcattgtttgaagnagaagagagcttcaaccctataacgcaatgtggcggacaaaagtgggcagtaaacttgaatgatcgtcattgtcaatgcggaaggtattctgcgcttcactatccatgttcacacattattgcagtttgtggttacgtgagcatgaactactaccaatatatagatgttgtttatacaaatgagtacatcttanaagcttactccacacaatagtggcctcttgggaatgaagcggctattcctccttctaatgacgcatggacacttatccctgacccaactacaactcgtgcgagaggtcggccaaaatcaacaacgataagacatgagatagattgtgtcgaaccatctgagcaccgaacaaaatgcagtagatgtggagccgaatggtataacaggcgtcgctgtccaatgcactctgagc

SEQ ID NO: 123668 - DNA, 398 bp, Glycine max
  unsure (1)..(398): unsure at all n locations
agtacctcttcattnttcacacaccggtagtgtacagtgacacagaatgtattatcctcaatcatagagccctntattcttcttgtattttctttcaaaaccttaactatctgcaagacataaatggaacattcacgaacagagganaatgatatatgaagacttaatctcttcacatgtgcaagaganaaaattaaggcacaagttgaattaggcctatactttataggagctnttcaatcgtccaacttccttaattaataacctatttactttttatacacagaaactatactcttaatttagtttcttctttaaatacttgttgagaactntatccatgttaagtctaaatgcaggccagaccaagctacttgaagtgnatatttcattttaac

SEQ ID NO: 123669 - DNA, 462 bp, Glycine max
  unsure (1)..(462): unsure at all n locations
tactaagctttaaagagttaactagaagaaagagggttgttatttagtagcggatgagaaatgagagattcaaatgtcgtcgactcctgaaacgcagtatgtggagatgtgagtgaccacaccaaactctgtaacgtaaaaggtttggtgtagtggggatcattactatttcaacacttgctntcttctacggtaaatatgggttgaaaatttgagataaatataagataagagtaggattttatataatactactatttattgggatagaaaaactgtatctatgcattcgagtgatattgcgtgcttatcattaactaagatatggggtatgagttataactaagaagagatgctcattacagatggacaattactattaataggatttttgatataattatggtattaatattaagtaatttaattaaaaggactgattaattcctgtgaaagatcata

SEQ ID NO: 123670 - DNA, 442 bp, Glycine max
  unsure (1)..(442): unsure at all n locations
ataactttcctaaaaaacagggaagaaattcatgttggcctaaaaatagaagttatgccccaggaagatgagcccgtttttcagcatcagtttgcagtccattgtttttgatactttacagctgaattactaccagagctaaacttctattggcttatataaaagaattactctcattatcatataggtggctntccttctatttatataaacacaattttatactctctgactccctgaaagaaacactggtatcttgtaatattcatttcttttcaggcttgaggaatgtgggctatggngagtgcatagccccaatgtatagaaggcaacaagaantttttatgaagattctggacttcaaatacttcttttaaatgtataactgagtgtgttaaccacattatttcttattggctttctgtcagaggcatatacacaa

SEQ ID NO: 123671 - DNA, 305 bp, Glycine max
  unsure (1)..(305): unsure at all n locations
atgcgccaatcatttgaatcgttatatattcaatatatagcgtgcataaaaaatacatatatgacacgttaaatactatattaaatgcacatatggcatggagttcattaatccttctctcatcgcacagaaaccacaatgttacttctcaattaacacacanattaaagcataacctgaatcatacttcacacataacaaaattcaccactagtgcacgttgcactacaacagatctaaacaaccttgattaaggaagaatgaacacaagacacaattgtcgactgggaatttcaaaattgaag

SEQ ID NO: 123672 - DNA, 477 bp, Glycine max
  unsure (1)..(477): unsure at all n locations
accttatagtaaacaagccgtgttaaaccttatattgccgagccaaatgcccttgacagttgctcgactcatttccatccctaatctctaccattggttcccagttgttgcatctcctangatttctcccgattgggagaccaaggaattttaaagggagaacgactaagttacaatgcaaaaagtcctttgctaccctgaggaagggaatgtcaatgtttaccctacatatgttactcttgtggaaattaaccggtagacttgccatcatctcaaaacttataaagatagctntcanagcccagagattttcatagaacggatcactaaaaatcaatgagtactgtagtaatgagaagttgatttgttatgaaatcttanagcctttgaatactcccagttcagtagcttttaaaaataggtatgctagcccctctgctactaccanaaacaagatagaggcaagggggtcaccct

SEQ ID NO: 123673 - DNA, 292 bp, Glycine max
cacttaagtgaagtataatcattgtgggaacttacttatacgacttgtctaggccattaatagaaacacttggttgcttgtgacatggtgaactccactatggtaacacgcagctcacatatcctctgatgattgacatatcaactgaacacttgttgcagctatagcgaaatactcgaagactaactcatgtagctagatatatatatgtatatagctagatctacatatctgagtgtcaattcgcttgaatggattaacggaggtagcatcatatctctattgtattatt

SEQ ID NO: 123674 - DNA, 482 bp, Glycine max
  unsure (1)..(482): unsure at all n locations
gccaatcatgaaaccacgtcaatttatcccatggcggaataagtttcaaaacgaccccaaatggngaataagtttgcaaaaggaccccaaatggngaaatntgcccttctagcacgctccagaaatcttctcaaagatcccaacggtcagatcctgtaaaattgtcttgtgaagttgcagaccaaatttcgagaagatccaacggttaacgaagtctagaaagcgtttttaccgaggcagcttcatgtagctntctctagaagcttcattaagaggcttcctccaaaagcttcctcgtggcttctttgagaagctntctcaagaggcttctttgagaagctagatccttatctatctacacccctctattaactaaattaacttccttaaaataattacggatgaaaataacgcaacaaataatcaaacatcaaacataattactaataatatatagatatatatatcangggtgtacattg

SEQ ID NO: 123675 - DNA, 427 bp, Glycine max
  unsure (1)..(427): unsure at all n locations
atgaggaagtatagaagggtgaaacttcctggctttattctttgaccacagagtggtacctggagatatgtcgcggnggtcaagagaaccttgggacgtcaggtggggtgctattgcccaaaaccaagcttgaccaatcccgacccaacccgggcatagtcggtcagtgagaacctgtgatgtacctaagcaggcgagctcctggcagtcaacagataaaaggaacaaagaccacaaagcaaggaggcttgtggtggctggccagctgtgaatcttgtgtgatatatgggttattgcctctggtaatcgattaccaagggtgggtaatcgattacaaggcttanaaatgaagacatgaggctaagatggtctctggtaatcgactaccaagggggtgtaatcgattaccaggcttgaaaacgaggtc

SEQ ID NO: 123676 - DNA, 151 bp, Glycine max
tgacctctacaactctagaggcggtgaatcactcactaacttatctcactctctcactactgatctctctccaaacgatgggctctgcatgcctacgatcaaccaactatctcttacttatgtccttgacatcatactcagactcgcttac

SEQ ID NO: 123677 - DNA, 407 bp, Glycine max
acacatgccatacagggaggtaatgacacccttattcttactcatcaattagagacattgtatatataaaagacccggttcgtgtttcacatttgtatatcaactccctgtacatagaatccatcatggtgtcatacgaagtaagaacaatattgactcgatattgcgataatcatctcagtacgtgatgttgtgtatatggatcacaacatgtcacttgaactgataaaatcacacaatcttgtagtgaaaatcagggaactaacacaatatcaactttatatatattactcgtctagtcttagcagagttttatgccttttggataaagcattgtgattccaagtgaaactatactccatagtgatcagcgagcatctctctatagtttctgcttgactgcatat

SEQ ID NO: 123678 - DNA, 433 bp, Glycine max
  unsure (1)..(433): unsure at all n locations
atggtgcacaacaagtttccacatccacaatgcgcgcataaacccaccatcccctgttgcccacctccaactgagctcacgtactcccacgtagcccatatcctcgtttctctcaacaccgggtccncatcaatcctcccaagcttccacaacatccaagcaaaacaacattcaaacagcacaagctatcacagccaagcaaaacagagcaaaggcagaaaactctgctcaacacatcaaccaaaatcacagctnttctcacttaaagaccacagtaacaattccctcgatccagttcgttaaccgttggatcgacgtccaaaatntactggaagtctatagtgcataagcctacattgtgaccgttgggatctactaacaaacatccagaactcattctgtactactctttccacagccaaccacacacaag

SEQ ID NO: 123679 - DNA, 434 bp, Glycine max
  unsure (1)..(434): unsure at all n locations
gtctcctccagcctctcaaccctaaatctccctacttctcatganactaagctccttttgctgctctctatcggttctctcttgaaatntcaccaacttcagtgttntaaaggctcttggactcttcagcttctgaaggctcgctcaacgagccctctgtcgcaacctacccttcggcgggagggcgacgcgaggctcacgggtgcgtcttccgagggaggaaaacacatggagtcgccaccaacatttgtttgaggaaaacgtcgggaaaaccaaaatgtggtctacgaactttaagtgtgaaaggttcaagagttcgttttacgcacggngaaggtattagcaccccacgcgtctgcgctgangaatgacaanccttaattaaatgtgcaacatcatgaatnnntaactgttntattttccctttctctatg

SEQ ID NO: 123680 - DNA, 441 bp, Glycine max
attcttgatggttttgtcgactgtcttggttcggaggttctggacctttgcacaaataggcttcatggaccccttctgacccctatttggaaaattacaacacttagaaagctctacttgtgtgaaaatacatgtttgatgaagtgccagaggagcttgggaatttagtatcacttgaggagttggtcatttatagcaataacttaaccagaagaattccatcatcaataggaaacttgaagcagcttatagttataagggcaggtttgaatgcactctcagggccaatacctgctgaaatcagtgagtgtgagagcttggatatattggggttggcacaaaatcagctagaaggttcaattccaagggagctactagagcttcagaacctcaccaatatagttctgtggaaaacactttctctggaagattctctagaga

SEQ ID NO: 123681 - DNA, 288 bp, Glycine max
  unsure (1)..(288): unsure at all n locations
gttcgatgatgggaatcctaaatgccagggacatcaagtcaacaagcctaatggcatcaatcaatctactggcatatctggtactatctntnntatttattttcagattctatcaagatcagcaatccggattatntttaaaatgctntcgttgctctntttttattagattattattggagttgggtatgtgttntattgtcaaataatctctggttcttatgtatgtgctattgtgggattaggatatcaacatccaagaatcatgtntaactggatctttaaatg

SEQ ID NO: 123682 - DNA, 472 bp, Glycine max
cgcggactataccttcgaccaaacacgtgacgtgtgtctgtctctgtccggagttaaagtgggttgcagtaccgactccgcttccctaaccgtactggaggcggctgtcgtggctatatcctctatggttttctggagttataacatgacctccgagatggaagccatttgatcttttaaggccgataaatcgaccttcatctgttcctgcacgccctcttcattatccatttgtctggatcaagtgttataggggtgccttggtgttttcttagttatgatgaaattcctaaagaaataaacaacagtgagtatgccaccaaaacatgagtatgcaaatggatgatcggagcacttggatccaccccaatgtttttagataacgtaatgagtccagaacttctctatttataaaaagaacaacagcttcatctagccaagattatacaaaggtgttacatgagaacctaac

SEQ ID NO: 123683 - DNA, 495 bp, Glycine max
  unsure (1)..(495): unsure at all n locations
ctcagctatgcgctatntcctacaaacgttctcttgcacaagacattctattaaccgaaaaanaatgcacccatatacaatcaaggcagcttcgttacctagattatntacacgtacttccaaggtgtatttgttacttacatcacacacatctccttggctaaattcacatacatgcatactcaaagcantttgnggtaccaaaaattgcacatgtgcacatcttggtatttctaatacctatacatacacaaacttcatgatgaatcttgactatctacacaataaggtgctacatttcatgctctnttcaagtttttgctacctaaggccgcatgcaaattcaagtatattntccttcgttggctaaaattgtattcaaattaaaaggtatacanttttttggtaatgtatcttctttacatagcatgcaacatatntatgtatatnttttttgtgagacatnttgactaccanaaaatatatgtacataca

SEQ ID NO: 123684 - DNA, 221 bp, Glycine max
  unsure (1)..(221): unsure at all n locations
ctattgagcacacgtatgtcgacattgagtctcgttaatcattaatgatgctccctcagtgagcaactaattaaatctgctctgacatctaatacgattacatgatatggctctggctcgctaggagtgagctgaatacatcttatnacatatggagtgcattctatacgtgttatcttgctttctctaaaatgtgtaaaaataatgacatatgatcatat

SEQ ID NO: 123685 - DNA, 302 bp, Glycine max
attgcactgagtctatcgagcagaagtccatcaacattgattatcgctaataattaatgatacaacttgagtgagcaactaattaacttagctctgccatctaacactcaaacaagtgagaatacttttacacgactgttttgttgacaaccttagagcacatggggagtgtccaacctacattttatattgctttctctagaatctgaacaaaatgctaaactacgatcatataatctattgagacaaatgagtgcactcagtctactacaagtatattatagatatcaacgaatgcctat

SEQ ID NO: 123686 - DNA, 353 bp, Glycine max
  unsure (1)..(353): unsure at all n locations
tacgttanattagtctaaacttatgagggatcgatgtttatttctntacgctacaacatanaacacacgaacatgattaattagagaagcatcctcatatgcatcaacttgtgtgttagagagacccaacgctttatacctattgttgacaactcttacttacttgcatctactgttcttaccatagaattagtttatttttgtttttaaccatcaattatcaatgtttgttccaacaatgccttacttctgaataaaactctgtgcaataagcaggttccctgagttcaatactcggatcactgtgttctaatcttaaatacttgacaatccaatgcgatttccggtgttta

SEQ ID NO: 123687 - DNA, 477 bp, Glycine max
  unsure (1)..(477): unsure at all n locations
cttgacaatgctngctaganactattagagagtccagacatattcttatnncaatcaacactgtccattccagaattgtgagttctgaaatgttgcatacagaaccagatatcagaaactagaggttgcatataaaaagtgtggcttcgatcagatcaattagctagatgaaaataaaggtcaattaatcgatgtcagttcttcaatcacagaagataaagctcaagcagtattctcattccacttcacctttcaaccaaaatcaagatgaaagttgttgaactatgtgttgcctcttatcttatggcatagaagccaagaaaacatgtgtgttagactctaacaaagggtagtgaaccaagtgaaatataacaccatccatcctaacaaanaatcacacagaaaactggtatgagccaattccttctggtttctcattcaaactattctatcacactatatttaagcaagagttcc

SEQ ID NO: 123688 - DNA, 392 bp, Glycine max
  unsure (1)..(392): unsure at all n locations
tcatgagagagtcaaagatcaaatggagaggataaatatttgctatgctaaacaagccaacaaagggagaaagaaggttgtcttcgaacccgaagattgngtttgggtgcacatgagaaaagaaaggtttccggaacanaggacatcaaagcttcaaccaaggggagatggaccatttctagtgctcgaaacaatcaatgacaatgcttacaaagttgagctgcccggtgagtataatgttagttccaccttcaatgtctctgacttatctctttntgatgcagatggagaatccgatttgaggacaaatccttctcaagagggagggaatgatgaggacatgaccaagagcaagggcaaggatccacttgaaggacttggaggacctatga

SEQ ID NO: 123689 - DNA, 365 bp, Glycine max
  unsure (1)..(365): unsure at all n locations
agagtggtacctggagatatgtcgcgngggtcaggagaccttgnggacgtcaggtggggtgttattgcccaaaaccaagcttgaccaatcccgacccaacccaggcatagtcagtcagtgagaacctgtgatgtacctaagcaggcgagctcctgacagtcaacagataaaaggaacaaagaccacaaagcaaggaggcttgtgtggtggctggccagctgtgaatcttgtgtgatatatgggttatggcctctggtaatcgattaccaagggtgggtaatcaattacaaggcttaaaaatgaagacaggaggctaagatggtctctggtaatcgattaccaaggtgtgttatcgattaccacgc

SEQ ID NO: 123690 - DNA, 459 bp, Glycine max
  unsure (1)..(459): unsure at all n locations
aataaattggtcctgaaagcactgacttcagctntgtgaaattaatataaagcagcttagctgatcaaaaaaaaaaacataaagcagcttatacaattgatgaaatccaaataatctattgctattatntataataattcaaaattgggtttaaaatgcactaaaactaatcactactcttatactcattataccaaaattcagaaccttctagagattccccatttagtgcaagagagatgacatgtaaatattacaaaacaagatataatccatgattccacaaacgtaactgctataggcaaaaggggcctgatgttatatttgagtgaacttacccttgcccagattttacttttactgttcttttctataagtaaaagataagcatgttaactntgcacaagacanactgcttagaagttaanagtacttatcgaacattatcattaataaata

SEQ ID NO: 123691 - DNA, 471 bp, Glycine max
  unsure (1)..(471): unsure at all n locations
tatgcatgtgaattatgacgcatcaacaagaatcaagccaaggctattgtgcaagcaatcaatggggcaaaacacaccaaatgattataatgatggatggctcanattctcacaaaggtaaaatcatcactttcaaattgagctttcaaaactatcatgacatgtagagaagaatcaaggatttcaagtcacaaaatgtcaagaacttttattttcaaaacaattacccatttcttgaacatatcctataattcanagaaaaacatgcaaagtcgtacgtgcacacgatattgacccanaatattaaactgaaaatccgacgaaactaacaacattaacaagataacacaactaacaaattaacaaaaccaacaaaactagcaaaaccaaagaacacttcccccgcatacttaaacaacacatngtcctcaatgtagcacaattaaaagataaaaaccaataaatcatcaa

SEQ ID NO: 123692 - DNA, 476 bp, Glycine max
  unsure (1)..(476): unsure at all n locations
cctaaagaagctagagcttagctacacattatctctgtaatagctaagctcacctccttgagatgagaagttagagcttagctacacaccccctataatagctaagctcaccacccncattccaaaaatacatgaatatacaaaaaaaaagtccctactacaaagactactcaaaatgccctanaatacaaggctaanaccctatactactagaatggccaaaatacaaggcccaaaagaaggaaaaacttatgctaatatttacaaagaagagtggatccaaccttgacccatgggctcanaaatctacccttaggttcatgagaactcagggccttctttagcagctctagcccaatcctctaggagtcttctatccaatacccttggggggtagggattgcatacattccaagaatcgagtatcctcatnctatcaatgatgtataaaaaaaactccgcaacttgagtcccga

SEQ ID NO: 123693 - DNA, 356 bp, Glycine max
cggagctctgcatcggtgcgaattgcagcaaagcctacatctctgcttcgttgggttccacccactgtaacaacttcctaacggatgtatttcgagttttaattatcagcagaactcatcgacgtgctcttggttggagattcaatcgcgttcttctgtcaacaaccttttaacgtgttcttgttaatcgagcctgacatgctcagattcttaacggctatatattgtgtggcctctctcggcccaataaattaacctgaccaagaataaagatctttcctaatctctaagttcactcttcatcatagtctgatgtccattttcgatatctatcgggttaaaatgattatctcgta

SEQ ID NO: 123694 - DNA, 443 bp, Glycine max
  unsure (1)..(443): unsure at all n locations
gtggtttgttttgtatgacatggagtgttgtgaatgacttgaatgagaaaatgtatgaattgagtggactggaatgtttaaatatactgttctgatcaagcttgcaaccattagaagagaaagaacatgtgattagaaatatgactgagaatgttagtcagtttgtcagattgattatgaaggaatgcattaaccacatctcggtgagagtgtgatccttaaattttgaaacaaacgactatcatttagtactggtttttgcatgaatctctgaagtatggattgaatgcatgaattgaggatgatgaacgccatgttttgattgtgatagctacttagccaaaaagctgaccttgtgcttgaatgatntatcccttgcacccagtttgagctaaatgaattattgattgattgaccttgagcctatacaatgttatctctac

SEQ ID NO: 123695 - DNA, 470 bp, Glycine max
  unsure (1)..(470): unsure at all n locations
tgcctagtgtnataatggtctaatgcatgtatatgtagacgattgaagaacataagagacaagacatgaagttttagttatgcatgtgcatgccacaaggcacaagaacaagaatctntgctatagataattgtagcatctagctatagtatcttagagagacactcaggagagagagagagagagagagagagagagaagatgttgtagatttgagtatgagagagaaggaaaagacatggtgaagagttttacgcatgtaagctatgaaaactgattcaatactcactctccttcttgttggtttgtgggtggagataatttaggggaagttgcaagcagttatggagaatatctgaattcgtggatacttgtatgatcctaatgtggctttgagaaaacccactgtaactaggatcaggttaaggccctcataagaacttatagcttagcctatcatattcatatta

SEQ ID NO: 123696 - DNA, 468 bp, Glycine max
  unsure (1)..(468): unsure at all n locations
agtgctcatgaacaatacttcttccgtttcataatatntattgggtaagaaaaaaattatcttaaaataattattatnttagtctttagatgtaatattaattatttctttctatttatatttcttgtaatattaatatataagacacacaaataatttaataataataggattaattttatagaatttgttttttttttattntttattagttcttcttaatttatgtgaaataatctaggatgataaggagagatggaaggaaagataagaagagtttacttgtaattntattctttgtttttatttctaatttaaaattttcttcgatcttattttcactcntgtttatgtattcaaagaattgttacaaaacgacaaaagttatnttgatgttctttntttacaaatctttaanaacagacaatataataaaaataaagtaacaattctataatttaaaagtga

SEQ ID NO: 123697 - DNA, 227 bp, Glycine max
gataagagcccatatctgccaagcaaatagattgaattatcaaacgcatctcactatgcgcctagggaatttatggcaggagctagctagatcattcttattaatcaccatgttccaaaagtcttataattggcatctctagcatttgtctcggaattacagttcccttaggaccctttttcaactattgacggatttcaaaaagtgagttttttcaactgtgttta

SEQ ID NO: 123698 - DNA, 161 bp, Glycine max
atacccggatggtgatagctgcccatgtcatatcccatgtgctccgagagttgacggttaatcatgggtgcatcttaacactggatgcgcagtaccgacccctcactatcattgccatcatgagagccgagccctttgctgcacttgcgtacacgtcagat

SEQ ID NO: 123699 - DNA, 334 bp, Glycine max
  unsure (1)..(334): unsure at all n locations
agttgtccacattgtggtttgtgtatttctattcttgtntcatttacttattatacnnccctttgacgtgcttaagaccatttatttaagtcatttctcgtcttaacctaaaataaaataaatttccaccgaacgtttgaattgtattatccgttaacttcggttaaaatgaatttcgaccgttcggtcgtgccgtaaccacgttggaaatcaaaaagagataaaataataatataataacaaaaaaatacacctttntgtaaaataaagcggaatatcaatcggacattttctctttgggatttctcattcttaattgaatngactaatatct

SEQ ID NO: 123700 - DNA, 224 bp, Glycine max
  unsure (1)..(224): unsure at all n locations
atgaaagttttgtgacaccctggtggtgacacgtatagtctttaaagctttaagaaaggtctctttttaaagaatcataattatgtaatatggagctatntgatcatacgatgtggcagatctcctactcaatattgaagcatgtgaactactttttgatgaatacaatagatgtctgcatatcagatgaaagtatctaatcactgaaatgtacctgtcacata

SEQ ID NO: 123701 - DNA, 305 bp, Glycine max
  unsure (1)..(305): unsure at all n locations
ttcatattctagacgtgaagaggcacaagcttgaagagaagactatatgaggtatcttccttgggtataacaatatctctaaaggctatcgtgtctacaacttgtaaactaagaaactctccatcagtccagatgtgtgaattgatgagtacacttcttggaattgggatgaagaanagatggagaagaacgttcttatactcgctcaactacctcaagaagaagctgangaataagacccatgtgaaccaccttcatcttcaccacaacaacaagatcaagaaactttcatactagagtctact

SEQ ID NO: 123702 - DNA, 451 bp, Glycine max
  unsure (1)..(451): unsure at all n locations
tctctgagtcacctgcggcatgcaagcttcacgcanacacgcgtgaggtggcctctatgagatgatttctttattcatcatcagcaaaatttcggtatataaaccctataaggctgaccatgaacgtgtaaccagaaatgagtgattgcttctatgagatggattctttattcatttngaaatttagggtctataaaccgatgaccctgaccttgtaaatggaaaagtgccagtgtccctatgagatgcattctttattcatcaagatatgtaactttgagccgaatccgcctaaatcaagctgtatgtttaaatctgtgttgcatattctacatcaagctgcatggttaaatgtataaaaaccaaccctataatgatgaccctgacccttaaacggaaagtgcactgtcctatacatggataatctttatcatcatgaaggatgatattt

SEQ ID NO: 123703 - DNA, 437 bp, Glycine max
  unsure (1)..(437): unsure at all n locations
atcacatgtggtacttngtggcggncgggcgatggtgcacaacaagttgtccacatccacaatgcgcgcataaacccaccatcccctggtgcccaccttcaactgagctcacgtactcccacgtagcccatatcctcgtttctctcaacaacgggtccccatcaatccttccaagctttcacaacattcaagcaaaacaacattcacacagcacaagctatcacagcccagcaaaacaaagcataggcagattactcttgccaaaacaccaaccaaaatcacagcttttcccactcaaagaccncagtaacaattncttcgatccaatttgttaaccgttggatcgactnnncaaatnttctggaagtctatagtgcataagcctacattatgacccgggggatctactagaanacatncagaactcattctggact

SEQ ID NO: 123704 - DNA, 328 bp, Glycine max
  unsure (1)..(328): unsure at all n locations
ttaacatcatctctcanacatctgtcaatcaatctttcaatatctntctacagaattctcagattcatttctcttcatctgtctaagagtttnttatcaacactttctcttccaagaaaagttctgtgttcaaaaacttgcgctattcatctatttcattctcttctcccttcgccaaaagaacgaaggactaatcacctgaattcttttgtgtctctctgtctccttacagaagattcaaaggactaaccacctgatgattctttngattctgtcctctcccttaaacanaatatttcaaagggactaaccgctaaagatatcttta

SEQ ID NO: 123705 - DNA, 351 bp, Glycine max
  unsure (1)..(351): unsure at all n locations
tattcgtgaccacagagtggtacctggagatatgtcgcggnggtcaggagaccttggggacgtcaggtggggtgctattggccaaaaccaagcttgaccaatcccgacccaccccgggcatattcagtctgtgagaacctgtgatgtacctaaacaggcgagctcctggcagtcaacagataaaaggaaccaagaccacaaagcaaggaggcttgtgtggtggctggccagctatgaacttgattgatatgtgagatatggcctctggtaatcgattaccaagggtgggtaattgattacaaggcttanaaatgaagacaggaggctaagatagtctcttagtaatcgata

SEQ ID NO: 123706 - DNA, 208 bp, Glycine max
  unsure (1)..(208): unsure at all n locations
gctatataatataaggatacnaaggacttcgatttaatttaaagacaggttccagaagagagcactggtcgttttagcagtagagattccacaagtcgcttgcccacatcttaaaagctgtaagaatttaccaacaggacacctactagtgaggcactaatatcagaggacacttaaatggtctgctcagctactaagagcatccgct

SEQ ID NO: 123707 - DNA, 307 bp, Glycine max
gggcggaagacataaccaactttcacagacaatttgatcagcactggtccagtaactggcttattacttaagcaagcgttgtgcgtaagacataaccaacttgcacgtcaatttgatcagcgctattccagtaccaggcttataactcacttctattcactataaagattctggtttatcctcttatacatactatttgcctaatgcgaatgaacatcttataattctactacgggatgtcagctcacatgctgtatatcttttctgtatgtctataaatgaaaactgtaattggagcctgctattt

SEQ ID NO: 123708 - DNA, 417 bp, Glycine max
  unsure (1)..(417): unsure at all n locations
gcgaccctaagcaccgcggctgcagctaaatatttcaatatagtaaatatgctgaagtccttttagttatatactaactgtatatagactgttatngatgtagttgccagcattgttatactanatgtgatgacatgaacttttgactacagacagaatgagctagctaaaatgttaggcctatatgtgacttctaactgctatgcaccgctataacaaactcttttgtgtctaccaaattttgatcctttttccaccaacacccacccaatgacatatctatatgactgcaacttagggccgttacaggcaagtgagcccaaactattggtgggtgttgtgaacaatgggatctttgttcaatgtgatagggtgtgtcctcaaggaaactcaagtgtgttgggatctctaaaccag

SEQ ID NO: 123709 - DNA, 199 bp, Glycine max
  unsure (1)..(199): unsure at all n locations
gataagccacgtggcactaaaattgccaacaatgcacctcactaatggtgttactttaaaatttaacggaatgactattttgtaaaacttatgccaatattaggactatcttctacatttcaaaaggataaggattaatgtgcanaatggctacaaagacagggactaaaatgcctatttactcgttaatatatgcact

SEQ ID NO: 123710 - DNA, 278 bp, Glycine max
  unsure (1)..(278): unsure at all n locations
cctactatatgttgactngaccaacgctgntattggaatgctgcgacaatctttcaacaccttattcacacattctgataggttgggtgtcatgtgaccatatcggcgtccagatgtatcgtaagccatgctccattnttcctttgaaatgcgatcaatccatcttgctatggctggactcagttgacgaaaattttctaagttntgatcanacacatgcttgcaaggagtgtacgctgcatcaaatttgttatcatgaaaaagtatacgtagacatc

SEQ ID NO: 123711 - DNA, 226 bp, Glycine max
  unsure (1)..(226): unsure at all n locations
gatatgctgctgctgttagtcacaattaccacgtaaagaatcacctacatagaaatatttaggctacttactctttanattttcgcatcatcgttttctacagtagagtgaagtttggcaggttcatntgcngatgacgaagatgctactggtgaggccttgatactgttctcacctcaatgaatgacactcacatttgggattctgattaatgagaagacttgtc

SEQ ID NO: 123712 - DNA, 351 bp, Glycine max
  unsure (1)..(351): unsure at all n locations
gaagcttctctattgaagtttctcaagaaagcttctcaaggaagctacttagtctataaatagatgtatatgtaacacttcgtgtaactttgatgaatgagagtcttgngagacacaactcanagntcaacttctcttgctttttcatccttcaatatcgggctcccccctctctctttctcttcctctttcttttcctccattgaagcatcctcttcaagcttcttattcanagctcatcttggtggtgaagctccttcttccatggctttattccctagtggatggcgcctctctcacctcttcttctttgtcttccactgcatctccatggtggaaaatcaccattaa

SEQ ID NO: 123713 - DNA, 351 bp, Glycine max
  unsure (1)..(351): unsure at all n locations
ataatgtaagnggaanattcttcaacatttcaactatatagtatgtgatgagaatcctagaactgcttaaatacanggacatgtgactaggtagtggaccaaacagttagtggataccctccaacaaatggtagcagacatacttaacaaggcccaagtggagaaggatgaacgcccacaggtagaggcactactaagaatattaattggtgttgagggccaaactaatttgaaggctcatgccaaatatatgctctntttatatttctatttntctcgctgcattttggctaaactgcttgaaggccatgtctattctacatttggtacatacatatatgaatgatttcg

SEQ ID NO: 123714 - DNA, 484 bp, Glycine max
  unsure (1)..(484): unsure at all n locations
ccacacannaaactgtacatatattngacctacanngatatctgctactaatgcanaatctagacctaagatttgaataccactgattatagtgagtggtaaaatccttctctaaatatttcagccaagaccataacaaaaacactggcccatccattgtgtgtcctccataacaaacacactgttactttctttgatgtttgtagacatggataatcagaaattaccctgcagagcttgtgatagtgctcactctgcggacattagtngctatgctatctatcccacctngactgagttcngaacggatccaaagcttgagataggattgatgtaatctgaagctatgcatgcaagagaataatgggatctattctaatatcagagctttattctgcttgaattcataactgactgctttatgaggcattttggatcctcgagatgtatattggtatgacaaagccttttgtgatgttaccat

SEQ ID NO: 123715 - DNA, 502 bp, Glycine max
  unsure (1)..(502): unsure at all n locations
caagtttgtacaanatgaagtgtagtgaagtgtttctctcanatgaagttcagtttctaactaactatctaacactaatatatagagtgttagtaactaactaactaactaaataactacctacctacctaactaactaaaccaattacacaaaacaaaagcccaaactcgtaacccaattcttctagtgtagaggttttgacttccaagctcaatttgaccctcaacatggcagaattggccaaagtttatatttaacaaaaatgaagggctatttcttatctttctagggactactcacatgttccatctggagttttgtggtgtcctctaggccctacacaaggaagataggtcatgtaaggacaaaatctaaaattagctacaatttcaattagctcaatcatttccttgaccaaactgagtaagggagaaataaagcctaagatttaataagctagagaataaaaaattaacacaatgctttcaataccctcttatt

SEQ ID NO: 123716 - DNA, 252 bp, Glycine max
  unsure (1)..(252): unsure at all n locations
ttagggtatatactggatatctgtgactcatatgtagatacttgtagtgccatttagtgttaaagaatgtgattcttttaatgatgaactttcatagtaanggcttgcctggcgcaatactggaaggatgaagctatnaggggctcggagtgtttgtcctcattgtgcacagtgacaatgccgangaaatcaaaattacttttttatgtatggttggctgtctctataaactcctgatcagttaagtttaca

SEQ ID NO: 123717 - DNA, 419 bp, Glycine max
  unsure (1)..(419): unsure at all n locations
gatgactcattaccaaataaaagaaagattggtggacatgatgcaaatcaaggaaaaagctttagaccaatacacattcttatattattggaaacacacaatggtacccttaattattttacgctactagaaaaattatctttgacatcgctagagtacatcgattttataaacatccgatgtaataacaacatggagcatcatcataaataacatgacttcgtaacatcgatcttctaaaactgatgtaacgtgaatttgtaacatcggtnttcagaaccgatgtaatgtgagttgatacatcattttctactagttggtacatcgatttcaaaccgtgtaatgggcttgtacattgttatcaaaatcatgtacaactactacatggttggaaaacaacgtgatgtcatatatatttc

SEQ ID NO: 123718 - DNA, 85 bp, Glycine max
tatttcatatcatccatccaaataccctcgtccactatacactcattctatacatacagcttcacgttctaactagctttcatgg

SEQ ID NO: 123719 - DNA, 250 bp, Glycine max
  unsure (1)..(250): unsure at all n locations
ctacaatgcctacaagaatgacttgcctagtgagtataatgtaagtgccactttcaatgtgtctgatctatctncttttgatgcagatggaggagccttggatttgaggacaaatccttttcaagaaggatggagtgatgaggacatcaccaagggcaaggaccatgaagcacttgaaggtcccatgaccagaggcagacttatacaagctcaacacgtcatatagacaaggctaatcatttgtataact

SEQ ID NO: 123720 - DNA, 92 bp, Glycine max
ttacagcttttacgactttataccagggtatatatttagatccttactaggaaggattctaatctgagatagaacctgtgtcaagctttcac

SEQ ID NO: 123721 - DNA, 252 bp, Glycine max
  unsure (1)..(252): unsure at all n locations
canaatcagcatcaatactgtcacaaaaggtgaaactacagcttttgtccattagagtaatccccagtcaagcattgcgcacttgcatggaggaggaaattggttagaattgggaatccagagttcattctctgacttgtggtagctctactctcagaattaccattggattgcctctgttatcttctatattacataatctcagaattctctgatacgagtgtctatcactctgtatatgtaatatattta

SEQ ID NO: 123722 - DNA, 244 bp, Glycine max
  unsure (1)..(244): unsure at all n locations
taatcatctaaatgtggaagntaacattgattattgactcaatagatnacggcgtntatagctttctactgtattgtaccattctgactcactatgtagaccacattcttctgtgtatggtgngggtcatcattttcatgaccaattaatctattctatatctgcacgtatgaacaactgatagaccataccaaggcccttaacggacgcacttacaagtnggttagtcaacttctggaacatg

SEQ ID NO: 123723 - DNA, 306 bp, Glycine max
  unsure (1)..(306): unsure at all n locations
agtatgatgaactaagggacgtcaatatggccaccgatgaagccttggaatgagacaccaagaangcccgaatggaagaacacaaccaaaacaagttntaaggggctgtatatggcacctatagtgagctcaagctccgaagaggtgaaaggaatcatcacaggtcaaaggcatgatcttgaatgacgagcttaagtgctgccttatgtcgaaaagaaatttgtcccaacagtctaactagactgaaaggaatatgtgggccatcatcgatgagtgcacagagaaacttaatctatcaatgactca

SEQ ID NO: 123724 - DNA, 271 bp, Glycine max
aactctatgaaacatcacgttgaatctgagagtaaagggaagacagatgttaatgactcatctagtatctcacccaaatgcccttttggatatgattcgcattcggtcaagaatggtcctcttagctgtacagtgtgccaagcactcttatttgacaccagcataagtgtgccttgttctcatgtattctgcacagatgtattcgtgactgcgcttaatcttgaatcttgatgcatagatactctattttagctcattttcatatctacct

SEQ ID NO: 123725 - DNA, 388 bp, Glycine max
  unsure (1)..(388): unsure at all n locations
catntatcatgttaaacactaaccttgtgtcaattaattcccaacagtaatgcaaataaataaataaaatctgactatgnatgtttaatgttgcagttgcttttctaccctgaatcagatgatttaattatgaagcacaactcaatatatgattctaataagttgaaaaggaatgttctttattagtaaaagggtacagtttattaaaaggaagtttacatctgtttattcatataactgtaccacgtgtcagccttggagacaggtctcgtgcctgacaattgactgaatcattgttttagagtacgtctaaatatacatcatactacaccttcctaaggtattgattgtcatatatatgtcttggacgataggattactattctat

SEQ ID NO: 123726 - DNA, 345 bp, Glycine max
cattcaaatcattctcaaacactcatttcatgccaaacaatccactacatatcattttcaatcaattcattggtcaaacacgcttttggtacaaacaaacaactcaaagtgctgaaatttatataatttgaaattaaaaaaattgaaatataaaatcttgaattaaaatgactgaacataaatcataaaataattgaaaataaactaaaatggtcgagatgcacaaaattaaatgtcctgctcctgtggttgctcctatgcatgctcattaaagccaacacctgagcagctggtgcagatggtgtggataatcaagtatgggtggctagggatggcttgggatct

SEQ ID NO: 123727 - DNA, 191 bp, Glycine max
  unsure (1)..(191): unsure at all n locations
atggaattcattccttgcctctattctctttcttattntccccttttactaaatatttccctcttcaattgaaagtcttcatgacaatgagaggctaacaccctntttttgggaacttggcagccaactactctngatgtaatttctcttcttatctatnntatgaatatacattntcattatcttttcat

SEQ ID NO: 123728 - DNA, 444 bp, Glycine max
  unsure (1)..(444): unsure at all n locations
ctctcaaattacttgatctcttacccttgcttaagatgaaatctcnaggctanaagtctaataatgctaataagaaaatttatctcagtaaagtgtggcagaaggagaagacaaaaagtcaaagtttacaagaactaaaataagtaaaaagaataatgaatggtgtatgagaagacattaaagaaataataactcaaaaaatgaagcgggagttttatttgggtcattctacaagaagataataattaataccctattaaagatggtttatatcgcatatgtgaaaaactacgtttattttctaatggtctaactctatattcatgtgcataattagaagttcttgacgatttangagcaataatgcaagatggttacgggattcaatatgtccacaagttctaagaacaatgtcttcatgaatgagttngttgaaagcaatct

SEQ ID NO: 123729 - DNA, 352 bp, Glycine max
gctcactaactaagatcgtcttcttgaatgtatttttatttggatagactgatttgagcgatataatctcactctatgttggcccacacttggtatcttcaaatatctcactgaggtccccacaaagtcgagaacacaccggggatgattggaagggtagcatctacaaaaatccctttattatacgccaacttgttatacctttttgagtgctgctatgtgtgtggctgatgtgtttatgattaccatatggtgcccatttttacatgtgtcattgttttgataaaaaaaatgcttgaagtgattatctggtgaggtcttctgcttgattttagagtatataaaaatattt

SEQ ID NO: 123730 - DNA, 94 bp, Glycine max
gcggactattgaaaagcttctgaggagtcaagatcaatgaaggaaaataaagctgtgctaacaagccacaaacggagaaagaatggatgtcttt

SEQ ID NO: 123731 - DNA, 181 bp, Glycine max
  unsure (1)..(181): unsure at all n locations
gcttatatgccatccctcttgaagactaagtntctatcctgcttcaatcaagttctaaggcaatagtacatttcccaatgctaaagtcacctaactatgcacacaaatggatgatcagaccanaagcttacnaacattaagcattgaaggaagcactgaacacaaataacataatcaatta

SEQ ID NO: 123732 - DNA, 267 bp, Glycine max
gattttatggggatgtgcttacatgagatcaaagcaagattggacattttattggaacccattggtactgacctttgactgcatgcattggaagagatgtgaagacttcagtgtcgaaagaaaccacaacatgtgatattatctgacagaactgcaaaaccgggttcatgacagtagcaataatcaagatatatattaaaggctaccaaaagagaaatgctatggaactaaacagtgcgaattcccaccttcactaaattcaaatga

SEQ ID NO: 123733 - DNA, 242 bp, Glycine max
  unsure (1)..(242): unsure at all n locations
ttttggacttgtaatgagttgtgaccttctattgttattntcaagtgctttaattattataatattagactacgaccctttgtttaactctatgttattctttctgttgggctacaacgtgtgaggtgaagtcccacattgagtagaagtagaaaggttgagcaccatataagtgaggagaatacccataaaccttgaccttaatgttntgcgttagagtgtggtgtcaagtcaccttatgt

SEQ ID NO: 123734 - DNA, 253 bp, Glycine max
  unsure (1)..(253): unsure at all n locations
gtctgatattatgaaaatttgatcatcctgctttgatgaatattaagcctggggcanatggaaagaataagaacgagggaggaacccatgttgtgaccgttgtccctacatggccaaatttcccaccagctcaacaatgtcaacactcatccaatatcaacccttcttattacccaccatcctattagccaagaacatccaatcatccataaaggtcacccctaaatcacccacagaacccgcatgttgcaca

SEQ ID NO: 123735 - DNA, 233 bp, Glycine max
atactatccaagaggagattatgtatcatctcccaacatatggagagaaacaaaaagaacttgcaacgcataactgcctaagtaatgatggtaaagacgagcctactctggctactggtgattgaatgaaagtcatacattctaaaactatatggccatcctatgaactagttatagacataaacacaacacaaaccatgtctaatgtaactatatatcatctcacacaaggc

SEQ ID NO: 123736 - DNA, 473 bp, Glycine max
  unsure (1)..(473): unsure at all n locations
tcctgccaatcaaagcatattacttatgtatctgtgttaacaagtaaatatcttgatgngaagctnctagagagctggtcttaaccgacagtggttattaggtcaacatagcctctagtctctactttttcgcctgtgaagctaaggaatggaccaacgtgatggtggacaatggcaggcaagacttcaagcctctgganaagtttctaatgtatgatgttagcggagcttccttgtcaatgangaccttggacaccatgacgctggcgatgacaatgaatacaaccatggngttgtcctggtagatggggtngataccctngaagtctctatccatgaaagtgatagganggagacttcgttgtgattgtgcttcnacaaagttgtgcnatgtgttaatggtgtgaaatggcgttacggactagttgattgcctcatatgacatctgccgcaatgtgtgattacccttgatt

SEQ ID NO: 123737 - DNA, 304 bp, Glycine max
  unsure (1)..(304): unsure at all n locations
cacataacacagaatataaacaaatgtccaaagatcatcatatagttcatcatcaagtaacctaccaaaatacatggaaacagagaaacagatagaaaagaaaatgtttgcttaccaaataaagaaagagatgaagagctagagaaagaataaaatatataaataaaaagataaacgggaagcaaagacaagaagagaaacactgttaccagcgatcgagcttaaacacaaacgcagagagcanagttcaatacacattaatcagcaactacaagataagattgacagaaataaaagagagaga

SEQ ID NO: 123738 - DNA, 293 bp, Glycine max
  unsure (1)..(293): unsure at all n locations
gtgggaactttaacctctgctgatgtttgcagggaacatgcttatatatgatgaattttcaactggttgcatatntgagtatgataaagagcatnctctangatcangcattgngttcaaggaggaggacaaaccanatttcattggttccttctattcaaagaccaaggccatggtaatatctctgaaattntccatttcatcttaattatagtagtgccattggaatatttttcttttcggtaacaatcaaaggtatccttcactagaagtgatcttactagagtgacatg

SEQ ID NO: 123739 - DNA, 411 bp, Glycine max
  unsure (1)..(411): unsure at all n locations
tgatggatctcgctaaaaagcactggtttctcagacttttattgccacatgcgcccgttattaaggaggaatattaaattactgacaagattgaccccattaccgatttggattgcaaaagtctctgtccatctaagacccacacttcaacttacatnaatgggcacaatggctatatagatccagagtatgctaggacttctcgcctcactgagaagtctgatgtgtatagctatggtattgtattgctttgagctctgactggaaggaaagctgttgacaatgaatcanacctncaccatctggtgagtcttctagtgtgtctgggcttgaggtctcacaactcacaactttcaaagcacctcaatgaaattttttatgtcaaacgtactttaggggaaccaacacgta

SEQ ID NO: 123740 - DNA, 150 bp, Glycine max
  unsure (1)..(150): unsure at all n locations
atcacaaatcaacaattcttggacaaatacccgagtaaaatctgtaactcaagctcagtgtattccagggctaattcttaccacaagaagatgctgtccacangtgctattcgcgtcctgtcatacagatcatgttctctataaataatg

SEQ ID NO: 123741 - DNA, 449 bp, Glycine max
  unsure (1)..(449): unsure at all n locations
gcatcaacaagaatcaagccaagggtattgtgcaagcaatcaatggggcaaaacacaccaaaagattatgatgatggatggctcanattctcacaaaggtaaacttatcactttcaaattgagctntcaaaactatcatgacatgtacagganaaacaaggatttcaaatcacaaaatgtcaagagacntttattttcaaaacaattacccatttcttgaacatatcctataattcaaagaaaaatatgcaaanttgtacatgcaaacagaattgacctaaaatattaaactagaaacccaacaaaactaacataactaacaanattaacacanacaaaactaacaaaactagcanaaccaanaccaaagaacactcccnccatacttacacaacacattgtcctcaatgtagcacaattaanagaataagaacaatcaaagaaatcaa

SEQ ID NO: 123742 - DNA, 258 bp, Glycine max
tatctaccctgaagcataaattctggtgatatccaccttcatataaaggaacatgcttttttttgtagtctgtgcagaccgatgcgatggcttaagcgagcagaacaggctggcaaagctgtgtatatcagactacactcactagagttacgagtcagctgagttaataaactcgagacaacatgactgtacaaggatatgcatgccaataggagaaattgtgatatatacccacacgttgttacaggggtattgcaa

SEQ ID NO: 123743 - DNA, 357 bp, Glycine max
  unsure (1)..(357): unsure at all n locations
tactaagctaagcaacccagctagtgtactatgctaatgtctagnctagatattttattatgatgatcgaganatcttcatatattaccctgtggaatttcatatgcgtacaatgcctctttcaccaactgtaatgaaatagaatatttcggaaccatcatgtctatttgcatcttgctgatataaatcgagagatgaagcataaggactcccagcaccaattacacaaacagcttcaactgcctcattatgaatgacagtcttcttgccactataaccatgaagatcccacaatgttacaacctgcaaatatttcgcacaaccatttgttaattcagtggactatattcatttgaa

SEQ ID NO: 123744 - DNA, 427 bp, Glycine max
  unsure (1)..(427): unsure at all n locations
tacactgatatcagataggtatgaatgcatacctgatagtcatttggccggagacttcaattctatgccaggagatatggtactagcattcctaaaatctcaacttccctatttcttattttcgactaaattataacggtcctggttggtattttcctatcctgcccaactcttggcttggtattntaagctaggtgctagaataagattgttgctccacagaaatcctgtgtgatgcattaatctgctagcaactcatggttattgattaaccttcaatctcaaaggacaagagatgacatagaaatagttgctgggaaagggaaatcgcaaatgtgccagagatgtatagtnagtgctgacacttgactctttccaaaacaatgaagatcacttttttttataaatgatacaaactggcagtatc

SEQ ID NO: 123745 - DNA, 382 bp, Glycine max
gcatatttcactctttacacccagaatacatatgctcctctaatatcttttatacctcctgatgtgttctgactcaaatagtaggacaatacttctttttgcacttcgagccaatcacacacatctcggaaggaaagtgaatataataaagatatatttatgtccatgtcatacatacaagatattaccgtcattaccttgagtctgatgctactacatcacatattatcgtcatcagtgcgtcttgctctcagcgctgactacatgtcttttgttagtacaacaaaatgaaataaatgacctcttaaaatatataacaaactgacattatctgggcaaatagactcatctcttgaatgcacttctagtatacgatcatttc

SEQ ID NO: 123746 - DNA, 269 bp, Glycine max
  unsure (1)..(269): unsure at all n locations
ctaccttcgagaggaatattctggaaggcccaagtggatctagttgctatttgcacccccatatttactaagtacatctccttgctcttttttggtgaatctntctcccgaacggtacgaaattttacgaattccgaacgatgcttggtttctttccgtaatgttacaaaaccttacggattacgtaatccatcctttnttgcctttcagaatgcttacggaacttacggatggtgcactaacactntcttttaattttcggcatgtca

SEQ ID NO: 123747 - DNA, 350 bp, Glycine max
  unsure (1)..(350): unsure at all n locations
gctacctncttgagataagaagctatagctttctacacacacnccactaatagntaagctcacctccatcgccaaatacatgaaaatacaaaaaagtctctactagaaagactactcaaaatgcccttaaatacaaggctaaaaccctatactactagaatggccaaaatacaaggcccaaaagaaggaaaacctattctaatatttacaaagacaagtggacccaaccttgacccatgggctcaaaaatctaccctgatgttcatgagaattctatggccttcttcagcagctctagcccaatcctcttggagccttctacttatggctctagtgataggtcccttcct

SEQ ID NO: 123748 - DNA, 533 bp, Glycine max
  unsure (1)..(533): unsure at all n locations
gatccttaagcacctgccgctgcagcttcaagattcagaacctaagcagaaatatgtgatttggagaatctagcttctcatagaattctatctgatagtgaagttataaccatgagagctttgcaacaagagctgtgggatatttcaaatgcttatgaatccttgntgaggcagaaatctatggctaagtggatcaaggaggttgaaagaaatacagcttacttccacaaagtgantaaattcagaagaagctcanatgttgttcatggtattctcgttgatggtgcttaagtccagcagcctgaccttgntaagaatgcagtggtaacttctttcttgagagttcactgagtagaatcatatnacctactttgatggngctctnttcctctttgacaatataaagagagggctgagatgattacggatatggcactaagataatcaaaagatatgggaggggatgtctcatctcatactactggaggacctagcagatgcctccaagcctgcatatatacttatatattgtt

SEQ ID NO: 123749 - DNA, 182 bp, Glycine max
cccataaccgctgatgaaaccgaagcaccccacgaatctgtattattagcggacctggagatacgtcgcgcggggtacgatacctctgggacgtcatgtggactgcaattgctctaaaccaagcttgatcaatcccgacccatcctcggcatagccagtcagcgagaacctgtgaagaccta

SEQ ID NO: 123750 - DNA, 438 bp, Glycine max
  unsure (1)..(438): unsure at all n locations
cacactttttatggngggccattcttggatggccttgatnttctcagagtccacttgaaccccatttttaccaactataaaccctaagaaaactatattatctacacanaaggtacatttctctatatttgcatagagggtatttntcctaacgactgaaagaacttgcctgagatgtcctaagtgatcatctaggctcctactatacactaaaatatcattaaaatataaaactacaaatctacctatgaaatcccttaagacatgatgcataagcctcacaaaggtgctgggtgcattagtgagcccaaaaggcatcactagcaattcatacacaccanacttggtcttgaaagcagttatccattcatcaccccttttcatcttgatntggtgataaaccactttaaaaaaaatattggcaccatgcaactcatc

SEQ ID NO: 123751 - DNA, 385 bp, Glycine max
  unsure (1)..(385): unsure at all n locations
agctntgatcttccaccgccgtcgtcaccatcatcttatatcttatatttaatattagnacttgnatnttggctatattagtatggtatttgaacaatttattatttccttatttgcacggtatgtntagaccaatattaagtatgttatttgactatgtggagtttataattaacctatgcatggntgttttcttcatgggtcttgcttcttgcttcataattnggntgatattntttatgaacattatatnggatgttacaataaatttatttgatacgcactctggctttnntgtgatgccaaaaggggagagaaatgggattaaatcaagaattcacatgagtaatcaacttatntttaagataagcataaattcaaaaac

SEQ ID NO: 123752 - DNA, 289 bp, Glycine max
tgtgcatgtcataataggatcattgagatgtcttgcattccttcagttgcagcttatagtagcctcactaaagggctctgccaaattggagagattgacgaagccatgttgcttgttcacgattgtgtgggcaatgatagtgatggaccattggagttaagtatagtcttaccatcattcatgcatgtaaatcaaatgttgctgagaacgtgattgatgtattaaatgagatgatagaacaaggttgctctatagacaatgtcatctataggtcaatcatctctggcat

SEQ ID NO: 123753 - DNA, 289 bp, Glycine max
  unsure (1)..(289): unsure at all n locations
tagtttagttaaatatatttaaatttctatgctaattaatctacggttatatgatacattgtataatttttatggtaaatacgttagattagttntctatgatagaaatagtttggaagaatagttctctatgatagaaatagtttgatatgagaattatatgatattacggttagttntttaatttacatgatacattacnnataatttcgatatatattatatttaattttcggtggcaaanatatatatatatatatatatatatatatatatatatatatatata

SEQ ID NO: 123754 - DNA, 153 bp, Glycine max
  unsure (1)..(153): unsure at all n locations
taagctatctntagagtctgaaagctngcagcattatcatcagcttgagactgtctcttattcaacaagtgctcaatggtttgacgatattatagaagttcttgatgaacctctgatagaagcctgcgtattcgaggaaacttccgataccct

SEQ ID NO: 123755 - DNA, 262 bp, Glycine max
  unsure (1)..(262): unsure at all n locations
aaatgcttgtgtgtggntgactgtggaaagagtantacataatgagttctagatgtttgctagtagatcccaacggtcacaatgtaggcttattcactatagactttccattaaaatttggagtcgatccaagggtaacgaattgatcgaagaattgtactgtggcttaatgagaaaactgtgatttggtggtgtgtgagcagagtttctgccttgcctgtttgctggctggatactgtctgttgatgtgtttattgatgtg

SEQ ID NO: 123756 - DNA, 256 bp, Glycine max
ctgcagctggtccataaatgcgaatactgggatcatcatctactatcataattctgctaagagaggtctttgacacagatttcagtcttcaacctctatatataacgattgtccttgctattgagagaggaactgtatatatgtagcttccctgttaagcctcttcaattataatgtcatgcttacctatacttggatacattgctgcctaacaaatataacatatttttttacaccaaaaggtgagatcttctaa

SEQ ID NO: 123757 - DNA, 323 bp, Glycine max
  unsure (1)..(323): unsure at all n locations
atgtctcacaagactctcatttatcaaagttacaacaagtggtacacatgcttctatttatagactaggtagcttccttgagaagctctcttgagataaancctggagaaacttctttgagaaaactttcttgagaagctagagctnagcttcacacccctctcataactaagctcacctcctagagaaacttncttaagaagattcctaaagaagctagagcttagctacacacacctctctatagctaagctcacctncttgagatgagaagctagagcttatctacacacncnctataatagctaagctcaccccatgac

SEQ ID NO: 123758 - DNA, 442 bp, Glycine max
  unsure (1)..(442): unsure at all n locations
gattatcctgctttaatgaataggaagcctgtggccaatggagagaataagaaggacggagagacccgtgttatgactgtcattcctacatggtcaaatatcccaccagctcagcaatatcaatactcaaccaatatcagtccttctcattaaccatcaccctatcagcctagaacactcaatcatccacaaaggccacctctaaatcagccacaatacctgcctactgcacattcgaggccatacaccacccttgatacgaatcataacaccaaccagtgaaagaaatttcagaanagaacatgtagaantaccccattttagtgtcgatgctaactactccatatctactcataatgcaatggtaccataatgccacanagaattctcacctccattttcctangatcaactcgatgcacatgtgctatcatgaggagtc

SEQ ID NO: 123759 - DNA, 321 bp, Glycine max
ttcaactagtaaatgataacgtatacgtgtatagatttttttttatccagcatttaactattatttgtgaatatatgcatgtatgtttatttttttaatactaataattgtaaaaatattttttatttggcaaacttgtctctatgattctcttttaatagtttagattaaacgcttatatcattgaatttatttttgtttgaaacttagagaataattgatataaaatagttatatgttaaatcccttttaaactcgttataaaattttataaattttttaatttttctctttttgatagtattttttttttttaaaatt

SEQ ID NO: 123760 - DNA, 454 bp, Glycine max
  unsure (1)..(454): unsure at all n locations
gatctctgagtcacctgcggctgcagcttctttttttcatactcagtcttgaattcaagaatatccattaaattatgtctattccaactcactcttctctcaattccttctataactatanccaccttgcttgttggattggagtcaccgaaaagtgagaatgattccgggcacgaatgtatctgatgaggaagtaaagaggtcaatgcagtacttaattcaaacctctccacaggacatagttgatatcataaattactgaaagtgatatcaaaagccttcactcttaaggtaccaaatttttaagagttactcaattntcacttcatttgtgcttccttgtgagtgtaatggttggaccattcattatggatgttttcttgtgttccattgattgaagaaatattctaaatctaagaaattatcactctggagaacaatctgactganacat

SEQ ID NO: 123761 - DNA, 177 bp, Glycine max
  unsure (1)..(177): unsure at all n locations
catcacttgttcgctactgcaaacatattaggatatttgatgtcctgtacttccagtttcaccttgacaaggatgtcatggaccatgttgaaaatctatattgattcaaccccatatcctgcgtaaaaatcgcaatacttcaactgtacatcattcgcatacatccatgctnttcat

SEQ ID NO: 123762 - DNA, 292 bp, Glycine max
acaaacaagccttgttttctaaagaaactacaagccctgttactttctacttttaacttgactaagtggctcgatggatgccgttgacagggcccttgttattagaaactcttgcccctcctcccataaaagtttgcttaacctcactggactacctattcagattgtatcatggacatatactaatcataaggcaacagtaacaaagctcaaatggagactacagacatttattgtacaatcaaaggaaagaatgtgactgacctttagaacccatgttgtcttaccatta

SEQ ID NO: 123763 - DNA, 169 bp, Glycine max
  unsure (1)..(169): unsure at all n locations
catgcacaactcatccttctttcagattcttctttgcgctcaaccgatgagtgtngcactcagcgaatgactcgctaagaagacagggtggcttagcgagagggtaanaatcagcactatacanactcacctaatttaacctgaattgagagaaaataattattaaaca

SEQ ID NO: 123764 - DNA, 134 bp, Glycine max
  unsure (1)..(134): unsure at all n locations
tttcaaatggagaacaaaaaccaatgaataagacagtattcactaaacaggaatataattaatattatcgaatgaaataaacnaaaatataaagagatggngcttgtttgttgactgtacatctangtgtacat

SEQ ID NO: 123765 - DNA, 391 bp, Glycine max
ttgatcacccattcaatattggagagagagtacgattcactacagaatatttaccatgcgccaagcaggttatcaaaccattagatgaaatcggataatcatctttaacttggtaactaaattaaaatgttggtcgggatacccgcaccggtatattttcagattataaattattctgacatgagaatggaatccatattataccaacttccaagtattttgagaaaacaaaccttatgtattatattattctatttggaatgaaaatcattttatgaacataaaagtattaacctatataactttgtgtacctacatttaatattgactcagaaatataaaatatctaatatttagagatgtctatttgtatctaaacttctaataatga

SEQ ID NO: 123766 - DNA, 254 bp, Glycine max
agctcacttaaataccaacaaatactgaacagttgcttttttaaaacaggcatagaaaaaacctaatgttatctaaccgctccaccctgcctgaatcgatgatttctctctcatgtccttctttttgctgtttacagcaagaagaagaaaggctttaatgtgctctggatataacttggtgttgctgccacgtacttaatcaccatactcccttttatgtaccaaatgaaatgaaatacgcattatggagaaca

SEQ ID NO: 123767 - DNA, 75 bp, Glycine max
ctcacaacaggccctaaagagaggaccgtttttaccaggccaatcgggtgaactggctggggttcaacatactca

SEQ ID NO: 123768 - DNA, 318 bp, Glycine max
  unsure (1)..(318): unsure at all n locations
tttataccccctggtgacgtgcctaagccattttactaagtctttctcgttaactaaaataaataatttcacgacgttgatgatatcatactcgtaaataattcacgtcgcatccgacccttggaacaaaagagtaaaaatttaatataaaactcttataataacganatcatcggcgttctttgggatctatttataatgaaatactaggactagtaatcctgctgcactatccaaatgttgagtgctttatttactaaaaggtatttagccgctaagaacttaataagatatgtaaaaaccagctgtcttgaatgg

SEQ ID NO: 123769 - DNA, 212 bp, Glycine max
tctaacggatcagattgtgagtttcacacacaacacataattccctctacttttgatcacttcgtattgttgcacgcgtagctttctcacagtgtgaatgtgatgaaactcgggttaatagtccatcttggtcctaattgattgtgtcaaacactcaatgtcattgcaatcccccattctctccccctagatgtgtgcttgcctaaaacaac

SEQ ID NO: 123770 - DNA, 419 bp, Glycine max
  unsure (1)..(419): unsure at all n locations
ttataaaaaagaatcacttgataagaaagaactacgtangtctgatttcctcatcgcaaattgaggaatacgtangagcaaagggaaacacccttgtcggcccaaaaagaaaaaatataaaagggttaaaggattagagacataaaagggaatataaaaatcaaagcatgtttgacattcgattaaggtgccgtccttggacggacgtggggtgctataccttcccggcgtaatacactccgactttacttanagtcgagatcgctttttccgttttcgacgtntctcaataacatggtgcgactcgcgcgtatcttatggacaccatccggacctgcgctcctccgcgaggtagtgcacgggcaaagtatagtgaaattgaacttatacccctctagtatgagcctgtcacatatctc

SEQ ID NO: 123771 - DNA, 202 bp, Glycine max
cataaaaaacacataatatgtttgggaaacatggagaaatcttaaggaaagaaagacgataaaacgatactcatatctcttctacgccttcttcttgatacgaatggaagctcacaaataaaatgggaattatgcttccatcataccctgcatattatgaatatataatcccaaatgaacgatgatactacttctaacaaag

SEQ ID NO: 123772 - DNA, 383 bp, Glycine max
  unsure (1)..(383): unsure at all n locations
ccacaacaaaatggtgtatcagaaaggcataatagaactntaatggatatggttaggagtatgttaatcaattagactttacccgtatctttgtggatgcatgccttgaaaactgccatgtatttgttgaatagtgttcctagtaagggcagttcaaagacattctttgaactgtggacaaataggacacctagtataaggcaccttcatgtttggtggtgccagacagaaataagaattacaatccgcaagaaagaaaattggatgcaagaacaatcagtggatatttcatcggttatccagaaaagtcaaagggtatatgtcttattttcctaatcatagtatgagaatngtnaaactggaaatgcacggtcattgaaacg

SEQ ID NO: 123773 - DNA, 286 bp, Glycine max
  unsure (1)..(286): unsure at all n locations
ctctctngccggncaaaactgcacaacaccgagttattaaatgaactaagggatgcagagcaattgaagaagattgatatagatggagctcctattcatttccaatcaacatcttcctactncagacaacatcaaaaatcagttagttgcttaatgcctgtctcacaatatttccatgtatgcgtctacttgatctgaagttttgtaagttagtagaaatccctgatgctattggaattatgagtcgcttacaatggctagatttaagtggttaacaacttgctac

SEQ ID NO: 123774 - DNA, 317 bp, Glycine max
  unsure (1)..(317): unsure at all n locations
cgtggatggaaacctgcgtcccacttatcgctgcaacaacccttctcagtgtggatagcaaaagccgcacgacgccttccaacantgccgcctgatgcgaagggccgagcgatttttctaccattggcggattcacaccgattgggcatctatacattgtctgagcgatagaagcagccacaccgcacaccgtgagcgaacttggtgtttgtatattaaaatgtgtatcatgctacttagcttctgctttttctgtcctccaaatgacatttgtttatctcgtcaactgccctagtgcatctacggaacatcatttg

SEQ ID NO: 123775 - DNA, 289 bp, Glycine max
tttttaaaaaggtattttcctagagctgaggctattaaatcattgaacccgccacgtggataacttgatgtactttgcaagggacacaattttttcttcagcggagagtgagaatctgattgtgatgtacacgcttataacccaacctgtaatctaataaagttttattagctcggatcgggtggatgatgctatttataaggtatagcttataactgaatgatttttttaatatattcagttgcagaaaagctgctgcttatgaactgtttttgaaatagaactgata

SEQ ID NO: 123776 - DNA, 173 bp, Glycine max
tgacaaatctacgactattctactaaagatatatagtggggaacagaacaatgaaaatttacctcttgttatctactttgctggttgacactgtatgctaacactaaaactgttttctagatatcagttgatcaggatctcacctgacttttgttcttgcttacagagttcag

SEQ ID NO: 123777 - DNA, 379 bp, Glycine max
  unsure (1)..(379): unsure at all n locations
agctttggtttagttgcagtagacggtatactgcatctcttctgagagctttacttatatagggggtggatagttaacaaagctatcagtntgtacattttcataagttcagtcagagtctctttaaatacttaatagcattattcaatggccatatacgtgacacttacccataatttgacatgaactttcgaaaagctggagagctatttgatagtacgaaagagctaaatggagctatagagcacagcttattataagtcaaaagtctctatgcttctaattaaacattatggcttactatactagctttgggtgagtatagagattaagcttatacactgctaagtaatctgtgcacctctataaagtaatctgc

SEQ ID NO: 123778 - DNA, 274 bp, Glycine max
  unsure (1)..(274): unsure at all n locations
cttaatcaaatgacctctcaccctcacctgcttaggtgatttgtcctcanggtcatagaangttgcatagaattcttttacanatggcacatcaatgttgtcatccagaaagtcagtcaactcctcccttcagtgtcttctatccagctcatctaggaaatcatcanattctgtggtgtagaccaccacatttctctcaggtagcaatttcctaggcacannatatgttgttatctctcccaagcttctgngatatgaatcttgatctgtcata

SEQ ID NO: 123779 - DNA, 292 bp, Glycine max
  unsure (1)..(292): unsure at all n locations
cttgatctagctgcttaatcatgagttgattatggagagtatatcctttttcttaaagaatgccactaactaacttcaatgttgcttccacgaatggcccgacgaacttcctcaagaggtcacgaatgaaaggcggcgaagaactattccgcccggatatcacagtcaccgcttangagcgctgtcaccagcagcgcttcaagccatcaatggatggtcgattctcctggagcgacgcgtccacctcatggacgacgagtatactgattttcatgaggaactcgtctgatgg

SEQ ID NO: 123780 - DNA, 336 bp, Glycine max
  unsure (1)..(336): unsure at all n locations
tctaattttttattgtgaattacctatattatccttatgttntagacacactaaattgtttcttaanaataaacacgttggcaattcgggttggcagggtctgaattctgaacggttntgttgcatatattctaganaataacaatgtaaatttcgatcttctaacccgaaattacactttgaatagtaaacttgtatggttgtgtaataatgagaaaatatgtatgtttgaatatataaatnttttataaatgtatggttctcaaanaatttctattcttgcacaataaattataaccataatttaatataaccttttatacaatatactttatg

SEQ ID NO: 123781 - DNA, 243 bp, Glycine max
aacagtctcaaaacttgtttcctatgtcactccaagtgatcatgctctgagatggatgagtattgagtcacttcaaggcattatctcctatgacggaaaaatggaaaaccatcatatagagattcttctctttagtatgggtcacctcctgttgtaccacattgatcataatatgtggccagatggttgtatgggtcttcattagctaagctatgaaatgcatggtgggcaaggaaagtgatt

SEQ ID NO: 123782 - DNA, 130 bp, Glycine max
  unsure (1)..(130): unsure at all n locations
atccttgagtcacctgcggctgcagcttaacatagaccgcttcaggcgctggactacttacatggatttatggagcctatgcngttgaaagcctaggatgaaagaggtatgcctatgttgttgcggatga

SEQ ID NO: 123783 - DNA, 363 bp, Glycine max
  unsure (1)..(363): unsure at all n locations
cttaccccttaaacanatattttcatgttcggatgacaagcattangagggatctctgcttgtgggttagcatctttaagtgtcaaaggatccttctgagaaagtcttcacagggttctggttagtaagttcgcttctgtcggcatatataccttcttgatggcacaattatntcacanggcttgggtagaagactactctaagacttanngttttccaccgtgntgtattgatattagtagacctaggctttggaactttatatgtttcagtaccttattactaccattaccttttgatactaatatgtgacatgatacttatcttcaccatgcacatacttacccttgatactattactat

SEQ ID NO: 123784 - DNA, 289 bp, Glycine max
caccttctttacctagaatatttacatgtacttacaacgagtatttgttacctacatcacacacacttcctttgtgtaaatcacatacatgcatactctaagcactttggctatctaaaattcacatacatgcatactcttaagccgcatgtcaactcgagtatatgccctgttgctcactaagatcgtattcaaattaaaaggtattattgtaatgcattttcttgacataacatgcaaccaattatagatttctgaagacattgtgattaccaaaattatatgtaca

SEQ ID NO: 123785 - DNA, 385 bp, Glycine max
  unsure (1)..(385): unsure at all n locations
gatcctctgagtcacctgcngctgcaagctgttcttgtagttcaagatacaagatagtgataactactgccaaantgttcaaaaacaaatctactatggaattctgtagcataggattaacctacgtcaaactcagatatatgattcaatatggtccctacattcattcactcattattanngaaggggagttgtgtcaacaatntgtaagcaactctaaaagaatgcgaaaacacacataacataattgaagaaagaacacatatcaagaacagaacacaattcaagattaaaagcatcagtccaaatcaccaatccaatgcatacataattatcatatatcagagtagaagaatcaaaaatcagtagtctaatgccctctgtc

SEQ ID NO: 123786 - DNA, 212 bp, Glycine max
cgcaaacgtgaactgcaatctcgacgtcgacatcgaccctgttattttcgacatttcagcaataagaaaaaggctagggcggacctttttttttctcctttatcaaaggagggtgcgcactgccacagtactgcagcacaggtgttctcaacacctgggattggggcaaggcgggtttccccattacaccacccttgtgtttggtctttcta

SEQ ID NO: 123787 - DNA, 152 bp, Glycine max
aatattatggaacgtcacaaacaaagaggggggatgaatttggttcaaaccaaaaaagcactgttaaaaaatagaagtacagaaaacactttcttatgcagatcgcatcacaaaacatatatgaatcagacgcaatcaatacttaatcaaat

SEQ ID NO: 123788 - DNA, 394 bp, Glycine max
  unsure (1)..(394): unsure at all n locations
ctgcagcttgcaatgggttttatatctaccatacctcttctcattatcttttggactctgagnggagacaatggcgtgggcctattataacatctgctaaaaatcattttttattanaaaagtatggatggtaaggattgaatccttgactgcttacagtatgttttgggtgagctgtaagcatttacaactcgattntgaatgatcttgattttagaaaactgcttttggctaaattgaaatggtttttatgttagaatagtctttatctcacaaagtttgtagtatcacttaagtgtaaaattgtgaactcaacacaaaagctataattttccacttctagtctattgtgcctttaattaagaacaaaatcatgtttaaaacaactggacat

SEQ ID NO: 123789 - DNA, 141 bp, Glycine max
tttcttgggggcggcaaggacaaagattccatcacatggccataacacatcctgggcccctcaatgagtcagactccagtagccaatcttttttttacaggggtccctaatctccagcgtacacatcccgcaaaacattac

SEQ ID NO: 123790 - DNA, 60 bp, Glycine max
ccaaagggagaggtttttttttttttaacacaccggggggggggatagggaaccccccca

SEQ ID NO: 123791 - DNA, 453 bp, Glycine max
  unsure (1)..(453): unsure at all n locations
agcttcacgcaaacacgcgtggggttgcctctatgatatgaattctttatncatcatcagcaaaagttcggtgtataaaccctataaggctgaccatgaacgtgtaaccagaaatgagtgattgcttctatgagacggattctttattcatttgaaaatttaaggtttataaaccgatgaccctgaccttgaaattggaaaagtgcagttgtccctaggagatgcattctttattcatcaagatatgttaactctgagccgtaattcgcctaaatcaagctgtatgtttaaatctttgttgcatattttaaatcaagctgcatgtttaaaggtataaacaccaaccctataaggatgaccctgacccttaaaacggaaaagtgcagctgctcctatgagatggattaattctttattcatcatttggagagatgataatttttggccttaatg

SEQ ID NO: 123792 - DNA, 460 bp, Glycine max
  unsure (1)..(460): unsure at all n locations
agcttgaggaatatggngtacccatcacatgttgtactatgtggcggtcgggcgatggtgcacaacaagttttccacatccacaatgcgcgcataaacccaccatcccctggtggccacctccaactgagctcacgtactcccacgtagcccatatcctcgtttctctcaacaccgggtccccatcaatcctcccaagcttccacaacatccaagcaaaacaacattcacacagcacaagctatcacagccaagcaaaacaaagcaaaggcagaaaactctgccaaaacaccaaccaaaaatcacagcttttcccactcaaagaccccagtaacaattccttcgaatccaattggtaaccgttggatcgactccaaaatttttctggaagtctatagtgcataagcctacattatgaccgtggggatctactagaaaacatgcagaactcattctgcact

SEQ ID NO: 123793 - DNA, 400 bp, Glycine max
accatcagatccgagtgaagcctgaggatatactaaagactggctttaggacccgttatggtcactatgagtatctagtcatcgcctttggtgtggctaatgctccaggtgtgtttatatacttcatgaataaagtctttcacccttacctagatagttttgtggtagtattcatagatgaatatttggtatactccaagactagagaggaacatgaagaacacttcaggattgtgctacatacccttagggaccgacaactttatgctaacttgtcaaagtgtgaagtttggttagagaaagttagtttcctagggtatgtgatatctcaagggggtatagttgtagatccctctaagatagaaagtcgtcttgaatgggagagtcctaatctattttg

SEQ ID NO: 123794 - DNA, 272 bp, Glycine max
agcttcgatgcaacatgaggtgaggttaatgtttcatcgaaatgatgcgctccatgagagggtggatcaaatggagaatgtagatcatattgaacaataaaggacgagcaaacggaatgatggtgttcctagacaaaaccgagcgatggtattaaactcaacattcctccattttaaggaatgaatgatccggaggcctacttgttgtgggagatgacaatagagcatgttttctcatgccacaactatgatgaggaccataaggtgaagct

SEQ ID NO: 123795 - DNA, 389 bp, Glycine max
gcatgcaagcttgttgcatcgagtctaaagcatctttgaattgcattatcaggtcatctttattaaaaaatccttatgcttcattgtgataataaggttgccattctgactcccattgataatctgcagaagaatagtccctatcaaactgagttccctgctgttgcatggaatagcagtcgcctttagagctagcttggtacgtcatgaagtctgccaatacactttcaagatcaggagctctccctttctcataatagttgtacatggccggttccagcctctgatcaaagttatttatagaataataataacaactgtcctggtgatgctctcctccagcaaaatcacaatttattagtggaatagagataacaatcttcatgata

SEQ ID NO: 123796 - DNA, 458 bp, Glycine max
  unsure (1)..(458): unsure at all n locations
tctcagctagagcctggtgtgtgcacnatggagctctttctccctcttaatggttgtatggtggttgtctctaggggagggaaacccctctctatctctcctagtgttcattntactttgtctccatgaacactcttcacaactctatgaaagtgttattttcaagatataatgcgcattctgtggtctcacgattggatggcttgatgatgtaaattatcgacgaatgggaaaagcttcatgtgacctaagtctttctttattctctcttattcaacctactcatgcttgaagttgaatcaatattcacccaagatatttgttaccgacttgtgtatcattcaatggcagttgatataaatcatttggaatgtgttgatgaagtgatgttggaatactactatgcttgtcactgaaagtggtttctttaatgatataggacatgacacttgcgatag

SEQ ID NO: 123797 - DNA, 424 bp, Glycine max
  unsure (1)..(424): unsure at all n locations
agctntataaaaagttggtattaattggagaattgtcaccgttagctacattacatccangagtgcataacgcgacttagattcaacgatggtgaatcacacttgcgtagtagtggtgatagaaataaatatagactatttaaccatgtatagatatatgatcaatatataacatcataccatcatatacgacttattgtattttaattttaaccatctatgatcagatcaagagtgaatggctattaatcttattctcacgtaataaattctagggaactttccaataatatgttcatgtaaagtaacaaaatgaggctgcggtacagattcggcatatatcttactgaagaaaacagaaacattatattgtattcagaactgatagaattctctgaacaataagttggcctgagaggatgca

SEQ ID NO: 123798 - DNA, 180 bp, Glycine max
aaccacgggaacccaagagggaagaaagagatagggacaaacccaagaagaacccccgacaccgccaaaagcgggaaaaacggccacgcaaaaaaccccaaaggaccaagcgcgaaaaagcccgcaagggacgcaacaaggacgcacaaagcaagggagcgaccaagggaaaaaaaagcc

SEQ ID NO: 123799 - DNA, 404 bp, Glycine max
  unsure (1)..(404): unsure at all n locations
agctngnctcagcgtntatccgatttttatacttacatgtaaggcatcgtcagcaaagtccaagaagaattaaatctagccacggcccacgagcataaagtggcagatgagtatgcccgagtgtacgcggaaaaggaggctagaggaagggtgatcgacttgctacatcaagaggcaacaatgtggatgggaccgattgctcttactttgaatgggagtcaagaactgccccgattgctagccaaggccaaagcaatggcggacacctactccgcccctaatgagatccacgaacttttagctattgcagcatatgatagacttaatggcccatattattagaaaccgctatgaaagttgtattgcactcaattaaatgaggttgtgccactatttactccata

SEQ ID NO: 123800 - DNA, 442 bp, Glycine max
  unsure (1)..(442): unsure at all n locations
tgcaagcttaaaagggttgttggccttaaggtgctctnagcgctattttcacgctgagcgcgagtaagtgaactttggcttagcgagccgggtgcgctaagcgccagaagagacaaatgacttactgggcgagctgataacgcgctgagcgcatgcttgcgtggtagattcccttcaaggttcctcttacttgctaagcgggctgatgcattgcttagcggatgatactcgctaagcgcatgggccaggcttagtgagacaccagctgctgcacctgaaatagaagtgaaagttgcatatattccatgtggagaagatctactgagcacatattaaactagacaagaaaatatttacgatccttacaaagaaccattagtntgggaaaatatatacattcttataaaacctttcttatacaaagtttgtctgtgatgacaat

SEQ ID NO: 123801 - DNA, 436 bp, Glycine max
agcttagggtctggttccacattcttatcaaatctgtgtttcaacaattggtcttttatcaaggccatgcaaaacatctgagtccgctttggtattcgggaaagtctttcactatttttatcctcaagatacacatttttttttcaaaaaccctttttgttgtgttttgatccgcaacatttttgaagaatactggtgattgtttcttttaaaaagcatgttagttttataaataggttgaaacctatacaaagttgtaatccgagattacactatcaaaaatcaaagagcacgcgataatagaaacgaaaccacgtgtaagttttttttagtttttgtttgtttcaagcaatcatcacaacacaataacataacaaagtactaaaagcgataaataagataaagaaaagttccatatttagaaggtctggtcggg

SEQ ID NO: 123802 - DNA, 324 bp, Glycine max
cacaactgtcggtattcaccctatatggtaataaattgccaacactttgttatgaatgtgaacattgaaagttttgctgaaatgtcttcggattcctataacaatagctatcactatatattatattattccaatattgaatacagagtgcgatcatcctgccaggtaaatattataataatgcctataaacatgaatattaatattctgaattatataaactatttataaatatattatttatttggacaaagatagtcttcatcatatattggagagaacctgcactatctagaaagtcattatatgtcttcctacatttta

SEQ ID NO: 123803 - DNA, 432 bp, Glycine max
agcttgatgatatggtcttcactgacgaaaggatcaaagtgagtctaaaaagaggcaaatttgatcatcatacattgataaatgccaaaaaaaaaactagggcaaatgaagagggtgagaatgagggacaagcccatgctgtgactgccattcctatacagccaagtttcccatcaacccaacaatgtcattactcagccaataacaaaccttgtccttacccaccgcccagttatccacaaaggcaatccctaaatcaaccacaaagtctgtctaccgcacttccaatgatgaacaccacctttagcacaaaccaaaaacaccaaccaagaaatgatatttgcagcgagaaagcatgtagaattcaccccaattccagtgtcctatgctgacttgctcccatatctatttgataattcaatggtagccata

SEQ ID NO: 123804 - DNA, 314 bp, Glycine max
  unsure (1)..(314): unsure at all n locations
ctatgagtcataggtttatattctaanagagcatanatccttgacttatcccaatggtcgggtattataccagtagctntctcactatcttttcctttcaagttngctttgaccttattgtaacaacacaatttattctcttttntaacaaacaacttatatgctgtgtgtgctgatgcttaacctttntcttttcattccaattgacttccctcccccaaatntagaagtaaatttgcttgaaccatatgctctcctagaatctaaacaaggtatcaggagataatcattaagtntatggttcaattcatgac

SEQ ID NO: 123805 - DNA, 306 bp, Glycine max
tcacatgttgtactaaggggcggtcgggcgatggtgcacaacaagtgttccacatgcacaatgcgcgcataaacccaccattctctgatgcccacctgcaactgagctcacgtgctcccacgtaggcgatatcctcgttactctcaacaccgggtccgcatcaatgcttctaagctatcacaagatccaagcaaaacagcattcaaacagcacaagctatcacagccaagctaaacagagcaaaggcagaaaactctgctcaacacatcaaccaaaatcacagcttttctcactgtaagaccacag

SEQ ID NO: 123806 - DNA, 366 bp, Glycine max
agcttagcagatgattcagatgaagagcttgtttatattatgcagatttatatcatgtttgaatatactaatttgttgaagcaaaaacctcaaccacaaaggacttcaaaattgagggacatgaatgggtggttgaaacattaaatggtcatcaagaaattgttataaaaaatttctaacgatgccatcccaacatactaagctatacgagttgttaaaagaaaggaaaaaaagttaaagacactaggtttttaactgttcaagagcaaagtgcaatgtttttggtcattatttgccaaacaacgactactagatttgcaacagatcattttcaatactcgatatacactattcataggcatttta

SEQ ID NO: 123807 - DNA, 325 bp, Glycine max
  unsure (1)..(325): unsure at all n locations
atctagatgaaataacatctggataagataagatttgatcaaataaaattgtcttctctcttcaagtccaagcccaattccggattcaagcccaattgcntataattctcctgaaatcatattaacaacacagaattagtcaagtacgcctaaattataaaactgcgtaattaattcgactattaaggcaaatcagtaaataaaatggtgacaagaacggttaagatatagggaaaaataatgacacatcaatcatgctcaggtngactntgaaccatacactatgttcngcactgagagacanacgtgtagtggtatgccttag

SEQ ID NO: 123808 - DNA, 427 bp, Glycine max
  unsure (1)..(427): unsure at all n locations
tagcaccccacctgacgtccccaaggtctcctgacccccgcgacatatcctcaggtaccactctgtggtcaactaataaaagttagaagactgaatcttccacactttctcacgcagggtttattggattatagggcacccatcatatgtggtactaggtggcggtcgagcgatggcgcaaaacaaatattccatttccacaagcccaggcataagcacaccatccccaatggcccacctttaatttgagctcatgtacgcgtatgtagttcttctcctcgttcctctcatcaccgggttcccatcaatccctccaagccttaacattgtcaaccaccgcaatgcatcatctcttatagttgtagtctccttcgngttctctctcggattactctcatnctcaccgtcaatcaaatcaatatacaca

SEQ ID NO: 123809 - DNA, 454 bp, Glycine max
  unsure (1)..(454): unsure at all n locations
caagctagagtgtgttcgaaaatagtatattttatttgaactgcaatntcccactttggaaagagtaattggaaggagagggagtgttgtaccaccatcagttcaatttgaataaaaaaaatgctaaaacttcttgtacttaaaaagtttcctccagcaatttctttcattaacgtaaggacattccgaaatgtaaaattaaattacgaaatgctctttccgtaataaaagagagtgcgggtggattttaagcatatgaagaaacttctggcgaagattatgttttccataatttgaaagagattatagggtggcaagaaaaagggttaaaagccttccacgaatttatatgaaagcctacaataaaaggagtgtaaaaacacttagtgtgcccgaaaatcgttactaatgatttcaaatcatccaatttctgtactaaaataatttttcacat

SEQ ID NO: 123810 - DNA, 285 bp, Glycine max
ataattgttctatacatgtcacaaaaagatataactttatgaactattgctacactaaaacctatttatacttgttatgatacagtctattgcactattctgtcacaagatattaaaaacttgcttaattttattgatgccatataacaaatattgaaatttccccacgaagcagaggataaatcaatggtatggagctaatttgagttcacggcacaaaatctacaatgacctctaccgtgttggttcaatgaatcttaatatattcacggaaataccattttc

SEQ ID NO: 123811 - DNA, 457 bp, Glycine max
agcttgtggttaagctcacattggcatcacttctaaaatatacggacttcaggtaaggcagtctgcaaccacgttgcataactgacgacctaaataggttgtcatgtcaaacaaattttaaaaactaaaatataaataaattttaactaatttcgtcctattcaataatatcatatgtaaaaaaccttattcaccaaacaaaatatctaaaatatccttaatttaataagagtgttatttttaactacgtttttttcctgtgcagttaaatgtaaatgatactttaagaaaataattaatttttaaatgagactattaaaattaaatgatgttaacttaattttttaatcagcacgtatatgtttgttcttcttatattctagacctctcaatgtagtgtgggataagaaagttaaataattatataaataacaaaataaaggagatatttaatagt

SEQ ID NO: 123812 - DNA, 460 bp, Glycine max
  unsure (1)..(460): unsure at all n locations
aaacgaagcgcgatagacaagaattctagtgaataaactgaagagtngtctgctatagtttgaatatataactattaactgctattatgccagaatacaacgactaactgtctggattgtgtcactgagaatattacagaaatatataacttgagtctcgagatgtctgattggacattgcttcaacttatactccttccttgatagtccttatatatatactttgtgatctattggtgtatggctatctgaaactctgaacatcattgcattcaggatacagcagattacctgcatgatccctaatctggacaggactgatacatgaacaacatatgcaagttttgcactttcttggtacttacctgacacgtatgttctgtctctttctccatgtgtgcagtagctatattgctgaaatgtcaaatatctattgactagcatttctctatgacacttt

SEQ ID NO: 123813 - DNA, 468 bp, Glycine max
  unsure (1)..(468): unsure at all n locations
catgcaagctntagatggaaaacctgtggngatgcggttgggcaactacacaaagctcattgtcgtgttcagctcttaggggaaatcctcctatatccaagagaccactaatgaaaatccacattcaatccaaagcaaggaacataaaataaaaccaatgaagaggaagaggaagccataacagtgcaagatcaccaatttccttccggcttgttcgcgtgaaatgtaaagaaaaccattaaaagaagaagaggaaggaagccatacctgattacctgaaggaagaagaagagaaagattcaaggtctgaagttagggttagggttatgggtaagaggtaagatgccgtttggacgtttggtgatataatgcagctaattagcttttctctctaaatctgaatgtgactctagcttttttaatgtgctgaccctatnctattattcttatttatgttattttcacggt

SEQ ID NO: 123814 - DNA, 303 bp, Glycine max
cacgagcatatgatcacggacgagtatgctcaagtatacgcgcgcaaaagaagctagaggaagggtgatcgactctttacaccaagaggcaaccatgtggatggatcggttagctcttaccttgaacgggagtcaagaacttccccgcttggtagccaatgccaaagcgatggcggacacctactctgcccgcgaagagattcatgggcttctcggctatcgtcagcatatgatagacttaatggcccacataattatatatcgctatgaaacctgtatgtgctctcagaccttgactagata

SEQ ID NO: 123815 - DNA, 336 bp, Glycine max
  unsure (1)..(336): unsure at all n locations
agcttatgcacggaagatgtatttattttatttatatgcccgaagaaacaccatntcctatttaaccatgcattaagtaccatgttcaatatatttgtgttgttgttgtgtgctttttctttctttagaaatgggtttatgatcccaacatggtttgctcatggcgcctaacacatgcaactaagaatgtaatgtgaagtttcacgcttcccctttttttgttgttgtttcgtagaggataacgcaaggatgatcaaacatgaaaacaaatggtatgcaattttgcagatcaaaatagtttgtgaacgcatattcattatgatgccatgactcatg

SEQ ID NO: 123816 - DNA, 463 bp, Glycine max
  unsure (1)..(463): unsure at all n locations
agctntgcgaattatgattttaatatccaagttccctcccattgtcttcttattaagcaaattaatagctttagaggcaatactaacgcagtcaaagatggtccttctttaatgaagcccttttagttctcaaaaatgatcttaggagcaatctcaacaaacctgtcagctagaacctttgtaatgatcttgaattaataattagaaaaggctataggcctaaagtcttccactctattcttcaaacttgggaatgaaagaaaccacattagaattcaaggaggggaagatccacccttactgaaaaaactgaatggtggaattatatacattagaagcaattatgtcccaataggtgtgctaaaagagaccactaaaaccatcaagaccaggggagctatctttgctcatattgaaaactgaatgccgtagaattcttgatttcttttagcagaacaagtct

SEQ ID NO: 123817 - DNA, 237 bp, Glycine max
  unsure (1)..(237): unsure at all n locations
ctattacccataaccaagcttgaccaatcccgacccaacccgagcatagtcagtcagtgagaaactgtgatgtacctaagcatgcgagctcctgacagtcaacagataataggaacatagaccacaaagcaatgaggcttgtgtggtggctggccactgtgaatactgtgtgatatatgggttatggcctctggtaatcgattaccaaggtgggtaatcattacacgcttaanatga

SEQ ID NO: 123818 - DNA, 421 bp, Glycine max
  unsure (1)..(421): unsure at all n locations
atctctaagtcacctgcggcatgcaagctagtcatcgtaggcgacggatgttctggtatatattatgttcccctctcaactcactctattattcaacacacacacgctttattattctatttaacttatgcttttgaatgaaacttattgctaactacatctacatgagttggtgccacagggaaaaccactcttgtcaagagacacataacgggagagtgtgagaagaaatatgaacgtaatatttccttaacacctaaacttttatttactatcttcctttacagcataaacatccctaccctcttcctcttggcttaatntttactatgcctaacatttcatttactaaagtttatttatctaatttacatgtagcaaccattggtgtggaggttcatccactagacttccataccaa

SEQ ID NO: 123819 - DNA, 388 bp, Glycine max
  unsure (1)..(388): unsure at all n locations
agcttcatttagaaatattggttgagagggattgttntgctttgatgtttaaaatatattatgaaaanatgactgtctgttatgatagttgcanaacaatgtgcacaatttatcgtgatgcaagtggaagattcaaaaaaccaacatggatccaaatccatggttaccaatcctgaaaggtgaaaaaggcagtccagggcctccccctcaacaacaagaggaacctatagatatctcttctcaaaaggagcatatgggtcactatgaagaaagcataatagtggccaaccaacctgttagtgtaaattcccctaagaaaggggttatacgttgtagaagtgaatacataatggaacaactctaatgagaacttacaagagggagaaac

SEQ ID NO: 123820 - DNA, 298 bp, Glycine max
  unsure (1)..(298): unsure at all n locations
acgagggaccgcgattaacttgntctcaagacacaggccaattggacaagaagacatgactctatctacactctactccacattttttatgattgaaaaaagagtctgaaaaatcgaatggcccaacggtaatgaagatgaccaccttaagttgaaccacttcacttgctctcttggaagtggaccaccagccctacaagtcataaaaatccaacacctatcaagtgagaataaaactttggccctctgatctaacccattgctggaagagccattgggcctatacttcacatccaac

SEQ ID NO: 123821 - DNA, 366 bp, Glycine max
  unsure (1)..(366): unsure at all n locations
ataacgaaattatagctaactgaggaaagatagctaattgaggaatgaatggctaattaaagaaagaagactaattatgaatagctgaataattaaggaaatcatactagtcaaaaacctgctcatctactcctatgaaagaagatgacaaaagaaggaaaagacacacattatttcctatacattttcttatagaagacaaagactaatagaaggagaggttagcagtggaattcattccttgcctctattctctttcttatttggcgcttttactaaatatctccctcttgcaatagtaaagtcttcatgacaatgagaggctaacaccctgnttttgggaacttggcagtcaactactcttga

SEQ ID NO: 123822 - DNA, 403 bp, Glycine max
  unsure (1)..(403): unsure at all n locations
cctccatgatgaagagaatttctctaatgcgtatggacgaccaatggtaaaagattatatgatacatctttttaattcctagaaatcataataacttctacgtgaagtttgcgtaacatatgttaaaggttattcccataatatggcaaagttcaattatcgcggccaaatttgatttgagtagaggtgaaagacttactcccatgggacattaccgacangcatgcagtcaccatccttgtcctcataggttgggacataatcagagctgtcaaaagatcattcagcttgctctcattcatgaaatccttcattccttgagactcacaagtgccttgcattgcatatatacatcaacaaccaagcgataattaataatcaatacgacccgactcattaattc

SEQ ID NO: 123823 - DNA, 402 bp, Glycine max
  unsure (1)..(402): unsure at all n locations
ctttgtccaccatgtttgttcctgtccatttatggtatcattatggcctgtcaacaagagaaaacatagagagtaagtattgcacaaagaanagtataagagatcagtactgtggcatgtctgttcctaattagttcaccctgcttgtgatttctctttgctactctatgtagttcatctaatgtgaaacaagtaaacttcaaaatacactattatatggcatttgggatgatngattgaacaatcatattcatgatgattgatgatagtgaacaaagaattatgttatcttagacccttccctgttattcaactaaaaataatatgaaggggttagaaacaccaaatagactggtttctcatctgatatcanaacaatattggttcatcttgatacttaaa

SEQ ID NO: 123824 - DNA, 463 bp, Glycine max
  unsure (1)..(463): unsure at all n locations
tgaatcgatcgtctaataaccacacttcttcacctcaagagatacacacaagcaactgaaattacgtactacccatctgaatcagatatatctttctctgatccactagcttnctcatcctgattccagaattcagataactgttctccgtaattgcatattggactgaaatggagtgtgataatcaaactaacttctttcttggataataatatagccaaggcatcaccatcagcccatataatatacccaagaataacctaagtgatcatacagtcagaccatcaatcctatgtggagaaactactatagcaaatatgaactcattgttctttctttatgtattgataatacagcagaaaaagtcatggagtcttaaatcacctaaaagccccttagcaaagctcttaaatcatttatccttaccttaatatgcttgatacaataactgctgtgtgactac

SEQ ID NO: 123825 - DNA, 463 bp, Glycine max
  unsure (1)..(463): unsure at all n locations
agcttaaagaagagtttgaagaagttntgtcttttacatgcccaactctcttgagtgacatttgtattgattgttgtattgtgtgttgcatcttaatctctaccatttcatatgtgcatcatgcatcatcatgtaggagttaggagaaagtttctaaagttagaaaatttcttcagtagttcaaactctctattttaatcgattacaggctgatcgtaattgattactcaagttttgatgcttgcagtgaagtttcttgtatcggtttaatcgattacaagctcatagtaatcgatttcacagttctttttgagacagtgattatatttttcaggagtctctactttaatcgattgttaggtgatataattgattactttccattgaaaatataatcgattccatggttcttgaaagtttccagtttttggaaaactctttaataattgaaaagaatataatc

SEQ ID NO: 123826 - DNA, 343 bp, Glycine max
tgtatcacaatatatgtagctacttgccttgagaaaaaaatatggaacattattctgattttatattacctcaattttttggcaatggcccgattgacaattattaatgaatatgttgtatattgtgacttgcaatatacatggttgattatttgttattttactgatactagtccctctcttatcacgttatataataagtgtttatactatactaatgttcatttaaatggtaaccacatttttgagagttatttatgtgctaaactaatcatcaaattatctccttagtaataggattattatatggaacctgttcaatgatgaattatatatggactat

SEQ ID NO: 123827 - DNA, 465 bp, Glycine max
tcttagtcacctgcggcatgcaagctttcacttgatcccgacacaatggcggttttctaagatgaggaagaatctgaaacgcgaagaagaagacttcacttgggaagaagaggcatcgcgaagaacaagaagaccgaagaaggtgcagaatgaagcataagaatgaagaaccagaatgaagcagaagaagcagatgaaggagaatcgtccgacgaatgaagaagatgaagcaggcgcgagagatagagagacgagagtttttttttaaaaaaattctgaagggcttttacgtctcttcccatatattgctgggtgcaccagcaaaactgctgggtgcacctagcagcactctcagtgtttttagaaccggatggtccaaccagaatttggtggacataccagtttagttcgattgaactgagtgtgtcttccattgattacggataaatattttattgattaatc

SEQ ID NO: 123828 - DNA, 415 bp, Glycine max
  unsure (1)..(415): unsure at all n locations
aactatttcgggagattttcttgagttcaacagttatcactatgtctggaggattaaatacgaatgttgtcacattgaaattntgaatatgagcttcaattagaggaatattaaaatattaaaatatttcctagttgaaatctccgtaacacttagagcttcattgcacacaataccattccatntacaatattctgagatagttgggcctactccccgtttgctttgaagcanagcctcttgttcctcatttgttgacaaggaatcatgccatagtgttagcaataacaccttgttggaacaagacataaaagaaggtactatagataatagccactaacagtgaacccgaacttgagtttgcatggtgattcaaaataatgactcgattctattgtgaactagtataatgtat

SEQ ID NO: 123829 - DNA, 401 bp, Glycine max
  unsure (1)..(401): unsure at all n locations
agcttcacaaaaggttatatggcttgtaacatgtatngaggcagnggtacaagaagtntaatgagtttatgagcaactcaggattcanaagatgtgacatagaccattgctgctatgttaagaaatatactaatagttatgttatccttgtcgtgtatgttgatgacatgttgattgcaggatctagtatggcagaaattaacaagttgaagcagcagttggcaaaaaactttgaaatgaaggatcttggtccagctaaacaaatccttggtatgagaattcttagaaacagatcanaaggaatcttgaagctgtctcaggagaaatatatacacaaatggcttgacagggtttaccttggagattctaagaaccagaatacccctttgagatctcatttg

SEQ ID NO: 123830 - DNA, 453 bp, Glycine max
  unsure (1)..(453): unsure at all n locations
agctnttaactagacgatacctcatacaaactttaatcttcatattatttgntnngcaaagatttgtatttgtgcttaactttaatatcctcacactgtgagttgtttttctatataaataaacttgtttatgaaatcttggagaggctttatgactaaatagtactttggatttttttatcttgggtataaatcaatgttgtaagcctgagaaggctgcaaaaaatacttgatgcagccaatgttgtttagtggaactccttattgttgtagaggatggacaagatcttatgttaaaagtgaactagtgtgatgctctctcccttgcacttcactctttattacatcnggttggtcgttctttatttgttcaatgttttgaaaatatttcaatgttacatatcacaattcaccccttcaacccttgttggtgacatgttattcaatttggta

SEQ ID NO: 123831 - DNA, 452 bp, Glycine max
  unsure (1)..(452): unsure at all n locations
agcttgtttaataattcactattattgtcaccttctcctactataagggatnnggttcttcttaattccctaattttttgttttgccttttcactgaccttaaaaggttcgaataaagatttctctatagggacatttgatggagattcttcatgacttttctgtttaggggttgcctttattttaatgaattcccctaagacttgaagatatttattagtgtaattagcttgttccattaggctttcgatgtctctggaaattatatcttcattaacatcttttaatttaaacgaaacgaccatgacaggtttgtcgttactgtctttgacctttggcagttggtattgagttgtgggaggtaattcctattggattaactcaccatcttgcatttccaattgagatgacattggttgtngagcacctcttatatattatatatatatata

SEQ ID NO: 123832 - DNA, 222 bp, Glycine max
  unsure (1)..(222): unsure at all n locations
tcaacacaangngcaacacatggagtccatgatatttttggtctcgagagttgtaaaactgctacctcaaagaccaatatatataaactttgatgagtagggcaacaatatacaggtattactattatacaaacttcattaagcatgattgaattctcacccgccaacacataattacttacattgtgcgtcagcacttgaagaacattctcttctccaatc

SEQ ID NO: 123833 - DNA, 393 bp, Glycine max
  unsure (1)..(393): unsure at all n locations
agctngagatgaggaagtgttgaagggtgaatctttctgcttttattgttgaccacagagtggtacctggagatatgtcgcgggggtcaggagaccttggggacgtcaggtggggtgctattgcccaaaaccaagcttgaccaatcccgacccaacccgggcatattcggtcagtgagaacctgtgatgtacctaagcaggcgagctcctggcagtcaacagataaaaggaaaacaagaccacaaagcaaggaggcttgtggtggctggccagctgtgaattttgtgtaatatgtggatggtggcctctggtaatcgattacaaggcttaaaattgaggacaggaggctaagatggtctctggtaatcgattaccaaggggtgtaatcgatta

SEQ ID NO: 123834 - DNA, 349 bp, Glycine max
  unsure (1)..(349): unsure at all n locations
ctcctattcgtggtatgatgatggagaagctgttcttctnggacctganatgctacaacagattaacgaacaagtgaagttgattctagacaagataaagcatctcatgataggcagaagagctattatgatagaaggaggaagccactagattctcangaaggggaacatgtgtttttgagggtntctcccgtaaccggagttggaagagctctcaaggctatgaatgtgacacccaagtatctangtccgtattagattttgaagaagaatgggcctgtagcttatcatatcgccttacctnncgagttattgaatatgcatcctgtgtttcatgtctctcaactga

SEQ ID NO: 123835 - DNA, 347 bp, Glycine max
tatcattccatatgctgttacaaaagccatcagtgtttctgtgattaaaagataatttcggctagtaatcattcccaataagactatcaattctgctacaaaaccgctcatgcccgtgcttgctagagaagccatctataagatagtgaaaaccgtgaatatttttggcattgggatagccattccacccatttcgtctagataaagaagacgtagtctatcatatctcgttcccgccaagaaaaagagcgcagcgccaacaaatacgtgagatatatttgtaaatagccccgttgagccctgttcgcttattgaacaattcctaaaggatgacaccatatgagata

SEQ ID NO: 123836 - DNA, 403 bp, Glycine max
  unsure (1)..(403): unsure at all n locations
agcttataggaatatggggtacccatcacatgtggtactaggtggcgggcgggcgatgatgcacaacatgttttccacatccacaaatcacgtataaacccaccatcccctggtgcccacctgcaactgagctcacgtactcccacgtagcccatatcctcgtttctctcaacaccgggtccccatcaatcctcccaagcttccccaacatccaggtaattcaacatccaaatcatcacaaactacaaaccaagcaaaacagggcaaaggcagaaaactctgcccaaaactcaaaccaaaatcacaactttttctcacttaaagaccccagtaacatttccttcgttccaattcgttaactgttggatcgactcngaaaatttactagaagtctctagtacat

SEQ ID NO: 123837 - DNA, 253 bp, Glycine max
  unsure (1)..(253): unsure at all n locations
ctgagagggcttatatcctacaccatactatccacgatttccttgtggtnttatcacgctacgtatgccacccattagtctttgtctataacccatctccgggttcataacgcgttccccaacataactcgggccatcattaccgtcgcatcggacagacaaagtngcccaaagagggagtccaccgaggaaatgctgaccacctcataagactggatagcggtttctaacgattcttctgcggcttccacat

SEQ ID NO: 123838 - DNA, 443 bp, Glycine max
  unsure (1)..(443): unsure at all n locations
gcttctaatgaaataaaacanatgacatctttatgatattatatgacacatgangtttatgttttcatgttataagttacctttaagacaatatgaataaaatcaagaattggtagtcacttatatacttgcaaacacaaacttacaatntttacaagattcatctaaggtcctgttacactcaaattgtgttgaaaaattcaactattaaggattcaacaaaatggttgctggctaaggtggaattcaactatctcttatgttaactggatgacgtgaaggctantttagttgaatacaaaattgacgacctaccaatattagccaaacaagaaggttagcagaataaggacaaggttaatacgactacctacaatgttaatcgaattgaaaaattttggataattctaacggtagctgaatgagtagaagatcaagtcagc

SEQ ID NO: 123839 - DNA, 311 bp, Glycine max
  unsure (1)..(311): unsure at all n locations
ctcacaactcttcatgcattgctntcattccctacgaatagaagagatatggttataacatatgtgcctatactttcattattacgacattattacaacctcagtctagacttcaaatctaactacctagagctcaatggtctatgagggtagtcttcttcttcacacaatgatcaataggttcacttaaactccaatcttatcatggttcattttacaaagatacaatgatgaatttggcctgcttcttattcaaatattcactcatattcttcatctactcctgaccaatgtttgcggggtctcttttc

SEQ ID NO: 123840 - DNA, 473 bp, Glycine max
  unsure (1)..(473): unsure at all n locations
agcttgtgcttgctttagtgcgtatgggattgttgtatgataatcattaattttgctaatgctttataacttggttgtgagatcaacaattattgttatattcaagttatgcattaaaaaagtgaactttttttttttttaaacttgatcaatacaatgactaatacggacagtttgaattaatcgttaaaataaatattaaattgttggtttaaaaaaagagtcattntttatatttgattcatatgtagagggtaaatttcttttgtaaatttgataaaactttggttcaataatttttgttntattctcttagtacatacttgattgtggggaattaatgttactactttcatgttgtgtatntagcgatcaatgcanaatattacctatagtttnngtaaattaacanaaaagacttaattactatcattgaatcaagtagaanatatatattctcaaatgggataaag

SEQ ID NO: 123841 - DNA, 324 bp, Glycine max
  unsure (1)..(324): unsure at all n locations
cgtgttatattatataatacatgctntcatgaatccttctagattntgtgtaccgatgaactttccacaacaagataacacattcgtgctgaccaccgnntgattttcgtggtgggataacaatgganaatactntaaattntccaataatcttaagtgattcgaatgggatngaatntaatctaattctntaattaatatttattntctttaaaaaagttgatatttaattaaatntaattgagttgagtttatttttcagaaataagaaattntatctctttaaatatactnnntttaaaagtacttcaagaggagtaattc

SEQ ID NO: 123842 - DNA, 439 bp, Glycine max
  unsure (1)..(439): unsure at all n locations
agcttcttatccaaggttcatcttggtggtgaatctccttcttccatggcttattccctaatggatggcgcctactctcacctcttctcctttgacttccgctgcatctccatggtggaaaatcaccattaaaggacctcatggaagctcaaagatccagcctccacagaagccccacaagcaagcttccatcaagtggtattatagcacaagagcttcaagtatgtgctccttaaacctccatatattntttgctttaccttctcttctattggtggttcttcatttttctccatgtatctcctcacatgtcttgagataaatgtttntaacatgattatttagagtttccactgattaaatttgctatagaagctagatttgaatttctatggntcaaatttcttgttcttgttcttgaaccatgaaatttggtgag

SEQ ID NO: 123843 - DNA, 449 bp, Glycine max
  unsure (1)..(449): unsure at all n locations
agcttcttggatgttaaacttaaggcatctttgttataaatcttattctcattttccgtnccttgattggggggaaaacacatcagctaagaattgaacttcgtaacatgctactggaaaataggccagtgtttgaatacctacttcaaattcagactattgttgactttcttggttcaattggagtaacaatntcttcatattagcatattcatgttgttcttgaggggttatctagggagtataagtccactatgttgttaatatgtagtaagtctgaacctctttccattgaagaggttgaaacattgttgctaggtcataaagctaggcttgataaatttcagaaatgtgattcccaaattaatattaatctgacttgaagggactctacttctaccaattctattgattntactcaagggccttcaacctctaacagttctact

SEQ ID NO: 123844 - DNA, 341 bp, Glycine max
ataatagatggtatcgagataaactaggttgctatgcactatctatagatgtggtattggagataaattacattactatgaattatttgtgttatcataaacaaattacgttgctatgcattattaataaatgagttattatagacaaattatgttgctagcaatggttcaattaaaacacttgacacttttcccttcactgaagtcatattatatgaaataatttaatacttcttatgcgtgatgtgaagaatatcgcttctatgaaagatcacatctctaatgaaatatagaggctgtagacatttaaatggctctgtatctatctatcacgatagata

SEQ ID NO: 123845 - DNA, 205 bp, Glycine max
  unsure (1)..(205): unsure at all n locations
tgcctattatgcttggctggggccatcacaatttttgccctactttgggttgacacgtgtatcgatggcacatcttaaactattatcatcgaagtcgtgcatgggcatatgcgtcttcttatatagtcatgccantctctttgaatgtgataatccatgttgcttggctggactaattgacaaattttctaaatttggtcaaaat

SEQ ID NO: 123846 - DNA, 454 bp, Glycine max
  unsure (1)..(454): unsure at all n locations
agcttccacaacatccaggtaattccacatcctatcatcatggactcacaaaaccaagcaaaatagggcaaagacagaaaactctgcccaaaacacaactcanaatcacagcttttcacatacaaataccccagtaacatttcctttgttccaattcgttaaccggtggatcgactcgaaaattttattggaagtctctagcacataagtctacattttgaccgttgggatctgctagaaaatgtccagaacccgatatgtactacccttttcacaaccagcaatacacaagcatttttctgcacttatacaaaattctgttgcacatttcaacagcaaaattctgcataaagtgcagatttcgaaaactactcttgccttcatccaaatttgcccaaatggaatcctacaagtcccaaatcatgtaccaatcatgtctaaaccaagaacaagc

SEQ ID NO: 123847 - DNA, 440 bp, Glycine max
  unsure (1)..(440): unsure at all n locations
agctngccgccacggagatttccgactatgctcttgtgtggnggaacaagctacanaaggagagagcaagaaatgaagagccaatgtgatgtgaatcttacggggcgcggaacgcttgatacatgctgtatagttttaggatgacgccacttcccgtgaaagaaaataagtcatggtagacgccactttcagagaaagaagataagtctgggtagaacgccttttcaatgaaagatgataatgtacgggagacaccacagtgattaccttgataagtctgatgtattggttcaacaaggaacccatagagatactctcacccatttatgaaatgccacaagtctcttattgaaataaaaccaaactatagtgttctgacaaaagataataaaacatggcctttaatagttgtgccaaactcataaaaaaatttactaaac

SEQ ID NO: 123848 - DNA, 450 bp, Glycine max
  unsure (1)..(450): unsure at all n locations
agccttaagattaaactcttttctctctttttctctcaatngntcttcattcttcttctttttttcacttctattcttcctttttcatgcacaaatttcatggctcttccactggtgatgatcatggaaggctaaacacttaatgatccaatgatccactccaaacaaggttgaatttgagttctggtttagtatttcaattctgagtgaatgttcatctttttcttcaatcctattttcgactttcatgattatgaataggcttaggattgaaaaccaattaggttatggattattttcctaatttcaaaatttaatcatagatcgtttggatgatattccaacctaatttgtgatgtcaatgaatttagggattaattggattgaactaactctaatgacattgattgaactttcataacatgatcattctctgtagaactatgatag

SEQ ID NO: 123849 - DNA, 459 bp, Glycine max
acctgaagcatgcaagcctgacatcttaactaaaattgtaatactctttctacgtacctatctaggaagctagagcaagtataaagaataattgacgatgagagacaagccatgccatcaatttgtcttctataagagactgtctccaaaaggcgacgaaatgaacataggaaaacatggtcttgtactcttgttgcacaatagtgaacaagacaaaagaaaagtctggcatcatggaaatttgcatacattgaaggcttgcattcatattatagaagagaaaaaagaatagtataattgcaggcaaacttatatacattattatagggctcatgagttattgttttactgtaccattccccacagtaaatgtactatttttggagtgaaaaacaaattggtggacaccaaatacttgatgacatctagagaggagcggaatgagagagaagacactac

SEQ ID NO: 123850 - DNA, 446 bp, Glycine max
  unsure (1)..(446): unsure at all n locations
agctntaaaattgaattaaaacgttcaatattttctgtttatctattaccatatatgtgtaatagattacatagtgcacattgtgaattccacatttaatggctgttgctaatcatatttggccactggtaatcgattaccagagagtaaatctcttgaaaagactttctaacttaaatttcttatcgaaaccttttgctacttcaattaggaattcccttcctatttaatatacctttcctaagactctatagactgtcttgatcatccatctcgaatatctttaatttctttgtcttgaataaagctctgagaaacatgtgatcctttggcatcatcaaaacattcagcttgaacctttgtctgacatttatactaattcgacaacaactcgtgactacatccagtccccaagcgacctacggtacttgagaatatctttcatc

SEQ ID NO: 123851 - DNA, 313 bp, Glycine max
tcagctgtcgatatgggacacatccatgtggtctatgtggcggtcgggcgatggtgctacataaaatttccacatgcacaatgcgcgcattaacccaccatcctctgttgcccacctccaactgagctcacgtactcccacgtagcccatatactcgtatctctcaacaccgggtgcacatcaatccttccaagctttcacaacatccaagcagaacgaacattcaacagcgcaagctatctcagtcaagcagaacagagcacaggcagaacactctgctcaacacatctaccaatagtacagctgttctcac

SEQ ID NO: 123852 - DNA, 435 bp, Glycine max
  unsure (1)..(435): unsure at all n locations
agcttcggaagatagtgatgaggtacaagccctaaaggcagagcttgaaagagcccgggtagtcaaagagaagttcaagtccatagccatcaaagtctgaagagagtatgatgaactaagggacgtcaatatggtcaccgctgaagccttggaacaagaaaccatgaaggcccgaaaggaagaacacgaccaaaacaaagttttgaggggctttatagggcagcaatagtgagctcaacctccgaagaggtgaaaggaatcatcacgggtcaaaggcatgatcttgaaggacgagctaaaggcttaccttangtcgaaaagaaatttgtcccaacagttaagcgagactgaagggaatatgtgggccatcatcgataagtgcaaagagaagctaaatctagcggcgactcacgagcaaaggctagaggatgagtt

SEQ ID NO: 123853 - DNA, 282 bp, Glycine max
  unsure (1)..(282): unsure at all n locations
tctcagagagcacaaatcccagacttatcacaatggtccttttaatacacctaggttgctcactagctctataactttaattgcttttgaccttgatacatcaacacactttattcttttctttctctcttttttttttaacatacaacttatttgttgngtgtgctgatgctntctctntntctttgcatnnccaatagttccactcccccaaagttgtggtaagattgccttgaactatatgctctcctagaatctaaacaaggtatctggagagaatat

SEQ ID NO: 123854 - DNA, 347 bp, Glycine max
  unsure (1)..(347): unsure at all n locations
tttctgaagatttttggcttttcaaaccttgaaaacttgtgctattcatccttttcattctcttctccctttgccaaaaagaattcaccaaggactaaccgcctgaattctttttgggtctctcttctctcttttccaaaaaaaggaaggactaaccgcctgaattcttttgtgtctcccttctctcttgtcaaagaattcaacacgacacnagttgagacatttttttgattcttcccattccctaatacaaaagcgttcaaaggtttaatcgcctgagaattcttttgtatccccattcacagagtatcgaaggtgtaacagcctgagatctttgcttaacactt

SEQ ID NO: 123855 - DNA, 460 bp, Glycine max
  unsure (1)..(460): unsure at all n locations
gcttgctgttgaacgctacatcaagacacatttttctgatgcggatattgatgcctttnttgcttccttctcctggaagaattccgctctacgatcccaatggcctttcttctctctctctcttttcagatgatgactttatctctctnttttggttaactccaggacatttcgtcatcttcattttgatttggggtaggggttttctcatttcttgctttaaaatgcgtcagttttcgttttttacaatgtggatttcatggtaataagctccctgcttagtgcttagttcaattgcccttgcgtttnttctgaactgagttcgtatgtgtacttctaattgtgattacactatcatgaatacatacagataataatttatttaatacttaagaaaaagataaagttctgacatgatagcgtatggtatatgaatttattcatgccatagtaacgattt

SEQ ID NO: 123856 - DNA, 470 bp, Glycine max
agcttatgcgagttataggcattattcttaagtgtcagttgtctctaaacaaatagaaccctttacttgatctcacgtctgaagatgcaactgatgggtcattaaatgcacatcatcttcatgccggaaaaccatgttctttagattggttgaagaatacttcaacataaaccacttgcattttgttagagtaggtatgtcacagcaaggcgtgtctttagatactgtttgaactccaaagtgttgatcgttactttattcttccaggatatcgatagatcctagaagaatgtcatataagacaatttgtgcaacacgaatcacaaacacaaagcattaaatgaagtcttaattgcatccttatatgttgcatcagatcataacaaacgtatgcttctatttgaaacttcaaacacataattgatgtttacaattaattgctcataaggcatataatttaatacttatat

SEQ ID NO: 123857 - DNA, 411 bp, Glycine max
  unsure (1)..(411): unsure at all n locations
agcnnggccaaagactacctaatctcatgacattaacaaaacacactagtangaagctaattaggtcacctctacacaaaaaatggctaaacaatcacataaatacacagaatctatgtcatcataggtgaaatagtgacttctatctcactaatactgacatgttgcaatgactaaccatcatagattgcaaaagcaatgatcgcaactggtatagatctgactgctagaacaacgtcagcagagatagttgaagaacccaaagaggaagctagggcgctgaaagactagaaatatgctgtctctggcactggcaagtcttatgtaataagaaactattactttggaaacgcaaaatgagtaacatggttgccaattgcagtctggagaaatgcaggttgaagtaacccc

SEQ ID NO: 123858 - DNA, 435 bp, Glycine max
  unsure (1)..(435): unsure at all n locations
agctntgagccaactcanacgatattaactntttattctgatgtctgatggaggcccggaacatatcgagacgctcgaaattgaatgttgaacctctgagccaattcaaacgacaataacttttttcacggatgtctgattgagtcccgtaacatattgagacgctcgaaattgaatgttgaacctctgagcaaattcaaacgacaataactttttactcggatgtctgattgagtcccgtaacatatcgagacgctcgaaattgaatgttgaagctctcagccaatacaaacgaccataactttttactcggatgtctgatcgagtcccgtaacatatcgagacgctcgaaattgaaagttgaagctctgagccaatacaaacgaccataactctgtactcggatgtctgattgagttccgtaacatatcgaga

SEQ ID NO: 123859 - DNA, 398 bp, Glycine max
  unsure (1)..(398): unsure at all n locations
cttcgagcgtctcgatatattacgggactcaatcaacatttcttttaaatntatngcggggtngaatagctcagagatacaattttcaaatttcgagcgtatcgatatattacgggactcaatcggacatccgagtaaaaaggtattgtccgttgaactagntcagagattcaacattcaatttcgagcgtcttgttatatcacgggactcaatcagacatccgagtaaaatggtattgtcgtttgaactagctcagagattctacattcacattcgagcgtctctgtatattaccggactcaatcaaacatccgagtaaagagtattgtcgtgtgaattgcatagatgttcaacattctattcgagcgcttcgatatttacgggacttcatcataca

SEQ ID NO: 123860 - DNA, 424 bp, Glycine max
  unsure (1)..(424): unsure at all n locations
agctntactcacacaacatacactgctcacattttatttcttgaattatataagcagaaattgcttcaattctggcttattagctatcacaagctagctggcctcttcattgggtactcacatacacaagttttggcattttaagttacttggtttgtgcatagtgttatttcatttattaagtggatgttcatattttttttccttcgtgtttatggcaacctaacttgaatttgaagtacgcattgctatcttaaaactaagaataatattgagcaatgatctaactagaaccatatgaggctngattatgaacgtcattacattatttgaagctttattcacacaacatacactgctcacacaaaatttcttgaattatataagcagaaatgtcttcaattctggattattagctgtcaca

SEQ ID NO: 123861 - DNA, 471 bp, Glycine max
  unsure (1)..(471): unsure at all n locations
agcttcaagggagttgacctattgtcttctgatatacnattgagngaaaagnccaagntcaaagaataagaagcaagggcatcctcaaactcaaagaagtccaactgaggggcttggagcaaaatctacaaaagcatggagcttatctttaccagctacttgtattagcagattggtgcacccattaagccattgaaaaatgctaatttgtaaactcactagaacaagttcattcttgacctccaaacaatgtggtcaatttccaaaattaaaaggctacaaggaattcttgaatagcttgtgtgtagggatgatactatgctagagttggtaattgggtatatcacacaatgtacaaacactgttgggcatgctnctctttaatttaacgaaatgaagctgtgaatgagactntattggcaactctacactacacatacagcaacataagatcgctgtgacccttcaagg

SEQ ID NO: 123862 - DNA, 381 bp, Glycine max
  unsure (1)..(381): unsure at all n locations
gaacctatttggtggagccattgctgttcttacagaaagcaagttcaacagacaggccncctctttctttatacaactttgtctgtattccttagttgttgaaggctactatgtcttggattgcagaactgcacacaccgtaataaggagatttacctgtggctctctggtaatctgaaccattgacttcactgagttacctcctttgtgcttcaattggtgggaactacttctacacgcctgctattttggttagagcaatgttcatctagactcttgagagaatgagagaactattcacactttactcaatagagtatggttcactctgactaaacatacactccttcccgagcattctccacctttctactgtacaat

SEQ ID NO: 123863 - DNA, 422 bp, Glycine max
  unsure (1)..(422): unsure at all n locations
agcttctcctcatgctaccttgtataagagactctttgtgtcaatgactgaggttgcattacctgaacttccctgcgaatggctgggctgatccccgagacaaaacagctgagtacaaatggtgccgaaagcctgatgacacagttggccaaagattcaaatnttgcgaggtactccgctactgatgactgctgtgtcagcttacacaacatgcatgtggggtcttcgtatgtggaagaggagaatcgcgtgtgtaaggtgtggaggaacgacggccacgatgtcagctgtccattccggtacatccattgaaaccatgctaacgccttcccctccatgtagaatgaagcaatcgtgagacgttcatgatctggtgtcgcgtggtattcanagaattgtgaaatcttgaatatccaccccgc

SEQ ID NO: 123864 - DNA, 343 bp, Glycine max
  unsure (1)..(343): unsure at all n locations
tttaatttttaacttcaccaagcatgattgtcttattttatgacatctgaccatcttgatgacttgactttttataccatgaacactttgtatcatcatgtacatcaaacacttaaaccttagataccatgaactttgctctacaaatctaatgtaaaacgacgagcaantgactctctttcatttcttggggtctcatatagaaaacgcctccatcaatgttgttaagaatcacaaaagaaaaatatggtatctgtatagaactggaatgaagattcttgataaatcctaagtcctaactcacagtgcaactttggtctgcacacactcaagtgaaatggaa

SEQ ID NO: 123865 - DNA, 313 bp, Glycine max
  unsure (1)..(313): unsure at all n locations
aaacacccttgtcaacccccaaaaaagtaaaaaaaaaaaatataaaggggaaaataatataacagaaaaataaatgatattaaagtcatgatttgctcactcgattaaaggctatcgtctattgtgacgagcgcgtggggtgctaataccttccccgtgcgtaaacaactcccgaaccctcattntcaaaactcacaaaccctttttggtttttctagcattntcctcaaataaacgttgtggcgactccactcgttttctcccttgtagacaaatgttntggcccatttattttggccttttcacaccccca

SEQ ID NO: 123866 - DNA, 332 bp, Glycine max
  unsure (1)..(332): unsure at all n locations
ctatactntnntcttgcatttttatgggtcacaatttatacatctactctcgaatcatgttttgcggtgatttaaggtctatcattttcagtcatgatctcttgtgtgaacttagatctaaatttcttccaaatattgttggagaacaacacacaaactaagtgtaatcatttttcatgtatctagagcatgttatcataatattgccatatgtctaagttggtgattttatttgtgtgatctaattattgtcatgatctgcatctacctattttattggctatcagctgtatcatcatacatgttataatctaaatgctgtgtacttttta

SEQ ID NO: 123867 - DNA, 470 bp, Glycine max
  unsure (1)..(470): unsure at all n locations
agctngaatnnggagtttgtaggtctaaagatcttttgcttacatattaactaagccattgaagtctatcaagttcaaggaattgagagacaagttaggagtgacatccttgacaaatctgaattaaggagggatgttgatgtatgctgtaattcagttagttagttaggagttgggagttagttagtttgtcagctatgaaagttgttatagctacatgtgcagtgtgtataaaaataatagtgatcatgaatgagaaataagagagtgcagaagttttaattcagaattccaagttccctctattttctcaatcaattctttcatcttctcttattatctattatagagtgagtgtgcattgtgtgagtgtgtttgaagacctttatttgttcaacaactatncttattataagctcaactttttaaatttatttgttcttttatataagactcaatatatattgtct

SEQ ID NO: 123868 - DNA, 339 bp, Glycine max
  unsure (1)..(339): unsure at all n locations
tttctaagtaaactcttatntcgcttcggtatctcaatcagtacgttacacagtantgaaaatggtgtccttgttgaattcactactacataaaagacacacaatgacgattgtaattacatacacagactgtttataaccatctgtgaaccaatgtcggtgaaagacaagactctcgaccggtggttcatataaagctgtcttacaacaacatgtcattctaagacggntcttctaacaacccgcttacaatttttttacaaaacagataaaatatacatcataaaatattattatgaaaacatcgctagataagatgttgaattnttattccataac

SEQ ID NO: 123869 - DNA, 455 bp, Glycine max
  unsure (1)..(455): unsure at all n locations
catacatgatgttctctatttgcatttattatttacactatgagagaantaacatatttgaatggcattaactaacgtgacatgattgttcgtgacaaatgatgtcttgcctcangttattgtcaatgatagagatcttgctttgatgaatgcatttgagagtatcttttcttcttcactaactagctatgtcaatttcacattgctaagaatgtgagagaanaatgcaagatgcatgtgagcatgttataagattgggacaaggtattggatgctcgtgatgggttgatcaatctcgcgataacaatatatgactaacactgcaagcttgcnatatgactcatgtattcgtattcttagatgtcacatcatggtggactatactctccgtatttgtacatagccagactgacttacagttaatagtgcagcgnggtacatttctgtgtatatac

SEQ ID NO: 123870 - DNA, 334 bp, Glycine max
agcttgaaatgaggaagtgtggactgtgttattcttcacagctgcgatcgcggaccacatagtggcacctggagaaatgtctcaaggctctggagaccttcttgacctcaggtagggtgctatttcccacctccactcttgaccaatcccgacctcacccggacatattaagtcaatgagaacttgacatgtgtctaagcatgcgagctcctgtcggtcaagcgcataaccgaatactaaactcacaagcgggggcgcttgtggtggtctggcaactgtgaaacctgtgtcattgtggaatgcggcaatgaacttcagtctattggtgggattc

SEQ ID NO: 123871 - DNA, 396 bp, Glycine max
  unsure (1)..(396): unsure at all n locations
agctntagganaaatcctatccaagattggttcttctcccctcttctctcttcgcacagaccacttgacaacatccaagggatctatctcatttgcccatgctctggtggaaattgatgcttccatggaacttagtgaagaggttcgatttacacttccctctggtgaggctttcattcaaaagattgaatatgagaataggccaaccttttgcactcattgtaaaatgattggacaccgactagcaaactgtaaagctgtgtctgctactaagattgatcccagcaaaaaaaccacagattggccctccatagttcatccttaaatttctgaattagcagccatcccagagcccaatgcttcatctcctcagtaaaagaaaagagaactaggata

SEQ ID NO: 123872 - DNA, 155 bp, Glycine max
  unsure (1)..(155): unsure at all n locations
gctgatttctttagaggaatttctagatggaccaacccagcacctattttatatactctttcttctcattgacttagtgaatcaccttntgtggtgtctattgggtcttaacctctatcaacattttagaactttgcctagattccttcttatgt

SEQ ID NO: 123873 - DNA, 484 bp, Glycine max
  unsure (1)..(484): unsure at all n locations
gtcacctgcggcatgcaagcttgcataattcatcaaggtatttatatcctcttccaaggcaccacanaagctttgatggaatttcattttgaggcccgagacaagttcaaagcctctcaaaatgctttttatggtaagcaccatagaaagggttgcttctcctataaagagtgcgtcatgcgtcattggcatattgaagcaagtttacttcctctctcccactacccacaaagaaattagagaatttgttcctttcaagtgcttgctgcgtgtttttatgagacaattcatcatcataatataattcanaataatatctattccttatcagaaaaggatactaccaagatacttacaaaattaacatttaaatgttgaaaattgtctcatataagataatatatattaataatgatcgccaacanataagtagcatgaagtacattaagaagaagatanaatctcttcttgtattcaatttatt

SEQ ID NO: 123874 - DNA, 463 bp, Glycine max
  unsure (1)..(463): unsure at all n locations
cagtgatagaattgaaatataggtatagctaagtaatntatacctacaaaccatatgataatcatatgtataagtatcatctaactaactaactaactaactaactaactaactatatatatatatatatatatagtattggatttctatcactatntgatttagtgatgaatntagaaccatgagtataggtagtatatgcccacacatatatagttttgtaactatttgttntagaatggatgtgaactatagctataaataatataaacctatantaatttatttttaataaagaaataaaacacacttattgatgcgactaacttgttagtttttttttttacaaacaactgtagttgcacatagtagattgttgttttgtactaaatatcacatcaattagaaatataaaaatactttaatgataatgaaatcttctaataaatatatatcatttatt

SEQ ID NO: 123875 - DNA, 472 bp, Glycine max
  unsure (1)..(472): unsure at all n locations
acctgaggcatgcacgcttcaagaggtaagagagaagtcatgaatatttattcaatatatttttggtaacttttttcataagaagtgaagattggaggctaggcttattggggtttagaaggagctggattgctacccttcatttggtatattagccttagaagtaaaaatccagaatgagcttatagaagtttggataaaattgattggtcgtaatactagtttcttcgatgcacaaactatttctagaacaaggtggaacaccattcactgtattttgttagcggctgggaactactttgaagatcccgagattctaaaataggaagttgttctttatttaagcaacgtttttttttacctgctagtgattatctagttgatatccctattagaaattttccttacattggtgatgaggctggaaatgattcntttgttgttactaaagaggagatcatgaaggtagtga

SEQ ID NO: 123876 - DNA, 328 bp, Glycine max
cacatgctcttaaaaggtcttctacgatagaatggtccgttcagtgtggccattaatctgatgatggtaagctgaactacagctaaacttggttcccagcgctctgttcatgctcttctatacctatagataaatcaatgatctctataagatactatgcttgatggcacatcatgttatctgacaacctcacttatatacaaggtggtcaactattgcacagacaatttgatattatatgagattgatgtgagcaaacttgagtctatctcgctacactaacccagatagaatctaaatctgtagggtctctagagtagtctaccac

SEQ ID NO: 123877 - DNA, 318 bp, Glycine max
agcttatgcacatgctatgttattaagaaaacttgctgtcgcaaggaacgccgttgcctagattgccctgcactgcgaacgcgggggcatgatccccgagacacaagcgaagcagacttatgatcccaacatcgctgggtcgcggtgcctcacacatgaaactttgaaggtggactgaagtactacgcaccgccctttctcgtttctcttctggcaagggaaaccctcggatgagcaagaagagaaacacatgggatgcgtgtggagcaaccacagcgactgtggaacgcgtatgcatgatgacgccctgactaacgc

SEQ ID NO: 123878 - DNA, 357 bp, Glycine max
  unsure (1)..(357): unsure at all n locations
cttgngtagatttcttcaacacattctacatntcaattttcaatttaagagcaactctataaccctacttacaaacttattgtatgcattccaacttgatatcaacaaatgaacttgccatgttgttttcatggggaggataccattttcatcgagaataaaggaaaaaataatggtcctttactcaaacatataagaaactatttgagcaatgagatgccaatgaccaaagaacccacaagactgcaatagggaatggacacacgagaccctgacacaagtcaagtgcatggcattacggacaaggattcctgacatagaaacaacacatagggaggaaccacctaacaatgagtt

SEQ ID NO: 123879 - DNA, 280 bp, Glycine max
  unsure (1)..(280): unsure at all n locations
ctatacaattcatggccttcatcatgttctaagttatacaaatcattctagaattcagagagttatgcaaagatcattattcacagttagtcgttcactcacagagtaaggtcacactctcaccggttntntggtcaagcttttctttcacaatcagtctgtctagtgactaaccattctattataagtntgcactcttgttctttcttcgttcaacatgcacatttgcttanattcatgaaaggaaacacacatctcatcttaagcatgcattcaattt

SEQ ID NO: 123880 - DNA, 352 bp, Glycine max
  unsure (1)..(352): unsure at all n locations
aagatgcacagtccgttttcaaaatgtacaatctggtatttcttgataccacacatcccaggntcttctagtattggtttatcttgatcaacacgcacaattgttcaagaaaaataattataaggtgggcagaaacccactatatgcactaaactgtaatgacctaagaacagccccgcggagcttctcatgtattctgcagcctgtttctgaacaaggaggataacttgtaaaacttgtcatgaggcagaatacaagcactaatgtgaacatcgcttacacaccacagggttaattgtatggttcattattcaacaataaatcatgttcctataatcctaattcaattaat

SEQ ID NO: 123881 - DNA, 204 bp, Glycine max
taaaggtggccaagctgattaagggaactggtaaaaatctaataacttcttctcataaatttactcaatcatatcgtaagagcacacttaaattatatccatcgggggagttctcgacttaagtgacagtcgcggaactatatatacttggccctccgctaggaaacgcatcttatgtgacaaggagtcatcgggattttgttc

SEQ ID NO: 123882 - DNA, 291 bp, Glycine max
tgatacccttgagctggtcctttcttgttgactcactacagctaaggaaaaccagatatacctatctaaggaattggacttgaattgtttggaaataggggggggtttgttattgacaattggttgtggcttcttatgagtatttgggcctactgatgacattgatatggtaaaagtgacatgctgatgaaagttgtttcaaggctaaaaaaataaaaagcataagtgaggaaaaaacttatggccagaagagaactctggtttacctcatgtaatttatcctactttttt

SEQ ID NO: 123883 - DNA, 476 bp, Glycine max
  unsure (1)..(476): unsure at all n locations
catgcaagcttgtaatgccctcaagatgttcaaggagttcatataatagtagagtggaagcaaaatcaaagtactcaaaatagatcgtgaccaagaatacctcgctggtacaaatttctttgagcaacctggaattcaaaatcaactaaccaccagatacacacctcaatagaatggagttgttgaaaggaagaacaaaacaatcatggacatggtgaggtgcatgctgaatgccaaacaaatgcctaatgagttttgggtggaagcaattgctaccgctgtctacattttgagtaggtgcccaacaaaaagtgtttgtgataagacaccagagtaagcctggaatggaaggagaccatctatcagacacctcagatntgttgggtgcatatcatacacacatgttccaaaccaactcaaagagaaaccgaatgacaaaggagaaagaatgtgtttcattggtacaacatagattc

SEQ ID NO: 123884 - DNA, 268 bp, Glycine max
  unsure (1)..(268): unsure at all n locations
gctttgactcctgttccttgaacttngctaactctagattctntagcatcatcaagataattcttggaagacatctgcttcacaatagaangttggactagctcatctangtccctatatggaacgagttcaacccttgtcctcacttncatattaagcccactaagagacctagctatgctngtactttcccctctctaagtcctgctcttaaaaagagtagntccatttgttgactatattcttcaacacttatactctcttgtct

SEQ ID NO: 123885 - DNA, 311 bp, Glycine max
  unsure (1)..(311): unsure at all n locations
gatgaatgagagtcttgtgagacacaactcatagntcaacttctctccccctattccttctttaattttggtgctcctcccctctctctctctctctctctctgtctgttcctccattgaggcacattcttggtggcgaagctacttctttcattgcttattatctagaggatggcaccttctttcacctcttctcctttatcttgcggtgcgtctacatggtggataatcaccattgaaggacctcattgaagctcaatgatccagcctctatagaagctcacaagcacgcttcatcagtggggatggac

SEQ ID NO: 123886 - DNA, 213 bp, Glycine max
tttttttctccatttaccgggggcgtaaaaaagtgacatcaacataattattagacttcgttctcggatggagatgaaaatacaagtgatcccatataggggaaaatgtacttaattgcacgtggtcaaaaaatatggaagagggacattaataagggtactagatttggacacattcatgtatgccgacttccatgtaagtacgctatatct

SEQ ID NO: 123887 - DNA, 427 bp, Glycine max
  unsure (1)..(427): unsure at all n locations
gctgagtcagagggagcaccgaataaatctatactgaagaatatatactgaattctcttcagaattcttcttcataaaatctgtagtaaaatgcattttacgttatgatgtgtaaccctcaactgaggatgattgatattgcaaaatctcccctttcttttgttctatatgtattaatctaacaagatttatcagactatggactctctatggaatntataagagaatgtgtatgttcaactatagaaaagtgaactatgtctcattttattgaataactttattctatctatgaatctttaatctagtatctctgttactgaaagggcagcttgactgaacattgatcatgtgcatgtgaattaaactatgactctacctcatgcatgccatatcagaactgtctatacttctacatgatctctac

SEQ ID NO: 123888 - DNA, 136 bp, Glycine max
caatactcacagagtgtgcgacataatgaatggaatcaaacataatacgtaatcgttaagtagaagccttagaaaaataatgactactattcaatactagtacgtaagttgtctcacactacgcatgttgatactg

SEQ ID NO: 123889 - DNA, 291 bp, Glycine max
  unsure (1)..(291): unsure at all n locations
cgcatgcaagcttatcgcaacagccgagctattctcacttttctataattcaaaaatagttaaagattggcacttagcgcttcctgccccactaatcccagctcataagctcaaattacagaatggatctggggcttatctcaagatagcgcgcttagcgctgctacaatcataatttttcagagaaagaagtggcgcttagcgcatcatccacgctaagcccactgattaagattcacttacattgaagatattgngcttagcgcaatgatatgcgcttagatgaactat

SEQ ID NO: 123890 - DNA, 379 bp, Glycine max
tagctaaatgttggtgaatacagattttatgacgcatcttctatcagatgatactagaacaactattgcattcagattaaacactcatacaaatattataagttgagcgatctacagtaatctaggctagggtcttcagcataggggagaacttatattttaatctttatcttacactatcttcccagatttaccaaccgttaaaaaataattggagactgcatccttattgggagctattcaggggagcatacaggaaaacattcttgaataaactgagtatactatctaaaaccggcggtttgtaattactatcaattaacatatttcattaatacgaatgctgtaacattgtgatcacgtaaggatgcaaggaacc

SEQ ID NO: 123891 - DNA, 130 bp, Glycine max
  unsure (1)..(130): unsure at all n locations
agcttacaactaattattatggtctatntattgttttattcncactcctcaattctgtnagnngggctatggtcctttcctaccttctttataattaaccctctctttcattcgtatatcatcgcttcct

SEQ ID NO: 123892 - DNA, 378 bp, Glycine max
  unsure (1)..(378): unsure at all n locations
agcttcttagttttatatgatgcatatgggtttgtatctacctcatgcactcctctaatgactatggcatcatttctggcgctaaactgttgggagtngaaagccatcttctcaattaaatttctggcttcatcaggagtcattgtctacaagggctccaccactggcaccatctatcatacttctctccatattactgagtccttcataaaaatattggagaagaagttgttctgaaatctgatggtgggggcaactggcacatagtttcttaaatctctcccagtactcatacaggctctctccactaagttgtctaatacctgagatatccttcctgatggctgtggtcttggaagcagggaaaanttttttaat

SEQ ID NO: 123893 - DNA, 446 bp, Glycine max
  unsure (1)..(446): unsure at all n locations
ccatatacaatcaaggtattcttacatacctaagatcatttacatgtacttcccacggtgactctgatatttacatcacaacacgcctccttggctaaatttactactgcatactaaagcatttctgggtaccaaaaattgcacgcgcgctcatcttggtattttaatacctatacatatacaacactcatgatgaatcttgactacctacgcaataaggtgctacatttcatgctnttttttttcaatgttttgctacctacagccacattgcagatcaagcatatattcctttgctgactagaattgtattcaaatctataaggtatatagttttatgtaatatgntcttcttcacataacatgcaacacatttatatatatatntngcgagacatttcgactaccaaaacgtattatacatacatccaagtattgtgctatca

SEQ ID NO: 123894 - DNA, 507 bp, Glycine max
  unsure (1)..(507): unsure at all n locations
ctgcaagctgaagaaagtttggctttacatgcccactcctttgataccattgattggtggtatcttggntggtgcatcttantacatttgatatctattntgcattgtgcataatcatattgtgtgtgaagaaaactntctaagttagaaaaacntctttagaggtaaaaacctcttgntttaattgattacaacctcattgtaatcgattacaataagttgtctgaagtttgtaaagataagtcttgtattggtttaatcgattatcgatatctcgtaatcaattacactgttgtttgagacaatgactgatttagtcangagtctctactttaatctgataccacagtggataatcgattacttctctcttattngagttgttaggggtgaacaagaataccttaattgattacttagatcatctaatncaatacattgttcttgagtttgtttctagaatgtggatgaacactcntaatcgatacttagataatctaatcgata

SEQ ID NO: 123895 - DNA, 390 bp, Glycine max
  unsure (1)..(390): unsure at all n locations
atgtacatacgggcagctagcttgagccccnattggtcaagagctgggttaggttctttctaatggtcaggaagcctatattnttaggattgcctcttgacatatcccttactaagtattttactatcttggtcaacgtattgatacaatttctttataggtttaattatattttttacttctaaagttttacaatattataaactttgtttccaatttttttgtcacaaattgtgccctacattntatcaaacattatgaatttttcctcctcctaanaattttgacataattaatgaaaaaatcatcacanaatcgtcttaattgtggtgaattaaaggaaaaatcaccgcanaatatcttaattgcgggntattttttacatggagc

SEQ ID NO: 123896 - DNA, 473 bp, Glycine max
  unsure (1)..(473): unsure at all n locations
agcttatctaaagnttggctttactaggtttagaattgatacttataaattcanaggtcctcaaggttacatattagagtgtgcataaataagattaagattcataggacatagctaatagtctaatactataaacattaatccatttttcacaacttctttttgtctggttaatataataaatccgtgcttttgagttgaatatcatacttgtttctgcactcaaatcacactagaggcagtagtaagtttgtgagagcaaagccggttagtatatagtattaaccttgatttgtacataactggcaggaaaaaccattgagtggatcttccagttgatttatacattaacaatttaacacggtatcagaggactagtagttctaaacattntnttcagaatattagagattacgggttaaattaaattaagaaacaagtaacttattactcctattgtgaagattctgtct

SEQ ID NO: 123897 - DNA, 508 bp, Glycine max
  unsure (1)..(508): unsure at all n locations
tctacaagaaggataccagctccagcattagatgacatatgacagactatgaaattatcatccaaaaaagaaaagcgagcatttacattaaattaacagaaatactntcgaagtatatttatccaaacagcagctttccctaacaaccacatttagaagcttaatagttgaatcagctacattacacacttgacgtcacccttctctatcaataatcaaatccaaacatttcggatttaaagtaggatacacgatcatattttgaggataataaatccaaggcaaagaagcaataaaatagttcatcattccaagtaggaaacactatcatgttttgtacatttaacataagctcagcatattgagctactcatttagaattccttacaaattcgaaggatagatgatcaaagagcactggcgatctataaatccacgcggagaaagcganacaatcgtgctagagagttggtttgaaaaaatatagaatcaatccaattatcaatca

SEQ ID NO: 123898 - DNA, 300 bp, Glycine max
gatgatgaagagcataatagtgtatagactcctagaatgtgtggctcataccagagaagtaatctcctccgtatgatacaagacatctccaacatacattgaggacgtggagaagcttgaataatcggatgagcccttatatctatccgtccaagacactcagggaatacgcttcttagactgagagagagcctctgagagagagaagatccatcgttcgggatgtcgctatccataagcgtgagagactcaatctctgaaacgacattctagccaccctattatcactctgtgtggtga

SEQ ID NO: 123899 - DNA, 384 bp, Glycine max
  unsure (1)..(384): unsure at all n locations
ctgcagcttgtaaagtctctcgctcttagtgtctataatacaaagaaggaataatcgtctagaccatcattaagaggtccgtccaaagcaccaagtgtagctagctcctctaatgaagacttcaaaggacaatctgatgaggacgacgagctagccttcatctcgagaaaaatctgaaagatgtggaagaacaagggtggatctaaatagaagaacttctccaagaaggtgttcaatgaaaagaaagacaaagataaaagctccatcattgctatgagtgcaaaaagcctgaacacttcaagtctaagtgcccagatctggagaagtccaagggaaagcatgaataatacaattccaagggtaagaanagcctcatgagcacct

SEQ ID NO: 123900 - DNA, 415 bp, Glycine max
  unsure (1)..(415): unsure at all n locations
actcagctttgctgcnatattacaatagacctcctcaacctcatcagctaaatcaaccacagcagagcaattatgacctctctagcaacagatacaaccctggatggaggaatcaccctaacctcagatggtccagccctcagcaacaacaacagcagcctgctccttccttccaaaatgttgttggcccaagcagaccatacattcctccaccaatccaacaacagcaacaacccctgaaacagccaacagttttaggccacattatttccaataagggtattgaagtagatcctgcaaaaatttctgttatttcacaattgccttacccctcctgtgtgcgagaggtgtgatcttttcttggtcatgcangattctacaggcgctttataagggaatttagcaaagtagccct

SEQ ID NO: 123901 - DNA, 281 bp, Glycine max
tgagaggacgaagctcatagatgtgaatctacacttcatcagagatgtgattgaatctgaaaaggcgaaagcggatatatgttcagcataacataacccggctgatatggtcacaaagactctatctactgtctacgtcgagcattgcctggactccatataatattaatatgcctaaagcaaatgggtataattgcaacccgtaatcacaagatatactcttgctgatgaggagtctatgtggatatctgcggtgtgtgactcaaaatcataaatgacac

SEQ ID NO: 123902 - DNA, 443 bp, Glycine max
  unsure (1)..(443): unsure at all n locations
ttcctctnttctccttgcaaagatctatctatccttttctggctaacttaggaataactatagaaaaatataaggctgacaatgctaaatcattccatcccttgtcaaaatcaaatctctcattttattngaactgcctgccatgtgtatgctcctcacaccatcatgtaacaaatctatgtgctatacttttttttccttgagtaggatagatatcagatatgatgggtctccaagatggagtctcgatgtntatctactntggtcactcactgctatggctatattaattgatgttgttatttcccacctctctatattcccatngacagagaaagtacgatctgacttctgagttaagcatatgtaaggtgggctggctggcttacatagcttttgatttgatgttgtggttctatttcaaaatggttgaaaagtggaac

SEQ ID NO: 123903 - DNA, 480 bp, Glycine max
ctggagcatcctgtgaaacgagaatcggaacaccaattaaggtataccctaagtaaaagttaaggctatcctctgtataaggaattcaagaagggttaatatgggaagtctaagtctttttaattagtcttacctcccacataacctcattctttaaaatggtagattaacctgcaagaacttagctaatgaaaaatgtataaacaaggacgtattagaccaatcacttgaccacacaaagttaactagtactcttccataaaccctgaatctcatcttactgggttttgaaacgtgtacgtgccacttgtgcgtataagtaaatcaacaataaataggatttatagctgcaaagtgcagaagtaccaaacttgagatatttagattctaaatatgggtctcctcagttcactatccccaagctactaaaccacaataaggatacagagtgatggcaattggaatttaccagtttgcatc

SEQ ID NO: 123904 - DNA, 337 bp, Glycine max
  unsure (1)..(337): unsure at all n locations
agcctgtagagagatctacattntggatctatctattactagttatccataatcaattacacacggccgctgagatcatatatggatgtcatgagtctctactttaatcaattatcaagatatcataatcgactacatcgttctagaaagtgttcccagggttgatcaagaacactctattaaattaaatcatgaatctaatgtattacattgttctcgaaaactgtcaagtcttgggaagaacactttcatcgattaaaatgggaatctgatcgagttcgtctctggatcatattgatctaatggtcgagagtcataatccatcatagatcactta

SEQ ID NO: 123905 - DNA, 425 bp, Glycine max
tgacctacgctataaatattaacttgtgtatcatttggcataactttgatgaatgcgaaactcgtgagacacacttcacagttcaacttctctctcctctgtttctccttcaatttcatgccacccccttttccctctctctcattcttttcttccattgaagcttcccctctatgcttcttatccaagacactctccttggtggtgaagcttcttcttccatggcttattccttagtggatggagcctcctctctcctcttctgctttatcttccgctacaactccatggcttaaaatcaccattgaaggacctaattgaagctcaaagatctagcctccatagaagcttctcaagcaagcttccatcatgctttggctcatattggagaaactattcatgatgaaatcaatctgcaacaagtt

SEQ ID NO: 123906 - DNA, 508 bp, Glycine max
  unsure (1)..(508): unsure at all n locations
tctanatatgacaatgatattntagaactgagtattgatccttataaatgaccccatattcattctacagatgatatgaaatcatgtccaattctccttgtgatggtctgattatcaacttcccatggtaacaaacaacgcatgagaaatcactggactaaagaatctcatggttcttcaatgagagtccacgtgaagtttaactatattttgcatcatcatagacctgtgataacccaaccggacatgtcccacaacaaacttatatggattcataaacttctagtttaagatagcatttctattgtactttgctggatactaaagcaacttttaatgacaactttgttcttccaagttagaatacattatcttttccaaaatcttcaataatatttgtagtactagagaatatatactaccattgactttttgcattacttaacaagagatctttcattatcttcatagaaacacatagtatagataatcatattggagaatattg

SEQ ID NO: 123907 - DNA, 442 bp, Glycine max
  unsure (1)..(442): unsure at all n locations
tcttcagaaacgtggcatttgtgcacaatacacaatgtccggttcaccacaacanaatggtgtatcagaaaggcgtaatagaactttaatggactatgatangagtatgttaatcaatttgactttacctgtatctttgtggatgtatgccttgaaaactgccatgtatttgttgaatagggttcctagtaaggcagttccaaagacacctttgaactttggacaaatatgacacctattataatgcacctgcatgtttggggttgtcaggcaaaaataaggatttataatccgcaagaaagaaaattggatgcaagaacaatcagtggatatttcattggtgtcgcaacatgcccttttgcgggcgagcgatgcgaggctcacgggtgcgctttccaaatgaggaaagatgcgcggagtctgcaccaacgtttatttgtgg

SEQ ID NO: 123908 - DNA, 248 bp, Glycine max
acactgaagactttggttacctgtcaaatctctatatgtcctacaaggcttcaattaacaaaatcttgctgcatttagaccaaaacataaaataaggttatttcttaagatcgtgtgtaaaggtactctgcttgagtcataataggacataactattcacatttctaccattgcagaaatatcttttctagaatgctaccatttaatccttgctaaatgacttcgttgataggtgatcaatacacgaa

SEQ ID NO: 123909 - DNA, 347 bp, Glycine max
ctcggaccaagcacgagctcacttaccaatcgatacctaacttttttggaaatgcatctttctcgagcaaaagagaaaaaattccatcaagagaaagagagaaaatttcatctataacagagaaaaaaatttcatccaggaaaaaggaagcaagaaatttccatcgagaggggagaagaaaaagaaagaaggaattccacccaaatgggaaagaaaaagaaaactctgtcaagaaacaaaaatggaagagtttgacggcatttgaaatcaatgtccatgacaatagaagaagacccactaaaggcttcttatacaccaatctcgtacgactttttgccgctacaaac

SEQ ID NO: 123910 - DNA, 388 bp, Glycine max
  unsure (1)..(388): unsure at all n locations
tcgcggatgagtatgcccaagtatacgccggaataagaggctagaggaaaggtgatcgactctttacaccaagaggcaaccatgtggatggaccggttcgctcttacttgaacgggagtcaagaacttccccgctggttagccaaggccaatgcaatggcagacacctactccacccccgaagagaatcatgggcttctcggctattgtcagcatatgatagacttaatggcccacataattagaaatcgttaggaaacttgtatggtctctcagaccttgactagatacgacttcctttttttttgaaataaaatgagttggtcccatgtttctactacanaaagctagtgcaaatcaaatcactcctacattntatctctagcatg

SEQ ID NO: 123911 - DNA, 443 bp, Glycine max
  unsure (1)..(443): unsure at all n locations
agtcacctgcgggcatgcaagcttgtatttagacctcgatcagtcatcttttctggcctacgccgactgtcattnttttcgatcaatatcggtgaataatatttttttgccgaggtgggctaatgttctcctggccgaatgaatgggaacatgccagtttcggccgaaacgaaacatcggttgagctcgcacgataaaacctagccgacctacattgtaagttttttatgcaacaccgaaacaagaaaacttcccctgccgtaggaaaaaacattatgggccagcgagcgttattttaaaataaaaaattgcgcaatgtcggctganaaatatcagtcggcgccatatcacgaccgatgtcggttattgagntttctattcaatccctgaatgaaatttgcatgatgtctacccggaaatgtttgatcggtggcatcggtgat

SEQ ID NO: 123912 - DNA, 349 bp, Glycine max
  unsure (1)..(349): unsure at all n locations
cttgaactagcccactagaccttcagggctgacactccattgcttttgggcatcagcngaacctggagaaaagatgctatgtgtgggagaatttcaattaccgggcactttagagagaatcgacccttgagtattcaagattggttagactaagaaaaagacggtatcaagatagaggacctgcaaagttgaaacacagttactgatttgcatntaggatactatattttgagcttaccccacaaaggctgtgaagaacagacttgaaactgtaggctctcatgccaattctaatttgctgacctaccactgattccacaagcccttaaaggctccccctgtaattgaa

SEQ ID NO: 123913 - DNA, 356 bp, Glycine max
  unsure (1)..(356): unsure at all n locations
ctctagnttccaggtacacactatatatcttatcttatgacagcanaagaagaaaaattaacagacccttttctctattcctaacagaaataatatgaactttaccaacacgttcaactcccatctactcgcactagatggacctgtgtatgtgacgaacaaagagcagagaggcgcggaaacctacactaccaagcatgaggaagaagccatagcagatgcaggccatgtaaccgaagaagaacgaagtttgcataanaccagacatatctgatcgtgcatagtagtaatacaatcaatagccgtagatgaacaagccagttgatccaccacaaaggaaagacctacggaaaaca

SEQ ID NO: 123914 - DNA, 443 bp, Glycine max
  unsure (1)..(443): unsure at all n locations
aagcttcgcccacatcgacaaacttccatntacggcagctcgcagtctatacttattacacgcanctttgggcccttcgaaatcaccgatcgaattggacccgttgcttaccatttgaaactgccaaactcttcgaagatacacccggtcttccattgctccttgctccgatgctactatggcccattacccccgatagcccataacctttcctctactactcaaggcaatcaacccattttggaacccctagctatgctggcccagatggatgatactactacctcatccncaacctctttggtcctggtgcaatggaagggactacctccagaagagacattatgggaacctctcttggctatctgcgacaagctacaccttgaggacaaggtgtctntgccagcacgtggtattgttagtatacagactatactaatcac

SEQ ID NO: 123915 - DNA, 413 bp, Glycine max
  unsure (1)..(413): unsure at all n locations
cacctgcggcatgcangcttctaatacttatttatgattcagataaaattattatatacacttgttgtctncatgcaaccttaagagattgtttgactttatgacattgcaattgctttctaccttggagttaaagtcgtcttctcaccctagctagatctttaaccagaagaaaattagtgtcatggtgtcttaaccgcttatagtcagagacagaggcctatctatcacaatcaataattccgggtagatgatcacaacaaagtattgactctgtgttattctattttctttctttccattgtagatccttctgaagatggcctaaataattaaataatcatatttagcacgataacgatgatatccttatctctaatgtggcgaaaattaaatgcttatgtanaaccccg

SEQ ID NO: 123916 - DNA, 335 bp, Glycine max
  unsure (1)..(335): unsure at all n locations
atggattgtaagtgacatcccttggtcagagtggatttgattgggatggcactaagcacatgatcatagttgaaaatgataatgcttggaatgaatattgcactggaagtattctttaatatgttgctatttgttattcaaagtagattggatttgactctttctttgttntccagtcgcatanatcggctaaaccggtttgattcaggtgcttcaaaattgcgatgatatagtggatttgtgtgctaaagatagagtcaccagtcatggagctgaaactgctatggatgtttgatgaagcgatgagtagagaaacaaatgaagtggaattcatg

SEQ ID NO: 123917 - DNA, 340 bp, Glycine max
  unsure (1)..(340): unsure at all n locations
ctgcacaaggctcttaatatttgaagagtatccttgnggaaccttcacccgacgaanacttatcttctccttcttggacaaagtatggcaggctgggggcaagtaaattctcttcccatcagaccttggatgcaactgtgatcttatacccatattaactagatcttgacgggtattcaagccatccttcgtcttgccttgaatggtaaggagcgccccaatcacactatcacanaacattttctccacatgcataacatcaatacaatgtctaacgtcaagatcacaccagtacggaagatcaaaaanatggacctcttcttccatatgcaactttgac

SEQ ID NO: 123918 - DNA, 446 bp, Glycine max
  unsure (1)..(446): unsure at all n locations
ctcattcagaagttgttaaaacttgttatatgtgaaaacacatggtggctatttatagagaaaccagttataaccgcctataatcgattaaatatacaatgtaatccattattttgaagaagtaatcgattatattagtatttcaatcgattaaagtgttcttcccaaaaacgggaaagctttcaacaaatatgtaatcgattagatccttaatgtaatcaatngaaatgttcttgatcacttctaaaacatcttttaagagagaagtaatcaattatatcacctggtaatcaattaaagcagagactcctcaaaaatcaatcattctctcaaaaagaactgtgtaattgattactatgatgttgtaatcgattaaactaatacaagtcacttatttgcaagcttcanacactttgagtgatcgatacgatcagtctgtaatcaat

SEQ ID NO: 123919 - DNA, 373 bp, Glycine max
  unsure (1)..(373): unsure at all n locations
gcttcgcttatagtgcacaactccttcaagtttttggcatatcttnggaattgctttattgcatccaacagaggtatgtctacctctactcttctaaacgtttccaagatctctttctctgcctcttccanntattttgtggaaactgctcttggagggaatggaagagggggaatgtgctgcttctgtaaatcaaaattacctgtggaagaagattcacctgcacaaaaattgttaggtaaattttgtcatcacctttntctgtagtagagtgaagtttggcaggttcatttgcagatggggaatgtgctactggttgaggtcctttacacttgcttctcaacctcaatgaaatggcactgacatttttggg

SEQ ID NO: 123920 - DNA, 471 bp, Glycine max
  unsure (1)..(471): unsure at all n locations
ggtagaactaccataagggaaaagagccttgngtgctaagcttatgtntataaacaagccagacaaggcaagtaaggttgtgagaaacaagacaagattggttgccaaaggttactcacaataggaaggtatagactatacataaacctttgctcatgttactcgtctaaggcaatacacattatactctcatttacagctcatacaaaaatgagactatatcaaatagacgtaaaaagtgcattcctcaatggagcaatacaagaagtagtccatgtagaacaaccccatgggtttgagggtaacacttttccacaccatgtttttaaacttaataaagctntgtatggacttaagcaagctcttagagcttggtatgaatgtatcagttcatttcttttaagcaatggatntgaaagaggaanaagggatacaactctgttctacaagaactatgactccccaattata

SEQ ID NO: 123921 - DNA, 411 bp, Glycine max
  unsure (1)..(411): unsure at all n locations
agcttatgtaanagcacttataagagaatgatatattattataaagaatgaaataaacttttcataagctacaattagcttatgcataagttaaaaatcatattgttaaaaaaattatatgaaagaacttttacaaattatcttgtgcataagttgatttaatatttatttacgagaaaaaaaaaatcctatcttcaagtctcaagcatcacaaacggcatgataagtctcaatgagaatatttattaatttaaaaaataggcatttgattatgcctatctgaattgaaatttgattatatacaaattgaatgtagatacatatatatgaaatagttagaagtgtcatattcacacaatacgtgaatgaaacaagatagattgatttctttgaccattacaggggaatcat

SEQ ID NO: 123922 - DNA, 471 bp, Glycine max
  unsure (1)..(471): unsure at all n locations
tcgtggaaggtacagtctgggttatgatcctacacatgccgacaagagaagcattgccttagaaaggaaagaaagaagcctagcccatttacaagggcagggaccacaaatggagagggtccctatctgccacattagcaaaagctntgtcagtgcgagatggatgcatgagaatcgggttgctatgctagatgaagaaaccgacctagagcagccaagttgggtgcagccgtgctccccgagtttcgaattgaagaattggcggatcgtggagcgacccgagatttcggtgccaaatccaatgtaatccagtagttcaaaccctattgctaggcctaggctttagggtctgctcctttntttaggcgttgtttctttaaatgttccagtgattntaatatacgaccttctntattgatatgatccttctcggactttcgcccatttcattnntttctgcatatttatttt

SEQ ID NO: 123923 - DNA, 281 bp, Glycine max
  unsure (1)..(281): unsure at all n locations
agcttttgtatcaactagcaaccggtcaataatatattgtgtgctagcagatctacaccagctggtgtagtagagactaagggcagataaaataaatagtgaatccgcattatctttntaatgttttgttattaaaataaaaacattgtccaatttatcgagtaacaaaatagagagaagatcttatatcatgagtatcatgttgtttttttttaactgcgtcagccatgttatgcttttatttcttttggaaggcgaaatcaaatatgtattataaaaga

SEQ ID NO: 123924 - DNA, 508 bp, Glycine max
actaagctggacacaagattctccttgcctggcacttcaaaaccttctctgtgttggatcatataaatgtcttcctctaaatccccatgcaagaatgcagttctaacatctaactgctccaagtgaagattctatgcagctacaataatcagaataactctgatggtagtcatctttataactggagagaacatctttatgaaatcaattccttgtttatgctgaaaccctttcaccacaagtctcgtcttgtacttcttctaccgtcagattcttcctttagcctatagacccacttattctataacactttctttccttctggaaatttaattaaagaccacatcttacttctttgaagggatgtcatctcatctttcattgctagctcccactcaatagagtcattcccttgcatagcctcactcaaacattctggctcacaagcatctagtaacaataaataatgcaatgaagggaatacctatctggtggactgaattctgct

SEQ ID NO: 123925 - DNA, 259 bp, Glycine max
agggaaacttatattatattgtaggacacacagctaagaaatgaaaaaaaaaaaacgccatatgcataagccacatatgcattcacctaaatataaatacaaggccacatgcgatttacggcggcatattaataaagtcacaaaaagccgtacaaatccgcatcctgcataccattgatgaatctgccctaatcgtaacaacacatgtacttggaaatcagaacacacttcgaaaactctcatgctcttgttattaaaa

SEQ ID NO: 123926 - DNA, 166 bp, Glycine max
cccggcgggtttgttaactgtccaaacctgaatcctctgcgaataacgaggactgctggttcttacgcactcctttaccatctttctcgaaggctttacgaatattaatttaacgtggggctcgcatctgactcccactttctttcctgactcgcggtggactgag

SEQ ID NO: 123927 - DNA, 439 bp, Glycine max
cctaaacttagtgtttttgtatcatgaatgtacgtagcggatacggaagtctgtgctcaaatcgataaacttattaatgaacgatgtatatatatatatcccctgataactattttacaggttttaaagttctgcatttgtcatattgcattactcttacatactatctgcccgattgtatcatatctgctgatctctggtatcatagcctgatggggaagtaggaatacaggccgtaagggcgtatgatagcaaagtttattgatctgacaccttgtatagtatgagacatatgttattctgaatttgtagagcttggcgaatcggtggaatcctattaggacattatttggaatatctgctgaactgattcgagtcttccaccatgtacgacctattggacattttcacagtgtttctgtgagaaatagcctgattg

SEQ ID NO: 123928 - DNA, 308 bp, Glycine max
tagcaacataatctttatctctaattctaacaagcttatgatgactgagatttaatttaactggtgaaatcatgtggattcaactcttcttctaactagcctcacatgatatagcaagttttaatatagattgcaaaagaatgtgttgaaaacgtgttaatgagtatgtcactatgataataattatgtacatgctatcgatctgtgctattaatatatctccttcaatagagaactgatatattacgtgagtaggactcttcaattttcttaataaagtcacacatcaagtgattcttatataagtt

SEQ ID NO: 123929 - DNA, 392 bp, Glycine max
  unsure (1)..(392): unsure at all n locations
aacaacctgctgcatggaatggtgctgctcttattgacctttgtgcaaggtgtatctccttgaagttaaactacacatataattttacgcaaaacagaacaaccaccatattgaatcgaaagcatagctataaatattcaaatgtccttgacctacaaagtatctagtatcacgactatctagctgccaataatccgtcaaataatgcattgcatcatattcttaaaatgacccagacaatgattntcagtagactcgaaacaatctcacttcattccaagttcaatgtgagtagcatagtcacaagcgggttaacaattcctttgtctcataccatgatagctcatgaaccttatccattacaattgattatgaatataaattaaaaacat

SEQ ID NO: 123930 - DNA, 511 bp, Glycine max
  unsure (1)..(511): unsure at all n locations
cacctgcngcatgcaagcttngggcttaatcacccatatgtgtgtgctgttatggtctttattattatgaaangnnactggtccttagaactagatagagtanggactggataactgcattgctagagatagtgtgcagggttttagttttctttattatgttgcgggtataatgtngttaaaattacaccaatgttcacaagacggactctgtgaatgaagttagattaaattattccaaactctggacgaatcgatgtttggtaatttgtcctcacatagaacacatgaacatctttaattcgaaaaacatctttaattgcatcaacttactcagtaggaggacccaatgcctttagatatctatgttcacactcacttgttctcgtgtatttctattacttaagatagaacttacgtttgctttaatcacaatcattaattctgttgcaacacctgttactaacaaacttgctaatgacagttcctatttcatactcatattcattta

SEQ ID NO: 123931 - DNA, 440 bp, Glycine max
  unsure (1)..(440): unsure at all n locations
gcttggagattccgcttcggttgaagggttcttctcggtgggggtgttcttcggagttcaatggnggnttatgggggctactggtggctgtgggtgatggagaaagagctcgtgaagttggaaatgggtttggaagaaagaaggagaaggaaatgacttttttccaaggctacacgaaaagcaaaggctgaaacactcaagtgtttctgctctcggagaaggaagcgtttctcacaagccatacgttgaatcaaagatcgcaatggtccgatcatggacatctagcatatgaacctccataccaaattttgagaagatctaaccgttaacgaatgcaggagggcgaatttaccaagacagctcagtcagcttccttgagaagctttctcgtgaggcttccttgagaaagcttctcatgagacttctttgaaaagctagag

SEQ ID NO: 123932 - DNA, 365 bp, Glycine max
ttcattgaagcacatatccactcgcagttcccaagtatcatacctctcaccaacaaaggtttgaagaccatcaaacctctccaaaatcttcgaaagaagagatgaatcttctccctcatgttcttcttcaccaatatttctagcacccttctgtacccatgatccatcatgctccttaatataaccaaaggatgctatgactgaagcgcctatatagaatgttctcttgattggaacataatgttcagaatcaaaagggatgttgaaatgttgaacgaagagggtaacacagtgaggataatgtaatggcgcattcaatcgcaatgccttatgcatgcgatatctaacaagatgtgcctaatcaa

SEQ ID NO: 123933 - DNA, 262 bp, Glycine max
atatataatatatacatgcctacgctcttgcgccatgtatataagttagaagtgcaccttccgttttctctactgcctcagaaagccaacatgttatggaggagaaaatatttcaatttatgacatggtacattgataacaacctatagtgctgacagattagtctgctgttacgcaaataccttagtctacgcgaaatggcgtcatatcttattccctgacaaataaatgtagcattatttttgtactgattatcgttaca

SEQ ID NO: 123934 - DNA, 485 bp, Glycine max
  unsure (1)..(485): unsure at all n locations
gagacttcccagctatctaacatctctctcaattatgctctttctcactctaagaagtggattcactcttttgtcttggatgatacgaatgaaggctcctacccttatttatactactccacctctacaatgaatggtggagattacttgtatcttagggtggagattaattctctagaatgcttcacacattctaggagtctctacactctgctactcccttccatactctttcataaggttctagaaggttccacacatctccagaatattccagaggtttctacattcttccacaagcttctagagagttctacactactctagagttctctaggacgttctagaaaattctacacttttctagaaagctctagaattttctagacctctcaattaatggggatccaacanaatggggcacgtgcacgtattcgtcatntagacgaaatttgttcatataaaagcattccttttattttaat

SEQ ID NO: 123935 - DNA, 345 bp, Glycine max
  unsure (1)..(345): unsure at all n locations
tagcttatcatattgagattgatgagatctatgtttatttggagaggcgtaatctacacaaatgcctccccaacctccaagatggaagcatagatgtagctgtggtgaatgaagtttatgcttatctatatagcccagaggaccaagctcctaaacaagctagagtaaaaggacatctgattaagatcgattcagacaggctgaatgaatgtcttcaaactccagtggtgttagaggaggaggaatctttacccacctagtctatatnttgtatgttgaggactaaccaccaggagattgaagccaagaattgtattccctgcaaggagtgtggtatgaatgctg

SEQ ID NO: 123936 - DNA, 465 bp, Glycine max
  unsure (1)..(465): unsure at all n locations
gctggaatcatttatcctatctccgacagcctatgtgtgagtcccgtctcaggtagcccgaagaagaccggcctcacagtgataaaatatgagaaggaggagctaatttctactcgggtgcagaacagttggagagtctgcattgactataggaggctgaaccaggttaccaaaaagcaccattntcccctgccattcattgaccagatgcttgaacgcctggcaggtaaatcccactactgtttccttgatggtttttctagttatatgcaaattactattgctcctgaggatcaggaaaagaccacattcacctgccccttcggcactttggcctataggaggatgcctttcggcctgtgcaatgcccctgggaccttccagcggtgcatgantagtatttgtagtgtatttttagaanattgcatagaggtgtttatggatgatatcactgtatatggatcc

SEQ ID NO: 123937 - DNA, 397 bp, Glycine max
  unsure (1)..(397): unsure at all n locations
agctngtaaaaccaatattctntgttctaccagtccactactggctctaacataagccataagatntattggttngattgcacaatgaccaacactctttcgtcttacagacggataaacaaatttagtacttagtcttttctcttaagatgaacaaagtgttttgagagcttttgtaaactttgcaagaatttacacaagaaatatttttacgcaaagaatgaaataataaattcttcaaataatgctttatgtcttcaaagcttttggtatttataggcctcattcaatcaagtatttattgtcgctaaatgaacatatttcctctcttaagcttgtgtatgaagaatgaaataataaatgcttcaaataatgccttatgtcttcaaaagctttg

SEQ ID NO: 123938 - DNA, 452 bp, Glycine max
  unsure (1)..(452): unsure at all n locations
tatttacctatctctgtcccaaatggccttgcaaagattctatagataaaatgcataagctttaattctagatgtgtgctttgatgcataggcataatgcaatcattctatgtctagcaatgaatttattatgatatcttttccttttagttctattagaagttatcctctgtcgagcatctaacccctaaaactgatgcatgcataccttcattatattcttattaaggattaccctctgtcgaacatctaaccccttaaacaatgtaaagatgagtaatgcatgaaattaaaataggaaaagataataggatagcaaacacttgttgcattgataaatatgaagtacatcatacatctgttagcgttntaagcctatcangccctaactaggggtttagcctctcatgaccctganggccttacactgagataggggtataagaattggt

SEQ ID NO: 123939 - DNA, 399 bp, Glycine max
  unsure (1)..(399): unsure at all n locations
aagtcanctgcggcatgcaagcttctcgatatattattggcctacatcttgacgttcgtttgataaantatgaccatttgaacttgtccagagctttggttgtccaatttcgagcgtctcggtatattatgcacctgaattggacatccgattgacatgttatgaccattggaatttctcgagaagcattcgtgttcaatttcgagcttctcgatctattatgcgcctgaatcgaactttcgtgtgactagtgatgaacatttgaatttctcgagaccatacggtggtcaagtatcagcgtgtctgattattttgcgcttgaatcggactttcttgagacaagtattgatctcttgaatgtttcgagagctttcggatctgaatttagagcatctctat

SEQ ID NO: 123940 - DNA, 303 bp, Glycine max
  unsure (1)..(303): unsure at all n locations
cctgagggtgccttagctagagtgagcattgtgggttatggagaagcaagagggtgggtttgcaacagactgatgagcgcaagaagttttggctttcgagtttgtacaattaagttaaacgacaacaatctggtntttaaaaaaaaccgatgctaacatatgatcgttacatcggttttgaaaatataatgttacatagatgtcttacataggtttgacatatcgatgtacctacgaatgttacatcgatttcacaaactgagtacctacgtttgtgaacatcatttatataactgatgttac

SEQ ID NO: 123941 - DNA, 219 bp, Glycine max
acaatctgagaaggaaagcacctaaaagaattcaatcatactcacatatactccttggctgacagaccatgtaaagagttttgatgaacacgaaggttagagctaatgcgacaatctagagctcttattggaggggctctctcaagctaatcaagtatgaccttatctgtaaactctcaagcttaccattaactatgtgtttcttcctctaatacttca

SEQ ID NO: 123942 - DNA, 494 bp, Glycine max
  unsure (1)..(494): unsure at all n locations
tactaagctagctcacacacctctctaatagctaagttcacctccttgatatgataagctagagcttagctacacaccccctataatagctaagctcacccccatgacaaaaaacatgaaaatacaaaaaaaaagtccttactacaaagactactcaaaatgccccgaaatacaaggctaaaatcctatactactagaatggccagaatacaaggcccaaacaaggaaaaacctattctaatatttacaaagaagagtggatccaaccttgacccatgggcttaaaaatctaccctaaggttcatgagaaccctagcgccttctttagtagctctagccctagcctcttggagtcctctatccaatacccttggggggtaggattgcatcaccttccccgtgcgtaaacaactcccgaaccctcattttaaaatccatagataccagtgctctgaatgttgaattanattcattgtaagagcacatctttcata

SEQ ID NO: 123943 - DNA, 358 bp, Glycine max
  unsure (1)..(358): unsure at all n locations
caacaaccttctgatagaatcttctggagggcccaagtgggccttggttgctatttgcacccccatttntactaagtacaccccctgcctttgttttggtgattcttttttcgtaaaggtatggaaacttacgaatttcgtacgatacttgctttcttccgtaatggtacggaaccctgcngatacataatcatccccttcttgacttatggaatgttacagaacctcactaattgtgcaacgatgcctccatttgatgttcggtgtgtcacggaaccttacagattgtgcatcaatattttcttttgtttccagcatgtccggaattcacanatggctatgatggtgcaacacttac

SEQ ID NO: 123944 - DNA, 293 bp, Glycine max
ttacacaaaattccaaaatatcatgtatttgacactttattgcaaactggtcatgcctgcacctatgccgacacttaagggcaaatttgtatggtcttgtgatgctagggctcacgaatcatttctttattttaatcaaccacatgtttccaaatatgttctttatcaatttgtgcattcatacgagtccatttccggcgttcggcgaaaattcacagcattcacccttcacgtgtagacacattgtacacaaaattggtatgatcaatgaaactttctttggaaatcgtctc

SEQ ID NO: 123945 - DNA, 419 bp, Glycine max
  unsure (1)..(419): unsure at all n locations
gctttatcttggtcttattttctaacattatttattttcctatgaagggtattntaattagtaaaggtctagttataattaatctaacccccccttcttaattattatgaggccacttgatccaacacatcagaggagctattataccctcctgcttggccttctgaagtccatgacccatttgctctgacctttagaaacaaagttgagctagtatcctgaaaaccaccaaaactaaagctcctcaacacccaacaaaatgacctctcctcatttagcccataaactgaagccacacaatcacaatctgacaagcaagcatccncacattttgacacattagaaatatcactatattagctattactaaaaattcagaanaaatagtagtggtttgctgcaccgctgaaatcctaact

SEQ ID NO: 123946 - DNA, 453 bp, Glycine max
  unsure (1)..(453): unsure at all n locations
ttatctaatcattctaatccactcaattcatacaatttctcgatcaatncattcccaaacactcatttcatacaaaacaatccactgcatatcacattcaaccagntcactgttcaaacaagctttctgtagaagcaatcaactcaaggtactgaaatataaataactgaaacataaagactaaaatntaaatgactgaacataaatcataaaataactgaaataaactataattttcaaaatgcacaaatttaaatgtcctgctcctgtgattgctcctgtgcatgctcatagagatccaacacctgagcaattggtgaatcctgagggataggctgctctagctcagatgttggtgtagctggcatggaatcatcangtatgggtattgaagatggctntggaatctggtctgtggaagtctcctcctcctgagccatgtgtacacctgca

SEQ ID NO: 123947 - DNA, 379 bp, Glycine max
  unsure (1)..(379): unsure at all n locations
agcttaagctccttcaactgcacaaggctcttaatattngaagagtatccttgtggaaccttcacccgacgaanacttatcttctccttcttggacaaagtatggcaggctgggggcaagtaaattntcttcccatcagaccttggatgcaactgtgatcttatacccatattatctagatcttgacgggtattcaagccatccttcgtcttgccttgaatgttaaggagcgccccaatcacactatcacaaacatttttctccacatgcataacatcaatacaatgtctaacgtcaagatcacaccagtacggaagatcaaagaaaatggacctcttctttcatatgcaactttgacttttatccttcttttgggtct

SEQ ID NO: 123948 - DNA, 482 bp, Glycine max
  unsure (1)..(482): unsure at all n locations
tgtaattctagctcattcagaagttgttaanacttgttatatgtgaaaacacatggtggctatttatagagaaaccagttataaccgcctataatcgattaaatatacaatgtaatccattattttgaagaagtaatcgattatattagtatttcaatcgattaaagtgttcttcccaaaaacgggaaagctttcaacaaatatgtaatcgattagatccttaatgtaatcaattgaaatgttcttgatcacttctaaaacatcttttaagagagaagtaatcaattatatcacctggtaatcaattaaagcagagactcctcanaaatcaatcattctctcaaaaagaactgtgtaattgattactatgaggttgtaatcgattaaactaatacaagtcacttatttgcaagcttcaaacacttgagtgatcgattacgatcagtctgtaatcaattaaaactgagaagttgaactactaa

SEQ ID NO: 123949 - DNA, 366 bp, Glycine max
  unsure (1)..(366): unsure at all n locations
ctaagctccttaactgcataaggctattaatatttgaagagtatccttgnggaaccttcacccgacgaagacactaacaaaaacgtatcttctccttcttggacaaagtatggcgaactgggggcaagtaaaattttcttcccatcaaaccttggatgcaattgtgatcatatcctcatatcagctagatcttgacgggtattcaggtcatccttcgtcttgtcttgaatgttaaggagcgtcccaatcacactgtcacaaacatatttctccacatgcataacatcaatacaatgtctaacgggtagatcagatcaatatggaagataagaaaaatggacctcttcttgcatatgcaactcttac

SEQ ID NO: 123950 - DNA, 439 bp, Glycine max
  unsure (1)..(439): unsure at all n locations
cgctctacagggaagcatctaattgtctggttcacattttatantcaaacatgggtacctatctgtctttgattcttacatatatatgctgatcttgttggttttttctttgttttcttttggagatatatttcaacataaatcgtgaagaacaagaaaagaagaaatataccttcacaaagatatatagacatttgaatttgtgaatgaaactaggcatgggtctgatgcattctaattaactctatatgtatgttgtatntgggtaggtatgaacatgaactcattcagacaattggattggagtctagagtgcaagaggggaactcacttttggatgttggatccaatcaaggagtaagtatggtggggatctatggtatcggggttataggttagactgctatcgcgtgtgcagtgtacaattngattgctgatc

SEQ ID NO: 123951 - DNA, 428 bp, Glycine max
  unsure (1)..(428): unsure at all n locations
ttgcgaaaggcttgtcgctggagctgaaccatcaactgttctatctctntcagactggcgactcctaggctcttgatcttgacttgatataacctatttttaagccaagactccgacatctatcgcaggtgaaatggatgaatgcatgaagaaatgcgtatggcatagatgcattttatggatacgagagcccatgagattatctccttctttaatacaaaattcgggcagcatagcgcccgatgcatgcatttaagaaggtgacatggaccttccttcttctcgtgacaaagtgaggggatcaagacgcaacccgtgcatgatgacatgatgcgaaggggaacaaggaaatgtacacagcatggcaatatcctcaaataatcacacagcgaaggcatacatgacatataggttatatgcatggcagt

SEQ ID NO: 123952 - DNA, 416 bp, Glycine max
  unsure (1)..(416): unsure at all n locations
agcttgagggttggtatcaaatatggaatgatattcangtattgatcaaagagaatgtgagaatggngaagtgaatgaagcggtgattcttatgtcatcttataaatctttctcgaaatctatgtactttaaaaaaaatattaaaacagaaggcaatagtatttaattttatgaaaatattgtaatcatttaatatttatcataaagaaagtataaaaatgaataggaggatttaaagttntgaaaatatttgaaacatttaacatttaccatataaagaaggtagaaaagtaaaagaatatgtgacgagttggaagtatcatgaaagtgatagcattaccacatcaatgtactcatcatcaagatgtgacaagcaatgccaataagacacatggcttggatgacccatatgaatt

SEQ ID NO: 123953 - DNA, 386 bp, Glycine max
  unsure (1)..(386): unsure at all n locations
ctcaaaatacatcactggattctgtacaatctncatacatactgaacccaaacagacaatgtggcagtttatctgtcactaataaccatctaattgattcatgatcatctggactagtgtaataactcttcatatgtaaatacttttctctttatctgtgatttaatacacaataatttaaattgcacaaattatgggcaatgcggactccacatcatgcacatgtatgaataattgcgatccttgaatttgtctgactcttctaaccgtgcaatttatgtcataaatctagtttattgctcaacttaatagctcatataaacaagcgatgttatttacggtatcaatgtatgcttatctacaaatcttgctgccatgtgagttgt

SEQ ID NO: 123954 - DNA, 259 bp, Glycine max
gcaagctgcttgaaagatttatggaggctggatcttgatctttataaggtccttcaatggtgagttttagccatggagttgcagcggaagataaacgagaagaggtgagaggaggcgccatccactatagaataatccatggaaggaaaaactctaccaccaagagagtgcctctgataagaagcttatagatgaaacatctatggaggaagagaaagagagaggggcggaggggtgggtcttcactgtctctcattct

SEQ ID NO: 123955 - DNA, 354 bp, Glycine max
  unsure (1)..(354): unsure at all n locations
cttggaaacctctaactgaatctccatcttcttcaggggcaccacattaattactagattagtttcatttctgtttttcctctcttaattttgtagattaatatttatatctgatggcaattctacattgtatatttttaagttaaagccactcacataggttaactatgtcctagnaatgctgtcaatgtaaagtgctactcttgtttcatcctgattccaataaaaaacaagaatatatcttcaaactagttacacctcataagtagcactctgtactctatagactatatatcttctatntcttggttgtatagnttatatatttttcacattaatttcccactatgaaca

SEQ ID NO: 123956 - DNA, 387 bp, Glycine max
tcaacttacagtgagtgattcacgcttagcactattgatgcattcctaccccccaagggtattggataaaagactccaagaggcttgcgctagagctactaaagaaggccctatggttctcatgaaccttagggtagaattttgagcctatgggtcaaggttggatccattcttctttgtaaatgttagaattggtttttccttcttttgggccttgtattttggccattctagtagtatagggttttagccttgtattttagggcattctgagtagtctttgtactagggactttgttttttatattttcatgtattttggcatggtggtgagcttagctattatagggggtgtgtgtagctaagctctagcttctttaggaatct

SEQ ID NO: 123957 - DNA, 412 bp, Glycine max
gatggcgcctactctcacctcatctcccttgtcttacgctgcaatctcatggtggaaaaacaccaactaaagaccctattgaagctcaaaaatccagccttcatagaagctccacaagcaagcttccatcaatatctctgagggcgcactaagcgagcagtatcccactaagcacacataggtaagttcaacccttatttcttgtataatgaacttgaataaactctggactaatgtgaattttgggatctttttacagatggcatctaagacaatgataagcactgcttctaggccacaagctcaatataaaaccaagagaatccaatccttggaagcttggaaccgatatacacattaccatttacactggatgatcctctcaaaaggaatgtaacgatatgcatactga

SEQ ID NO: 123958 - DNA, 391 bp, Glycine max
  unsure (1)..(391): unsure at all n locations
gcttcatgatgaatcaagaatgattcaaagaagttttgatgattataaaggtgatgacaaaaagctcaaaagttaagaacacttcatgataacaaagatgatgatctcaagaatcaaagaatgagttcaagattgaatcaagaacacttcaaggttcaagaggaaatntgatttctagaatcaagaatcaagttccaagaatcaagatcaagattcaatactaaagagtcaagaatcaagagaagactcaatcaagataagtattaaaaaggttttttcaaaaactgagtagcacatgatattttctcataaaccttctaccaaagagtttntactctctggtagatcgataccaaattattgtaatctgataccagtagcaaaatagttt

SEQ ID NO: 123959 - DNA, 491 bp, Glycine max
  unsure (1)..(491): unsure at all n locations
taagctagacagggagcttcatggaggaagagaatgagagagagatagagttattgtggcatggataattgaaggaagaaagggagagaagtttaactctgaagtatgtctcacaagactctcataaagttaccacaagtgatacacatgtttctatttatagcctatgtagcttccttgagaagctagagcttagctacacatacccctctaatagctaagctcacctccttgagaagcttcctttagaatctaaaacttagctacacacacccctctaatacttaagctcacctccttcagataagaagttagctacacacaaccctctaatagctaagctcacccccatgcgaaaatacatgaaaatacaaaanagtccctattacaaagattactcaaaatgttgcgaaatacaaggataaaatcctatacaactagaatgtccaanatactagggcctaaagatggaaacctattctaatatttac

SEQ ID NO: 123960 - DNA, 366 bp, Glycine max
  unsure (1)..(366): unsure at all n locations
tttttgttataacaaaagatgatgactaatgtgatgacatatagctcaataatcattctaagaacaactcatgtgaatcaagaacaattcatgagtgcgagatatgaatcaagaagaattccgactcaagaagaaagcttagagtcaagaatcaagattcaaggttcaagatctcatgaatcaagatcaagattcaagactctagattcaagaatcaagagaatgcttaatcaagataagtatgaagaggtcttctcaaaaattgaatagcacatggttnttctcataacatgtttaccacagaagttttactctctggtgatcgattaccagaatgttataatcgattaccatgagcaaaatgga

SEQ ID NO: 123961 - DNA, 430 bp, Glycine max
  unsure (1)..(430): unsure at all n locations
catatcctgatgagggtgttccatatgttcttttgactggactaatacatttgctgcccaagtttcatggtcttgcaggtgaagatcctcataagcatcttaaggagttccatattgtttgtttcaccaagaagccccctgatgtccaagaagatcatatctttctaaaggcttttcctcattctctggagggagtggcaaaagattggctctactaccttgctcccaggtccattntcagctgggatgaccttaagagggtgttcttggagaaattcttccctgcatctaggaccactgccatcagaaaagacatttcangcatcaggcaacttagtggagagagcttgtatgagtactgtgaaagaatcaagaatatatgtgcaagctgtcctcaccaccagatttctgagcaactcttcttcaatat

SEQ ID NO: 123962 - DNA, 318 bp, Glycine max
agatgaagatgcccacaacaagaaagaggacccctgatggtgcatagatcacattcaaatccttaaaacaaaaactaaccgaatgtaaaatgaagagcgaatgaagaacgatgtataaatcgattacggtcgcaattcgatagcgtctcggcctcgtttcctctttttttcttcttcttcttctttctctcctctctcaattccctcaatttctgaccttggaacccttataacaacccctagaacacctatttatatgaaaagggtcactttggggtagttgcagctcgcccaggcgagttggtttcttcaccatga

SEQ ID NO: 123963 - DNA, 327 bp, Glycine max
ccaagcgtattattctttcaattttcaaagctagagaagcctctgcccaactaatagagaactgctcatatcccatatcaagtccttgagataagttcagagatctcatgggatatttatatattataaaagcctcaagatacagcccaatatatagacaacagagtgctatccaagatagtcgactagtcaagccacgtgccctcactaagatggcagaaattgattgcatcattctagacaacctgatgaacttttaattggaaagagacatccatcaagcacaacaattattgcttttgtatacaatcttattgtcatgatgta

SEQ ID NO: 123964 - DNA, 506 bp, Glycine max
  unsure (1)..(506): unsure at all n locations
ctcagcttacaggatgaagccgatcgaacatttccttaccgacatcattcaaatttcactctcggattgaattgaaaactcaatagccaacatcggtcatgacatagccctgactgatattnttcagccgacattgcgcaatttttttttaaaaaactctcgctggccgataatgtttttttttttacggcagaggaagttctctttttttggtgttgcttaaaaaatttacagtgtacgtcggctaggttttttcgtgcgagcgcacaccgacgtttgtttccgccgaaactagcatgttcccatttattcggccaggaaaacattagcccatctctgcaaaaagataatattcaccgatattgataaaaaaaaatgatagtcgacgtcagccaggaaacatgacctatcgaggtctataaatgaagcttcacaggatgaagccgatcgaacatttcttaccgacatcatggaaattttcgtcacggattgaattgaaactcaat

SEQ ID NO: 123965 - DNA, 307 bp, Glycine max
  unsure (1)..(307): unsure at all n locations
agcttgtctgcagatccctcatttaagactatgtttattatattcaacattatcatcacaacatattaagaaaactataactttatctgcagatccctcatttaagactaagtttcaatcctgcttctatcaagttctaaggcaagagtacatttcccaatgctaatgtcacctaactaaacatacaaatgggtgatcagaccaatagcatgtatacattaagcattgagagaagcgatgaacacagaaaacacaatcaattatgtattanagtaattacatcagctgttccttagaaattcccaac

SEQ ID NO: 123966 - DNA, 358 bp, Glycine max
aagcctttcctctttcgctataatagggggaggagggatgaacttatacgttctttcctccaggcatctgacgatcacttgaaattagtgagatatatcgtttccatgaagaaaatctaagccgaagcgctgtcgtaactcgttcgatacgtttacatcggcgatttcgtgtagatattccgccatcgttcgtccggtcttggatgatcttcagtctttaactggcaagttcccgcaatcgaacttttcaattcattctatgtaccattggcagtctgcgtctgatacacgtacttccatttcatttcatttacatttcgtaccccctcttgacgcgccttactcatttattgaagtc

SEQ ID NO: 123967 - DNA, 464 bp, Glycine max
  unsure (1)..(464): unsure at all n locations
tactcaagcttgtaatccactacacatatactgtaatcgattaccagaggagtttttcttattacattctcaacagtcacatctttntatctgtttcttaaatggccatcaagggcttatatatatgtgacttgagacacgaatttaacaagagtttttcaaaacaaaaaggtcttatcctcttataaagcaaaatcgttttatcctcttacaaattccttggccaaaacacttgtgattcaataaggaattatttgagtgctcaaattgttcaatctatctctttcaagagagatttcttcttctcttcttctntattctgaaaagggattaagagaccgagggtctcttgttgtgaaagaattctaaacacaaaggaaggatngtccttgtgtgtntagaacttgtaaaaggaatttacaagagagtggaactctcatgcgggttgcttggtgactggacgt

SEQ ID NO: 123968 - DNA, 408 bp, Glycine max
  unsure (1)..(408): unsure at all n locations
cacacatggtgcaccgaagacaccgactataaacaacccactgtcaacaaagcgctagccatcttactaggaagtatgcagatgtttgctattctccacagaatatcaatccactagagacgtgtacttcatcatcttctgaccaactcactccaagaaagatgatgcctatgttggcattaattcagccattgatctatgacttcattgataatattattgatgtcgaagctgatggaaattgtggatgtcactcattagctggctcattaggtatgggtgaagactatagggctctggacacacccatctgcttatataacttggctaantctcggaagactatatcaagctctttggtggcgcagacatatgtgacgaattgatgatgtcactacatgttgatgt

SEQ ID NO: 123969 - DNA, 417 bp, Glycine max
  unsure (1)..(417): unsure at all n locations
agcttgcacaaaagaactattatgttntttttcaaatgaagtaactgactaactaactaactaacttccaggaatatatacagatactatttagaaggaaggaatgagccttgattaggccctgttaagactnttggcaagcgtacaaattgtcattataggtttcacatttataaaagagttngtctccacagggacttgagttacttaatttattcggataaaggttatcagtttaatagttatgtacaaattcaacagatgtcanttggtttcatcgntcatacccttagtatcttaataagattaacatgtataaatcatttttaacattactgatgcacacantaatttcccaagtcgatttctcgcactttggacctaagaacatttactaaatatcgatccctcgtatat

SEQ ID NO: 123970 - DNA, 361 bp, Glycine max
gaagcttataagaaaagaatggttcatgttggagaaacaaaataaaaatatcacaaggtggtgtgaagttggtcacgcccatgattaaaagttaaacaaattgattttcaacaattgaaacaaatcacaaggtaggggaggactaaacctggtcatacccatgactacaccatgtaagaatttttatttcaatgtttcattattttgtgttttgggcctaaactttatttagcccattgctttaagtaaggatttttagtcttagtttagggttccatacttttgtgagttgatagagaaaaagaaaaccaaaatgtggtgacgactttggattcatccttcggtgttcctacatcaaaag

SEQ ID NO: 123971 - DNA, 220 bp, Glycine max
catgactctatggactctcttaaacatgtaaaacaatgataaataagttaagatcatagttaaaagtgggatgtgatgattaattgatcctgtaaataatgagaaacataaatttaatccataaagataaaatgggggacaattagatcaaatgttaaatttgagagaccattttagcattcatgtgcgatgcttaacgactaatttaataataaattat

SEQ ID NO: 123972 - DNA, 419 bp, Glycine max
  unsure (1)..(419): unsure at all n locations
aattgagagctgcataaccttccttagacgtggtgatacgtcnttccattatgggatctcccagactggaattggagcaacacttcgatcttctgcttctctcagtacagtataaacagcctgatataattaaattaaagtgcaacaatatgaagctgggatacacatatacttcctgggcatgagcaaattggaaactggaacggtggacatagtacaatacagaaggataagggaatattccanaagctatacctcaactataccagtgtcatttgataaactatcaaaatcataattgaatactgccttgccattgatgtccaaggtcaatcgagagaaaagtgattccatcttaacatcttctccatcaaatcatcatcatctatcttctggagagccgatctgcacttgtcaaa

SEQ ID NO: 123973 - DNA, 367 bp, Glycine max
  unsure (1)..(367): unsure at all n locations
tacttattatattnncaatcctttctttgtctntttctagttaagaagataagatagaatactttataagggggtgtttgataagggaaattcttntaatttcatgtgaatcttagaatgagaaacttagtttttcatgtgtgacatctactctaaaatataacattgatgggagaggaggttttatggtggaaaaaaattatgtagttntccaaacagctcttctgttagaaaggtggcaatctaacttctttgagtgtaatttttaactatcctcaaaatatcacattacttttattagattattacttattacatttcaattcattttttttgtcttttcctactaagaagatagcatatgata

SEQ ID NO: 123974 - DNA, 356 bp, Glycine max
  unsure (1)..(356): unsure at all n locations
gaattaatgaaccaaaagagtataagtcacccagagatcaagataggcatggcactcatgcagtaactaccggtggaggctctcctatgcatggggctaaccctctagggtatgctaaaggcataaccaaaagaatggcacccggtgataagattgcagcctaccaagtgtgttgngttggtggctacttcaactcagatattgtgtcaactattgataaagttgggctgatggagtgaaatgttcttacacctctttgggtggtggagtctnctcttattacagagatagtttatcaatgattgcattngacgcaatggagagggtgtgttttgttcatggtcttgctgaaatgc

SEQ ID NO: 123975 - DNA, 277 bp, Glycine max
  unsure (1)..(277): unsure at all n locations
tctatgctnganccggcatacggttggcctgtgcacaaagtcactggatcttcgaacaagtccaagctgatggggcatctgaacaagtgaagaatggttatttcaatctgggcttcgttcatggaaagaaactgataattgaaaggaagattatttccgaagaccatataaaatagcaaacacggggtacgaattactaatatggaacactctcaattcaacaaagtgacagaaaatcaaagtagtgagatgcttctggagatatgatgtagggggc

SEQ ID NO: 123976 - DNA, 239 bp, Glycine max
ttttggtagctaaatatttgaggaagacccggatcccagataacttatcttgcactttcaaccggctggtttgaagatacttacttgactgataacaagagccacctttatggatatatactttagcaccattttacatgcttatgagacgaactcccgaaaccctttatggccactctaaatggaacctggctttggcactatataagttcatcgttaatttccctttattggggaac

SEQ ID NO: 123977 - DNA, 445 bp, Glycine max
  unsure (1)..(445): unsure at all n locations
ctgaggcatgcaagctanagtatgcccgagtcattcatccctatgagatgttgngttgtattggcgatcagaattgccattccttggattatatggttgaaccgagctcatgcttttacaaaaaggttcatcaagtcaagttgaaatatggaagtaaccgtcttgcaaaattggggcaaaagatgaatcgagtcacatcactgcttcgtctactgccaaacatatataggattggtgatgtccttgttacttccagtttcaccttgacaaagatgtcatggatcatgttgaaaatctaaattgattcaaccccatattctgcgtaaaaagtcgcaatacttcaactgtacatcattcgcatacatccatgctnttcattggttgantgctcattgcattcttttcttgagaaataaaataaaataaaataaaatgaacttaatca

SEQ ID NO: 123978 - DNA, 406 bp, Glycine max
  unsure (1)..(406): unsure at all n locations
ctaagtactaatatgataatatatatcacaagtttaagacttggaccaactccaccagtctgaccggtcgaaccgcgaccaggtggctggaccgggttgagtcacaagttcgatcgagtgtgcttttgacccggagcagcctaaattgacccaactgggtttacagtcaaactggtgacccttggacctagaccgggtcactatctntntttttctaattatatccgaaacgacatgagggcgagccctggtgcagcggtaaagttgtgccttggtgacttngtggtcatgggttcgaatctggaaacagcctctttgcatatgcaagggtaaggctgcgtacaacatccctcccccataccttcgcatagcgaagagcctttgggccatggagtacgatatccga

SEQ ID NO: 123979 - DNA, 376 bp, Glycine max
  unsure (1)..(376): unsure at all n locations
gcttaagaggtaagagagaagtcaagaatatttagtctatatatttttggtagattttttcataagaagtgaagatnggaggctaggcttagtgtggtttagaaggagctggattgctagccttcatttggtatattagccttagaagtaaaaatccagaatgagcttatagaagttcggataaaattgattggtcgtaatactagtttctttgatgcacaaactatntctagaacaaggtggaacaccattcactgtattttgttagcggctgggaactactttgaagatcccgagattctaaaatatgaagttgttctgtatttaagcaacgcttttttttacctgctagtgattatctagttgatatccctat

SEQ ID NO: 123980 - DNA, 99 bp, Glycine max
actaaacactgggctcactgaaggaaaaaatacctttttttataaaaagggaggcgaaccccccccccgggcggtaacaaacacgaacaactttttacg

SEQ ID NO: 123981 - DNA, 388 bp, Glycine max
  unsure (1)..(388): unsure at all n locations
tcagtccctgagaaactgtgtcccagaagacaacagttagttttgattgctgatnaccctatccttgcaacaagttctatggaagtagacacggagatggacaagaaaatccgcagtagtgtgagtagcattctgaaagatgcttctgtgcctgatgctgagaaagatgttccaacatcttccaccccaagtggttccatgcctgatgctgagaaagatgttccaacatcctccactccagatgctgaagccctcccttcacccagtgaagaggaatcaacagataaagaggatcaagccttagaggagactcctgctccacgggcaccagagactgctccaggtgacctcattgacctgtaagaagtcgaatctgatgaagaaccca

SEQ ID NO: 123982 - DNA, 340 bp, Glycine max
  unsure (1)..(340): unsure at all n locations
aacagngagagagatatttcaaaaacaccattccttaagacggatctgtgatggtcttatggaatgtcaatccgtttgtctatacataatttttaagaatgtattttacaaattaatttaaaattaatagcttatgtacaattcgaacctatgactgtaaggttattaacacaacactctaatgccaataagccatatatattataaaataattaatattggtttatgtaacactaactattctaatgtactattaatgcacactgtagtctatataataatgtctgtgataattgtgaacccataattacgtttttacatatataaattctcattaaac

SEQ ID NO: 123983 - DNA, 356 bp, Glycine max
aactagcttatgaatgaattgagtagtggtgaaatttggttcatgttgtgctcacacatcgtaattatattaaaagtcctattatatatgcgcatcttatatctgtttagctctgacgcggtggtggagggggaagataatggtgcctaatccataagctacatattaaatgcaaatggaaaccatctttggctggcatctgttcaacagaatcatatcatcaaagattagcatggatggactatcatggacatgaaacatgagatacaggataaagatgctgcgtccagttgagagccatcctgctaaatcatttcctgtacagtgtgattgactgaaatctaagacactacttc

SEQ ID NO: 123984 - DNA, 340 bp, Glycine max
atacttaagtcacctgcggcatgcaagcttagggtgcttaatcataccataattattgtcatggcatatagcgcttaatatcactggctcgtctaatcttcaaacacttgaccttgctactaatcattactatggaccccttccaacttccctgtccaattgccgcatattgaaagtgttaagccttgctatgaatggattaaatggttctgtccctgaaagctatgccaacctcacttcactgttgtttgtatctgtctcaaacaacagcattcataacttatctgaggcagtgtctgatctgcagcagtgcataaatctcaccaccctagtacttact

SEQ ID NO: 123985 - DNA, 499 bp, Glycine max
tcagctagttgctagtcaatcaacaaagttggttgagcatttaatctttcagagtcaaatgatttacaagtagctctactcatatagacccactattgctaactgaccaattgacccaagttcagtgcatgtatcagtgcatatggtccattgatgcatgttattctggcatgggtatggatgcatgtatctcattcatttacacgagtacactacacccagacgcatacacaaataacaatgataaattattgtttttcttattataatatataaataatttattgtggctcaggccacagctgagaaaaacacatccaaatggattacaagacagatacaggcatctttctcattgatagcatgtgtcttcagccttgaaccaagccaacccattcacatcccttgcatcagagaagggaggtgaatgaccttaaacatcatgctgatcttatctctagataatcacagccagactatataacactaacacccatat

SEQ ID NO: 123986 - DNA, 310 bp, Glycine max
  unsure (1)..(310): unsure at all n locations
actcactgtccacacgtcgcggagaattcatttcaatgtttgagntgaggagaccatctatcctattacgcaacgtggcggacaatagtgggctgttaacttgaatggacattattgtctatgcggaaggtattctgcgcttcactatccatgttcacacattattgcagcttgtggttacgtgagcatgaactactaccaatatatagatgttgccacacaaatgaacacatacttaaagcttactccgcacaatggtggcctcttgggaatgaagctgctatgcctccttctaatgacgcatggacac

SEQ ID NO: 123987 - DNA, 456 bp, Glycine max
  unsure (1)..(456): unsure at all n locations
atagactgacaactcctgtgaaaggggtcttgtcatgttcttggatcatncgaggcgcgtaaggtaggaagcaatgcttacaacaaatctattatcacataacaatatctcagacgacacatcgatntcgaagtgaagaagtaaccttttcaaccaaacaacgttactattaacaaaagacaatgcaccatattcatcctcagtggacaatttagaacaattgattgttcttagaatgccaaagagaatgttgttcctaaaatacaccaaagccagaagtggccttctggatcacacagctagcccaatcgcatcagaaaggcatgagttgagaagctctgagcagaaaataagcttgtcaggacatattgaaactgagaagagatgacaactgtcgtgagactctggtcttctatttactcaacatcaaacataggattaaggcggaatggcaat

SEQ ID NO: 123988 - DNA, 405 bp, Glycine max
  unsure (1)..(405): unsure at all n locations
tcagctaagttcccgcaccataaaattcacccttattttcatgtttcttttctttanaaggcagngggtaactacacagtgtctaatgacttgcctgccaccctggaattggagaaaaaggatgtggtttcctgccaagctgttgtcgtggagagacaaatttgatgctataaaacatactaaggaatggctggtgccgtgggaaagcatggatatttgagatgccacatgggaagaggaattattgctaaagagtcaattcccagatttcagccttgatgacaatgctgttgttgcatgagggggtgatgatagaaatgggtctgttattagtgaacgtgaagtattgtgtaacaaaaagaatgttgagcccatagtttggcgcgtgtatgaaagaatgattaa

SEQ ID NO: 123989 - DNA, 405 bp, Glycine max
  unsure (1)..(405): unsure at all n locations
agcttgttcttctccatcgggctgaagatcgtgatttctctctntntcttgtccatcgccaccttacctatgtacgtttcgtctaagctatgtagttctattgaatacctatgtctatgtcgggaactcgtggttaacccaatgaccttttttggtttatgtttgcaggattggagaactcagggtgacctgaggtacatttcgtgtcgtggtcactggtgctcacaggctctcatattgattgaggtaagtctggatcactttgcacggctttgaatgcttaatgtctattgtaaaactatggtaacgtagtgtactatcgtaatgatatgtatttcattttgtttgaggagcgtcgaaacttgtatgtcattatgttcatgacattgtactaactgcatttat

SEQ ID NO: 123990 - DNA, 480 bp, Glycine max
  unsure (1)..(480): unsure at all n locations
ctaagctttctatcgggactttcgtggaaatcctgttgcttctttatttgtgngagtatcactttattgcttctttaatcctcttttggtcacttcctttgtacctcgtttcgttcaagatgactnctaaggcgacagctacgtaagtactattggagctgatttcggaagtatcactcttattctcttttgtatttctatgtatggcccaacactcattgttattttaatttcaagaaatcagaaccgtggacatggaagggaaaaccgtcaagctgcagattgtgagtattctcatgtagtggcgttgtcaacgatcatatagcagtgttaggactttccaaatgttatccctcccatgatttgatctattattatattcaatcccagtaatgtactattatataattatttgcgcgccctttgtgccatgaagttttaacatccaaatgaaccgataatagcgcttattatacattt

SEQ ID NO: 123991 - DNA, 378 bp, Glycine max
  unsure (1)..(378): unsure at all n locations
tcacctgcggcatgcagagctaaagcacgctntaagctaagtaactattntacttatttgcctaacatcctgaagttcatttctaacttttagataatacgttgcccactggatgcaaagcaccttcaatttctcttattctaatggtctagcatcattgaaatactgcatgataaaataaaatataagttaataatataataccaatcataacaaaatcaacggttatgagaaatgataaaattctcacacaaagacactcttctctcaacaaagagactttgtttcacaaactctcttcatgcgtatcttctccattaattctcttttctatttatagggaagattaacaccgacctatataaataagttctcttg

SEQ ID NO: 123992 - DNA, 504 bp, Glycine max
  unsure (1)..(504): unsure at all n locations
tactaagcttntcaggaagctacctagtctattaatagaagcatgtgtatacttgtttgtactttgatgaatgagagtcttgggagacatacttcanagttccacttctctccctcttttattccttcaatttcgtgctcccccctctctctttctctccctctntcctttcctccattgaagcatccttccaagcttattattccaaggtcatatttggggggaagctctttctttcatgtgttatatcctaaaggatggcgcctcctctcacccttctccattggtttcgcggcatctccatggtggaaattacccattaaggacctcttggagtctcagagatccactcttcatagaacccccacaagcaagtttccatcacctagactccagaaacaactttatcttgcatattggtgtggaaatgaagggggtattggagctagaacacacacaacaatggtggtgaagaatatgataaagacacgtggaggaataatg

SEQ ID NO: 123993 - DNA, 394 bp, Glycine max
gcctgctcaacaattaatccattcgatttctcatggaaagatctatctacatatattgtcaataatatctcccgttatagattttctaaggttaattcaacaatggaatcagctatcgcatgtgcattaaaaaggatttgatgctctgaaacctctattgcccaagaaaccatccttctcgccaaatcaagtcggggaagaatatgtcgaatggactaatcaattcacaccattatccggtgtgattggaaatatatgcgtaggcgccttgttgcattactaaagcacatactaccttctctaatgatcttgtgagtacgaccccctgaagtgtgttgctcacaaataaatcgatctttgaagttcactctgtttcgtgaacacagcaacacta

SEQ ID NO: 123994 - DNA, 417 bp, Glycine max
  unsure (1)..(417): unsure at all n locations
ctcagcttctacttccatgtgatttgatctctcttttgctctgaattgtgggaatgtgctcatgtatgtggtggcaatttggttcgtattcttgcttgaatgggttgaattaaaggtttgtatgagatggccctatgcctataatgcattttgaagcaatggggcatgccacattgtccccgttctcttgctattgatgcctaaacgcgcgcccaccaagtgttcggtgaaatgcctcaatggcattagcgcgtgatttttgtagggaaacaacctatgggacaatntggtttgcacatgttctctattttttgggacatgtattcagtttcgtaagggctagagtaattgccgcacatatatcctaggcctatgaaccacagtntttatgcaagagaacacaagaatggatgcata

SEQ ID NO: 123995 - DNA, 474 bp, Glycine max
atactcagctaggtacgataagtgcgtattgtacatataggatttattatggtgtgagatcatatccatcgtccatggaataagagagaatagatacaagagtgtgagtcggttgccatatttcatagctggtgtaaaccttttagtaaaagacaacgcagaaatatataggaaaaataaatattactcttattactttgacactgtcttactttatatattctcaaaacttagcaaaagctttcactcacatcacaatcctattaccataaaggttaccctggcaatggcatcacacttcaataattggatttcattctcattgatgattctcattaatacgagttatcatcacaagactcgacaacatgctacttatctacggacatgtgtggacatggcatactctagattattaaagatattccaacaatagctcaccctaaatgtcgaaacatggtgaagaacacaatt

SEQ ID NO: 123996 - DNA, 258 bp, Glycine max
  unsure (1)..(258): unsure at all n locations
aagctagagaggaagcttcagtggaggattaattctgagagagaaagaaggcggaggggggcatgggaattgaacgaaattatgaagataagntaaactctgaagtgtatctcacaagtttctcattcggcaaagttatgacaagtgttacacatgttgttatttatagcctagcacatgggaagccttcttgataagcaaggaaggtagattccttgggaagctagaggaagaaagcttccttgagaagctagaggg

SEQ ID NO: 123997 - DNA, 487 bp, Glycine max
  unsure (1)..(487): unsure at all n locations
atgatcaaattccagtagagaaaaataaccactattgctgattgttaataaaccaataatntaccatcaaaatgttcttgttcactcgangttgttccgtgtgtaataacactctagttttgctataaagggttgagggatatggatggtgcctattactattacattgacatcttcatatantttattgctattttcaacaagctgtcacttcattntagtctttgaggtagattgatgttaagaatggttttgttgcaatgcttcangttcacgaagctaagaacaagcttgatgttcctaaaaatgcaaagganaaagtttgtgatgtaaattatctttttcctttaaatacaattacaatgcttgcttagttaanactaactgtcaatatcaatgcagtattaacttaattcttaatcaggacaccaaggtgcataaattgatattactggtgacaagatgtcaaattctgatgatacaagtc

SEQ ID NO: 123998 - DNA, 216 bp, Glycine max
ccatgctcgtaacagcaactgttcaccttctatatgactgaatcaatatacaatcactgagcaattggctgatttcaataagatccttgatgattcgggaaatatgtgaataaagctcgaagaggaagataaagctctgttgcttctgaatttcttaccaaaatcctctgagcatttcagggatgcaatcctttatggcaaagatcaagacattac

SEQ ID NO: 123999 - DNA, 92 bp, Glycine max
aaaagggggaggatttttttttctttcggaagcgggagcaaagaacctggccctaacaccgaaaggaggacttgggggaaggaaacccaggt

SEQ ID NO: 124000 - DNA, 238 bp, Glycine max
ttgtccctctattgcatttctgttgactatctgagacatctggccgtacatgaaatttatggatggagaaccacctctggtaatgattttcctggtgccctcagcccatagctggcaatggtggtcctggttgccttgaattcgcctctatgatctgatcattggggaagatacattctaagtgaaaaaaaaaactaacctgctcaaacttcctagatacatcaacttatgaaacatt

SEQ ID NO: 124001 - DNA, 393 bp, Glycine max
  unsure (1)..(393): unsure at all n locations
taccaagaaatgctactcttaaaacgaaaatggcatacaacctcctccaataaacacaaacattaatgtaaatttagagcaaactcatgcacatacttccttacgaacattcactcgcacaagatattcttctaactaagaaaaatgcacccacgcacaatcaaggcaccttcgttacctagatcacttatatacacttccaaggtgtatttgctacctacatcacatgcatttcctttgctaaatttacatacatgcatactcaaagcactntggctatcaaaaattgcatacgtgcacattntggtatttctaatacctatacatacacanaacttatgatgaatcttggctacctacacaataaaggactatatttcatgctgtattcaa

SEQ ID NO: 124002 - DNA, 491 bp, Glycine max
  unsure (1)..(491): unsure at all n locations
aaaactcagctgaggatatggngacccatcacatgtggactaggtggctgtctttctatggtgcacaacaagttttccacatccacaatgcgcgcataaacccaccatcccctgttgcccacctccatctgagctcacgtactcccacgtagcccatatcctcgtgtctctcaacaccgggtccccatcaatcctcccaagcttccacaacatccaagcgatacaacatgtaaacagcacaagctatcacagccaagcaaaacagagcaaatgcagaaaactctgccaaaacaccaaccaaattatagcttttctcacttaaagaccccagtaacaattccttcgatccaattcgttaaccggtggattgactccaaaattctactggaagtctatagtacagaagcctacattgtgaccgttgggatctactagcanacatccataactcattctgcactactctntccacagccaaccacacacaagca

SEQ ID NO: 124003 - DNA, 151 bp, Glycine max
aatagtgagagggcaaagttctttttttcgcaggcaagttccataaagggctaccactcctgtgccccacgatcagttcagagtatactgttttaaccggccatacctcagtcaaaacagaaaacttaagccatttagcacaaaataagga

SEQ ID NO: 124004 - DNA, 361 bp, Glycine max
  unsure (1)..(361): unsure at all n locations
ccattctttccttcctttcttttatccatctcatcccttcttctatctacattagccctaaagtgtaaagcctctcatgataatgagaggctaaacccccattgttgggagtctggcagaccaacttttgtaatgtagcttcttcttattatttatttaatacaatccaatttctgttgctcttttctgtgcttatttgtttattgattattggatgatcatccatgttcatgtagtgcttaaaggataatgctttgaaaaatggttattttctaagaaatangaanagacatctaaatgaaatcattgctagaaataaattgatatttgtctatccctatttatgcatatctaatcttaa

SEQ ID NO: 124005 - DNA, 511 bp, Glycine max
  unsure (1)..(511): unsure at all n locations
taagaatagggtcaaattaatctactntagtccgttatggatatgacaatcacaaagtaatcacaatttgataatacatggatagtaatgtcagcaaaaactttaaacattcgcaatgaaggaaaacacctcacaacaatgtaatatatttattgtcacataatcgtcaataatagtacaattttgtttacaatatttgatgaattctatcgaatacaccaaattctttcttcctaagtcatgattaaggctttctacaccgcttgtgtttatgttttaaaaaatatgttgcctatttcttgtgaattgttgtcatggtctccttgtctaattgtgtgccatcactaaacactataagttataatatatacaagttagtgacgtagataaaaaatgaagtacaacttatactaaacaaataacgaatttaactgtatatatntcatggtccaatcagtcttcaactccctacttattatgttccacatccaatgcagtcacgtaatatcac

SEQ ID NO: 124006 - DNA, 459 bp, Glycine max
  unsure (1)..(459): unsure at all n locations
agctntaattaaataatatcatagaagatatttgtttcgacgattgtccgcactggatcagtaaggagggggaagggagaaaacaaagaanattgcagttattcgagaagaaagaaaagcttacaaagattgtttctcagagcctatgtctctaacttctctctaaactaattgtatcaaaaggtgtctcacaatgtgttcgaggacttatgttattttaactgagactatttctacagtttaggttacaatgaaaatttaatcttcaactaaatttatagcaaaacaatcatctttgttctggtaaaaatcatctgaagagattgccgacttggcgtcttctttctttaacgaagactcttcttcttcttggtcttgaagtacgtgaagaaccctctttaagttcttggtgagacgtgtccttactctgatcccgctataaaactgcttccctggatg

SEQ ID NO: 124007 - DNA, 491 bp, Glycine max
  unsure (1)..(491): unsure at all n locations
tctaagaaattgactcaatanaatatccttcctttaaataattactaaatatccttactntaaataaataaatgcaactttgaagatggaatcaacaaacttcaagcaaaacgaaacttcaaacaaaacgtttctgcctttctttctctcttcaggagtgtngaaaattgccattacaaggtgctcttatttaaagaaaaattacacgaaagttaaagcatgcatgtgaccatctgcaagcaaaaattacacgccattaaagcatgcatgtgaccctatgcaagcaactgtatgcatgtgacccctgctgcaagccctagcttgcaaatcagcaatgctctagtctgcaatgcaccaacagtgccctagctagcacctgtgtccgagacgaatccagttgcacctgtctcgcaggaagcaatggcgggtttctatccacgtaagtctcacaggaagcaatggcgggactgatccacanttgcacatgtctc

SEQ ID NO: 124008 - DNA, 386 bp, Glycine max
  unsure (1)..(386): unsure at all n locations
ctgcaagctggcattcatatcctgggagggtgtttttatgttctctagactggactaatacattagctgcccaagtttcatggtctcgcacgtgaatatcctcataagcatcttaaggagttccatattgttcgtttcaccatgaagcccccatatgtccaggaagatcatatctttttaaaggcttttcctcattctctagagggagtggcaaaagaatggctgtattaccttgctcccaggtccattttcagctgggatgaccttcatagggtgttcttggagaaattcttccctgcatctatgaccactgccatcagaaaagacatttcaggcatcaggcaacttagtggagagaacttgtatgagtactgngaaagattcaa

SEQ ID NO: 124009 - DNA, 494 bp, Glycine max
  unsure (1)..(494): unsure at all n locations
gacacaacaaactaagctatgctgcnatatttacatagacctcctcaacctctacagtctaatcttccacagcagaacaattatgacctctccaacaacaaatacaaccctggatggaggaatcaccctaatcaaagatggtccagccctcagcaacaacaacagtagcctgctccttccttccaaaatgctgctggcccaagtagaccatacattcctccaccaatccaacaacagcaacagccccagaacaaccaacagttgaggcccctccacaaccttccctcgaagaacttttgaggcaaatgactatgcagaacatgcagtttcaacaagagaccagagcttccattcagagcttgactaatcagatgggacaattagctacacaattgaatcaacaacagtcccagaattctaacaagctaccttctcaagctgtccaaaatcccanaaatgtcagtgccatttcattgaggtcggganagcagtgc

SEQ ID NO: 124010 - DNA, 182 bp, Glycine max
acttaacggtgacccaccatccccagtagttagacactttgaagtggaagatcgcccgcacaaagtggtatggtcaaatgacgtctgaagtggcacaagaaattgcagacaaaattgtgagttcatgtattttttggttactgtcattatcaaaaatggttagctacctaatcaacttattt

SEQ ID NO: 124011 - DNA, 437 bp, Glycine max
  unsure (1)..(437): unsure at all n locations
cccattagggactatttggaactgatggattctacggaggtgttagacaacatcgtagaggaagtgggagacaaagatgcacggttttgcgaagtgattaggtttggtattgtgtgtgaccattcagaagtagtggtggtggtaatgactgaaacgacatcatcttcattgtcttctagaaagttgctttttagctcctggagacggaggtctatttgtttctcttccacccctcgctaattattcatctttagatattcttaattgcgttgggtgatgcactttgtgtgtgcttggtttcacaatggacatcatcataattgattntacttccaatctaatgttatttgagtagaaaacgatgcctttggtgttgctctttactactgatgtgttgtgtggcctgcacgtagagtgatattataattgagtttcat

SEQ ID NO: 124012 - DNA, 361 bp, Glycine max
  unsure (1)..(361): unsure at all n locations
agctagctactacataagcatctcttatggctttggtttggacgtatcgntcctgcattngtcacttatcatttcatgcattgcatcttgcataagtcatttcttcaccgtgcatctgcatctaacatgtttcttgtacaccttctattttcatgttcgctcatgcatgatcacttgcatttcctctgcaaaacaaagaaagtcacgataaagctcaaacaatgcatcattcgcatacatccgtgctcttcattggttgcattgctcattgcattctttccctgaaaaccaaactttaatcattgttatcataagggaagaacgcactttacgacacccttactgaatgcatgctaaagct

SEQ ID NO: 124013 - DNA, 412 bp, Glycine max
  unsure (1)..(412): unsure at all n locations
atgcagtggtgcgtgtgcgcattatatgctttagtctgaaatgaaattatggtcgagccatgctggttctttggtttaagaagagtcaaatgaaatttgctaagtagtttctgctcaggtgttggagcttttatgcagactttggaggaattcgcgctagcaatattctctgcatttgtacaatttccataatagtaaggaactattcatatggactaggaccactgttaaaccttaaagcagcttgtagtgtttgaaaaataatcacatgaattaatggcctattcttctctttctcttgtaatttacacattggtttggagctggtatttgaactcttgattagagagaacanggaatgaccatactactagcnanagatcgttgaagtatcaagagagaatggaacgat

SEQ ID NO: 124014 - DNA, 507 bp, Glycine max
  unsure (1)..(507): unsure at all n locations
gtaaagctcgttctnttcttcgtggtcctctccagtgacgattcttgcctctgctcgaacctttctcctgctacgaacctcgatccattgaccttcctgcagattgttttcgtcccttctttgagtatcgtctgttctgtgtcttactccaacagagtggctatcaacagtcctcctctggtgaactctgaaccttgggcgacctctctgtctctcatactctctctctctcgcatctctctacctgtttctctcattgactctccctacaattctctctctctctccatctctctctctgtctctcgctctaaccctcactctctctctcatctttggtttagtctcttggatacataacatatctagcatgtatgagcttattgaagccattgtgagaaacctcctctagtcctcatctgacaatttttacagagntttacatatgctcgctactctaaatatggatttgcttttgccaaaatctattataacagataccacagc

SEQ ID NO: 124015 - DNA, 344 bp, Glycine max
  unsure (1)..(344): unsure at all n locations
tttattgacttatngtaaatgcataanaaataatgctttagcactaagagctacaagtaaagaanactgcatattaagtgactttattctttattaagatatttcaatttgggggccatgttatagatcctactttccatgatcttatacaatttcgaataaatttgttagagatgcaaaagaagattatcagtttcattaattaatataagatattgcattgctatagagattctgttcatgctttaatgttcttatctacatgagcaacttatattttcatgggtttattcatagttctagatggtcatatagaatatatcatgtgatagctntatcatgaa

SEQ ID NO: 124016 - DNA, 232 bp, Glycine max
  unsure (1)..(232): unsure at all n locations
acacaacatatacctaagataaaggtgcagcgcttccaggttgccagttcctttttattagctggatttccacagtaatctactgttccatctttngtgtaaccatcatcctctgccatcgtgagtcagaactagtacacactggccaattgttcacttgcaattgcaaccaaccaagcagcacagattattgacaactataacaccatctacagaaaacaacaaattacta

SEQ ID NO: 124017 - DNA, 444 bp, Glycine max
  unsure (1)..(444): unsure at all n locations
taagcttgctgggagcttcttggaggctggatcttgagcttaatgaggttcttctatggtgatctntcaccatggagatgcagcggaagacaaaggagaagaggtgagaggaggcgccatccattaaagaataagccatggaataaagagcttcaccaccaagatgagccttggataagaagctcggaaggatgcttcaatggaggaaaagaaagacggagagatagagagaggggggagcacgaaattgtaggaagaaaaatggagagaaagttgaactttgagttgtgtctcacaagactctcattcatcanagctaccacaagtgttacacatgcttctatgtatagactangtagcttccttgagaagttttttgagaaaacttgctgagaagctccttgcaaaacttcttgagaactagagctanctacacacacccct

SEQ ID NO: 124018 - DNA, 415 bp, Glycine max
  unsure (1)..(415): unsure at all n locations
aacgctatattgcccgaaatattctctgcattcattaccatgaagtgccangatctggacacttgctcccatacatggaggaagtgagcgccactattataaaaacacaagtagtggagataaaataatgcgctggatataaagaaatcgttgattctggcatggcaaattcatagacatgaaccagatatcgcgcgatctatcatttcttctntgatagagtcagtcttataacgacgaatatgtttgggctgagttttgaatttatttaatgcgaaaaaacaatcacttatattttatctcaccttaatctgccatttaaacaacactacatgttatagataatctgagaatttaaacgaaagtggatgaagaatacattgataacagaatgtccatatttgttataaaacaa

SEQ ID NO: 124019 - DNA, 127 bp, Glycine max
ctcaaaatcacaatattcagaatcaccctaacagatgctctaataccaggatgcacctatgcctaactattctatgaaagtctattatttatgacaaaaggtgaaatacctggatgccctagtcttg

SEQ ID NO: 124020 - DNA, 266 bp, Glycine max
tctctgcacggcacgtgactccagtgtcagaatgacagaaagtgtgtcgcggccgacataagcgaagctcttgctcctacataacctcaaatgaggaattcagacctacgttgttctggataacttgtgagactataaatagtctcagtgtcttgctcactaaaatgcgaacatgctctaataacagagagaacttccaattaatcagagcaccatctgccttccgaagaacaacaaagtgtctaccggggaacgggaggacactg

SEQ ID NO: 124021 - DNA, 399 bp, Glycine max
  unsure (1)..(399): unsure at all n locations
actaagctcagaacatctccatgatggccgatcggtgacctgcttgngtgtaattatctcaacctcaagaaccagtttaatctcatgcaatgaactagcagaagtcccttcattctcattatgaaattctctcaagagaacctcccatgggttgctgtgtatgctggcttctgcatttgtcaaccttccgccagtcacaatttccagaatcatctccgcaaacttgtagatatccatacacagtttctcttttgtgacttcatcggattcagtcattcaaataataacatgaatcattgcgcgatatatataaagttcttaagagtaccaaaggatgtgcttggctctatagaggacttggatatatgtaccaatatttccaaagattaagtgtaaatg

SEQ ID NO: 124022 - DNA, 353 bp, Glycine max
tcacatgtttgtcatcatcaaatttggtgttaatgtgaatgtatgtatacatgcatttgatgatgtcaaaagaagaatcaaacacggctcattgtgcttcaagaataatacaagattgtttcagcatacaaagcctcgattcaagatttcttcaagatctagccttgcctcacaatgaaaggtttcaagtcattcaaggcacatgtatatcgataccaatggtttgaaagtgtgtaatcgattaccagaaactctgagcgctgggaattcaaactttaaatgaagggtcacaactgttcaagaaaaacaaatgtgtaattgattacactaattctgtaatcgattaccagaga

SEQ ID NO: 124023 - DNA, 408 bp, Glycine max
  unsure (1)..(408): unsure at all n locations
agcttattctactaaggactctagacaacatgcatttcattttttttcttttcagatcctacagatnggtcacattcatggtagcaacacgcctagaggggtacttcacatcagcatgcaaatattgtataactctttaaaccttctatgttcaataaaagagaatggaagatcatgctcaataatcatcatacatataccacactttgaactattgtaataatcctaatctcccgcatgaacgagaaaatattccacatcatattagacgcgcttcaataacttccatttccataaacgtgaaagtgaagccatctatgcacaccacaaactcaacaaatgatactatcattccaacatcaaacagttaaaattcacaaggaaaaatcacctttttaattaatcaag

SEQ ID NO: 124024 - DNA, 441 bp, Glycine max
  unsure (1)..(441): unsure at all n locations
ctaagcttgggtntgggcaatagcaccncacctgacgtccccaggactattgatctccgtgacatatctncaggaaccactctgtggtcaacaattaaagcatgaagtttcacccttcaacactctctcatctcaagcttgtaagattatggggtacccatcacatgtggtactaagtggcggtcgggcgatggtgcacaacaagctttccacatccacaatgcgcgcatgaacccaccatacactgttgcccacctccaactgagctcacagactcccacgtagaccatatcctgtgttgtctcaacaccgggttctcatcaatcctctcaagcttgcacacatccaagcaaaacaacattcatacagcacaagctatcacagcccaggcaaacagagcaaatgcagaaaactctgctcacacatcaaccaaaatacagt

SEQ ID NO: 124025 - DNA, 326 bp, Glycine max
  unsure (1)..(326): unsure at all n locations
tagagactgtcaaaatataccactctccattcactctgcggatacaaaaccaatggtcttgtaaatgacaaatgaaggcattctccagctcatggtcaatctgggcaggctcagcaactggagagtcaagagggataacttgtaggtcccaaacttccagagcctgttgtaatacctacagaanantaatattngatgcatgcaacaaacttgtcagtgatttcacaatgacaaaacanataactacttgtaaccatagttataataaacaggctggaatagctggtccaagaaccagtcaagacaacccagattacatatggatc

SEQ ID NO: 124026 - DNA, 476 bp, Glycine max
  unsure (1)..(476): unsure at all n locations
tttaaatctttgcctctctctggtacataagatctgtaagtactctctttatctactcattacttctcatataacttgaaaaatntatgctgagactaagcctcttttaatcacaagcctacagcataccttcatattataaaatacaaccaaccttaatttatttacaataaaaccattgtaaaataaaattgatcaagggaaggcgcacatagttcatcctctataaatatcccaagctcatggacccaagcctatcacaataagaaaaatactaaaaccccacattcttttacctgtgcatttgtccccatcagcaccttctagaacctcaaggtagtgaacaaaagacggaaccacaatctcaagcttcccatcactgcataacaaanaggcagacattcaacataatgaaaagtacacaaacacaaatcactcaagaagcatagcacataaacaacttactctgtaatatc

SEQ ID NO: 124027 - DNA, 287 bp, Glycine max
tgttggaatggatagtgtcaatattgttcatatgtaactcattatgtagatgtcggagtgaatgcacactaagatggaagagacttgctaatatgccgcacgatcctactgcaatatgatgataagctatactgaaacacaaagataagaaccttccactcctcacacacatatactgattgtattctttctgtcaatccataaggatccactactactaaagcacatatttaagtcacgagacctacgactggtgtgcataaccgccttaatataagggacagtgg

SEQ ID NO: 124028 - DNA, 462 bp, Glycine max
  unsure (1)..(462): unsure at all n locations
cagcaccttnaactagcttctatatattgaggcctatnaccaagggtaaatatcattttttatttattatcgtttactatttttcactgtgagatattaagcattaaaagtctcattctagttctttatacttgtgaaattctcattttaatcctttatatttctgaaagattcatttaggttattgctcttgagttctgttagcaaacattagtgtttttttaattgttgattctaaactatataatttaaaatagtgatgactaataatcaaagcaagacccataatcaccattgtgatgtagttcagaagttttcatcgttgtcgagacccaacatttatgatttgtgttaatgctgcgtcgcacaatgatgttgtttggagatggaggatgcaaatctgatttgtttgttgtgatagttgtagtatcgtggacgttgtatatccgagtggacgatgac

SEQ ID NO: 124029 - DNA, 296 bp, Glycine max
  unsure (1)..(296): unsure at all n locations
atataccacaatccttactacatctaaccgtatattaatttgtgtctggtactctaactattcctttagtgcacttgtcattttagtttaatataatcatgactcatgtattcaatagaaccgatctaatgcacaaatgcctactgtattanttgggatagggacctgcaaggaactaacatccaacttcgacccacactaatgaaataataaaatctgtgcttggtgggtctacgcacgtaaatagatctgaatgaatctcactacggaagtcttactttggatctttgtatcta

SEQ ID NO: 124030 - DNA, 406 bp, Glycine max
  unsure (1)..(406): unsure at all n locations
tataagagaattggtgatctaaacgttgttgaagatatagtgagtcctaaactgtggatctaaactctgattagatacttttaaaactttagatatcgggcatctaacaagttttattcaattccattcagatttttaaacgctctattagttgagttttattaaatgatctanactgcagagctttaagggttttaatttgtgtggttagtgcgtagcacaacatgcaactaatatggacatttaatttgttttggttgataactaatattgacatcttaattgtttgggttggcaatgactatcatttaaaatttatattcttaagacggatataagtattgaccgtcttaaaactttcatttttactacataaccggagtgactccttgatttaacgcatctt

SEQ ID NO: 124031 - DNA, 81 bp, Glycine max
ctcgtgctgccgcgacttcgtacgaacccctcactgtgtcgctaaacgcacgaggccccaacattgtagcgatattcctcc

SEQ ID NO: 124032 - DNA, 413 bp, Glycine max
  unsure (1)..(413): unsure at all n locations
gagagagagaaagagagttgtgtgtgtcttganatcgaaggagtaaaagagggagagaagttgaactttgagttatgtctcacaagactctcattcatcaaagttaccacaagtgttacacatacttctatttatagcctaggtagcttccttgagagacttccttgagaagcttccttgagaagctagagcttatctacacacccctctaataactaagctcacctncttgaaaagcttccttgataagcttccttgagagacttccttgagaagctagagcttagctagacacgcctctctaatagctaagctcacctccttgagatgagaagctagagcttatctacacatacctctctaatagctaagctcacttccttgagatgagaatgctagagctgagctacaca

SEQ ID NO: 124033 - DNA, 395 bp, Glycine max
  unsure (1)..(395): unsure at all n locations
ttgcttaggagaaatgtggttctacaacaaactatgtgtcccctttgtggaaatcaccaggaggaggctggccatctctnntttcattgcagaatgactatagggctgtggtgggaatttatgagctggacccggnttaaaggagctttctcaactgacccagcaacacactttattcaattctgtgagggctttgggacacggaggaatcataataggaggtgtatatggtggattgctctaactagtactatntggcaacacaggaattcccttctgtttaanggcacaccatttgaaccttcccaaagtgtggatgatgccctatttcatgcttggtcttggcttaagttcagaaaaaggtttaatatctcattaaccattggtcttcactc

SEQ ID NO: 124034 - DNA, 361 bp, Glycine max
  unsure (1)..(361): unsure at all n locations
tacatatccttaantgcaatgagaaaatcaaacctacgtatttcttgcacaagtggtagagatacatgttgattttatgcttttgaatggttcatcgttaccgataaaagcaatgaggaccgtgtatagaatcgacgctaacacagccttgagtgatttttgcggacaaagcttgatttgtgagatgattataaccctaaattcactcttggtcttatgtaagtcattcagggaaccttcatataaataccctcgattgattttttgatatcttattcaagaattcttggtatttaatattattatccctttttacttcactgacattaaccgtgatgatcggtggatttattttatagtg

SEQ ID NO: 124035 - DNA, 252 bp, Glycine max
  unsure (1)..(252): unsure at all n locations
taagtgatcctaactctntgagataactacttaatccgtttaatcatattcctctccgcaagccacagatgatatgatgaggatacatctactgttcgtgtgatataataatataaaatcatatggcagccactgtttcttgcacgctaagtaatataaatgtgaaagatagctatctatcttcaaatggtaatcaatgtaattacttattaacatccttggctcaacaagttaatacattctgcatggatt

SEQ ID NO: 124036 - DNA, 371 bp, Glycine max
tctagtctacaataaactgactatgagggagtggttcataatagagtaatcacgtcacatcattggctccaaaatagtgtactactaaagtgcacgtatattgagaatgctttccttcctgatccctataacacaaggtaaaaccctcatatctaacctacggtataatagaacgccatactaagatatatgctcatcattagccatcccttcatatgattaaatgaagggataaacaaaaattcttttgatcaagctaatttccttcctttatatcattttctctacagtctcagaaaaactaaagggacggaatgtatctcactcttacgaaggaggaatagtcctctacttcacacatacttatatct

SEQ ID NO: 124037 - DNA, 461 bp, Glycine max
tgacattctcaaatatggcacctttcattcaaagaacacgtcgatgatgcttgctacggttgaaagccatatttatctatttcttaaatctattagtacatcttcatcttaatgtggattcattgatctaaatgttccaaacttggagcacatttgtgcttgattccacattgctttatagattgagactgagtaaaccatgataaaaatataacccaaacgttagcatgtcatgattcatacacactttgggctatcgaatctatgagacgactgagaaagaaaagaatatgtaatatgctctttacgatgttacttgagaatgacgtacacagacaccaatatggatattcaagaaaacatgcagaagactcaccttgctttaaaaaattaatttctacatatactttaaataatcatacgagtcttagatgatagctatatttaattcaatcatatat

SEQ ID NO: 124038 - DNA, 280 bp, Glycine max
tatcatcctcctacggatcccactatatatcatatggcggtagtttttagaatatttcctcctgccctactttttcggtctcctattcatgtaataataatattctttcaaatttgtattgcattgatgtgaatcttactatttttaaaccgtgctgctgatcacatatacggtcactcatctgtaaacattcacaccattcatactgcatttcaacaaaataaataaggagactgatggtttattctacttaaatagttatgatgatatttagaatact

SEQ ID NO: 124039 - DNA, 385 bp, Glycine max
  unsure (1)..(385): unsure at all n locations
acctttcaatccatctttgtaaaagataaatgatatatccgaccgttagttcttatctttctttattaattgaaaaacttatttatgttatttctaatatttttagtaacttttaacatttgttgaaatattacttgaagtatcattttttgaaatactaacttctaatttctagctcttttatattttttatctctaaaggatgtatttaattttcttattactctttttttaaaagatgttatgtgtgtctgtttacattntttaactatgtcaacaacgtagtttactaaacacttatgatttaataagttaacttataagatattggatatctttntaactttcagctaaattttcaactctcaactaattgttcgtataa

SEQ ID NO: 124040 - DNA, 444 bp, Glycine max
  unsure (1)..(444): unsure at all n locations
agcttcttctagactcatcttctccttgaagtggcatgtcctctctctcttccttctacattacgctgtcgntcatcttccaagaagcagaggaatccattgatgaagaagatcctatgcctacaagctccaatggagcttacattaaattcactaatcataattagtgaaattgtggctccacacattcaagtgaaatctgaatagaaattcaaatatccctccaatatagtgtgacacttatgctataaatagagggcgtgtgtgtgtgcattnttntcaactttgatcatctgagaagtacacttcaaagttcagaccttcattgaggcccanaanttcatgctacttctgtccctctgctncactcatattctctacctataatctcttatacatggctatctatgggggtgagcttcttcttgactcatcttgctcttg

SEQ ID NO: 124041 - DNA, 305 bp, Glycine max
  unsure (1)..(305): unsure at all n locations
tactgattactatatatatgaattgctccaatcattcaatcagtgaatggatgaatcaattcctcatttgggacctagcttaataagcatgggtaattttaacttgtcttgaactaactaagtcaactttaagcctaantggccctcttctctctatttcttactcacttatctggtcatgggacttttaatatttatgaggcttctattttcttctcctgatgataacaagtctgtaaacagccaccctgccttggtagcttttgagctgtcattttgatatatctataatctgaccatggggg

SEQ ID NO: 124042 - DNA, 507 bp, Glycine max
  unsure (1)..(507): unsure at all n locations
cgcactatgatactaagctagaccgctgaggcactntcttatagagtaggggaaacagtaaactttatctactcccaatacgaaagaaatgaaagaatgagggaaagaaaagagtcgtcaaattaacttaaaggagggcgccaggcaagaagccgcttaccaaacaagaagaagatcgataaggtttaacccaatggaaacccgagctacaacccaaccagaagaatccattacaagacttcaaagactagtcggaaacccgcttagacgagcatatggaaaaaactaccatacatatgtaatggactactttntagacaacaatctttcctactttgactgatagccctcaaggattatgccaggactcatacgattacaaggagtangatgctngaaaggctggctgatgtgctatggactcaatcatgtanataaagatcagatagttagtctttctcaccggctgaggacgcacccctttctctgacatcaaattcactatta

SEQ ID NO: 124043 - DNA, 430 bp, Glycine max
  unsure (1)..(430): unsure at all n locations
gagtctatacatgttttctttgatgagtctaatgccattcttccaaggaagggatttttatatgatattcagattccttagaacatacacatatgcatggaaataactctaaagaaaanaatgaaggaagcaatgaggattctcaagataatgtggctagaggaaataatgaacttccaagagaatggaaagcctcaagagatcatccccccgacaacattattggtgatatatccaaaggggttacaactagacattctcttaaagattatgcanaatatggctcttgatctatgattgaacctaaaatataaaagatccatagtagatgattactggatattaccatcaagaagaactgaatcaatttaaagaaatatgtgtggaactattagaaaacctgaaattatcttcatatgacaaatgggtc

SEQ ID NO: 124044 - DNA, 256 bp, Glycine max
  unsure (1)..(256): unsure at all n locations
tgattgttatctgatatagcttaactgcattggtcgtctctggtgactggttgcttaccatgtttgaatgaatattgttaagcttntgtgtgtgtttggaacccatgaacttgctaagcatgcatcatgtgcctagcgagttctcgcattatagaattatgtttgaatttctggagaaacattcatgatctcactaagcctacgacgtgcgcttagcgagttcattccatcttgattcgtgatcatgattgatggg

SEQ ID NO: 124045 - DNA, 334 bp, Glycine max
  unsure (1)..(334): unsure at all n locations
acggtacaagtttaaaccttntaatcttggaccaaataaataagccaatatagtcatacatattctaataatatgacttataaatgttctagtatcaagtgagtctttcatcaaaagaaatgaggcttaagataagagtgcaatattgtacttttgatttcactaacaagtgctttatgaacttaatagtcttaaagacagccttttggagaagtacaaagagaatggagtgtagagaaggccaactaccttgatgaatgagtngtggtgatgttcatatcagtactggtggaaagagaagcacttaatgatgatttccttccaagtaggttag

SEQ ID NO: 124046 - DNA, 380 bp, Glycine max
  unsure (1)..(380): unsure at all n locations
ctgatatgctgacctactgaatactatatattattgaattgctcacaatcaatttcaatcagtgaatggaatgaattcaatttcctccatttggtgacttaggcttaataaggcatgtggtaatttttaacttgatcttgaaacaaacttaaagtcnacttcttaaggcactaatcggccctcttcctctcttatctctttactaagcctatcatggtctatggggactctttaactatttactgaggcttcttatttctcttcatcctgattactagacaaggcatgtagaatcagctcactccagctcattggatagcttattaggagctgtctatttttcgcatattatcttatactattctgtatccatgtggtgg

SEQ ID NO: 124047 - DNA, 274 bp, Glycine max
  unsure (1)..(274): unsure at all n locations
ctagcttgtctttatatatggaagtctgactcactacattattttattatttgggagggatccaagtgctccggacatacatatgcatactcatgtattggcggcatacacaccgcctgttattattttaggaatntcatcataacataaaaaacagcgttgcaccactataacactcgattcaaaaaaaatgataatgaacacggcatgcatgaacatatgaaggccgatctatctgtcttaaagatcaagaggcttccatctcggaggtcat

SEQ ID NO: 124048 - DNA, 133 bp, Glycine max
tggctctggcttggcgcaggaagtcctccgccaccctccggcccccgatatctccggcaactttttacacggcctatctcaactccactcacaacaatacagcagcttcatcacaactacaagaaaattgtac

SEQ ID NO: 124049 - DNA, 436 bp, Glycine max
  unsure (1)..(436): unsure at all n locations
tcatcttggtggngaagctacttcttccatgtcttattccctagaggatggcgcctcctctcacctcttctcctttgtcttccgctgcatctccatgttggaaaatcaccattaaaggaccttattgaagctcaaagatccagcctccatagaagccccactagcgagcttccatcactaactgcctgagaattcttttgatactcccttccccctcttgacaaaagattcaaaggactaaccgcttgagaagtctttggattcttccctttcccttaaacaaaagattcaaaggactaaccgtctgagatatcttttggttcctcttacaaagattcaagggactaacccgcaaagaattctttgtcttaacacattggagcgtacattcattgtggaccaatagatagtacatctacttgngttgtaatactga

SEQ ID NO: 124050 - DNA, 122 bp, Glycine max
cgacttttgacctgggagaaaaaacgcgacaagctacgcatactttattggggcgatggccgtattttcagaccccgtaaagaaacgagcctgtcaatcaacacatactttactcgtgtcat

SEQ ID NO: 124051 - DNA, 227 bp, Glycine max
ttgcttagtgcttctgatttcaatatcgcgcgtctcgatatactacgggacacaatcggactcccgagtgaaatgttattgtcgtttgacattgctcagagcttctattctgaattacgagcgtctcgatatattaccggagctcctcaggcatccgagctaaaaagtattgtcgtgtgaatttgcttagagcttctgttcttaatttcgagcgtctcgatatacta

SEQ ID NO: 124052 - DNA, 384 bp, Glycine max
gcctctaagataattaattaaacttcgagatcacattctctaatgtaaattgacaataccaatgatgggtgtgtgctgaatttatattataaccttgagttcaaatttaacaatgatccaataattaataaatctaacatcattatttttaaaacaagcttaagtatatgcaaaaaaagaaaaaattctgaaaaaaaataaaattacagagacgaggtgaaagagagatcatacgtctcttattacatataagatactctcgactataatttatcctatgtttgtattatattagtttatataataaaacagttatcttagcttctatcacatgaataaataaaatatattttgttaaaaaaaatatctttatatttatattat

SEQ ID NO: 124053 - DNA, 329 bp, Glycine max
  unsure (1)..(329): unsure at all n locations
ccatgaactagcttcctttgacaaacccctacaaacaaatttgtgtgttttatcagagcagggcaggatccactngaaggacttggaggacctatgacaagggctagagcaaggaaagccaaggaacctcttcaacaagtgttgtccatactatttgaatacaagcccaagtttcaaggagaaaagtccaaggttgtgagttgtatcatggcccanatggaggaggactaaatgaaaccactttgtctcacatttagagtggttagtttgtctaaataatggcccaatcccngtaaaagtggatgaccaaaatatgttttgggttatcc

SEQ ID NO: 124054 - DNA, 382 bp, Glycine max
cgacttaagcacgagcgactaattccagttctcttaagttaaatgcacaatgcttctgatatggtaaaacctctttcaaagtataagtagtaaaatgagaacgctgcaaatggggcaaaagaattagcacatcatgcttgttacttcaacaattagatatgagcctgtacttcgtcactgcaaatgatgcctgtaaattaatgatcactatattggtaaagacaactaacgcatatccaactctcttattgtgatgtattgatttctgaaaaataaatataatataataataatgctatctgttaaaaaagccctacgccttcacctctactatatgtgacaggcaaaatagcctggctaaaatgctggtctaacgaaaatg

SEQ ID NO: 124055 - DNA, 341 bp, Glycine max
agatgtattttttatattatttatacaagatttatattgattcgctctctatttctagagaagctaatccaggtatctaattcaacctgaattagattttcactatacaatgtgaggtttacaagtaatcacaagcaatttcaaattctacctataaaatgaaacttatgcattcaacccaagggtccttattgaatctaagcctaagagaaacctactcttagctctcaactagaaacacttattctagcaatacaacctatcataccctatatttgtatggggacgattgcttattaatatttggattcatgctggccgagttgagctgcttaacacta

SEQ ID NO: 124056 - DNA, 197 bp, Glycine max
  unsure (1)..(197): unsure at all n locations
gtcttgcattctatggtcaaatattataatcactctaaatcatttgtgggttgattaagtctatattttcagcataatctctgtgctgaccgtagatctcatttctgcaaattngttagaaagaaacacagaatctaagtgaatcacccatcatgtcgctagagaatgttagcataagactgcacatatgtctaagt

SEQ ID NO: 124057 - DNA, 362 bp, Glycine max
  unsure (1)..(362): unsure at all n locations
actaagcttctatccaagctcatcttggtggaaagctccttcttccatggcttattctctagtgtatggcgcctcccttctcctcttctcctttgccttccgctgcatctccatggtgaagaatcaccattgaaggacctcattgaagctcaaagatccagcctccatagaagctccacaagcaagcttccatcaggctagattcccctctaccttgatccactgtnttataatagatgttaacgttttcaacttatatttaaggacaataccccctccaaccacccctgctaatccgttttccaagcctacctcaccatgttttgataccncttgtgctgcagccaccagtcaaacaccct

SEQ ID NO: 124058 - DNA, 327 bp, Glycine max
  unsure (1)..(327): unsure at all n locations
gtacgtgagctcagttggaggtgggcaacacgtgatggtgggtttatgcgcgcattgtggatgaagaaagcttngtgtgcaccatcgcccgaccgccacctagtaccacatgtgatgggtaccccataatcctacaagcttgagatgaggaagtgttgaagggtgaaacttcctgcttttattgttgaccacagagtggtacctggagatatgtcgcggaggtcatgagaccttgtggacgtcaggtggtgtgctattgcccaaaaccaagcttgaccaatcccgacccaacccgggcatagtcggtcagtgagaacctgtgatgta

SEQ ID NO: 124059 - DNA, 290 bp, Glycine max
ttgtatttcgcactatttctctattaaactgggacataaaatgtattaataaaaactcttaagggcgctcaatgatactcttgaacctggaaggccggcgctgtctaaactttatacaacataccatcctctcatctctgctgatactgctgttactttattttatataaacacttcaatgatggcttatatcaaaaatattcgcataaattgcctttaacttaatctctttaatattctcatatctctaagtcaaccccaatgctacagttagacattggcacgacctc

SEQ ID NO: 124060 - DNA, 369 bp, Glycine max
  unsure (1)..(369): unsure at all n locations
gtacatggcattatggctaaacataaatgaaggcaagcagcattctaacatgtaatctaatgagcaatgacaccaccctaacaaatcaattgaagaactgaaacaggtaatttaatgatgtcaagaataatgcataccggaccaatatctgctatcaattggcctcggaaagaaagagcaaggccccaattatacagggctctcacatcantttgaatcaatgacaatgccagcctatactttctgcctgcctccactagtagctcttcacactcttcacanacatcaataagaaatggtgcaacttcctctttactattgnatntattcctcagtcccttcaatattctaactatgttgacagatgat

SEQ ID NO: 124061 - DNA, 393 bp, Glycine max
cttaagccactgagctgcagcttattgacagagtaatccaagatgtcgaaattgtgtgtgaatattcatatcaagactttctgtgattgggctaaagatacaatctgtgcatatgagaatgcttcaaatacattataatagctatcagatgggcctaatagaaatgtgataacttggcaaggatacgacataaacgagtgtcattttacacaagaacacatgatgataaaggacaagcaaacagggggcacctgaggtgaactcacactttgaagataatatgcatcctggacttatcctattggtatgagattgggtacataaattaggtgggtaagaatggtgaaaacgggcgccgatagttcatggacaaaatgtagaaacttattgaac

SEQ ID NO: 124062 - DNA, 244 bp, Glycine max
taagctgctgtgggcttcatggatatggatcttgagcttaatgatgccctttaatagttattctccaccatgaagatgcagcggaagacaaaggagaagaggtgagaggaggcgccatccactatggaataagccatggataatacgcttggagaggatgattcaatggaggataacaaagagagagagaaagatagatgggggagcacgatattgaagatagaaaaagagagagaagttgaac

SEQ ID NO: 124063 - DNA, 397 bp, Glycine max
  unsure (1)..(397): unsure at all n locations
tgatgacgaatcctgggatcaagacacgctatatacgagatgatggcacgtgcacaccacccttactccttctatcttttggcatgtatgccgaactttacttaatgagtaaatttctaattgagttctaacccaaggtctctccccctttggcaacatctaacagaactaagtacatgggcatcaatatcagaggataaagcttaaccaatcaatctcacagatgagactcatataaaccagaagccaaactatttataaccaaaaccacacagtatcgggacacagaatctgaaatccagatactactagagtaataaagtgctgattataatgatctaaggtgcatagccacaatagacggcatanaagagacatatgattagaaactatatct

SEQ ID NO: 124064 - DNA, 168 bp, Glycine max
tgaatatctgtaagaatcttgacggattatcatatgtaattgaatgctgcaattattataataaagggtaaataaaagtgtgcccttatgactataggctttaattctaatgcacactacgacctaacaaagttgggtctattgtaacttactcaacatcttgtaaac

SEQ ID NO: 124065 - DNA, 340 bp, Glycine max
ctcaacctcgggagccaatccagaccttatgcgtaggctatcaaccatctacggtagccaccgacggccctgttgctacttcccctgagttccttgtccttctttggcaccatttcccatgccttgctgaccccctgaagcacccccgctgttgggctattgaaacctcttgcaataaaatgtgtgaggccttcctctgatggtgcccccctcatggtgtagccaagttgccttatggcgaggactagattataattaatgcaacctctcgtccccatcaaggaaacatatggaaatcctccacatgagacgagaatgtcggttcttccttccttccatt

SEQ ID NO: 124066 - DNA, 269 bp, Glycine max
aatatttcttgaaatatattcacctaggtactcactggaaccctaagctcttatttatatttaatcatttgaattggacatgttgatcgttagttgtgttctaaaaacccttccagtgtgtgaatatagctaatggtaaatattccttaatattaggaggcaccttatcctgattattttgggtgagttagttctacataccattagatgataaccacttatctggacatcttggggacaacactctatttgttttatcatcatctcag

SEQ ID NO: 124067 - DNA, 433 bp, Glycine max
  unsure (1)..(433): unsure at all n locations
aagaagaagagggatgaatatttgaggagaangacataatggatatagaagaaggatttcctcaatttaagatactcacacagactntggatgtattcattaaagagttctgagtctcggtgtatctctctcctttgcttcctattacttttataggcctaaggtagattaaaattcacgcgatttcgaactaagctagctttctgggctttgcgagtatggcggtgatcatgcgcttagcgcaagatttgtgctaagtgcgtctttgaacttctttaaaggtcttcttcgcgctaagcttgtgttgaccgcaatcttcaagttatgcatcaatttatcctcacaagcactttgaattctcttcttttaatcctgctggtaaaaaataagatgatataaaatccttatatttcattataacaatataaagtag

SEQ ID NO: 124068 - DNA, 273 bp, Glycine max
  unsure (1)..(273): unsure at all n locations
atgtcactaccctcaaggaattagaacgattgatgggacctctcctaagcaagccttccgcatagtgtacgggaagattctagatttgaccatatcggaggtatttacagaagctgtcgtgtccctcgcccaatactatgaccagccgntgagggtgttcacgnttggggactcttaaatagtaccaactattgaagagtttgaagagatattatgatgccctctcggtgggagaaaaccgtaattcttcttcggttttctttctttcttgag

SEQ ID NO: 124069 - DNA, 207 bp, Glycine max
  unsure (1)..(207): unsure at all n locations
ctctctctctctctcgggctctcacacacacgttgaccacattgtagaagaattttatattgtaatcgaattattaattatgatatatagtaaatagaataaagtttgaataaattattttaaaattatattaatattatgttttaatcaattaagaggggtaaaactgttacactaacaattatatttattanactcaaaacaata

SEQ ID NO: 124070 - DNA, 360 bp, Glycine max
gcaattctagtgtttactgttcatgcgtactattcacgtagcaataaaagttgtcttctgattcaatctgcaatatcggtttctactgattaatggaaggcttagtctccagtgtcgttttctcttgaggatcaagcataactctctttgagggtgtattattactattgaattctgatcagcttttcctcttcaccaattactctgtatttggtgctattaatccatgcatgcttagtgcttgattaattgtctctcccttaacttacgttcatggttaatgatccagttcgtcatgattaaatgggtatgtgttcttaacacttaagacaccttatctaaattcgctagtaattaatt

SEQ ID NO: 124071 - DNA, 230 bp, Glycine max
tgttttacactcatgctctccgggttaactgatttccttggagctaagatgttgatgtgggcgcttataaattttgccctactgccaggagcttttatatcggatgcacccctgtgtatagaagtgaaaaatctttctcggctactgagttttaactttctctcagcactcctagagaccttctccttaaaaaaaaggtcttagcccttttgcattttggtaacagcttg

SEQ ID NO: 124072 - DNA, 289 bp, Glycine max
gtgatgcaaaaccacttgtttagatgactgagtatagatctcttccctggtgtatttatatagttacttgtacaatataaatttctttaatgccttctacaagcaatatgtcttgggcaatgcactgtacaaagggatgtttcaaattgtggtggaaatgggttgaataactcatcaatatacttataagtttattaattttatcaatatattacaaaaacattttcaacagattgtatctcttgaaaaccaacgcttagacctgttggcttttgtaaagctataatgc

SEQ ID NO: 124073 - DNA, 379 bp, Glycine max
  unsure (1)..(379): unsure at all n locations
gtaagctntctcggngatgaagtgttatctatatgtttgctctagntgagtaaaattatggtgaaactttgntgtgcgtttctttttgtttaatggaattgaattattaatgaaatgtggcatatactgtttttgtagtaaaacacatagttggttcacctctctgttcattttattgggtctgactcctagtgagatcgtgccatttattgaatatttgggttttagtgcatcgtgaacattatgattatcagattatgtaagctattctgtgttgtgaatacggtataaacttatccaaattaaaacttatcctanaccagaatataagtatatttcaatgaatgttntcttacaatacaagagtggtctctatgta

SEQ ID NO: 124074 - DNA, 260 bp, Glycine max
gtggctatctcaacaaactagctcaaaaggtaaaatattttatcactgcaaaagttctacaccacctagaagtgcaaaattcaacaagtacttcctgcaatctcctctttggatgcctcatgagaaatgctgtcaaaccttaatctcaaaactgaaaagagagaaatttaacctggctttttgcttccacagctcttttggtgacatccctcaccttgagacaatttacataccataagttgcaagaaattccagtcatt

SEQ ID NO: 124075 - DNA, 366 bp, Glycine max
  unsure (1)..(366): unsure at all n locations
ctaagctagctaccacacatctctaatagctaagcttacctccttgagatgataatctatggcttagctacacaccctctataatagctaagctcgcctccataacaaaataaatgaaaatacaaaaaattccttactacaaagactactcanaatacctcgaaatacaaggcanaaaccctatactactagaatggccaaaatacaatgcccanacgaaggaaaaacctattctaatatttacaaagataagcgggctcatacttaacccatgggctcggaatctaccctaagcctcatgagaaccctagggccttccctaggatctttggcccaatctgcttggagtcttctatccaatgccct

SEQ ID NO: 124076 - DNA, 255 bp, Glycine max
acacccatgatcatataaacgacacaaacgaaagcaagtttaattatcttcttaaaatcctctctcttaggcttctcttgaagtaattgcaggtgtcaactatgttagcatcatattcttcccaataccaacccttgtgaaattgtcaaatattaaagttctaataaaattaataattacacgcaagtctctatgggcgtaaggatatatatacttgaacacttgtccaaatcaactaactattccaattaatta

SEQ ID NO: 124077 - DNA, 275 bp, Glycine max
  unsure (1)..(275): unsure at all n locations
attanatgaagtctccataaaattctattcttgaggnggtagggattacaatttccaaacctggttggtgtgaaaaatagcctgaacccattcaaacattttccaccagaggtctaaagcttatgaaggtgaactaanattggtaaacatggtgatgaggaaactgacagaggcaggctggatattatttctntaatctgaactagcgtaacttccgtttgttgcatggaaaaataaaattaaaattaaactgcatcaactatatatggagatta

SEQ ID NO: 124078 - DNA, 200 bp, Glycine max
agagatgaggaagtgtagaagggggaacttcctgctattatatcgtgttcacatatgtggacctggagatatgtcgcaggggtcacgagaccttgtggacgtcacgtggggtgctattgcccaataccaagcttgaccaatcccgacccatacccggcatagttggtcagtgagaacctgtgatgtacctaaacaggcga

SEQ ID NO: 124079 - DNA, 152 bp, Glycine max
cggctcgataagtgcatgcatctgaacatgcttactaacattttttcttcttaccagaaacacctttgaggatatgtacttggagtaatgatgtgcatacaacaattactaaacgtattgcggtacttgaaacgacgtagatgctgcacaat

SEQ ID NO: 124080 - DNA, 484 bp, Glycine max
  unsure (1)..(484): unsure at all n locations
gatggatcttagagcttcaatgaagtccttttattatgattgtccaccatgaagatgcagcgggagacatatgagaagacgtgagatgaggcgccattcactatggaataatccatggatgagacgcttggagaggatgattcaatggaggataagaaagagagagagaaagtaagaggggtgagcacgaaattgaagaaagaaaaagagagagaagctgtactttgagttgtgtctcacaagactctcattcatcanagttacaacaagtgttacacatgcttctatttatagactaggtagcttccttgagaagctatcttgagagaactttcttaaaaagcttctttgagaaaaattccttgagaagctagagcttagcttcacatacacctcttataactaaactaacctcctggagaagcttccttgtgaagaattctaaagaagctagagcttagctacacacacctttctaatagct

SEQ ID NO: 124081 - DNA, 246 bp, Glycine max
ctgcacttcccaatttttatgggttttgattaaaggtgaccctagactttttttcaatgtgaaaaaattcggaaaatcaccagccttgtacttcggagtataccaatttacgtttaacactcgtctgtttcactcggaactacacttaattttgccgggcattgtagttatttatactacctgcgtacttagtttgtttaaatccgctagttcatgaattcgggcgctgaaagaataaacttgaaa

SEQ ID NO: 124082 - DNA, 438 bp, Glycine max
ctcggtactcatcatcacattctctctctagaagcaatatcaatacttacttagaaggtattaatattcaaattgaccatattctccaccactaagcaaatatgtgaaactttgagaatactggcttaaataaaaaatgaaaccagaagtgaaggcagaaggtaagattcactactttgaaatgatttatcagttgattggcaaatattaatcattagagcagcaaaagtgattattaaacttaaaacaaatacatgaaaaacacagagtggatgttcgcatctcatctaattactgctgtgtgtaacatcctagaaatttctacccggaacttttggaaacgatgtgatttgaatgattatatatatatatatatatatatatatatatatataacgattatccagtgtatatgcatatatgttcttggtagaagta

SEQ ID NO: 124083 - DNA, 480 bp, Glycine max
  unsure (1)..(480): unsure at all n locations
aagctttatccaatgactacctgaataattccttgatagcctcttttagccttgtttccgctttccttgtttcgaagctcactacaagccttacgtgaataaccatgatatcaccatatccttcaggaatnttggagctatggaattgtttgagaataagtgaggagggattatgtttcattggataacatgtcttgatggctatgcttcatgatgtactttgggccatacttgatgtacattgtatattggattaatgatggacatgctgaatgagatgctatttctcataggcttcagagaataacaaaaaaattcgtagagaaacaataagctatatcgtgagtgaattgacttaaatgggaaagaagatgaactctcgcgctactttttggataacttatcttactcatacatgtctacttttttatatcacttattccatagtccttatgcttggatcagcactattctattttc

SEQ ID NO: 124084 - DNA, 259 bp, Glycine max
  unsure (1)..(259): unsure at all n locations
atgatgacctctcctatacactatgaataacagcttgctattctcaagtactgccaaatcttactaaaaatgcctatcacaagagttatactaatattcatgactccaagtgtattgtattacatatacacgccatcttgcaaaattacacacatgcatactcatagcatttcggtggaccaaacatagcacatgcgctcatcttggtatttctaatatctatacatatacnaacttcatgatgaatcttgaccaccta

SEQ ID NO: 124085 - DNA, 429 bp, Glycine max
  unsure (1)..(429): unsure at all n locations
agctaagcaatnggctctcctgagcgagcttccncttcctcatatggtttactttttctataaatagccatgaaggggaatgggcaaagggttcaggaagttttataggaagataatcgaatggaaaagcagaaaataagaagaatagcgaagccaaggcgctaccgaatcacaattgaggatcattccctacatcgcttctcttgcgagccttgtaccctgtgcaacaaccgcgtagttcttcttccttttcttttattttcttaagaattagaatgtaatccatgtacccttatgggtcctctctgctattatgtatgtattcatcttctcccctttatcgntggtaatntcactttatttgaagggttaattctagctgaccacgagtgctgtgaaattgttgttttcttttgtgagactagagac

SEQ ID NO: 124086 - DNA, 315 bp, Glycine max
ccactggtccttcttcttccacttggtcactatgcacccacaagcttgcgaaattatttaggcatactcttcttgcaccctttggtcttgtcaaggcttgcgagtgatctctccgatccgcactcttcaatgggacggccactgacttctctggcagttcgctttctactcctttgagacttgactcttctcctctccgtgttcaaacttcttcgctgcgaatattacttgggagccatctaacctgcatatgaacttcagccatcatggagccaccatgatgccatacgatgcctctagttctcatctttctta

SEQ ID NO: 124087 - DNA, 179 bp, Glycine max
  unsure (1)..(179): unsure at all n locations
attgttgaccatagagnggacctggagatatgtcgcgggggtcaagagaccattgggacgtcaggtggcgtgctattgcccaataccaagctggaccaatcccgacccaaccctagcatagtcaggcagtgagaacctgtgatgtacctaaacaggcgagctcctggctgtcaacagat

SEQ ID NO: 124088 - DNA, 249 bp, Glycine max
  unsure (1)..(249): unsure at all n locations
tgttagcattcacctgcttttactttaaagngatgttggacttagcccaacaacacacatcccacaaactccttatgaactctcacttatcaacttacgagatgactccttgcccttgtgtgaaatcccaccaaaggatccctaaatatgtttgcccatgactaggtattaaaaaatgacgaaaagaatataagtgagaccaagactcatgtggggcttatggcagattctgatgacggacttgcctgg

SEQ ID NO: 124089 - DNA, 280 bp, Glycine max
  unsure (1)..(280): unsure at all n locations
tgcgagccttcttggtctcttgttcaagggctcttgcggtagtttcattctcttcccgtaatccggcacactccttctagatgtgtgtagcggccaacttgaacttctccttggcaagtttcgccttttctaactcgcttttgagagcttggacttcctcgtcctctttcggtgcttccaaactctctttgctgacgactnttaactnggcgagccaatccaaacctcgtatatgaactttcagccattcatggtaaccaccaatggcgccattatgaat

SEQ ID NO: 124090 - DNA, 285 bp, Glycine max
cccctttacatttattactctttcagtggctatattagagagactacaattgagtcaatctctagggaagggagagcatctctagaggacatcctaacctacaaagtcaaaaatgcttactgtaaaagctagttttacctaggtatttacctgcaggtggcatatttgctaaacaagatatttgctgttagccttgagagcctaataattaccttattgccaacattgtagattgatctccatgttaggggtaaataaatggacacattttagggactctctcct

SEQ ID NO: 124091 - DNA, 465 bp, Glycine max
  unsure (1)..(465): unsure at all n locations
ccttgatactcagcttanggtgctcactgactccagattgctgcanagaaggacagagatctgtattgtgatctacanaagaacatagaccacagactctggcaacaggtgtagatttctgattcatggcatgctgagttactatggtgaccaaggcatcaagttttccttcaagctntttattttcagtagatgaagatgaatccgtggtcaccttatggactcctctaagaacaatagcatcatttcttgcactgaattgttgggagttggaagccatcttctcaatcaaattcctaccctcagtaggggtcatatcaccatgagctccaacactggaagcatgcatcatactcctctccatgttgctaagtccctcatagaaatattgaagaacgagttgctcagaaatatggtggtgaggcagctcgcacataatttcttgaatgcttcccatactcatac

SEQ ID NO: 124092 - DNA, 443 bp, Glycine max
gtcacctgcggctgcaacttctatccaggctatcttgtggagaactcttcttcatggttattcctagggatggccctctctacttctttctttgcttcgctgctcttctggtggaaaatcaccattaaagacttattgaactacagatccaccttcgagaagcccagtgcagcttcatcaaatgcaacctctgcctgccttgatgtttggcgcacgggccttttctgtggataatggacgggcataagccaagctgaacacatcgcatctagtggacatactacaagcactgactgctgacccactacggaggtgtgtcgtatataggaatttgcgttgttggagaatatcgcacaccactcatacaaatggaattcagattaatcacccatcccctcaccaaacgacggggcaaattaaattcaaactttcaacgcaactct

SEQ ID NO: 124093 - DNA, 368 bp, Glycine max
  unsure (1)..(368): unsure at all n locations
atgcattagtcttttagatagacatgatgcataaaataggatgttncatgctatataactaatatccttttaggttatattgtaattataaattctgttgaatattttctcgctcccttcttgtgtggatgcagatgctgaaatcaatttcggccaggaactctgttaacagtgaccaaattaataccattgagcttgaactgctnttcatatacactatctgtgcttatgatatacaaggcatgctgaatgacttangatcacattngtttgtcctgatttaacttcaacaacatcatgctttatttgttgattctatcgcagtataatgtttgtaacaaccaattagttgaaagtggagaaattac

SEQ ID NO: 124094 - DNA, 112 bp, Glycine max
tctagctccggggacatctgactgcttccatcagacatacaccaaattttttctttgcatgacaaatggaatgccttaacaacgccttggatagacttcttatgccttttaa

SEQ ID NO: 124095 - DNA, 341 bp, Glycine max
taccacttctggataacccgaatgcaacttttatcgaggcgactatatctgagtactctgagaagccatataaatatggccatatatacccaccacagtcgaaagatgttcaatgtacgggaagtcatcaatgtggtagcataaccctataaaaacctatagatagatggtctggagaggatataaaacgagttcactacatcctataagccaaaacataataacatctgccctatgaatggatgaatatctcagagtctcaaattaggagaacgctatggtaatgtgggaccctcttctatatcacatgcaggactacagatgtcaaagatctatgtaaa

SEQ ID NO: 124096 - DNA, 294 bp, Glycine max
ttttttgcagctcagaattaacctttgtgataacacctagcacagtttctacccagggatattaagggctggaatcgcaattatgatcctttttcagattcttcctccagggacctgtttaccacttggggtgaactactattgatggtaaatattctaattgcagatgagtgcaagcaatactgccatttgggtttgacctgactccacaattggaaattagactttagatcaacaagtttactttttgggacgctaatcactttcctaccctccgtaggaacatttacaaaa

SEQ ID NO: 124097 - DNA, 434 bp, Glycine max
  unsure (1)..(434): unsure at all n locations
ctcagctttatgtgnaggatgtgactcttcaccatctgaattgaatttcaacgttctaaggcactagtaatcgattaccanaacatngtaatcgattacaacttcttgaaactaattggaatgttgtaaattcaatttgaaaactttttcaaaacaattttgctactggtaatcgattacaacaatctggtaatcgattaccagagagtaaaaactctttggtaaacatgttttgagaaaaatcatgtgctactcacattttgagaaaaacttttcatacttatcttgattaagccttctcttgattattgaatcttgagtcttgagtctcgaatcttgatcttgattcttgagatcttgaccttgaatcttgattcttgactcctaaacttcttcttgagtcttgattctttcttgttcttatcttgaaactc

SEQ ID NO: 124098 - DNA, 457 bp, Glycine max
  unsure (1)..(457): unsure at all n locations
tttttagcctcggntcccttaccttgacttgaagctcactacaagccttaagtgaaataccatgatattaccatatcctcaaagaatattggtgctgtggaattgcttcgggaataattgtggggggttgttgatacattggacaaccacgtcttgttgggtatgcttcatgatagattctgcgccatacttgatgtacattgtatatgtgtgtaaatgtagtacatgctgaatgaaatgttgtttctcagatgctattgagtaaaacaataatcgaataaggataagaaaatcatatagtcgactgattagatctaaatggacaacatgatgaactctggtcgactctcatgttaatattatcttactctttttatttctaatatttctaatatcactatccccttgctcttattctttgggtaaccactttcatatttcaacctgtctggccatt

SEQ ID NO: 124099 - DNA, 243 bp, Glycine max
cttgatctcagctctccactctctgctagcttctacactcaccaatagttttacttctttttgttaagcacaaacctcaatgttgacaaacacttaatacaagatgtctcacctttctctacactctacattaattgtgcggttgggaaatatatatggatctatacctttatgtgtggactaacatgaacacaggagatcttgaacagtgatctattttccatgctagtgatatactttaat

SEQ ID NO: 124100 - DNA, 406 bp, Glycine max
  unsure (1)..(406): unsure at all n locations
taagcttacacagagacaganggannattgcttatattcttcacatctccttcttatatactccacctatatatagntatatgcgcatgctacatgacaaaagctaataacagaatctctaaggcactaaataacagaattataaaagcataaggtactactgctcctaacagaattgagcactactgctcataacagaatggagcactacaaaataacagaattggtaccaaaatcccttaaacataatccttcgagtgcagaggtggtaaggtttgactcttgttgagtccttatcttactcttactatcatccctggtccatcaaaaacaccttgttcttaatgtgttatgacattcaaccacggcttaataagtagaaccaggactcctaattatattgtgt

SEQ ID NO: 124101 - DNA, 472 bp, Glycine max
  unsure (1)..(472): unsure at all n locations
agcttagatnngaaagtntataatatttagctatgttcgagtttgttctctctaatttgtaatgcttctatcacgaggaagtgattgtattgcttagctatcatngggtccattctcagatgaattaccatgtgtttataattctgcatttttatcatgagggatgcattaattatcatgttgaaacttcagaattctgaattctgcatttatttgatttgcanggcttcatacgaaatgatatgtcaatacatttttattattaatataattcaatcttggtggtgtagctatgtctaacacctcacataatatatgtgaactcaatccgattcgctattgattgnggctatcaatgttgtcatctttatatatatataacttgtggtagctgtctacccaggtcttcgttgttttgtgcgacttgggtttacagaatttattttccttcaataatttctgacaatttttt

SEQ ID NO: 124102 - DNA, 465 bp, Glycine max
  unsure (1)..(465): unsure at all n locations
acatcatggttgaagctaataagttcctttcgtatattaagtgtgatatggctgcacgcttgaacatgatgtatntactnttttccttagtgtctntgtttntagtnttactatgttgcagtttttgttgttcttggttgatgcgcctacctcaccttattaatcattatacttataatagaatcttattattcttgtggtttaattattgcttgtataaatttattactaggataatttacctcttataagttaaaaattggttctcttagctcctataaattaatatttaattctcttttaatctttttacggttaaagtggatatttttatttttattacttacatttcaattcttttttaatctatataaaaagatccctttccaatcttaagactaaataaaattagatccaatttaaacctaaaaattccttttaacttatgaattttatattaatggt

SEQ ID NO: 124103 - DNA, 397 bp, Glycine max
  unsure (1)..(397): unsure at all n locations
ataccacgatgcctatttccggaaaagagctctggaggcagcaagaagagcacactttgcagagatacctacgttttgtaatctcattatggttanggtttcttctgtaatggctggctaaaccacccttgttgagaatntctaaagaacaatngatgtaattactttaatatctaattgattgtgttcttgtgtcaatgcttttttaatgcttaaattcgtatgctttggctgacacccattgtgtcatagttggtgacttacttggaaagtttgtgccttaaactgatgacaattgaactatctacagaggacgcgataagttgttagatctatcaaagagtggctagtagcacaccgatcagtgactagtaatattaactttagcattactgtc

SEQ ID NO: 124104 - DNA, 434 bp, Glycine max
  unsure (1)..(434): unsure at all n locations
tcttcctaattagattatgccttagtacatagtgcatcttactgttaaaaatatttgcacttaccaatttatatatgttatggaacgcttggaaatcctcctccgtcgcctttgcctgctaatcaggatgcttgcttaataataacaaagtgcagaccagaagctctgcatacacttcctgcgttgccaagaaaatagcttggcttcttctactacactactttnttcagattccttgtaattntattccaagagtatgcccaacaagttattattaataggctcccctgctttgatcgctcttaatcctcagttgattgttagtgcttagctctactgangctctaaagaatggctaagaatttgttaaaacataagcacttagacaatgtangaaagctggagttgctgcacatgatgtccaacggtatgtc

SEQ ID NO: 124105 - DNA, 329 bp, Glycine max
tcttagtctcagctgatgaagatgaaattgtgactacttcatgcacttcattaatgacaatagcatcatttctggcactaaattgctgggagtttgaagccatcttctcaattaaatttatggcttcagcaggggtcatgtctccaagggctccaccactggtagcatctatcatacttcgctccatgttactgagtccttcataaaaatattggaagagaagctgctcataaatctggtggtgagggcaactggcacatatgttcttaaatctcttccagtatgcatataggctctctccactgagttgcccaatgccgaaatattct

SEQ ID NO: 124106 - DNA, 225 bp, Glycine max
ctaagcacgactcacttattaaataacacctttatatttaaatacaggcaaagaaaaaatcttattgagacaagatatttaattatgttagcttaaaagtcaaagattatttatattatggtattgtagtaatgcttataatacatagaataataataattcgtgtaaatttatatatgtatacatataccctcgggagggaggctggctcactcctaggatgct

SEQ ID NO: 124107 - DNA, 403 bp, Glycine max
  unsure (1)..(403): unsure at all n locations
tattctagatatattccatatgagttctagctaganagatagtcatgataaaactcatatcttcttctccataaatattaggtgggaaaggcaaccagaattgagtcaacaattgggatttgttcacaccgagaacttgggcaagtatttagtagtccccattttccatatgagggtatcaacaaacacatttcaattgattctgactaaggttaatcaaaggttgtcctcctagaaaacctgacaataatccttctaatgacaagcaacatttggtaatatacgtcttaaggcactatcgacttttgctatgcactctaactacattcctaaagccgatgaatcatgtcatcagtgtgcagctgatgttgtgaacctagttcatatttttcgtgagctgtgt

SEQ ID NO: 124108 - DNA, 390 bp, Glycine max
atagatgtgagctaagcagaccacagttgtttgtttccctagatcttctctagtatcgaatatcacctcttcaccatcagagttgatagtgtcatcacgttgaggttcctcatcatctgaacttatgtctagtgcttattcatctttactagtggacgcatcagccatcagacaccaagttgattcttcctccctgccttattcatgatgaactctatgcctgtaaagctacaggatttctttggactcacaattcttttcatcatgctctaggcagaattactgaatctaaaagttgtcatgaccttgcaatgtgatctcaccacttgccacacagtgtcaaaaactagacaacttaactactctaggaagatatctactaccacagat

SEQ ID NO: 124109 - DNA, 526 bp, Glycine max
  unsure (1)..(526): unsure at all n locations
tagcgacctaaactcagctctaccatgactaccttgaataattcctttgatagctcctttgagccttgtttccctttccttgttttgaagctcgctacaagccttaagtganaaaccatgatattaccatatccttaaggaatnttggagctttggaattgttttgggaataagtgtcggggggttttgtttcattggacaacttgttttgttggctatgcttcatgatgtattttgcgccatacttgatgtacattgtatattggttaaatgttggacatgctgaatgaaatgttgtttctcaaaggctaaagagtcaaaataaattcgaaaaaagataaagaaaagcaataaagttgagtgaataagatcttaaatggcacaagaatgatgaaactcttggctctactcttcatgttaaattgtatctttacttctctttatttactaatgtttgtctaatatcacttattcccctttgctctctattctttgngatgtaccacttattcatatttctcatacc

SEQ ID NO: 124110 - DNA, 111 bp, Glycine max
  unsure (1)..(111): unsure at all n locations
accgtccataagagcctcgctgatgaagctgtngcatgagaccaccacggatgcctcccagtgggtgactactgaggctgcgtgagacggatttaagagcgagaccgacac

SEQ ID NO: 124111 - DNA, 400 bp, Glycine max
  unsure (1)..(400): unsure at all n locations
ctcagctntctaagaggctnctttgagaagctagatccttatctatctacacctctctattatctaaataactnccttaaaataattacggatgataataacgcaacaaataatcaaacatcaaacataattactaataatatatagatatatatatcagggtgttacattggtgagctgcccctcctccgcaccatacatagaagcggcagaagaatcattagaaacggctttccaatccttcgaggtggtgagttgtgcctctgtggaaccaagtccggtgctaccttctctttccaacgcggccataatggtggcacgtgttatgctcaagaacggatttgagcccggaatgggtctaggcaaggactgcctcggatatgccgacgtagccgatgtt

SEQ ID NO: 124112 - DNA, 348 bp, Glycine max
atcatgatcgacctattaacaatagaagcctactagagataattgatcattgccatgcaggaagaactgatcctattcgaaagagacaatgtttggaaaatagtagaaaaacttgagaatgatcctgacatatgaaccatatgtgttcttagatattgactaaatgaacttggataattatttaaacaaagcatgggtgtagcatacgggttcatcaacaaagggaatagctatgataaacgtatgctcctgatgcagattaaagctctacaatgctttcgcatatgcatcataatggctttaactaatcaatgagtgttagaatgctttctaaaggttaattcacag

SEQ ID NO: 124113 - DNA, 356 bp, Glycine max
  unsure (1)..(356): unsure at all n locations
gaagcttctagatanaactacatgatactgcctcggtagaaacgctttccagccttcggtaaccattggatcttctcggaactaggtttgcaacttcacaagacactctaccatgatttaaccggtgggatctctgagaaaatatctggagtgtgctataagcttccgttcccgatagcatctcttatataagcattgtagcctgtgctttcttgtagcttatgacaaatgccatttcttcttctttctgtctatcaaatccatttctaaagntccaagnactgtctccatcactcacatccaccattagcaccacaaactatcattgtctgcattgaaacccacccgaaggaccc

SEQ ID NO: 124114 - DNA, 456 bp, Glycine max
  unsure (1)..(456): unsure at all n locations
ctaagcaccgaggctgcagcttaagccaattaagaatataaacattagatgatgaatatcatcatgttattganaggatgaacacctaacattggagtataacatgtctttcttaaattttcatttgtgcatggccaatactgggcatccaaaaatcatggctaccttctgttagattctatcacggttccgatgacaaatttaataattcatctttccattatctagtgcatctttgtaatagtccaattcaatctatccaattgttaaaaaccattcttgattggtatgaaataagtaaatggatgcataattatccatcttctgtaattntcatatccaacggaccatctaattaacacgtaatgactcgcgtcaatctaccatacttttcatagtaaaattgtcttaattattaaagcttacttccatctctcattagtaggatgttcacaa

SEQ ID NO: 124115 - DNA, 254 bp, Glycine max
  unsure (1)..(254): unsure at all n locations
tcactctatccttcatagtngtgactatgacccataccaactaccactttagttcatattgccgcatcacctttcctctccatgcaaaccatcttaaacgcttatctccgtcaccgccataaaaaccaaataggtgaataataacatacatatgatcaaatgctaatatgaattcatatctttgtgaaaacaattgatagaagtcatattcaacaaggacaacgagtgtctaccttcaattcgaatccagatgc

SEQ ID NO: 124116 - DNA, 322 bp, Glycine max
  unsure (1)..(322): unsure at all n locations
actaagcttcccgcataaacatgttaagaccttccgctaaaatattgaactagattggtgccaatgggtccccttgtctaagaccccattgtgatgagaactatgaggtgggagacccattgaccagcactaatataaatgatgatctcagacacccagctatccaacatacccattntacatagaagcccatatgctttagcatgtagaggaggaactcccagctcactgagtcatatgctttcttatagtctagtttaaagactaagcatcttatcttacatcaccttgcttcatcaatatgcctattatcaacaacact

SEQ ID NO: 124117 - DNA, 294 bp, Glycine max
  unsure (1)..(294): unsure at all n locations
acctatanaaacncaagctcaagggctcatgagcaaggganatgatgtcaatcaacatttatttatctccttnctataggacaatatcgtgacaaagttttatactatctaatccctatggaatcacggcactaattgttacgtataccatggaaactcgacacgaaagcaatccacagtggtctcaccaatgaaataaccctcacccatggaagcataaagttctaacaatggcctttgacacctacacatgcggttggggatcatatacgaatacgactctcaatgatgaag

SEQ ID NO: 124118 - DNA, 102 bp, Glycine max
acttagcactcgctgactatgataaaaattttgtaatcttctgaagtgaaatcacttttttgtttgctaaaccacctttttcaaattttgaaaatgcataaa

SEQ ID NO: 124119 - DNA, 283 bp, Glycine max
  unsure (1)..(283): unsure at all n locations
tactgactngagtatggcatacacatngcatgtttgattgcctttaaaggctcgaagagtgtgagaacacgggctgtgttttctggaaaacgcgatgaacttgctaagcgagcatgctgcgctaagcgagttcatcaatactcatcgtatgtaagcattatctgaagatatcgctaagctcgcttaccgcactaagcaagntcatcttttgaggaagaacactaatcctcttgttgaactacctgtggctaagcgaggtagaatcgctaagcccaggtgactt

SEQ ID NO: 124120 - DNA, 351 bp, Glycine max
ctgcactgcaaccagcagcctggagccttttgttgttattttagcctaagatgctgattaccatgcaatatttatattcctaattttatcggcgcagaaatacaagtctacaggaacatcaataacctaatgtgcgctcttggtacaaaaggcaggtctacctttgtattgaaacccaaagccaaccttggacaaaatcccaaggtcaccctgtgtcagactctacaaaaccatggtttccttggtagctacttttagaaccacatacgcgtcaagtcaggtccatataactgcctaactgtcacagaccttatcagtgaatccatactctccacttcaagaacttcaaca

SEQ ID NO: 124121 - DNA, 89 bp, Glycine max
accgctgctaaacaagataccatctccaacaattgaacaacaaccgagtggggctgctagtatatgaaatggcggggcaagaaagatac

SEQ ID NO: 124122 - DNA, 356 bp, Glycine max
tgagcatggaactctatatatgttttcatgtgtttttgttggtaggtagccacggagcaaactctaaatgaagtgctttagttttggaggaatttggagattccaaaggaggttccaatttccttgcacttttatggttattattgcaaatcattgtctccatgagaaggaggtaggcagatttgacacaatatagagtcactatgcttccaaatgaaagtatcattagcttgagtattcatcaaagggatagtcctaataaattgcacatcatcatgattataataatgttccaccatatccatcctccaacaattcatttcatgattaatgatggaatttgaattcaaattttc

SEQ ID NO: 124123 - DNA, 356 bp, Glycine max
tggatcacgaaatgatatcatcgcgatgatgccttgggttatcagctcatcgccctaagaaacaagaatagcgactagctacagccctgtgatccttgtttagcttactcaagaaacacttcgggcattatagtctgatgctgcctctcttgtggattaacacaacattgcagaatgaccgactgttcggactttatccttatacaaaatataggattataccttcccattgaccgatgacaaactaattttattattgcatcggggagaaaatgactgtatattaatgacagaagctcccgcaaatgagagcccatatgcataggatcagccaatctctgtacactaccttcatg

SEQ ID NO: 124124 - DNA, 366 bp, Glycine max
  unsure (1)..(366): unsure at all n locations
gcagcttcactgcatattttctgcctttaagagttgagactctgttttctcacttngaatcctgaanacaccaatatgaacaatatattactgtatatattcataacaccaacggaggaatagactaaaataggagaagcttgtataattcataaatcccagagaattactgaattactctatctataaccacacgacatcagtgtactgcacatcaaagaagccttaaatttcactttggaggccattgtaaggggaaagatggttaatttcggatacttcagaaccagggagccttgactaacaagtttgccacaggttgacggcccaatctggcaacagcccgttacgatgcttctctgaatc

SEQ ID NO: 124125 - DNA, 364 bp, Glycine max
ctaagcttataaatccttttacaatactttgttgaggggacttaagtaatttgcatattgatactgcacaatggagtaagcattccttagaccatcatttctattctttctttcagaactttccctagcttcaagaaaagcaactgaaagaaatgatcgtggtaaactcatcgatcacaaaaatatagtacaggttagtggtcacatgcactcatgttcatgtaccttaatgagcacaaaacacaatagcagtgcatggactctacaattttattttggatatgtggaagcgctgaaatgcacaaaacttgttggttgtacaagacaataatacaattggttgtacaagacaagtgtttaaata

SEQ ID NO: 124126 - DNA, 294 bp, Glycine max
  unsure (1)..(294): unsure at all n locations
ttaaagatacaatctttgcagatgagaatgcttcacaaacattaagaaagctagcagatgggcctaaaagatatgttattacttggcaaggatacgacataaaccagtattcattttcacaanagcactagagtgacaaagtcaatgcagaacagcggggtcaccctaaaggctgaatctaacactttgcaagatgaatgatgccatccctgtgtagcttcatcccttacttcgggtcaatgatgaaatatgggagctaactatgtgaaattatggatgtgtctcaatgtaatg

SEQ ID NO: 124127 - DNA, 358 bp, Glycine max
tgcttgtggggcttctatggatgatggatcttttagcttcaatgaggccctttaatagtgattttccaccatgaagatgcagcggaagacaaaggagaagaggtgagaggaggcgccatccactagggaataagccatggataagacgcttggagaggatgattcaatggaggataagaaagagagagagaaagaaagaggggggagcacgaaattgaagaaagaaaaagagagagaagttgaactttgagttgtgtctcacaagactctcattcatcaaagttacaacaagtgttacacatgcttctatttatagactaggtagcttccttgagaagctttcttgagaaaacttcct

SEQ ID NO: 124128 - DNA, 253 bp, Glycine max
gaaagatggataagggggggaaggaaagaaatagtgaggatgtatgagaatggataaaagaatgaaaggtaagggaagaatgaagtgagaaaggaaaggaaaaaagaaaaaatgaaaaaaaaaaaaaaaggggaagagtagggaaagggaaagggatagatgagaggaggagataaagtaagaaaaaggagtaataaggagaaagggttatatgaaaaaggaggaaggaaaaagggtagagggggagaaaaag

SEQ ID NO: 124129 - DNA, 324 bp, Glycine max
cgttacaacccggcactctggctcacgccaccggcttggcccgcctccaggaggataaactcgccgcccaacgccgctccccatcccactctcccttccaccaccttcctgcacccccaaatccccttcctttaccacctccacccaaccctaatgttttttcctcaccctcttcgtctacccctttactccccactccaccgaaaccacccccacttccctttcgccgccttactccggccgaactagccagtcgcagggaacgcggcttatgcttccactgcgacgagaagttcacgagagggcatcgctgcgcctctcggt

SEQ ID NO: 124130 - DNA, 270 bp, Glycine max
gaaaaaggggaagggaaggataggaaagaataggaaggaagaaaaagaaagaagagggagggggggaggagaaaaagggaaagaaaaaaagaggaagagaaggaaaggaagggaaggatggaaaagaagggagagaaggaaagaaagaagaagggggagagagaggaaggaagaggagaaaagaaaaagagaaaggagaggaaaaagagggagagagaaaagagaagaaaagaagggaaggaaaaaaagggaagaaggaaaaaagaagga

SEQ ID NO: 124131 - DNA, 336 bp, Glycine max
gacactaaaaactcagctggaccaatgatttttctctttaccattattcagaaaggggttagcgatacaagctctactcttcgagcggaacaattaacactctatctaaatcctgtgaatacactaaccatcgttgatcatatttttctgcattcggcatcacttcttggtaggtaaaatgaagaaaaaggactatcatgttactctttttatcattatatctatgcggaccattgtcaacaagaaagtctatgaagttaccatcaggactgacccattgacctggatcatcaatattgatagaagctacacttgaaggcccattgagctccctat

SEQ ID NO: 124132 - DNA, 380 bp, Glycine max
  unsure (1)..(380): unsure at all n locations
gaccgcacttaagcacgcgctgcactgagatacaactaaaatgttgtcatgtatttgactattggaaccagaacaatgctttattgtgttcagaagtggaagttaattgtgctaactctccgacacattgaaaaattgggaccaaatctgatatcttctagtactcttgggttttttcaccttacttcgttcaatctgttttangatcctaatgaggaatataaagttacacaaaaggacctttaagatgagctcttttgctgcaattttttattcctggtgtttttaagggttatttaatcatgaccttccagctaatccctgcactaagacatgtacttaagaataattgctacattacaacaaattatcaaatatgt

SEQ ID NO: 124133 - DNA, 353 bp, Glycine max
tgtttctttcaaataatgtaaggattgtggccactgatgtgatgtacttacccaatattatcatggtaatagggtattagtcaagtactcaagtttcgcacattgggacgtcaattatctatccaactaagttgacattgaaattgaaattgagaacttatcttcgtatacctcaattttttagatgtatggacagaaaaaaataaaaagaaaagaaagatagaaacagaataacgtaaaagtgaaaaggaaaagaaagtaatcgaatgtatacaaataatcctaagtgattgataatttgatatgattatgaaaagcgataaaatagaaaaaaagagatgaaaaatgtaaat

SEQ ID NO: 124134 - DNA, 305 bp, Glycine max
  unsure (1)..(305): unsure at all n locations
agctntaatctcatcgtctctcacattctttagattngngagcctatccaatccttgtgttcagattctcagccacttatgatagctcgcgatgatcccattactgcttcccctaagctctctgttctttcttcattgccgcatccatgccttgcgaactccttggagtaccctcgcgttgtggcactgaaaccccgtgcgatgaaaggcgtgatgctttcgtctgatggcactcctctcatggtgtagccaagctgtcttatggcgaggacgggattataattaatacaaccccttgttccatc

SEQ ID NO: 124135 - DNA, 353 bp, Glycine max
ttgtgtaatcgattacactgatttggtaatcgattaccagtgattgtttctgagtaaatcaaaagatgtaactcttcaaatggttttgaatttttcaaattggttttaagtttttcaaaaagttataactcttctaaatggttctcttgaccagacatgaagagtctataaaagcaaggctttgttttgcatttttaaggaatctttctaacaatccaaccaatctattacaatcctttacaagccttgaatctctttgaacttcttcttcttctttgtgccaaaagctttccaaagttttctggttttctaaaccttgaaaacttgtgctattcattcttttcatctcttct

SEQ ID NO: 124136 - DNA, 269 bp, Glycine max
cgcaaaaggggcattgtagagcaattatgacccttccagcaacaaatacgaccctggatggaggaatcaccctcacctcagatggtccagccctcaacaacaacaacaacagtctgctccttccttccaaaatgctgctggcccaagtaaaccatacattcctccacccatccaacaacaacaacgaccccacaaacaacccacgattgaggcccctgcacaaccttcactcgaagaacttgtgaggcaaatgactatgcaaaacatgc

SEQ ID NO: 124137 - DNA, 346 bp, Glycine max
ttagaaatttcttctttctccccatttgtaagcgcacttgtcgtttctgagtctataggttgctcaccatctcttagtggggcaataagggtaaacccatgggatattgatgcactagctgaagcactaaatttggcaatcacaatgcctgatggagagaagcagcttcgacatgaaaagcactatcgatatgttagttctcatgatgtggcatactgggctcgaagcttcgagcaagatctagtgttctcgtgcaaggatcattataataaccgatgctggggctttggctttggcctgaacttcagaattttgtccctatcttctactttcaggaggctatcta

SEQ ID NO: 124138 - DNA, 392 bp, Glycine max
tgcagcttactttcggagtacattattctatggtttttcccttacaccaaaaatctatagcctatagatcacactactctctccatttctatattgcccaatgaagccaacctgtgaaatgttattacattcatcactttcataagaactcaatgaatggtaatatattaagtacaacttattgtaatatattctggcttaatattcatgaatgctacccttattctagtttttataggtactagtggagaccttctattttttattaaatatggaggtaatatattttctataagtgcatctagtataaagaaacaaattctcatctttgaagaaattttttccctaatgacatttttcaatatgattaagaaaaaatgaataatgcatct

SEQ ID NO: 124139 - DNA, 345 bp, Glycine max
tcaattggtagatatgttcaccaatggacttcccacggagcagcttcaagaccttacttgcaagctgggaatgatagatatacattcaccagcttgagggggagtgttgtgatgcattccataattggcacagattttattttgtaattagtaaagattttatttttttattatttgtacagattttgttccattttatttctttccttaattaggtcgttgacagcttataaataagtcttgtattcactctttgaaagacagaattacaataatattcagattattatctttcaagtgatactgttagaattctaatatgggtttttgatagtatgtttggta

SEQ ID NO: 124140 - DNA, 323 bp, Glycine max
ctgttccatatcttgaacatctttattctggacttggcaatgcctatcctttcttataagtgtatcaatctggcttatgtgactaatgcagtatgtactgtataattactatagctccatatctagtataaatatttcatgatacaatctaagctacaattgttgctactgacacttgttgtctcgacaatctcactaacaacgagggatttatacacactacaatgtagccaaattccctttaaaaactttcaaacttagcgatcgacacataaattttgaacaatatacctcatctactgtgtgtaagaatattccttttt

SEQ ID NO: 124141 - DNA, 359 bp, Glycine max
tgagctcgttgctgctgccccatatatcctctctgaacttgttcctactccattcttcctttcgggacctttttgtttcttgctctaatgcttcaaccatggtcatgttgatgtctttcagctcgtcacactgttttctgaccctagcgactgccatcttcaacttctctttcaccactctcgtctttttgagctccgctttcaaaacttgcacttcttcactttcctcgggaatttcatcctccttcccatttagactttttagctttgggggccaatttatctcttgtgttctagtcttcaaccacttgtgatagtcgtctatgacgcagttgctacttcccctaagctccttatct

SEQ ID NO: 124142 - DNA, 360 bp, Glycine max
tgttatacaaggcccatcttggtggttgacctctttctgacatggattgccccctagcggatgacaccacctctcacatattgatccttgactttcgatacatttccctggggttaaatcaccattgagagacctaattgaagctcatatatccatccaccatagaagacccacaagcaaactcccatcaggtggttatcagagctcatgagcttcatgtagggcctccttagacctccattaatccatagatgtacctacggttccatcgaggtgactgcattactctccatgtatatcctcacatgtcttgtgatcaatggcgttaacatgattctttagattgtccaccgattatac

SEQ ID NO: 124143 - DNA, 359 bp, Glycine max
ctggagacttacaaaaaagaaaaatttgttggtttataagatttatgagattgatgttcaagttgaaaaagaggatgcaagtgatgaaatgctcttgagaaaaaaggtgatggtacatgagaactaacgtggactcattgatgcactaaatagcaagatctaaatgggtaagggaaggagatggaaactcaacgttctttcatgcaatggtaaatggtaggagaaggaaaaattttgtaagagatttgattatggatagggtatgggaggataatctgagtatggtgaatcatgaggtaaacaagttcttctaagaaagattcatggagcaagagaggaatatactgactctagatggg

SEQ ID NO: 124144 - DNA, 234 bp, Glycine max
  unsure (1)..(234): unsure at all n locations
ttactcaacagtatttcttcaaacgatcaatgcatanatagctctggtgatgatgaaaattcagaanacttaagcttgatggtgaaaagttgtgaaattatcaaaagatccaaagacagaacattctctacaccttcaaagaagatagaaagtacaacaacaccttcacatgcttcatatgtgggaaggcagggcacatcaaatatgaatgtcctatctaccttagaaaacacc

SEQ ID NO: 124145 - DNA, 353 bp, Glycine max
agctctccaagggctagttttccttttcctttaatgtctaggaatctcgccagatggtggtccttatttttcttggaaggtaccatgggatatggcactttcgtacccttatttgaagctttttctttcctcttttctctttctttttcactcctactctttgcttcatctttattttttcaaatttttctttttctttttttttctgtgtcttttcctacctctatttctctttcttggtcttttaattctttctcttcaaccattatttgtttttccctcctctaactcattgcatctgttaccttattcttctttttaacagtagtgtccttcaaagcaacttgctcctt

SEQ ID NO: 124146 - DNA, 324 bp, Glycine max
tccttttttaattgtggggagaggaagaagagctggtggaataatacatggatacatattcattgtattctacgggggcatcgcctatatggtaaatcaccttgacagtcctagcaaggatatagccacttgcgaagcgaaactcaacccggccacgccatattggcaactcccttaccttaatgaagacatcggttctcttcaatacacttaaactgctaccgttgaattcgtcttttaagaaggcgaaagccatccccatgacatatcgttaacgtccaaccgggcctatgggttgcggataggaaaaacccttgggcctgc

SEQ ID NO: 124147 - DNA, 351 bp, Glycine max
ttgcgattcgttctatgttcccgttttggtccacattgtgtttcgtgcatttttattctcgctttgtttactttttataccccctgttgacgtgcttaagccattttacttaagtcatttcttgcttaacttaaaaataaaataaatttccaccgaacgtttgaattgtattatccgttaacttcggttaaaataaattccgaccgttcggtcgtgccgtaaccacgttggaaatcaaaaaggggtaaaaaataatataataatcaaaaaacatcttttagtaaaataaaacgaaaaatcaatcggacgttttctctttgggatttctcattcttaatcgaattgattaat

SEQ ID NO: 124148 - DNA, 356 bp, Glycine max
tgtccacaaaaataggtttttgatttttgtcatttcaatttctcactaagtaaaatggatcattttcaaggtccaacgccttaaaatgatcacctcttaaagtaaaaaaagaatcacttgataagaaagaactacgtaggtctgatttcctcatcgcaattgaggaatacgtaggagcaaagggaaacacccttgtcgaccacaaaaagagaaaaatataaaaagggtataaaggatataaggacttaaaagggaacataaaaaatcaaggtcatgtttgcacattcgattaaaggctgccgtcccttgggacagacgtgtggggtgctaataccttccccgtgcgtaaatacaac

SEQ ID NO: 124149 - DNA, 353 bp, Glycine max
tcgatggacatagagggtttcgatgtcaaagcttgatttacatatcgaatgtcatccaaatttttgacaagacattgggacttgcatccatattgatatcgtatcctgcttaattatatgcatgagcgtattctgatcatagtgtggtgagtgaatatctcttctcatgcaggtacatgattcctatgtgttgtgagagtgaaatgatgggcagcagcaccaactgagggaagtatatatgcccttccttccgcctgtatcttcgatagtttgggatatataacatattgtatatgtatgagtaatcaatgtgctaactatagaaatagccttccctgccatagatagagttt

SEQ ID NO: 124150 - DNA, 178 bp, Glycine max
agctttacgaaatttacaaaaggttaataatatacgagttaaacaactaaaggcctctataaaaaacaagagctatcccttattctaacttaattgagaaaaaattaaaaatacaaactaaaactttgaaactggtttgatctatagaaaatctactactcccctgtggaaaaaaatt

SEQ ID NO: 124151 - DNA, 359 bp, Glycine max
actcaagcctggtgagggatagatttttaacatttgcaaactttatgaaaagaaatgtgcagctacagagttattactgcccgttctgctcgaatcatgaggaggaagcacacattttttggttgccaaagaataatgccgctatggtgggagagtcttacatggatagaagttgttacaacgttcccggcatcaccaaaggaacactttttacagcattcttactgcaaggcaccagaaattgtccataacagacggcggatttggtgggttgctctcagatgggtgcatttggaatctcagaaacagaattgttttctcaaatgaggagtttaatggacagaaattgatggaggatg

SEQ ID NO: 124152 - DNA, 227 bp, Glycine max
  unsure (1)..(227): unsure at all n locations
cttaagcatatgnggatctaggcttaagcatagttgcctgtcaaatatccttnggtgcatctcanacttgagtcatgaaccaaatgagctaaagttgcattaaagattgagctcattatataaatgagttgaacttcagctgcatataattcgacttggtagattcatgaatagactcgcattatatatatatatatatatatatatatatatatatatacattcaa

SEQ ID NO: 124153 - DNA, 352 bp, Glycine max
tgacagcggtcgcgaatgatagcatttaaacttttgacaaacatattctgactgcacgaaaaagaacaatctagtcaacaataaactgactaggagggagtggttaaatagagagtaatcacgtcacatcattggctccaaaatagtgttttactaaagtgcacgtatattgagtatgctttccttcgtgatcctcatagcacaaggtaaaacctccatatctaacctagggtaaaatagaaggccatactaagatatatgctcatcattagccatcctttctaaatgataaaatgaagggataagacaaaaaattcttcttgatcaagtttaattttccttccctttagta

SEQ ID NO: 124154 - DNA, 290 bp, Glycine max
  unsure (1)..(290): unsure at all n locations
agcacgagctcactttagccggtttataaagtaacgttttatatcaagagatattcgagacttgggttggacgacatcnctnctgattccagctgggaaaatggcgagtggaggaacgccccggcatttgcgcaacaagcataatgaaaccttaccgtttaaaagcatatagttggcctangcttagagtnttcctcttgtaaggcttgtgtctttcgttatgaatttatatacaaagatctngcttatctgtcctggcttaccattctcatcattgcatgttactcttt

SEQ ID NO: 124155 - DNA, 340 bp, Glycine max
tcggttttatatttctagcgtctctatatattacgggattcattcagacatccgagtaaaaagttattgtcgtttgaatttgttcagagcttttgtttcgattttgactgtctcgatatattacgagactcaatcggacatccaagtaaaaagttattgtcgttagaatttgctgcgagcatccgttttcaattacgagcaactcattatattacacgactcaatcggacatccgagaaaaaagttatcgtcgctagaatttgctcagagcttacgttttcaaataggagcatctcgatacgttacgggattcattcggacatccgagtaaaaagctatt

SEQ ID NO: 124156 - DNA, 353 bp, Glycine max
tcaagcttcaacatctgaccacttccagagttttggaactacttcacatggacttgatggggcctatgcaagttgaaagccttggaggaaagaggtatgcctatgttgttgtggatgatttctccagatttacctgggtcaactttatcagagagaaatcagaaacctttgaagtattcaaagagttgagtctaagacttcaaagagaaaaggactgtgtcatcaagagaatcaggagtgaccatggcagagagtttgaaaacagcaggttcactgaattctgcacatctgaaggcatcactcatgagttctctgcagccattacaccacaacagaatggcatagttgaaagg

SEQ ID NO: 124157 - DNA, 357 bp, Glycine max
tgcttgtggagcttctatggaggctgtatctttgagcttcaatgaggtccttcaatggtgattttacaccatggagatgcagcggaaggcaaaggagaaaaggagaggggagacaccatccactagggaataagccaaggaagaaggagcttcaccaccaataattgccttggataagaagcttgaagaggatgctttaatggaggaaaagaaagagagaaggggggagcacgaaattgaaggaataaaagagggagagaagtggaactttgaagtgtgtctcataagactttcattcatcaaagttacaacaagtgctacacatgcttctatttatagactaggtaagaatctttc

SEQ ID NO: 124158 - DNA, 362 bp, Glycine max
tcagcttgaacacacattgtatgcagaaatctaaacccattcatatgttgaatttgattctagcaggtgctattaacttggttagttggtttgaaagctgcttgctatatcttagaactatcttttctaaatattgttgaaagttgaaacttgtgcttttggtcttgttttccttgtagcagttgctttctttttgtggttgtcaggtggcacttctcagaatcatttgttttttgacttgcagtttaccggatttatacctccattcttttccacggttcactgcttcatgttgtcttcaacatgatggctttagttcccttgggctctgagctggagaggatcatgggctcagttcgctt

SEQ ID NO: 124159 - DNA, 97 bp, Glycine max
tattacggatgatacaacacaacaaataatcaaacatcgaacattagtgcttataattatttagatatatatatcaggggtgttacactcgttatat

SEQ ID NO: 124160 - DNA, 359 bp, Glycine max
ttcaccagatcatataagataaatgtgttcatgcaatctgtagatatatcctctcaaacgtcaaattctttgcctatatattcaacctttccatcactggcacgtggagtgaatcttcctccatggtgcaatattaaagttatattgtcattcattctacacaatcagaaaccacaaacattgtcatatattaggaaatgaaaaacctaactcaaacataggcacatcacacaacaaaatgcaatgtcatctataaaaacagagcatcataaatcaaaataataaattaccataaacctcactgcgaagcgcgaagacaatgcaaatgaaaacccttcaacatataaaaccccaaatga

SEQ ID NO: 124161 - DNA, 131 bp, Glycine max
  unsure (1)..(131): unsure at all n locations
tacacaagnactaaaantagtaaagttaacattcctaagaatttcttcctctactagtctcttaattcttcaagagaaatgtgccctctatgcttatgtcgaaacgtacaccatatttcattcataatact

SEQ ID NO: 124162 - DNA, 368 bp, Glycine max
atagacaactcaagctttgccaccactttgtaaatacatcctacaagggatattggtctaaattcccccaagtccataggattttcttttttggatattaaagcaataaaagatacattttcctcctctagggaacactccattcgcatggaactcttgtcccatccttacaaaattaccctttacaacatgccaaaatttcttgaagttgaaatcgtatccatccagtcccggacatttatctccatcacaatcccacaccgttttcttgatttcctcttccaaaaggaagctattagactagcattgtcttcttcatcaatggagttgaatggaaccccatcaaattttgggatacacacctcctc

SEQ ID NO: 124163 - DNA, 299 bp, Glycine max
ttacgatgaaccgtgaagagtgactagctacaaatcggattcccgtgttaggcttactcatgaaacactaggggcattattgcctggaactaattataactatgataaagataaacttggaaaacttcctgaatgtcaatagaataaccatatacaagatagtgaagtagagcttcacctccaccaataacaacaagcttcatcaatccaccgggagaatattccttgtaacatttcaatatttgctcccgcaaattaataccctactccattgcataaacacaactctttttattccc

SEQ ID NO: 124164 - DNA, 354 bp, Glycine max
  unsure (1)..(354): unsure at all n locations
acccacaagctcgcttgcggagactagaaggaggctttttctttttacnccttattcagggccgctatggtgattttacttaatggagatgcaactgtaggctaaggaaaaaaggagaggggagacaccattctctatggaataatccaaggaagatggagctttccccccaataattggcttggagcagaagtcttgtagaggatgctttaatggccgaacataaagagagaaggggggagcacgaaattgaaggaattaaagagggagacaagtggaactttgaagtgcgtcttataagaccttcattcattacagtgacaaacaagtgctacacatgcttctatttataga

SEQ ID NO: 124165 - DNA, 238 bp, Glycine max
  unsure (1)..(238): unsure at all n locations
tatgcaagnngaaagcctaggagganagaggtatgcctatgttcgtgtggatgatntctccagaattacctgtgtcaactttatcagaagaaaatcagacacctnttaagtattcaaggagttgagtctaacacttcaaagagaataagactgtgtcatcaagagaatcaggagtgaccatggcagagagtntgaatacaacaacgtntactgaatactgcacatctgaaggcatcac

SEQ ID NO: 124166 - DNA, 353 bp, Glycine max
tctcttgggaagataccttaagaagttagagcttaactacacagacctctgtaatagctaagctcacctccttgagatgagaagccagaacttaactacacaccccgtatggtagctaatctcacccccatgacaataaaacatgaaactacaataaacaagttcttactaccaagactactccaaacgcccccaaatacaaggctaagaccctatgctactagaagggccgatatacaaggcccaaacgaatgaaaaacctatactaagatttacaaagataagcgggcttatgcttaacccatgggctcggaatctaccctaaggctcatgagaaccctatggccttccct

SEQ ID NO: 124167 - DNA, 454 bp, Glycine max
aagcgactgggctgcagctctatttagatatgataataattgtggcaccttatggactcctaagacatagcatattcttgcctgaatgttggagtggaacctcttctaatcaatcctgcctcattgagcatataccagagctcccactggagcataatcatccctctcatgtgctaatcctcgaaatatgcaaagagtgctatgtaacaagggctagattctaagaagggagtgaattagaaactaactttctaataaaatcttatgatctaccaatccagatccttcaaagactctaatatatgcaatatctactaaagagcatagcataacataagagttatgaaaaaatgaactagatatctgttagctacctatcctctcagcccagcacctgtgaagtcacttttgcaaccttcagtctaacccatgcacctcttggtcaatgttcaca

SEQ ID NO: 124168 - DNA, 345 bp, Glycine max
tcttattttcagcagataaagatgtatctgtggccacatcatggactcctctaaggacaataacatcatttcttgcactgaattgttgggagttggaagcatcaatcatattcctctctatgttgctaagtccctcatagaaatattgtagaaggagttgctcagaaatctggtggtgaggacagcttgcacacaatttcttgaatctttcccagtactcatacaagctctctccaataagttgcctaatgcctgaaatatcttttctgatggcagtggtcctagatgtagggaagaatttctccaagaacaccctcttaaggtcatcccagctggtaatggacc

SEQ ID NO: 124169 - DNA, 244 bp, Glycine max
tagtcaattggctcctttggcaagttagatccatgtctatccacacccctatatataacaagataactttcgtaaaaatctttacgaatgaagataccgctccaaatatttaaacctcccacataattactaatactatacagagatatatatccaagtgataccagggcgtgcaaccctcttactgtgaggacaagcttacgtatgcaagcgaagggacctgaccgtatgtaagcgagggcga

SEQ ID NO: 124170 - DNA, 313 bp, Glycine max
  unsure (1)..(313): unsure at all n locations
agcacctgaggctgcagctctaccaatgactacctgactagatccttgatattccttttgagccttgttccctttccttggggngaagctcactacaagccttaagtgaataaccatgatatcaccatatccttaaggaattntggagctttggaattgtttaggaataagtgtgggggtttttgttcattggataacatagttctgttgccttgcttcatgatatatattgagccatacttgatgcacattgcctattggtaaatgtggacatgcttaagagatgctgttttcaatgctctcacaaaatata

SEQ ID NO: 124171 - DNA, 356 bp, Glycine max
tgtaggctacatttacaaccatacattggctttgaacaccatgaggaaattcacacaaaaaaactgaattggagagacacggaattacaagatttgctaccactttcttaactttgcaaagattgcataagaaaaagcccaatcttagaaggatgttaacttcggatgaatggttgaagtctaaggtgttggatcaagtggcctcggaataattaagaaggggggggggggtgaattaattattaatgaacctttactaattaaaaaacttatccttcttaatgttactagattcaattatgcttttactactaagtctagaaagtccagaacagaaatataaacttaatcaaaag

SEQ ID NO: 124172 - DNA, 359 bp, Glycine max
taggtacccctcaccttcaagctttataaactcttatcagacactatcaatacacaatttgggacatggatttttcctgctacgtagttatggttaaatggagagatataaattggaaaaaaaccttagagccatgtgtatgtttcagggaagagcattatatgcagctgaagcagaccgacttcgtaattgggccgaagatcgagcccggttttctttcactgatgcaatggaaatgtacacagagaacacctggttatcagtcttctcactttcagttgtctgtgccttcataattctttccagcacaggcagcaatttgcctggaacatgacgatgtattgctgccaatgcaaaaa

SEQ ID NO: 124173 - DNA, 256 bp, Glycine max
tacaatgatcttattactcttcaaggttctcttttaaagcattcgacgctcatggtttgttttatctttttacatattaaaaaaatgtttgattttatttatcccatctgatactaaaatacatttctagacaattataaacttttatatctgaagtattatcatcactattatataaatacttatgtctaattacataatcaaacatatttattctatatttattagtaactgtggatacctaattgtattcaaa

SEQ ID NO: 124174 - DNA, 354 bp, Glycine max
taacctcattgtctctcacaatctttagattttggagcctttccaatccttgtgtccgtactctcagccacttatgatagccgccgatgatcccattactgctgcccctaagctctctgtcttttcttcacaccgcattacatgccttgtgaactccttggagtaccctggcattgtgggcactgaaaccctcttcgatgaaaggcgtgatgctctcgtctgatggcactcctgtcatgggacatccttcgcatgaagatagatatctgtatcattcttccttgtcgcgagggaaccaattaacaaatcgcccctccatgctagccaatagttggttcctattcgtcttttcta

SEQ ID NO: 124175 - DNA, 459 bp, Glycine max
  unsure (1)..(459): unsure at all n locations
gatctgcggaccaaactcaggttaagttagtctaaacctaagagggctgtctaaatcgggtgtagtcttacatgagggatctacggacgaagctcggatattcatcctgacgagggattgtggggttagttatttatactacaacatagaacacaagagcacgattgattatagaaatatatctctatgcatcatcttgttcgttagaaagacccaacatatctacctactgcctatcatttatttaccttgcattntatanngtttagcatacaagtttagtntagaattctgtttgaaattatcgcttatacatgttctctcaacaatgctctcgatctgaacttaatttatgctacattagtttcctgagttcgatactctgattcgttcgtttaaatttaatacttgcnacccgatgtgcttctggtaactcncactgaatttctctacacataa

SEQ ID NO: 124176 - DNA, 359 bp, Glycine max
tcagactaaagcaacacaaaatctttgtatcctaaacccctcaatttaatggattttcaaggtttgagaagtgaaattgagaatggggtaaatttggagcaaactctcacctcacacaagtctataacatcaatttaaacttgttcaaattggatttacacctaaaattccaccgaaccaaaatttgactcctcaacacccaattttaccctagaaatggctctttgttcactttggtcatttgtttttctctcttgcacagcccaagcttcctcataagtcctaaatgacatttcaaactaggattaactcactttaacctccaaataccactaaatccagatttggccttccaactc

SEQ ID NO: 124177 - DNA, 174 bp, Glycine max
  unsure (1)..(174): unsure at all n locations
gcgatgcttctnttcatgtctgcctgagtgggcttatagcctataccatacttnccacgattagcctgggtatttatcagtctagttattgctgcgtgtgtttttcctaaacccattccgggctcataaccgttcctcaacataactacggccatcattaccgctgcatcggac

SEQ ID NO: 124178 - DNA, 361 bp, Glycine max
ctaagcttcttataagctgaaccattttatttattaagacaagttgagttttattcagaaaattagagtttatctcttttatcttagtgagagtgattctcctaaattcttgagtgattcaagaacaccttggctgtatcaaaggactttcacaacctttgtgtgttgccctcgttggaaagagtgattctttccttcctttcatcatcacccttgttctttcaaaccacaattccagaaaatccacctctgcccagaattatctcgtggccataactcccattttacgcactcaaattaagtgattcttgagcctaaattgaatttcaaaacgagaccattcacctcgttttggaatcac

SEQ ID NO: 124179 - DNA, 324 bp, Glycine max
tcctaagaccacaggagaggggtacccgagaatgcgaccggcatgagatgaggaactgtagaagggtgaaacttcctgccttggcagagaaccacaaagagaaaccgggagatcagacgggagggacatgagaccgaggggacgacacgcggggtgctagagcccaaaatcaagcctgaccaaacccgaccgaggccgggcataggcggacagagagaacctgtgaagcacctaagcaagcgagctccgggcgggccacagataaaaggaaaaccacaccccaaagcaaggaggcttgaggaggctggccagctgcgaatgcag

SEQ ID NO: 124180 - DNA, 351 bp, Glycine max
tttcactcggatgtcctattcatgttcataatatatcgagacgttcgaaattgaacaatggaagctctcgagcaattcaaatgggcataacttttcactaggatgtccgattcaggcacataatatatcgagacgctcgaaattgaacaaccgaagctttcgagaaattcaaatggtcataatttttcactcggaagttcgattcaggcgcataatatatcgagacgctcgaaattgaacaacggaagctttcgagaaattcaaatggtcataatttttcactcggaagtctgattcaggtgcataatatatcgacacgctcgaaattgaacaacggaagctctcgagaaa

SEQ ID NO: 124181 - DNA, 350 bp, Glycine max
ttaaaagttgatgacttttgttttgactatgttctcttacaaatttaaaattgtggaaaatgatgtcacaattcatctacaagtaagactctttggtggtgtggtgtctttttaagttgcaattatagagtgcaagactgcaaagtaactacaatagcttatgagtttggtttattcttattatcttacaagcatgttgaagtccctggtcacaattactatattcttgatgattgtctgtgctcaagatggtctgagtgataataccatttttgacggaaagaaaactgtgcgtgtctataatgggatgaatgatggcattcttgtgtatctccattgtcgatcaaggg

SEQ ID NO: 124182 - DNA, 568 bp, Glycine max
  unsure (1)..(568): unsure at all n locations
cgccatctcagagtcacctgangcatgcagctgangatatanggacacatacatgtttactatgtgttgtgtcggctatgtgtgcacaacaagtttncacatncacaaagcgcgcatatacccaccatactctgttgtccacctccaactgagctcacgtactcccacgtagtccatatacatcgtcctctcaacactgggtccacatcaatccttccaagctttcccaacatccaagtgatataacattctgacagcacacattatcacagccaagcaaaatatggcagaggcagataactctgcccaatacaccaaccataatcacagctgttctcactaaagaccccagtaatgatttcttcgttcaattcgtaaccggtggatcgactcaaaatttactggaagtcttagtacttaacctacattgnaccgttgggatctactacaacatccaaactcatactgtcttctctttcacagacaccacacacagcattttctgacaaagcanatgtgctgacctactgacacatattctgcatagtgcaattcgaaatacacttct

SEQ ID NO: 124183 - DNA, 351 bp, Glycine max
tttttcggagggcttgttcctcttttccttcttctaaagcttcaacctccacctctttagtggctctcaacctcgggagccaatccagaccttatgcgtaggctttcaaccatctacggtagccaccgacggccctgttgctacttcccctgagttccttgtccttctttggcaccatttcccatgccttgttgaccccctgaagcacccccgcgttggggctattgaaacctcgtgcaataaaaggtgtgaggccttcctctgatggtgcccccctcatggggtagccaagttgccttatggcgaggacgagattataattaatgcaacccctcgtccccatcaaggaaa

SEQ ID NO: 124184 - DNA, 388 bp, Glycine max
  unsure (1)..(388): unsure at all n locations
cctgactcaccatanaccttgacccattgtgagaatgcttatccttaccctcggaagcanaaaaagaatagaggtgaaatttccgatcaaagaaaaagagaaggaaaatttccaatgaaagcataaaagatatgaaggaaaattcctcaatcaaagagtgggagaaagcaaataaaggaaaagaaggataaatcctcaatcaaagagtgcgagatagcataaagaatagaaaggaatattcccaatcaaagaatgggagaacagtaaaacgaagataaaaatgaaagacagctctgatcatgatcgaaagaaccaatagaatgtgcgagaggtctttggaccgacaatatctgaacagtacagaattgtcaccaaatgaacgaaaaag

SEQ ID NO: 124185 - DNA, 352 bp, Glycine max
tcaagaatcaagatcaagattcatgtattaagaatcaagagaagacttaatcaagataagtatgaaaaggatttttcaaaaactgagtagcacatggattttacacaaaaacatgtttaccaaagagtttttactctctggtaatcgattaccagatagctgtaatcgattaccagtagcaaaatttttttgaaaaagttttcaaattcaatttacaacgttccaattaatttcaaaaagctgtaatcggttacaatgttttggtaatcgattaccagtgcctttgaacgttgaaattcaaattcaaaagtgaagagtcacatcttttcacataaaagctttgtgtaatcga

SEQ ID NO: 124186 - DNA, 343 bp, Glycine max
tgtagtgggagatgttttccgcactccgacaaatcctgctgtgttgtgtgtgatggttggggatggagttcagattcttgggatgtctgttgtgacgatattgcttgctgcacttggattcatgtcaccggcatctcggggaacactgatcacaggtatgctggttttctatatgatacttggtattgctgctggttatgtctcagttcggatgtggaggacaatcacctttggcgaacagaaaggctgggtgtcaattgcatggaaagctgcgcgtttcttcccaggcatttcctttttgatcctcacaaccttgaacttcctatcgtggggaagccacagc

SEQ ID NO: 124187 - DNA, 217 bp, Glycine max
  unsure (1)..(217): unsure at all n locations
gtgatattattgaccagccctccgaaaccttctaccgagatgtcttgggccacatgggcctcattcanaacttttactagcagagcccgatgaggctcggagctcatgagtaactccaacacngagacccttgccgggagtnttgtgagctgttcgataaccttgaattcactctgcttgaatatacggaggaactcgctggcttcctctagcgaca

SEQ ID NO: 124188 - DNA, 345 bp, Glycine max
tcatgatgatgaatcaagttgattttagaagttttgataatgacaaagatgatgacaaaaagaccaaagaatgatttcaagattaggtcaacaagttcaagataagagaagaagaattcaagtttcaagagaagaaatcaagaagacttcacaagggaagtattgaaaagatttttcaaaaaacaaacatagcacaattttgttttttcaaaagaattttttctcaaaattttctaagttaccacagtttttactctctggtaatcgattaccagtttcctgtaatcgattaccagtggcaaagtttgatttcaaaagcttttaactgaatttacagcgttccaa

SEQ ID NO: 124189 - DNA, 361 bp, Glycine max
tttacatgcatgttcacaccatatttactatacttcgatcaactgatgcaatctatttgattgaaaagataatttatattactcttctaatgtagtcgacaactaaaaaaaaatataacagaaagtaatgcttaggccaatctaatcaagtcattttgaatctcgtcattactatcatgcatctcaaagagaaggagaatcaggcatcgtaatacatagcacaacaaaacattaaaagaaaacatgccttccaaagccaaccaaggttaaaatgtattcatatttggtgaactttttcaaaataataacacatatatataaacatggtggaacaatctgaccacatgcacaacacattcca

SEQ ID NO: 124190 - DNA, 79 bp, Glycine max
ctatggatcaaatacgtgttctcgtcttgaaccatgaattgtctcgagataagaccctttgagtttgtcttgtattttt

SEQ ID NO: 124191 - DNA, 356 bp, Glycine max
ccaccggatgatgccgatcgaacatttcctaatttacatcatccaattgttattcagggattgaatagaataaacaatggccggtgtcggtcgttatatggccccgactgatatctttcagccgacattgcgcaatttcttttacaaacgctggccgataatgtttttttatttacggtagaggaagttttttgttttggtgttgcctaaaaaatttacaacgtaggacggctaggtttttccgtgcgagctcaaccgagggttcgttcccaccgacattggcatgttgttcttctcatttaggaggataagaaaacgttcgcccaccccggcaaaaacaaaaaaaaaaacattat

SEQ ID NO: 124192 - DNA, 316 bp, Glycine max
  unsure (1)..(316): unsure at all n locations
gcatcttaagcacctgcagctgcagcttgtgcatatagttatagatatgactgtatcangacttccttctatacanaccacaatctcctcctacgtatgaccctctatntactattcctttgtcattgttntatagtggtctaaatcatacaagcttcacatagcttacanaattgaggtaaagaatgggaggaaaaataaaatcataagattaaggaagaaaacacacattatcttatttgacctttctttntttattccctgttagagttatattttgacaaatatcatagagatactacactcgaactgtaat

SEQ ID NO: 124193 - DNA, 355 bp, Glycine max
tgttacagaacttaggaaaaatcaataacaagcttgttcgctcatcgttcgcgtgtatgatattcactcgacaaggtttgaagtagaggagaccttcaatcctataacgcaacgtggcggacaaaaatgggcagttaacttgaatggccattactgtcaatgcggaaggtattctgcgcttcactatccatgttcacacattattgcagcttgtggttacgtgagcatgaactactaccaatatatagatgttgtttacaccaatgagcacatcttaaaagcatactccgcacagtggtggcctcttgggaatgaagcggcaattcctccttctgatgaggcatggacactaatc

SEQ ID NO: 124194 - DNA, 100 bp, Glycine max
atatatctgatcattgtccaaccattctgcacactaacatggtggactggtgtcctaagccctttatgagttttgattggtggctgcagcagaaagagta

SEQ ID NO: 124195 - DNA, 358 bp, Glycine max
tagtccacatttttatggtccttacctaatcacaaaacagattggggcagttgcttttgagttagtccttccaccggagagtaaaatccacccggtattccatgtttctttactcaagaaggctctttccccttcagcgaatcctcaacctttaccacctatgttattggaggagttggagttgcaggtaacaccggctgctgtaaaagcggtgcgtaacactgctacagggattgccgaggtgcttattcaatggactgacctcccaaactttgaagccacttgggaactagtagacaccatcatgcaccaatttccttcttttcaccttgaggacaaggtgactcttttggggggg

SEQ ID NO: 124196 - DNA, 112 bp, Glycine max
ctcctccttatttcatcgggaaccagaagctgtcgcctctatccaccaaggttggcccaactacttatttctttcacacgagcgaggttcggacggcatgatcctttgtctg

SEQ ID NO: 124197 - DNA, 352 bp, Glycine max
  unsure (1)..(352): unsure at all n locations
gagatgaggaagcgttgaagggtgtaactncctgtttttattgacgaccacagagtggtacctggagatatgtcgggggggtcaggaaaccttggggacttgaggtggggcgctattgcccaaaaccaagcttgaccaatcccgacccaacccgggcatagtcggtcagtgagaacctgtgatgtacctaagcaggcgagctcctggcagtcaacagataaaaggaaaacaagaccacaaagcacggaggcttgtggtggctggccagctgtgaattttgtgtaatatgtgagatatggcctctggtaatcgattaccaagggtgggtaatcgattacaaggcttaaaaatg

SEQ ID NO: 124198 - DNA, 340 bp, Glycine max
tctagccgaatggactttccttgattttattcctttgatagcccttttgagccttgtttccctttccttgttttgaagctcactacaagccttaagtgaaaaaccatgatattaccatatccttaaggaattttggagctttggaattgttttgggaataagtgtggggggtttttgtttcattggacaacttgttttgttggctatgcttcatgatgtattttgggccatacttgatgtacattgtatattggttaaatgttggacatgctgaatgaaatgttgttttctcaaagctaaagagttaaaaaaacatggatgaacaattttccaaaaaaaa

SEQ ID NO: 124199 - DNA, 241 bp, Glycine max
  unsure (1)..(241): unsure at all n locations
ctctgattagtggaattnttgtatatatcatgtattacctcataatagaagttaatagtgtgaagatgagaatgagggccgatgaaaatatctagttatataacattgctttatgtgcatatcttcaactcttgaaattgatacattaaaggtcacatagatgatggatgagtattctccttcaaaggaagatgcaattttgcagaatgaaatgccaacaaactcttatatctttgttatt

SEQ ID NO: 124200 - DNA, 353 bp, Glycine max
ttagatgtgtcagaataccctaagttgatccctttatccaccattgaatcaaactttgtgagttgatctatagtgttaaggataaaacacttacatccaaatggatgaaagtatgaaataatgtgtcttcttcctttccatagttcataaggagtcttttttatcattggtcttatcaatattttgttttgaacaaagcaagttgtgaaaagaatggtcctagccttttcttgcaaagttctatttttcctttcaactaccctattttcttgaggggttctcggttaagacaagttatgaaaaataccattcctttcacaaaaatggttttaacttagtattctcaaacttag

SEQ ID NO: 124201 - DNA, 416 bp, Glycine max
  unsure (1)..(416): unsure at all n locations
ctgcagctgtgagatctcagcttcatttatatangttctgaaaaggccgttgacctttatgttgggacaaactaataagagtcaagcgaagcatttttccctgtctgggctgatatgtcagaatgaaacttgaaccgacatcaaatagacattgttcttgctgattgcatactaaatacttccctcttgtcctggtgctgtgatattaaggatctggtcctttgcaactctacacaacattatattcctcctaagtgttttataagatgcataaatttatacacaaacatgtcttatggtatatgggcaaagtcaattcgatctaaattatcatgtctaatattatttacaaccaacattagattgacagtgttgattcaataatataaatattaaacagctggaatccgactttt

SEQ ID NO: 124202 - DNA, 354 bp, Glycine max
gcttatgcaacagcttctatgtctcactcgcatcatattatcattattatttccacacacagaatagaaagtggcgcataccatattaccattccaagcgaaattgcaaaaagaagaataagcctccaccagccagaaaagtcacgatcatatattttgaaagttcaacttcatatatgaaattttaaaagagagagagagcaaactcagggaaactatcatgtctagaaaatgcatgctcattatcagaggaaggaaacgaacaaccatagatatggagctagggctgacctaatgtcaaatgagatttaaaataaattttaaggtaaaaattttatttttaataaaaaatag

SEQ ID NO: 124203 - DNA, 221 bp, Glycine max
  unsure (1)..(221): unsure at all n locations
attgtaacatcatatataaaaccagaacttaatccggagatccctcattaaagagtaagtttcaatcctacatcaatcaagcnctaacgcagcaattcattctccaatgctgaagtctcctaactatgcacacaaatgggtgatcagaccatgagcatatataatttatactctcgaagaagcattgcacactagaaacagtatcaattacatattaaagt

SEQ ID NO: 124204 - DNA, 351 bp, Glycine max
taatccaccgccactctatctaatttatgaaaatttattaatttaatacatactatgctaatcatataacagtgaatttgagattcacattacctcgtaaccaacagttacgatggtctccgattaactcttgttgcaatgaagggcatgtgataccatgcccaagattgcaacaatgacgtacaactgcccatggttttggcatcagggtcagtggtcctacacatttccctgtacaccgttgctagacaagtagagccccaactataccgcctgactcgttcaagaccagccagcacagtgaggtacaccaaatgaacctgatttcccatcttgtctggcattaaaacc

SEQ ID NO: 124205 - DNA, 220 bp, Glycine max
  unsure (1)..(220): unsure at all n locations
aatctgcntgcgatagacatctctatactcctgcactaagggttgaacactaggagatacatacatagctaactgattagaattatcactctcactctactgtgtaacactaacatatctcaagtctatcactcttactttatctattccattgtggtgcctcactaaacgctctctcttgatctgtgttttctctctatctgattgggttatcacacac

SEQ ID NO: 124206 - DNA, 353 bp, Glycine max
tggttttgggcaatagcaccccattttacgtcttcaaggtctcctgacccccgcgacatatctccaggtaccactctgtggtcaacaataaaagcaggaagtttcacccttcaacacttcctcatctcaagcttgtaggattatggggtacccatcacatgtggtactaggtggcggtcgggcgatggtgcacaacaagttttccacatccacaaagtgcgcataaacccaccatcccctgttgcccacctccaactgagctcacgtcctcccacgtagcccatatcctcatttctttcaacaccgggtccccatcaatcctcccaagctttcccaacatcaaagcaaaacaa

SEQ ID NO: 124207 - DNA, 259 bp, Glycine max
  unsure (1)..(259): unsure at all n locations
tatgctacttctaccatgtacatatgactttataaaacagatctaagaaacagttatatgtctcccatacctatacaatctaaacacaataaaagttatactacaccccttcattagttngtggaaaatttgttacttaaaaacataaatgttttaaatacacaactatagaatctatctcttatgtatatggttgcatcatcactcattaagactatcttagaatatatttgcatagactcacaattttctatgctta

SEQ ID NO: 124208 - DNA, 355 bp, Glycine max
gtgacctatgactctaagcttagcattcattttaaaactattatgctgatgacgtactcaacaattcacaaataagttgatcctaactatatgcaatgatgaataaaaataaaaagagctgggttgcctcctagtaagggctcgtttaacatcattagcttgacgcatattacctcatgtgtcttgtaaatgatgaacggtggttgacttctcaatacttcctctatggtaaagcttcaacctctgaccatttactacccatgtcctatctagagtctctgactgaggatcaaacaattctactgctctatacggcttgacttccttgactgtaaatggttcagaccatttagat

SEQ ID NO: 124209 - DNA, 342 bp, Glycine max
tgagttctttgttgctaccccatatatctccgcgaaatttgatgcggccatactcttacttgcgagccttcttggtctcttgttcaagggctcttgcggtagtcacattctcttcccgtaatccggcacactccttctagatgtgtgtagcggccaacttgaacttctccttggcaagtttcgcctttcctaactcgcttttgagagcttggacttcctcgtgctcttccggtgctttcaaactctctttgctgacgacttttaacttggcgagccaatccaaacctcgtatatgaactttcagccattcatggtaaccaccaatggcgccattatgaatgc

SEQ ID NO: 124210 - DNA, 375 bp, Glycine max
  unsure (1)..(375): unsure at all n locations
tatatactactcaagcttgggactgcattggggcatctattttgactnttctatgctgtctctacatacacaaaatagccccaccatcccaattttgcaaaatcatattcattcatcattggggcatttcaccgagcacttggtaagcgcatgtttgaacataaattgcaagaggatggggacaatgtggcatgccccattgcttcagaatacaacctaggcctaaggccttctcatccaaatcctcaacccaagaaaacaaggatcaaagcaaaccaaaactgcctcacaaatataagcatgttctcacaatttagagtaccaaaagatgaagaaaacacatcaatgggaagcgaaaaacatcaaggatggaat

SEQ ID NO: 124211 - DNA, 330 bp, Glycine max
  unsure (1)..(330): unsure at all n locations
ngtgcatccaataccatgatgaggatttcccatatgttcttttaactggactaatccatttgcttccaaagtttcatggccttgcaggtgaagacccacacaaacatctgaaagaattccatattgtctgctccaccatgaaacccccagatgtctatgaggatcacatatttctgaaggcctttactcattctttggagggagtggcaaaggattggctttattaccttgctccacggtccatcacgagttgggatgacctcaagagagtattcttagaaaaaattttcctgctttcaggaccacacctcaaaaaggatttttcagctt

SEQ ID NO: 124212 - DNA, 56 bp, Glycine max
acagcacacccaccgaagaggggccaccagggaaaaaaaaggaaagcggcgaacag

SEQ ID NO: 124213 - DNA, 349 bp, Glycine max
ttgcccacctatgagatgcaatcgtttattctctcttcctcgacgtgcgaggccaacaataaaaaaatgttgagcctttgtgtgggggggacgaggaggtttctaagaaagtccattctatagcttgggactagttgtgtaaaccaaaatgagctattgggttgggtctaaggtcaactaaatctactaataaagccttccttcttaaaattggctagaaattgatcgatagaagacactttctttaggcatcagttgctagatcaaagtacaagtgtggaccagattagatacccattgaggataagaaaaaaatagtctctaatttctggccgggggtctctaagaa

SEQ ID NO: 124214 - DNA, 305 bp, Glycine max
attcaagacttcaagatcaagcatcacgaatccaatgcaagatttaagagtcgggagaagaaatctagaagcatcacgtcaagactgcacgcatgataagggtgaaaagattatttgcggaactaagtggtatactttcgattgacaacaaaatgttctcaagttttctaaggttcccaagcgattactctctggtgatggattaccacttatgagtaatcgattaccactgaccaactaggtttccaaaatgttgtcaaatggttcgcatcgttccagaatgattttcaacagcgtaatcgatt

SEQ ID NO: 124215 - DNA, 340 bp, Glycine max
  unsure (1)..(340): unsure at all n locations
tgcactattggtttcacgagcactatggttgagctatttgataaaagataagagaacagatacagcatacctgtctgtactattacccgaagatttacaaaaaaccatcaagcaaacaggtaataatactcttcgacatcagaggacctgcctgaactagttatgaaaagcaacaccttagtatgtctccccgacaaatcaaaatggttttctaccaagtcgcttatattaaatttatttttatctgccaatctactggaagtgacgacccatctattccaatgagatcaccaatctattctantctataatcggagcacatcggtaatcacatattttt

SEQ ID NO: 124216 - DNA, 356 bp, Glycine max
aagcttttcaggatgttgtgtttttgtttgtcctgaaaatgtagttcatatagtaactgacaatgttgccaattgtgtttctactagtaggttactggaaaaaagtttcctaaattgttttggtctccttgtgtagcacattgcatcaatttgatgttgcaagacatgggaaaaatggagggagttagtgaggttgtgtcacatgccttaaaaatgactaaatatatttataattattgctatgcttttttttatgagaaagtatacaattggaagggaaatactccatccttctcctactcgctttactactaatttcattgctttgcagagtattttggctcaaaaagatatat

SEQ ID NO: 124217 - DNA, 350 bp, Glycine max
tgaggaattttagggatctgctttttatgctgctatcattttcagactacacatgtgtgccagcttagaagtaagggatgagtttatcgcaattggaaatggggttagaatgaacatgtgtaggaatccttaggagatcaaattggggtttatcttggaatttttattttattataattttttcatgtattattataattgcgagattgttatattgggatcatgaaattgtgattgaaattatatgtaagtgataaattgaatatgtgatgaattgtgagataacatgttgcattgagatcataatattgttattgagattgagtataagtgcaaatttgaacatatgt

SEQ ID NO: 124218 - DNA, 349 bp, Glycine max
tgaaggtgtgtcgcctttcatcttttcatagtagaatactggtgatgtgtctactatcattgtcatcattttttctctgtcattgaggtgccacttgagctgccaagtctatccacctttgggcgtattcttttgaaagatttgtgccccctttttgcacatgttctatagttgcatcctatccgaagacattatactgacactgcctaacgaaagcaaccactaggtccttccaagaatggactctggaaggttccaagttagtgtaccaggtaataactaccccagtaagactttcttggaaggaatgtatcagcaattcctcatcttttgcgtatgcccccgtctt

SEQ ID NO: 124219 - DNA, 362 bp, Glycine max
atacataagcctgagtgggatttccccatttatattattactatttagttccatgtcattgataagaaaaatgtttatagttgggcagagaaaaaagtctaatgaatgactaataatggcataacacatttgtaccaattctatcgcaggggttaaactaaaatctaatagaagtcgttatgttaaaaattgaactacacaaaatgtcaaggtatatgtgctatgcaaaagtgcaggtctgcaggatcaaatcaattgttgaactataagtaaatggaatgaaagcaatgtggttccactatgacaaggagagtaacacaaatcctctaaaaatctcatgatgaatggaaataaaaagaaat

SEQ ID NO: 124220 - DNA, 405 bp, Glycine max
  unsure (1)..(405): unsure at all n locations
agagatgtgagcaatgcagaacaaagttgatngattctatatcttctctagnttcgaatatcacctcttcaccatcagagttgatagtgtcatcagggtgaggttcctcatcatctgaacttatgtctagtgcttattcatctttactagtggacgcatcagccatcagacacaagtttgattcttcctncctgtccttattcaatgatgaatcgtctaggtcctgctaagtgctaacaaggattntctttttggacttcacgaatntcttcttcctatcatttgcattctcaagggcanggacatctaacttgaaaatccttaagaagagtnttgcatccactggataccttntcgcctagtagtgctttgacttnctcacaagcacaagcatcttgtacacta

SEQ ID NO: 124221 - DNA, 350 bp, Glycine max
tctcccccaattttctatatatagttggagaagtgaagtgaaaaagggttcagccccttaggcacttctctctctttcgaatttgctcggaaaaattgtttccgtgaagaaaatctaagccgaggcgcttccgaaacgtttccgtaaggaatttcacgaaggtttcgaccgctcttcgacgttcttcattcattcttcatcgttcttcgatcttcaacgggtaagtacctcgaaccaagcttttcgattcattctatgtacccgtggtgatccacattgtgtctcgtgtatttttattctcgtttcatttactttttataccccctttatgacgcgcttaagccatttta

SEQ ID NO: 124222 - DNA, 423 bp, Glycine max
gctcagctgtccaccttttttcttcctaacattgtaattagactctatcaatctatgtagaggccaccatgtacctgacacctcattattaacaagagtcaacttttcatgaaatcttatttaatggggatgaaggacagactaatcatctgcaacaatacccaatagaactaacctcttgggtctagtatcctacacaaatcatggaaactgcccatccctgggatcttaaagttgaactcctgaggctctgagtctactacctttacgacttgctgctcacactcataacctttttatgtggcacaacatgcttaatataacattggacacagatgtctaataccctagctctctaacactctaatcagcatggaacatctattgactaatcttgccacataacacgctctatttcctacg

SEQ ID NO: 124223 - DNA, 340 bp, Glycine max
ttgtgtgttgatcacttgctaatggcaatgcatgaagagctaaatcagtttaagagaaatgacgtataagatttagttcctaaaccaaactctcataagtcaatcagaaccaaataggtatttcaaaataaacttgatgaatctaccagtagggttgaacctttttgttcttccctccttcccctatttataggaaaaggaaggagatgcttgccacccagcttgcccaggcgagctaggttgcttcctccagaagcaaccgccttctagaggaacatccgggaaggcccaagtgggtctggttgctatttgaacccccatttttactaaatacacccct

SEQ ID NO: 124224 - DNA, 346 bp, Glycine max
aagcttctatatttgctgaaccattttatttttaaacacaagttgagttttattcagattattagagtttatctcttttatcttagtgagagtgattctcctaaattcttgagtgattcaagaacaccctggctgtatcaaaggactttcacaacctttgtgtgttgccctcgccggaaagagtgattattttcttcctttcatcttcaaccttgatctttcaaaccacaatttcagaaaatccattcctgcccagaattatctcgtggccataactcccgttttacgcattcaaattaagtgattcttgagcctaaattgaatttcaaaacgagacctttcacct

SEQ ID NO: 124225 - DNA, 348 bp, Glycine max
taaaataacaacaagagtgtattttcttttaaaatgaatatatgagtcgcatgatctgatgacttcattatacaaaactgaggaccttcctatgcatgacttttatacgcaacacgtaccaatatggatccactaatatatatagaaaatttctccaagggggagaactctgtagctaattaattattgccacattaataggtttggggaggacatctatgcctacgatactaagcagcaaaaggatggtgctagctatagaaggacacgcatcataaaagaacattcaggaatgccccattcgatctggatgcgacattacaccgcgaaagtactgagaaacactct

SEQ ID NO: 124226 - DNA, 228 bp, Glycine max
aaggcaacctttaaattccagcgggaaaactgcgacatactctccggtgaaaaagatccagatgtaccttgcgttttcttaaaatatagtactccgcacttcgcctatgtgcggaaaatagaggtgaaaaaatttaacttctccatgcagcaaaaatgacacgggaaaagagaaggtcctgcttttacgcgttggaaccctaactatgtcatatcccacatccatttg

SEQ ID NO: 124227 - DNA, 361 bp, Glycine max
tcatgatgatgaatcaagattgatttatggagttttgaagataacaaagatgatgacaaaaagtccaagagaatgagttcaagattgagtcaagaacacttcaagaatcaagagaaatttaatttcaagattcaagaatcaagaaaaggctcaatcaagataagtacaaatttttttttcaaaacattgagtagcacatgaagttttcacaaaagcttttaccaaagagtttttactctctggtaatcaattaccagtttactgtaatcgattaccagtggcaagttttgttttcaaaaagctttcaactgaatttgcaacgttccaatcaatttcaaaatggtgtaatcgattacaatat

SEQ ID NO: 124228 - DNA, 411 bp, Glycine max
  unsure (1)..(411): unsure at all n locations
ccgcagctggcccaaaacagagagagacagtaatttccgtctctcgagaactagaatcctctttattcaattcataccaaccaatcatatttagatgactttgatgttcacacttttcttagtgagagctcgttctctgagtttcgatgaaatntctcctctcaaaacacttagatataagacttcaggaaccactagaaccactaacttattagtaattaattaactttaattaacatcatatcacgtttatactcgggagataaatcataacactgagatagtaacatcatcactgtcaccttgacaatataactacancaaccctaaaattattatatatcagttacatatctatataacatcactcgggtggtgctatattgtccattcatatatctgctattagct

SEQ ID NO: 124229 - DNA, 363 bp, Glycine max
  unsure (1)..(363): unsure at all n locations
tcaagctngagatgcagcaggtaaaaggcgttgtattccaacttgtgttttttcaccaacaacatgatggcaatcaatttccaagtgtttggcatgtttgtgaaaaactggatttgcagctatgtgaagagcactttagttgttacaatattaatttaagtgaggtacatgtgcattgaactttcagattagagaacaaatatataagtcattatagttcacaaacagcagagacaaatgctttatattatgggctgggataagtgttttgttttgtaatgtgccaagagacatgcaagacccaagaaagaatcactagtcagaggtggagcgccttgagtctaaacacctaatccaatttgt

SEQ ID NO: 124230 - DNA, 115 bp, Glycine max
taagcaccgagctgcagctatgcaacagaacatcaagatgggaagagtggtgtgacgaatattcacgacttcgcgatagtcaaagaacaaccctgagatacaatgctcagaactc

SEQ ID NO: 124231 - DNA, 349 bp, Glycine max
tgcatttggaattgcgaaagcccccttccatcattaggattgttcctgccatctcaaacaaacaaatcaaacgtaacaagacaattatagctgttgtttgaatacctcacccactcaaatgtatcacaccattatggcttttctctaatgaaacactcttgccttttaccactctaattccccttgagttcttaggcaattcaagagattatggccacaacaaagaacaattcaccaatatgtgtaaggtaaggctagagagacaaggaaaaggttaacccagaaaaaggctaacaatgtttttaggcacaaatgaaggaaataaaattcagaatttaggaattcaagt

SEQ ID NO: 124232 - DNA, 434 bp, Glycine max
  unsure (1)..(434): unsure at all n locations
gagacagagtgtggtcncccatgaagaacacttttagaggattctttgcatcactctncttagnnnnggaagacagaaatatagctncatgtggttgactagcacctgagattgaagtcaagataacaaaatataanaagaaaaatcaatttctcaagaacaatctaagaataaccatatattgtgcaaccaaacggcaagaaaataatatcatgcatggctagtcacacgcatattatattataaagagataaatatatatacattccanatactaaccaccaataatatatattattcatgtcttgcacaataatctatgaaacgattntagtttgaaaatctctgatgaatttcataagatgcattcactatgtgatgatcttctaatattcttcttattctctgtagcatgatgctcattattctaaata

SEQ ID NO: 124233 - DNA, 352 bp, Glycine max
tatctttataataaggaccttatcagctgtttgaattacatgtaaattggtgaaattagctaatgaactaactgataaatgtacaatgacatataaagacattaaattatttggttataactttatatataaacaattcattatttctaaaattgagagactgagagggatacggtaggcactatgcaaaaggatttttaaaaatgagaaaaagggttaataaagagattttaagtaaatcagtcaggataaaaatagaaaaagaaaaactagtagcttataggctaaaaaactagtaacaaactaaacttattttggtcaaataaacttataagccactaaactggctcac

SEQ ID NO: 124234 - DNA, 368 bp, Glycine max
ggaccttaaatctcagcttctccccatttggtattttatgttgagaagtaaagaagaaaagggttcagccccttaggaacttctctctctctcgaaattgctgaggaaaattagttccgtgaagaaaattcaagccgaggcgcttccgtaacgtttccgtgagtaattacgcgaagattctcgaccgttcttcaacgttcatcgtttgttcttcgttttcttcagtcttcaacgggtaagtacctcaaaccgagcttttcaattcattctatgtacccgtggtggtccacattttggttcatgtatttttattctcattttcatttactttttatacccccttttgacgtgcttaagccatttattta

SEQ ID NO: 124235 - DNA, 341 bp, Glycine max
tctagccaaatggacttttcttgtattaattcctttgatagcccttttgagccttgtttccctttccttgttttgaagctcgctacaagccttaagtgaaaaaccatgatattaccatatccttaaggaattttggagctttggaattgttttgggaataagtgtcgggggtttttgtttcattggacaacttgttttgttggctatgcttcatgatgtattttgggccatacttgatgtacattgtatattggttaaatgttggacatgctgaatgaaatgttgtttctcaaaggctaaagagtcaaaaaaaattcgaaaaaagaaaaagaaaagcaata

SEQ ID NO: 124236 - DNA, 347 bp, Glycine max
  unsure (1)..(347): unsure at all n locations
tataggactactgtacatgatatatgtcagggtgtgggtttggccagcggttcatggataaaggggatatcccacattatttccatgacacacatgcaacaatgannntttgaaaattttatgcaaaactagtcatgcacgcatccatgtggacactcaagcatcaagtttttatggtcacgtgacactaaggctcacgattcattttccctattaagtcaacccagtgtttccaaagcatgttcttttatcaattcatgcattcatccgagtccattttgggtgttcgggaaaattttcacagcattcacccttcaggtgtatacacatttttttttcaaaaactg

SEQ ID NO: 124237 - DNA, 449 bp, Glycine max
  unsure (1)..(449): unsure at all n locations
ctcattgaatcgcatgtccacttgtaactcacaagtatcaaaccttttcaccacaaagggtcgaagaccatcgaacctatcctatatcttttgaagaagaaaggaatcttctccaccatgtaaatgtccttcttcatcaacggatcgagcaccctctttcacccaagagccattatgctcttnttgataaccaatcgatgcaatcacaacagcacatattatacaggatctcctgattgaacatancgtcaaatcaaagggatgtgaaggttaaggaagaggtgatagtgggattggcatgaaattatcgcaagctatctgcattcgactaggtgccatcattatagcttataaagccactacatatactctttaacttgcagttgaatttgatagatacacatgaaatgagtcacttcaagcatgacggaaaccttcgcttcactgtg

SEQ ID NO: 124238 - DNA, 341 bp, Glycine max
ttaacttcagggaaataatcctcttaataagattatttttgctgtgttaagcatatcatataaattatttataattaatgtttggtatgatatttttttaaaagtatttattaattttgttaataattaatctttgtttaaaattttacttaaaaagatttcaaatcaacaacaatattgtataaaaaatgtcttttttttttatattttctcctcaaggttttgacagagagtcaaatatagataattgagcataataaatatgtgagcataatcaactcaactctcggctgtttgcgtatagattattgagcacgaaggaaccttccttgatataatgt

SEQ ID NO: 124239 - DNA, 347 bp, Glycine max
ggggcctgatgaccttggtgggggcgacgtgcactccatagaactgacagaggcccgtaatcagagctgaaaaccccaggaccctgttggacttctccgagtccactgggtgtcttgcgggcgcgatccctacaaacaatagatgacatcagaaatcagttgagcaatgtgcatacttacctatgtcacgatggcgtgaccttactgggggggacaggcaccctataggactgacagaggcccgtaacctgagctggaatcctcagggccctgctggacttctccaggtccactgggtgtcttgtgggcacgatccctgcaaatagtggatgacatcaaaaatcagt

SEQ ID NO: 124240 - DNA, 359 bp, Glycine max
  unsure (1)..(359): unsure at all n locations
ccactactggataaaccgaatgcaaattnttattgatgcaatagacttaagtatttgggaagccatagaaatagggccttatatacctaccacagtagaaagaattacaatagatggaagcacatcaagtgaaagcataacaatagaaaaacctatagatagatggtctgaagaggatagaagacgactataatacaatttataagcccaaaatataataacatctgccctgggaatggatgaatanttcacggtttcaaattgtaagagtgctaagganatgttggacactctacattaacacatganggactacagatgtaatagatctggataacacactaactatgagttgaact

SEQ ID NO: 124241 - DNA, 364 bp, Glycine max
ctcagcttcccatcaagcaagttcatctcatagcttttatgcaaacaatagaattcaaaagttggagaatttgcttgaaaaccttgttgttgtgcttaaagtgcgatttgcagaagatccacaaattaatcaagtcttagaaactatagatcaggaggtatgaatttataattcaacttattcaacgatttaactatgatatgatactttacaaagaaaaaacattcttttaatttaggtacctacaaatggttctactagtaaaaatcatcaaactacaaacaatctcaactagaggtgagttgaaatttaataattaatatgttgacaataccatttttgttagcatatggtataacttgta

SEQ ID NO: 124242 - DNA, 442 bp, Glycine max
  unsure (1)..(442): unsure at all n locations
tacgagaaataaataagaacaagtgtatgatacacataagcaaataacaaacaccagcgactagtacatacggctagtaatgatattaaacatctcaattgttaaacatcnataacactntcatttattgtatcattagtttctatcatatcacatcatttaatttgcatttcaagagtcacatctccagtattatattggtaggaatactagctattctcatgagcagtattggttgatatttagaattcaagacaacacaattatatttataaagaaaaaaagtgaagaagaatgtgaaaataagacgaataatgatggtattgataaaaactctattcatgcatatagaaaaactatctctcttaaataaaacactntatattttttatacaaagagatntataatggccgaacactatagtcaangaatccaagtata

SEQ ID NO: 124243 - DNA, 141 bp, Glycine max
tctttcaaagttgtgatcgattttccgaacgggttcgtgaactaattgacaaaatgagagagagagagagagagagagatacttatcatatatttacttaaatgagtcacggaccaagtttttgtataaaatgggtctatt

SEQ ID NO: 124244 - DNA, 344 bp, Glycine max
tgtcaattttccaatctctcatggttgaagcaaacacatagaaacaaggtgtcactatcttatggatcaagtgaacaaagaaaaactgaaagtggagtactgctgcacatttgatcaacttgctgatattttaaccaaacccctcaaaggggagaggtttaaaatgttaagggacaaaattggcttgatgaacctaggagatcagaattaagggagggtgtgagagcctaattctgttttgtgtggtgtggactcgatggtacatcgcatataaaagagtgacaaaatttaaaaattctgttattagtgcctagcctatatgtgaagggttgttgcattgtttt

SEQ ID NO: 124245 - DNA, 287 bp, Glycine max
  unsure (1)..(287): unsure at all n locations
tgcaactctatcaggctatcttgggggattctcttctttctgctattcctagngganggcgccttctctcacctcttctactttggcttccgctgcatctccatggtggaaaatcaccanttaaggatctcattgaaggctaaagatccagcctccatagaagccccacaagcaagctttcatcatctatgaagaggaaaagcactgctttcagacctcaagctcagtatgataccaggagattccattctcttgacgcttggaatagatacatggataacattctc

SEQ ID NO: 124246 - DNA, 353 bp, Glycine max
ttccgcgaagagatctatgagggactccacggctgaagggaccagtgctgctcccgagtttgatagccaccatttcaggagcgccgagcaccagcagcgtttcaaggccatcaaaggatggtcgttccaccgagagacacgcgtccagctcaaggacgatgagtacactgactttcaggaggagatagcccgccgacattggacgtcgctggtcactcctatggctaagtttgacccagatatagtcctggagttttatgctaatgcttggcccacagaagagggagtgcaggacatgcggtcatgggtgaggggtcagtggattccctttgacgcagatgccctcaaccagt

SEQ ID NO: 124247 - DNA, 352 bp, Glycine max
tgtagcaaattcgaacgacaataactttttactcggaagtccgattgtgtcccgtaatatatcgacatgctggaaatttaaaaccgaagctactagcaaattcgaacgacaataacttttcactaagaaggccgattgattcccgcaatatatcgagacgctcgaaatttaaaaccaaagcccgtcgaaaattagaagacaataactgggttctcggatgtccgagtgagttccgggacatatcgagactcttgaaatttaaaaccaaagctcgtagaaaatttgaacgacgataacttttctctcagaagttcgattgagtcccgtagtttatcgcgacattctaaatata

SEQ ID NO: 124248 - DNA, 348 bp, Glycine max
tgcagctatggggcaactgaaactgagtctggctctttgtcatggagtttcaccccaagaatgtacttgaccgccatttagatctgatagagcattcctatcccatctagatccaaaatgacttgccagaaatgaaggctgaactgcaaaggtgctcaaatttctgttgtggaagtttgacatctgtttctcactaaacttggcaaaactcttcagtgatcaaaccaccccctccactcagatcttcagcatcaaaaactttatgaattggtgattccctttcttccagttcatcctagtttttaaaactagtgacaagacgtgagaaaacagagcaacataatggaa

SEQ ID NO: 124249 - DNA, 276 bp, Glycine max
  unsure (1)..(276): unsure at all n locations
agcttctatacttatacaagagtgaagctctgataccacttgctatacaagtggtctcaaatatcttaagggggggttgaataagatatcacanacttcttcctaatgtaaaaattctattttgattctaacccaaatcccaagattcctttcacaatgaatgcctaaataattctgcanattaaacttactgaatagaagcgataagcaataataaatctaagagtttaatggaagagaaagtgcaaactcatatttatactatgttcggcacac

SEQ ID NO: 124250 - DNA, 350 bp, Glycine max
tttctccaagcttcaagctttagtcttcatgttgttcatgtagccccctctatctctaacacaacctggataagaggaaaatgcactggactctttgggagaaactaaaagtttctaaagcctctgttggtttcgggttcaaaagactcaaacattttaacaatgctatattggtaaagcaattttggtgattaatgaccaatgaagaatgcctatcctctgaggtcttgaaagccagctactttcccttatctcctctcgatgcaaaaaaaacaacttttagaccttgcttcacctggacaagtatcctttcttctcaagcaactattgcggatagatccatttggtgt

SEQ ID NO: 124251 - DNA, 312 bp, Glycine max
ttttaactgattgatactatcaagcttctacaagaaaatagctgatgggtgctacacccaccaatatttttctccaacctactatgagagctgcacttactatacctactatttgcaaggcagtttcaaatgtcctataactagttgtgacaatgagctttacattgcacgtgagatcttatctccaaaacattatgattggtatagaatcatccctattcttgtatgccaagagactcacttgacattaagtgatgaccttgcagaccctcaccaggaccgttagccctcaaaaataaagggcatagtgca

SEQ ID NO: 124252 - DNA, 341 bp, Glycine max
tacaaatctgcttgattttcgagtttataagtgaaatcaaatcagatctagataagataagataagattagatctaattttgtagaataaattagtctgccctcttcaagttcaagcccaattctagattcaagcccaatgcttcattaattcgtgaaattagattaaaaacatcaaattagctgaatgggcccaaataataaaactacctcataaatttgacaattaagactaatcagtatttaaagcggggcaaaaagggttaagaaataggataaaataatggcacatcaaaagcccccatacttagcctttcgcactcctgggcaaaatgcagtaaa

SEQ ID NO: 124253 - DNA, 345 bp, Glycine max
tgtgagatttgcaagatcatcttctttgacaactccttgaaaattattgccatcaataagaagcgtcgactatttagagagtgatccaagactttcaaatggatttccgctgaatttattaatagagagatagagatattttaaatctatctcccataagttgcggagattacccaaaaaagtcggaattgttccttcaagttgattacgtgataaatcaagttcaacaagagaagtcaaatttcccaaagaagttggaatggttccttcaagttgattatatgacaaatcacgttcaaccagagaagtcaaatttcccagggcatcagaaatagtcccatgcaa

SEQ ID NO: 124254 - DNA, 470 bp, Glycine max
  unsure (1)..(470): unsure at all n locations
ctgacattcaccacanattctgccttcttctatattcagattgtgaatgcctctaacagcacctttgtcaatgatantcttcatgcctcttaagtgcagatgtccaaatctttgatgccatactttgacttcatcttctttggaggatagacatgtggaggagtacactgtttcttgaggtgtccatagagtaacagtgtcctttgatctgctgcccttcattagaacttcactcttctcattngtcaccaagcattctgactgtgtgaagttacattgaatcttcatacacaactgactgatgctgacaagttgcagcagtcctcacagcagacttgttcaacagaagtcatatggactacttcattccaggatcttcttaagccattcaatgtacaactagtgacaggctaatgtcacagaatcttactctgtctggttgacagcgcattagtacatctcctactgtg

SEQ ID NO: 124255 - DNA, 342 bp, Glycine max
tgactttgggttatacatggtggatacatgatgggggacttgtaggagttgatctgggcaagaatggatgatggaaagtggaattttcgaaatctgctcttatgcagaattccgctggcaaaatgggtgcaacaagattttggtatgtgcataaaaatgctcgtgtgtcgatggctgtggaaagagcactgcacaacgagttctggatgcttactcgcagatcccaacggtccaaatgtaagctcaagtgctagagacttccatatcaactttcgagtccatccaacgtgcaactaattgcacacaccgaattgttactgggcgtcttaagctagaaaagct

SEQ ID NO: 124256 - DNA, 336 bp, Glycine max
tcaatcatgtgaaaataaatcaatcattcgttatatgtatcacaaattatatatattgataagaattacaaattaaaatcagcaaactcttaatttcgtttaattaatatgtgaaaacatttatgagctaagcttaacgtgaattaatctttttttaatccatataaattgaacacaataccataaatttataacattcatatattctactcaatcaactgaactaaaaccactgataactaattttaataaaatgatcatttatttttaccaatttcacagaaaaacttttgactaagaaaatttaacttaattggttgagcatgtgtgaattgc

SEQ ID NO: 124257 - DNA, 344 bp, Glycine max
tgtactctaatcctgtaaatatgtctattgcatttccctcggtgtgattttgttacattgttctgctgaataattgcaaaaaggggctatgttatttgtccagtttttattttctgaatttcttttggggttgataataatgcttagaatttaggttttggatctaattcaatccgaaagttaacttgtgaggacctattttttggctatatcgctagttaatacagaaatctcaacacactcttcttatgttagaaataaatttgatcaagtactatgactatgagtattcaagaccgaaacatagaaatgaccaatgcaatttagttggaaaacctcttatg

SEQ ID NO: 124258 - DNA, 335 bp, Glycine max
ttaaatctaagctgtttatttcaagtaaatagaaacagttttattttgtgtttgctcaagcggcaacgaaaatgcttatgaaacatttcttgataagggacaaatcagacgcgtagaattttgatcgtgtgtaggatcaagaaattgttaacacagaagcaacttgataattcataattaaaacaatgagccaatgaaaagcattattccccaatccataaatgttctcacccaaagtgaattttcagacaattgctggttagtggtttcacaataatcagttgaaaattaattgaagaaataccatgttttcaacatcacatcagacaataaat

SEQ ID NO: 124259 - DNA, 334 bp, Glycine max
tgtacaaatgtaagaaacatcttctttgaccttggtgttccttgactccatctcattgaatcgcatgtccacttgtaactccaaagtatcaaacctttcacaaacaaaggtttgaagaccatcgaacctgtccaaaatcttttgaagaagagaggaatcttctccaccatgtaaatgtccttcttcatcaatgggttgagcaccctttttcacccaagagctatcatgctctttacggtaaccaaaggatgcaatcacaacaacgcctattagaaaggatctcttgattggaacataaggtttagaatcaagagggatgttgaagtgttgaagg

SEQ ID NO: 124260 - DNA, 352 bp, Glycine max
aggaccttaaaactaagcttaagtatgcccgagtcattcatccctatgttatgttgttgaagtattggcgatcagaatttccattccttggattacggggttgaaccaagctcaagcttttacaaaaaaggttcatcaagtcaagttgaaatatggaagtaaccatcctgcaaaattggggcaaaagatgaatcgagtcacatcactgcttcgtctactgccaaacatatttaggattattgatgtccttgttacttccagtttcaccttgacaaaaatgtcatggaccatgttgaaaatctaaattgattcaaccccatatcctgcataaaaattcgcaatacttcgactg

SEQ ID NO: 124261 - DNA, 331 bp, Glycine max
  unsure (1)..(331): unsure at all n locations
tctatataagctgaaccattttatttataattcttaagcngagttttattcagaaaattagagtttatctcttttatcttagtgagagtgattctcctaaattcttgagtgattcaagaacaccctggctgtatcaaaggactttcacaacctttgtgtgttgccctcgctggaaagagtgattctttccttcctttcatcttcacccttgttctttcaaaccacaattccagaaaatccacctctgcccagaattatctcgtggccataactcccattttacgcactctaattaagtgattcttgagcctaaattgactttcaaaacgag

SEQ ID NO: 124262 - DNA, 331 bp, Glycine max
tagtccacatttttatggtccttaccaaatttcaaaacatattggggcagttgcttttgagttagtccttccaccggagagtaaaatccacccggtattccatgtttctttactcaagaaggctctttccccttcagcgaatcctcaacctttaccacctatgttattggaggagttggagttgcaggtaacaccggctgctgtaaaagcggtgcgtaacactgctacagggattgccgaggtgcttattcaatggactgacctcccaaactttgaagccacttgggaactagtagacaccatcatgcaccaatttccttcttttcacctt

SEQ ID NO: 124263 - DNA, 327 bp, Glycine max
tgtatcatcgagacagagtctttaagattatgcttaattgcaaaaagtgtccccctatttttttcatttcactaaatcggtccccatattttttaattcatatcatgttatttttcaaaattcactagcttagaacattgaccgccacgtgtccgcatataattggtcatttaagaaatattcatgtgtttaggaaatatcattattagtaactaaagtgattaattatttaggttatctccaatttatcatcattactaattaggtcactaacaattatctcacaaataattaccccaacccaaaatgtaaacttcatccactcaa

SEQ ID NO: 124264 - DNA, 325 bp, Glycine max
tatgctgcaaatatttacaatagattcttctctacctcagcagcaaaatcaaccacagcagagcaattatgacctttccagcaacagatacaaccctggatggaggaatcaccctaacctcagatggtccagccctcatcaacaacaacaacagcctgctccttccttccaaaatgctgctggcccaagtagaccatacattcctccaccaatccaacaacaacaacaaccccagaaacaaccaacagttgaggcccctccacaaccttccctcgaagaacttgtgaggcaaatgactatgcagaacatgcagtttcagcaagag

SEQ ID NO: 124265 - DNA, 319 bp, Glycine max
tggggtaccgactaatttttgacttcttacttttcaagcaccggagattgaatctgtatacactccataactatgaaggaattgtcatgtcatcatatttgatggtctaatcattgtagaagtgatactttgataactactcacttttgataatgtatcacattaccaccgctcttttaaatgatatggtgaagcgagacattaataatataactttgggtaatgttttcaacacattgaggcgcgtttcgagcattttctataaaaaccgcgttgcgcagttactaaattatgattcttttaatgactggacaattgc

SEQ ID NO: 124266 - DNA, 311 bp, Glycine max
cttgcattaacttctcatttatttttttaatttctatacaacggcctaatcttcttatagagaaaaattactctcttcttatatagtccactctagcaagcatgacaaattcatggatgaaaacacactgtattgtgctctattaaaacaatgactattacattattatctgtctttaaatggtaaactaaagggagatcgttggaaaatattttcttatacatcggaatttataattaaaacatgtctttattaatggtgggatcttaagacaaaacgcttctagaattggtcttcgcgaaaaactaaaa

SEQ ID NO: 124267 - DNA, 333 bp, Glycine max
tttcgattcattctatgtacccgtggtggtccacactgtattttgtgtatttctattctcgtttcatttactttttataccctcttttgacgtgcttaagccattttacttaagtcatttctcgcttaacttaaaaataaaataagtttccaccaatcgtttgaattgtattatccgttaacttcggttaaaatgaattccgaccgttcggtcgtggcgtaaccacgttggaaatcaaaaaagaggtaagataaaaataatataataacaaaaaatatctgtcataccctaatttcgtccggggacctttgcttgatgacatgcgacctttct

SEQ ID NO: 124268 - DNA, 333 bp, Glycine max
ttggaaaatgatttctatacaaaagttagtcatataaagcgactaacaaactcccccaaatttacagttttgcttgtcctcaagcaaagaaagaatagttcacttgtcctcaagtgacaaagacagtgtccaatcgaacgaaaatggtgtttgattcaccaaggacatcaaccatatgaactgaatatcatggaatgcctaaatcaatcacctctcacaagtattagagtcacaactgaaataagctagtaagcatgacataaatcaaggaaggatcatcaaccaaaacctcacagtcattgtttcactcaaaatcaagtgtttaggcttatt

SEQ ID NO: 124269 - DNA, 340 bp, Glycine max
atactaagcttcttagaaggttcgttcctaatctctctactattgcttcacctctcaatgagctagtgaagaagaatgtggcatttaactggggtgaaaaacaagagcaagcctttgctttgcttaaagaaaagcttactaatgcacctgttctagctcttcctaacttttctaaaacttttgagctagaatgtgatgcctctggagtgggagttggagctgttttgttgcaaggtgggcaccctattgcttattttagtgaaaaacttcatggtgcgacccttaactaccccacctatgataaagagctttatgccttaataagagcactccgaacttg

SEQ ID NO: 124270 - DNA, 334 bp, Glycine max
  unsure (1)..(334): unsure at all n locations
tgtaaatagcgatatgaaagagaagnnnctttgttctattttgtcttctatgaggcagaggaagtattagttaacatgtcaaattatgcaagtggggtcattctgccctctaaattttcctttttccacttcattcaagacattttcactacagtttttttttttatcggcattttcactacagttgacccatggatcataaaagtaggatgtaaagcacgctatgttcattctcttggccctgaataattaaggcataccctcatggttatacagaatctaggtttatctcactaaaaggaatgtagattgcctagcaatgacaggttcattg

SEQ ID NO: 124271 - DNA, 327 bp, Glycine max
tgttcatttgtagacccaaatcatgtttttttgatgagttaacaaggcattgtggtagataagagaagccaccggcgattgagttaatagtttggcactttaagtataattatttgaaggaacgcatatatgtcaaagaagttattaaggttgttacatgttatgaactgaaaatcatctcaatgtttcctatcatttgaggtctaggaccctcccaacaagcatgaacgtgaagaaggaaactctattatttttctctgctgcctattacaaactaagcatccctttatattgggccatgaccagcaatgctaatacagaatataa

SEQ ID NO: 124272 - DNA, 330 bp, Glycine max
tcaacatcagaccacttccagggtgctggttctacttctcatggacttgatggggcctatgcaagttgaaagccttggaggaaagaggtatgcctatgttgttgtggatgatttctccagatttacctgggtcaattttatcagagagaaatcagacacctttgaagtattcaaggagttgagtctaagacttcaaagagaaaaagactgtgtcatcaagagaatcaggagtgaccatggcagagagtttgaaaacagcaagtttactgaattctgcacatctgaaggcatcactcatgagttctctgcagccattacaccacaacaaat

SEQ ID NO: 124273 - DNA, 325 bp, Glycine max
ttgtgtaagagtcaaaagtgtcattgtatatcttttgtaactttattgaaagttagtggaaattggtgggttgttaaaaattggacgaagtattagcggtaaagacgaaccaacataactttgtgttattcctttcttccatccatctattgtctaacgccgagttgtgattatcgcttttttaactaaggcctgatttggttgcaaaaatcttcatttgtgggcattaaaatttgttcttaaacttgttacctgacacaacactatgtggtaaaatgctgtcaaaaaaactttaggatcacaattcaacttcccttcttgtaat

SEQ ID NO: 124274 - DNA, 326 bp, Glycine max
ttattaaatagtactaattgatctaattattttatattatatgagatttgaacaagtattaaatatttgttcttcatgtaatgttctctttatttcaaaatatttattattttaaacaaccaaaataatactaatttttaaagaaattttatttgtgaatattttacttttagtattttcttaatcgccacttgttaacaaagtttatattatattataatgaatctttagtggttggtataactattaacaaatgcgaagtgtgacacgacagatttccgttgactgtgttgagttcactttcttcgattttctcttgacagtat

SEQ ID NO: 124275 - DNA, 330 bp, Glycine max
tgacagcggtcgcgaatgatagcttttaatcttttgacaaacatattctgactgcacgaaaaagaacaatctagtcaacaataaactgactaggagggagtggttaaatagagagtaatcacgtcacatcattggctccaaaatagtgttttactaaagtgcacgtatattgagtatgctttccttcgtgatcctcatatcacaaggtaaaacctccatatctaacctagggtaaaatagaaggccatactaagatatatgctcatcattagccatcctttctaaatgataaaatgaagggataagacaaaaaattcttcttgatcaagt

SEQ ID NO: 124276 - DNA, 322 bp, Glycine max
ttgacctaaaaatgagtttcttatgtttgattatgtagggtagcatataagatttgcaaatatccgactatcgaaacatcgagagcgctaaaaataagttaggagcaaaactttggaaaatgagcgatagagcgattttaaacattagatagcttaaacttggaatctgggcctgtatataaattatcttagaattatttattttttggaattgctgatttatttactattgtattgttgagataaatgcaagatctatgactgatgcatgttttgaaattgtgatgattctctacagataaaattactgaaatgcacgcct

SEQ ID NO: 124277 - DNA, 333 bp, Glycine max
tcaggctgttcaattgcttcagattgttgctctaaatggcaaatgtctgtgtggtggtcggcagaggagcataaaccatatagtctagcgacaggtgcagatttttgattcatggccagttaggttaccaggttaactaaggcatctagtttaccttcaagcttcttagtctcagctgatgaagatgaatttgtgactacttcatgcacttcattaatgacaatagcatcatttctggcactaaattgctgggagtttgaagccatcttctcaattaaatttatggcttcagcaggggtcatgtctccaagggctccaccactggtagcatct

SEQ ID NO: 124278 - DNA, 331 bp, Glycine max
  unsure (1)..(331): unsure at all n locations
ttgccacaaagaatacccctgcaaggacattttcctttgtgggaaaanctctttgccaaccaagtaatcaacaaagtaacttatcatatatggaccaacatacgaaacatgagtagtgacaccagcaaacacagcgttacaagccgcctccttccagaaggatttgagaagtgcccaatccaacgaatgctgcccggataggttttcagccttcaacctctcccaattagaattcaaaaccttataatttgtcttggatcggtctttcggcgcaacaaggggaatgtccttaagctcaagcggcctttttgccccaatggaaagaagtgga

SEQ ID NO: 124279 - DNA, 339 bp, Glycine max
actcaagctttgatcaagaaggacattagaagcgggaatttctctgtggatatttcgagggctacctgagttcatttgtaaataaagcaaaaatgagtaagatcttgaaagggaaataaaaaataaaaaagagaagtaaaatatgtaggaaaaatctttgacttacaatcttcatgaaggtaggcaagccctttagcggatccaagtgctattcgcattctagtaggccaatccatcgtaggcatgccctttcctgcatgtgaccatcaaatacattatccaatacttaactagacaaaataagaattaaatgttggaaactatactatgcaacttatt

SEQ ID NO: 124280 - DNA, 285 bp, Glycine max
  unsure (1)..(285): unsure at all n locations
atactcaagcttttcgattcattatatgtacccgnaggggttttcattttgtttggtgcatgtttatggtcgctttgtttactgataataccccctgatgacgtgcttaatccattttacttaagtcatttctcgattaactcaaaaataatattaattttcacactaacattgaattgtagtagacattaacctctgattaaatatattccaaccgatgagtcatgccgtatccactttggatttatcttaaagggaaaaaatatgggtggaaatcaatataga

SEQ ID NO: 124281 - DNA, 336 bp, Glycine max
ttatgttcttttgcctgggtttggttaatcttcattgactttatgttgtaggaaaagataatgggatgaagagtgattgaaaagggaaagatgacccatatttggtattattattgaaggtttgaaactagggtgattcggatgggtctactttgaatcaatgtaggtttggctttaacaattgaaagtgaaattttcatggaaatatggaaaattattttccaacacatgtaacttctatttttgtttttaattttaattcttttgcatttaagaaaataattgtaggaatattaaatttaactaaacattttttttacagaactaaacacgttt

SEQ ID NO: 124282 - DNA, 329 bp, Glycine max
tatacaattatctaagacctccatttattctttgggcgactaaatagtggagagtgctcccacctagcttgtggtacgcgggtaggtagtgtaggggatttttttacccacctacacatcctttcttctcaatatttttaaaatacacttttttttattatataaagtacattagttttcggatgctttgagaaatcaagattgaccaccccgatttctagacattagccttttttttataaaaataaattatttatttttaaatttatgttttaatttaaattattaaaataataaaatattatattatataaaaatatttttaatta

SEQ ID NO: 124283 - DNA, 329 bp, Glycine max
tataagttacgaactatgtttcacttatcctataaattaaaattgttatatacgtgtactttaattatcattaaaattaatctataaatttattttacacattttttataactattatattttcattagatgagataactaatttcaaataaaatgaatatttttttaagaaatgatcaaacaaattttagcataaaatgggattttaagtaaaaaaaattaataaaaattgacatattaaataaaaaataatgaatattggtaggcataaacaattgtattattgaaacaatgaattttgcatgcttaccaattacaaaaattaatat

SEQ ID NO: 124284 - DNA, 325 bp, Glycine max
tgtcaaggaagctacctaggctattaatagattgcatgtgtaccactttttgtaacttttatgaatgagaaacttgtgagatacacttcaaagttccacttctctccctttcttccttcaattttccatgccactttctccctctctcattctcattctcttagtggtgaagcttctccttccattgcttattctctagtggatgacacatcctctctcctcttctcctttatcttccgctgaaactccatggttgaaaatcactattgaaggaccttattgaagctcaaagatccagcttccatagaagcttctcaagaaagct

SEQ ID NO: 124285 - DNA, 318 bp, Glycine max
atactaagcttttatacaggcaattcttggttgtgaatctccttcttctttggcttatttcctagtggatggtgcctaccctctcctcttctcctttgccttccactgcattctccatgatgaaaaatcaccattgaaggacctcattgaagctccaagatccatcttccatataaactccacaagcaagcttccatcatataagccagagtttattttgatggattacataacttttggtctaaagaactaactaaagcccattttctaattttcctttacttttcatattttattttcatgtcataagttcatatg

SEQ ID NO: 124286 - DNA, 325 bp, Glycine max
tcttataagctgaaccattttatttattatctcaagttgagttttattcagaaaattagagtttatctcttttatcttagtgagagtgattctcctaaattcttgagtgattcaagaacaccctggctgtatcaaatgactttcacaacctttgtgtgttgccctcgctggaaagagtggaagaaataagtcaagatgaaagaaagaaaataagagaggaagaaagaagaaaaataatgaaagaaatgaaaagagaaaaacatgcctcctatattagtcataactcttgcaagagcctaagtgaagaacttcgtgactattacga

SEQ ID NO: 124287 - DNA, 322 bp, Glycine max
tatgtagctttctcgttacagattatgatgttctcggttatgcacgtgactgtgtcatgtgaaaattccctctcatttcatagaaattaaataggggggttatactaaaatttgtatatatttaaggagagatgaggacaaaattttcagatgacatactagaagaaaaaccattcccgtaccgcacaataaaagtcaccatatgtaaagaaatataaacttcaacactgctcaacaccctttatgttggagatatcactcaagcaccatagcattgaagatttaggtttacatattaattctaggatttaatgcttttaaa

SEQ ID NO: 124288 - DNA, 335 bp, Glycine max
tgttatttcgtggagagctttctgcatgtcttagttttatcgtatgcagactacatttttctgcaatatgtatagaaggcaaacaagattatgcagcattgtacagagggattgtatttcttcatgtctatttagagaggcaaaatgatagatattaattcttcataaagaagtaaaaagaagacatagtttcgtcaaagaggattaccatgtaataaattgtgatatcctttttctaaacctctgcaatatacatattattagtcacataatttagtatagtaagttggactgttcagaaaacattatttgaatgagtacatacgtgtgtaaca

SEQ ID NO: 124289 - DNA, 330 bp, Glycine max
ttggttttaaatttcgagcgtctcgatatattacggtgtctcaatcggacttccgagtgaaaagttattgttgttagaattagctgcgagcttcggttttaaatttcgagcgtctcgatatattacgggactcaatcggacttccgagtgaaatgttattgtcgttcgaatttgctacgagcttcggttttaaatttcgagcgtctcgatatggtacgggactcattcggacttccgagtgaaatgttattgtcgttagcatttgctgtgagctttggttttaaatttcgagcgtctcgatatattacgggactcaatcggacttccggg

SEQ ID NO: 124290 - DNA, 350 bp, Glycine max
tctatatcatactcaagcttcctcgtggcttctttgagaatctagatccttatcttctcacacctttttattaactaaattaacctccttgaaaataattacggataaaaataatgcaaaaaatataatcaatcatcaaacatacttattaattttatatatatatatatatatatatatatatatatatatatatatcagggtgttacaacaatcatatttcatagcatataagatagtaaagcttgtaagacatggatttagaaaacaagccaaacttgagtggaatcatattgaaatgcaaaccacatagtcatatatcacaacctataaatattcagtcatactaa

SEQ ID NO: 124291 - DNA, 332 bp, Glycine max
tgcaggagcaatagaatagtcaattggcactcatagattggagaaagaaaaaaaaaaggaatataccagccaggtttgttatggcatttgacaaagccaatgctgaagaaacaccatttcctgcaccagacatgtcttctcctaaaagcagcttagcaaacctttccttcatcaagtcagcttctgaaataaaagcacaaagttgtttttagcaatttgtgcttagtgttattgatgatcttctactaactactactaagaaacagtttgtgatccttatttgttatttcatcactttgagggtgatcagactaatttaactgcaatctgat

SEQ ID NO: 124292 - DNA, 249 bp, Glycine max
cagcttacaaaacacaagtttttttgcaaaaactgttcctcttgttgcctccggagctctttttcccaaaataggcattgcggtatgctctggaatatgtgcaaatcatctgcttaccctaattttgcgcaaaacaagctttaaatatgctctgaattcgcaaacatgagcttagtgccaccctcgcgcctatcgtgaagtaaagggtttgacatttacaccaattgtcgccgaaccaggctaaaaaaa

SEQ ID NO: 124293 - DNA, 323 bp, Glycine max
tcatgatgttgaatcaagattgattcatggtgttttgacgataacaaagatgatgacaaaaagctcaagagaatgagttcaagattgaatcaagaacacttcaaattggatttcaagatttaagaatcaagttttaagatttaagtttcaaaaatcaagaatcatgaatcaagaataatctagttgaagattcaagaatcaagaaaagattcaatcaagataagtactaaaaggtttttcaaaacattgagtagcacatgaatttttcacaaaaccttttatcaaagagtttttactctttggtaatcgattaccagtttatt

SEQ ID NO: 124294 - DNA, 329 bp, Glycine max
  unsure (1)..(329): unsure at all n locations
ttaaatttgggggagttngataaatgctatttatgagtatattatggggttaaattatataggaatatgtaatttttctctcctaaattcatcttcgctcaaaataaggtcgtccaagacttcatgcaattaatatagaaatttataccccaatatcacatcctatcagagcattgtgtttcaatgtcctctaacatgaggttcttcatagccatccacctaaccatttgctcccatgaacacaaagttcgacatcatcacaagatccaaacacaaatagcacatggggagtgagttatcacagtcctaactaatagagagaaacgaga

SEQ ID NO: 124295 - DNA, 326 bp, Glycine max
tatactttgtagaagcaaataactcatggtttgaattatgtttttagaaatttaaatttttttcctagacttacaagctctactccaagcttgatttaaacccaatattctttatcttaccaaatcatcgctggctctaaacaaatcaactagattttttaaaagatttcacaccgattaaaaagtatgattatcttacagatgtatatatcacttcacacttttattatacaagatgttttgagaggactttgtatctttacaagaatttacaaaaagctttacataaaagaatgacttgtatagatgattcgtgtcttgttttt

SEQ ID NO: 124296 - DNA, 324 bp, Glycine max
tttaactcggatgtccgattgagtcccgttttatgtatagatgctccaaattgaaatcggaagctcgttgcaaatgcaaactgcaataactcttaactcggatgtccgattgagctcgcatgatatatggagacgcttcaaatcgaaataggatgtctcaaattcaaacgacaataacttggtacttggacatccgattgagtcccggaatatatgcgagacgctcgaaattgataacataagctctgatacaaattcaaacgattgtgactctattctcggatgtccgattgagtcccgcaatatatcgtgacgctccaaatc

SEQ ID NO: 124297 - DNA, 325 bp, Glycine max
tctcgatatattatgcgcctgatttggacttccgtgtgacaagttatgacaattttaatttctcgagagtattcgttgttcaatttcgagcgtcttgatatattatgcgcctgaattggacttccgtgtgatttgttatgaccatttgaatttctggacagcttccgttgttcaatgtacagcgtgtggagatgttattcgccagaataggacttgcgcgtgacatgtcccgaccatttgaatgacttgagagcttacgttgttcaattcctagcggctcgatctattatgcaccatgatctgacttccgtgtgacaagttatga

SEQ ID NO: 124298 - DNA, 301 bp, Glycine max
tgcagcgggagatgatttccgctctgtgacttatactgctgtgaagagtgtgatgggtggtgacggaattcacattcttgggatgactggagcgacgatattgcttgccgcacttggattcatgtgaacggcatttcattgaacactgatcacaggtatgccggtatcctatatgatactcggcattgacgatggtcatgcctcaatgcggatgtggaggacagtcacctttagcgaacagacaggctgggagtcaattgcatagaaagatgcccgttcttgcgagacatccctttttatc

SEQ ID NO: 124299 - DNA, 318 bp, Glycine max
ctcatgatgatgaatcattttgatttcagaatttttgataatgaccgagatgatgacctaaagaccaaagaatgatttcaagatttggtcaaccagttccacataagagaagaagaattcaagtttcaagagaagaaatcaagaagacttctcaagggaagtattgaaaagatttttcaaaaaacaaacatagcacaattttgttttttcaaaagaattttttctcaaaattttctaagttaccacagattttactctctggtaatcgattaccagtttcccgttatcgattacccgtggcaaagtttgattcaaaag

SEQ ID NO: 124300 - DNA, 333 bp, Glycine max
tgtatgtttgtatttctagttatctcattttttgcattactttttttttttggattttatcaaactgtgcattaatttgtattgcaataataggaataaattgaattatatacaaagacataaatttacaaatattgcatacataaaagttaaagaaaaaataatatttatgttgatattacaataattgataatcataaatctttttaaattgacaaatcaaataatgaatgcattttaagatcatctttagttttcctacaatttatgaaaaaaatgtcaattttatcattatttttagttaacctataagaaaacatatcattaatgaaa

SEQ ID NO: 124301 - DNA, 332 bp, Glycine max
tgaggaatgcaatggcttgtgttatttgtgttgacttttaccaagaattgtgtatatatatagtttgtaagattctgtggaaacccaattcccagagaaagtgactgtcaatggatggagggcatacgcatgagatatcacatggtgttgtcttcggtccaactatgaaggataagttgtgaagacttgcgtaaccccaccttatcatacattaattggccagcataaagcctccacatgtaaccaaatgagacgtgcctcagtgaaacgtaacgtctattcaagcattatttggtattccatatttttgtaaacatgctctgggcatgttc

SEQ ID NO: 124302 - DNA, 344 bp, Glycine max
ccttgaaactaagctttataagtgaaatcaggtgcagccatctctctaagattcctctcacgaggtggaggttgagccatgttctcgtatgaaaattattagtggaatgctcaaaatcagaatattcataatcaccctcaacaaaatgctcagaatgctcaaaatgcacaagatgcacactatgcctaactaatctatgaaaggttctatctatttcacgatcaaagggttgtaaatcacctatattgccccttgtcatgcactatatgcagcaaataatgtgtttatcaacaagcacctaacatggggttaaaactacagctatactcaaaccatatcaaaat

SEQ ID NO: 124303 - DNA, 332 bp, Glycine max
ttttattttcagtagatgaagatgaatctgttgccacctcatggactcctctaagaacaatagcatcatttcttgcactgaattgttgggagttggaagccatcttctcaatgaaattcctagcctcaacaggagtcatatcaccaaggactccaccactagcagcatcaatcatactcctctccatgttgctaagtccctcatagaaatactgcagaaggagttgctcagaaatctggtggtgaggacaacttgcacacaatttcttgaatctttcccagtattcatacaagttttctccactaagttgcctgatgcctgaaatgtctttt

SEQ ID NO: 124304 - DNA, 325 bp, Glycine max
tgccgccacagagttttccaactatgctcttttgtggtggaacaagctacaaaaggagagagcaagaaatgaagagccaatggttgatacatggacggagatgaaaaagatcatgaggaagcggtatgtgccggctagttactcaagggacttgaaattcaagctccaaaaactaacccaaggcaacaagggggttgaggagtatttcaaggaaatggatgtgctcatgattcaagcaaatattgaagaagatgaggaggtaactatggctctatttcttaatggtttgactaatgatatccatgatattgttgagctgcaggag

SEQ ID NO: 124305 - DNA, 329 bp, Glycine max
tgcccctttggagtatacttaacttcttcattttataattattaggtttgaggggtggtgaagaggttcccaaatccattttcccacttatctggaaaatcaagattccaaataaggtggtttttctcatataaagggcattaaaggaccgcttgccaacaactgtgaatttgcaaagacgaaatatattggtggacagttcacattgttgcttctatcactctcaaattgagtcaatttatcatattttcatttcatgcaaggtagcctagtagatttcgttagaatgtagctcttggttttcttctaatcttccaacaacgttccat

SEQ ID NO: 124306 - DNA, 329 bp, Glycine max
tctaatggatttgggcagtggctttcaccctaatatgctgagaggataactaaatcttgcaactcagtacaggctccacaccatagagttaacgagcgccaacagaattatgatcagtttctttctcatggggaaaccgaaatgctattagacatggaagatgaggatctaagggctgcaattgcagctagtctgatggattcatccccagttgtgacaaatgctgaagccagtactcctcaaaatgataatcaaagtagtaaacaagtggcaaccactgaagctacccctctaaatgatcaacactccaaacaagtggaacccattgt

SEQ ID NO: 124307 - DNA, 325 bp, Glycine max
tagaagatcagaaaatttcaaaacttaccatcttatcaccctcaaaaagtaagaaggaccagttaaaatttccaatcagctaaaccgtgattgtgaatcagttatgtcatccattccattattattcagttcaacttgaattaaaccagttaaaattgagtcatgacatgaacaaagtgttccttgtgtgtgccagtgtgagagggagagggagcatgccttcttaagatatctgaattcagtgtttgttctttcatttaaaagatcctttccttcaagaatctgcaacaaaagaatcaacatgtacgtgcaattagagattgat

SEQ ID NO: 124308 - DNA, 323 bp, Glycine max
tctagatatattatgtgccttaatcgaacatccgagtgaaaagttatgaccatttgaatttctggagagctttcattgtacaatcttgagggtctcgatatattatgcgccagaatcggacttccagctgaaatgatatgaccatttgaatttgcgatagattttgtttttcaatttcaactgtctcgatatattatacgccttaataggacatccgagtgaaaagttatgaccatttgagtttattgagagcttacgtttttcaatttcaagcgtctcgatttattatgtccccgaatcggacatccgtgtgaaaagttatg

SEQ ID NO: 124309 - DNA, 328 bp, Glycine max
tgctgataggaacaatatatctctcagctatggatttctccatcatgtttggtttgcagataagtatgcagaagacaaggggaaagttctacagaccaaagaaggaagagtccaaggagttaccaccaacaagaagaaagatagagatgagctaggagtaactgtggttactgctgcattaagcttcctggctaattttgaagatgtatataaactatggacttttgttgccaggttccttgatgctgattttgtggagaaggagagatggagattcacaactctcaatcagaaaacaattgaagtttaatacaataaatttcacttc

SEQ ID NO: 124310 - DNA, 279 bp, Glycine max
gatatgcgaagataatattcccaggtccttggatttggtacgaacactccctcctgaatttcaacttggaaattggcgattggaggaacgccccgacatttacgcaacaagcataatgtgaacctttaccggtttaaaaactctatatttgggcctaagctctaaaatttttacttttgctaaggcgttgtgggctttgtgtttgaaattataatacaaagatcctgcttgatgtgtttctgggctctacccattctcattcatttgcatggttacttc

SEQ ID NO: 124311 - DNA, 332 bp, Glycine max
ttgatttgacaggttatacacattgattagatcacctatgtcgagaatcatgccaattacaagtttgaggagaaaaacgcacgatgagctcaaacggaccttaaggggcaatcagtggatgccttgccaatctaggtatggggcgtgtgagatagcctatatgatacataggtgtattgttacttaggaccttgctcttaacgacttatagctctgctttataaaattgtgccattaggttgtttgcatgttataatggagaaatttgttatttgccaattgtgtgattaggaatgcttcacagatttaaaatagatctctagatggctacc

SEQ ID NO: 124312 - DNA, 340 bp, Glycine max
tctcagcttcttagaaggttcgttcctaatttctctactattgcttcacctctcaatgagctggtgaagaagaatgtggcatttacctggggtgaaaaacaagagcaagcctttgctttgctcaaagaaaagcttactaaggcacctgttctagctcttcctgacttttctaaaacttttgagctagaatgtgatgcctctggagtgggagttggagctgtattgttacaaggtgggcaccctattgcttattttagtgaaaaacttcatagtgccaccctcaactaccccacctatgataaagagctttatgccttaataagagccctccaaacttggg

SEQ ID NO: 124313 - DNA, 332 bp, Glycine max
ttcttgagaaaacttccttgagaagcttctttgagataaattccttgagaagctagagcttagctacacacacccctctcataactaagctcacctccttgagaagcttccttaagaagattcctaaagaagctagagcttagctacacatacctctctaatagctaagctcacctccttgagatgagaagctagaactcagctacacaccccctataatagctaagctcacacccatgacaaaaaacatgaaaatacaaaaaaaaagtccttactacaaagactactcaaaatgcccgaaatacaagggtgaaaccctatactactagaat

SEQ ID NO: 124314 - DNA, 332 bp, Glycine max
ttaacattcaggactaaaatgaatatttattttatatttgtgctaggaaataggactacagaagcatcataaatttcggatacaaaatctcactttgtacaccggactctaaatagctgttatatgcatatcattgtcgtgggtcgaatatatttgagaccatcatttttggcaattcaaagatacacttcatatcaatttagtctcttaaagatctgtgatgtacggatgtcaaattagtccttcaaagaattttggtgacatcaaaacagtcttttgatcaagttggtatgtgacaattgcttgaaccattttcatgacacatatttgag

SEQ ID NO: 124315 - DNA, 334 bp, Glycine max
cgaatctaaagagaaattgtgtcgacggctttttctgttctttggttcattattctgaaagaaatgaaaccaggtcaagtgcggactgcggatttggatcgcgtcttcacgacactttatagtagttttgggcttgagtacaatgtttttttttgctttgttaagactcatgtgcagtagtcctgtggggttttaaaattttactctattggtttttaaaacatcacagtcaaattttatgtttttattctattctttgtactttttacttatggacttgggctctcttctaataggcccgacagtaaaattttcacttctacttcatgcaaat

SEQ ID NO: 124316 - DNA, 304 bp, Glycine max
tatacacattgatttgtctctcttttccataataacgccaaggacaagtttgatgagaaatacacacgaggagctcaaactgaccttaacgggcaattctgtggatgccttgccaatctaagtatggggcgtgtgatatatcctatatgataaatattgtgatctgtaattatgaccttgctgatagcgacttatagctgtgctgtataaaattgtgccatcaagttgtttgcttgttgaaatagataaatttgccatcctccaattgtgcgactatgattgctacctatattcaacattgata

SEQ ID NO: 124317 - DNA, 328 bp, Glycine max
tcaacgccctctcgagcatctcacaggccgtaatgaaatccggtggggacaaagccatagcatcccttgacacatcaacaaaagcaagcgccatagccaacacaacatcctgcttaaacgtctttggcaacctctccctaagcaaaccctgcccaatctcaagcacaagctctgtctctccagcttcctgcaacacacacaacgctccaggaacctaccaaacaaccatttcagtcaccaatgaaaccaatcagaaatcaaactacgttccattaagaaaaaggaatagaaaatagaagccttaattaattacacttttagttcctac

SEQ ID NO: 124318 - DNA, 328 bp, Glycine max
  unsure (1)..(328): unsure at all n locations
tgtaggattatggggtacccatctcttgtttttctaggnggcggacgggcgatggtgcacatcaagttttccacatccagaatgcgcgcataaacccaccatcccctgttgcccacctccaactgagctcacgtactcccacgtaacccatatactcgtttctctcaataccgggtccccatcaatccttccatgctttcacaacatcctatcataactacattcaaacagctcacgctatcacagccaagccaaacagagcaaggcagataactctgctcaacacaccaactaaaatcacaggttttctcacttaaagaccccagtg

SEQ ID NO: 124319 - DNA, 326 bp, Glycine max
tctacttatgtggcagggcgggctttcttttctttcttgtctcaaccgcgagctttgaccaccgcccttccttcccgcagatgcttatctttacatctgcctgagtgggcttatagcctaaaccatacttgccacgatttcctttggcatttatcaagctatttatgccaccgttgtctttgcctaaacccattccgggttcgtaaccgttccccaacataactcgggccatcattacttctgcatcggacaggcaagctcgcccagagaatgagtccacggaggaaatgcttaccacctcaaaagactggaaagcggattctaat

SEQ ID NO: 124320 - DNA, 331 bp, Glycine max
tcgaacttccgttggagttgtcggttgttgccactccataaccgactccaccttgttcggatccaccgcaaccccgtctttagaaatcacgtgccccaagaactgcactttctccagccaaaattcacatttcgacaatttggcgaacaacttcctatccctcaggatatgcaacgcaatcctcaagtgcttctcatgctcctcattattccttgaatacactaggatatcatcaatgaacacaaccacgagctgatctaagtaatcatggaatatacgggtcatatagtccatgaagatagccggagcattagtcactccaaatggcatg

SEQ ID NO: 124321 - DNA, 328 bp, Glycine max
cttgaatggtcatcattttaaccgttttcattgtttagaatcgaaaagttggaagtaaactgacaagggaaaggtgaattgcagaattttaaggatcaacgagttcattcgatcgaatgaaccatttaaaatgacaggcgattctaaatgcgaaatgaaaaatgcattgcattcgaaatgtaaaggttacagaaacttaaaatggttcacaaacatacattctccttgcgtactcgattctctatgtgctgggtactttgagtatataacgatgttgataaatgatttgcgacctcgaaatctgactaacaactgctatatatataca

SEQ ID NO: 124322 - DNA, 333 bp, Glycine max
tgctgcaccattgacagatttacttaaaaattaagcattcaagtggacaccagaggcagagacaacatttgttcaattgcagaaagtcatgacttcagctccagtgttagctcttcctaatttccagctgcccttcattctggaaactaatgcttccgacactggtattggagcagtattacatcagaatggccatccaatagcatttttttccaagaaacttgcacctatagtgcaaaagaaatctgactaatttagagagatgttagcaattggtgaagctatagctaagttcagacactacttgttgggacacaaatttattatcaaaac

SEQ ID NO: 124323 - DNA, 331 bp, Glycine max
taagacaacttgtgtaataaattacaataattgttgttttcaattaaaatagagagtttttccttctgaagaatttttccaactttagaaattttcttaattcttaataattttactaatgctaatgcaagcaataaagcaataaactagttctttccaaatgcttatgcaatgcaagcaaatatgcaattcatacgcagttcatctccccctttgggcattaacaaggccaaagagtttaaacttatgcacaaaaaagaacacacaaattgaaggaaataaaccatagcatttcattaatcatgaaacattgcaaacaattaatcattaa

SEQ ID NO: 124324 - DNA, 337 bp, Glycine max
ctcaagcttgagatggagcaggtaaaggcgtgggattcttacttgtgtgttttcaccaacaacatgatggcaatcaatttccaagtgtttggcatgtttgtgaaaaactggatttgcagctatgtgaagagcactttagttgttacaatattaatttaagcgaggtacatgtgcattgaactttcagattagagaacaaatatataagtcattatagttcacaaacagcatagacaaatgctttatattatgggctgggataagtgttttgttttgtaatgtgccaagagacatgcatgacccaagaaagaatcactagtcagaggtggagcgcctt

SEQ ID NO: 124325 - DNA, 311 bp, Glycine max
agaaactaagcttttaaaaggggaaagactcacattactttttttaatcatattcaaacttgtccaataaattataaaattctcggctctaacaaggtcgtctaagactctacaattaatatagaaacctatacttatgtacatgctatatagcattgagtgcgacgtccttcacacaaggttgctaagcaattcacctatcatttgttcccccgaacacaaagttcaaatcatttcaagatccatagcttacaacacacagggaatgagttttccattcctactaatagatataaacaagatgacatgta

SEQ ID NO: 124326 - DNA, 337 bp, Glycine max
tataatctattataaattaggacctaagcttctgattttattacatgtaaattggtgaaattagctaatgaactaactgataaatgtacaatgacatagaaagacattaaattatttggttataactttatatataaacaattcattatttctaaaattgagagactgagagggatacggtaggcactaagcaaaaggatttttaaaaatgagaaaaagggttaaaaaagagattttaagtaaatcactaaggataaaaatagaaaaagaaaaactagtagcttataggctaaaaaactagtaacaaactaaacttattttggtcaaataaacttat

SEQ ID NO: 124327 - DNA, 326 bp, Glycine max
tgaacaaatataagaaacatcttcttcgactttggtgattctcgactccatctcattgaagcgcatgtccacttgtaattccaaagtatcaaacctttcaccaacaaaggtttgatgaccatcaaacctatccaaaatctttgaaaaaagagatgaatcttcttcatcatgtccttcttcaccaacatgtcgagcaccctttttcacccaagagccatcatgctctttttgataaccaaaggatgcaatgactgaagcgcctattagaaaggatctcttgattggaaaatagggttcataatcaagagggatgttaaagtgttgaa

SEQ ID NO: 124328 - DNA, 328 bp, Glycine max
ttaaaagattggaaaagaaatgtagtcaatttcaagtcattggacatttatgatgcaaattattataattatgcaatgatgagtgtctttccgacattacctaacattagcctgagctttcatcttaacctgtaagtggacatgccaaaccaaactcagaatttgcctctttcaccgccagcatcatgtaattaaccaagggcaattttcggttctgtgcatgaaaactctatttattatgcaaaccaaaccaattaccaaacagtgtcttgatattaattagtgctaagcacaattataaatcaagggagattgtcgtccacagagt

SEQ ID NO: 124329 - DNA, 325 bp, Glycine max
tgagatgaggaagtgttgaagggtgaaactttctgcttttattgttgaccacacagtggtacctggaaatatgtctcgggggtcatgagaccttggggacgtcatgtggggtgctattgcccaaaaccaatcttgaccaatcccgacccaacccgggcataatcggtcagtgagaacctgtgatgtacctaaacaggcgagctcctggcagtcaacagattaaatgaaaacatgaccacaaagcaaggaggcttgtggtggctggccacctgtgaattttgtgtaatatgtggatggtggcctctggtaatctattaccaaaggt

SEQ ID NO: 124330 - DNA, 319 bp, Glycine max
tttgctctgttcttctttatcactaggctttcatagtctattcagacttccctttcattctctacaattcatgcttaaaaagggcttttttgtccatgaaagcgcgcttagtgtcatcttcgtgcttatcacgagtaagtgaaatttggcttagcgccattctcgcactaagcacagaagagacaatcttcttgctgaacgagctgatgacacgctgagcgcgtgatgacatggcagattctcttcaatattcatctcactcgctaaggggctgatgtctcgcttatcggttgagtctcgctaatcgcacggtccatgc

SEQ ID NO: 124331 - DNA, 324 bp, Glycine max
ttgtattttcaatagatgaagatgatatccgtggccacctcatggactcctctaaggacaatagtatcatttcttgcactgaattgttgggagttgaaagccatcttctcaatcaaattcctagcctcagcaagagtcatatcaccaagggctccaccactggcagcatcaatcatactcttcttcatgttgctaagtccctcatagaaatattgaagaaggagttgcttagaaatctggtggtgaggacaacttgcacataatttcttgaatctttcgcagtactcatacaagctctctccactaagttgcctgatgcctgat

SEQ ID NO: 124332 - DNA, 331 bp, Glycine max
tgtgcaaaaatgattgtcaaacctacattctatttgttgattgttttgttagttcatgacttccattcaaattttaactgtaaaaaagacccaattctgcttttggaaatcatgatatatgattaaaattaaactaggaattccaaaaataaagcgctgaggcaattagttttaaaaataaatggaagaatttatttagagttctctgatagagtttgaaatgcttttattgtagatttgaaggcatattggttctatagccaaacagaagagtcatttgtgatttccgaaggcattttttggcattatgcttcctgctactgattagatg

SEQ ID NO: 124333 - DNA, 332 bp, Glycine max
tcttagtctcagctgatgaagatgagttcgtggctacttcatgctctcctttaatgacaatagcatcatttctggcactaaattgctgggagtttaaagccatcttctcaattaaatttctggctttagcatgggtcatgtctccaagggctccaccactggcaacatctatcatacttctctccatgttactgagtccttcataaaaatattggagaagaagctgctcagaaatctggtggtgagggcaactggcacatagttttttaaatctctcccagtattcatataggctctctccactgagttgcctaatgcctgaaatatccttt

SEQ ID NO: 124334 - DNA, 310 bp, Glycine max
tgtagcatatacgaacgacaataacatttctctcggtttgtcgattgaggcccgggtatatcgaaacgctcaaaattgaaaaccgaaggtagcagcaaattttgacgacaatctcttttcactcggaagtccgatcgagtcccgtaatatatcgagacgctcgaaatttaaaaccggagctaggacaaattcgaacgacggatacatttcactcggatgtccgattgagtgccgttatatatcgagacggctgagatttaagaccgaggctagcatctcatgcttacgacagttacatttcactcggaag

SEQ ID NO: 124335 - DNA, 328 bp, Glycine max
tccagctatggggcaactgaaactgagtctggctctttgtcatggagtttcaccccaagaatgtacttgaccgccatttagatctgatagagcattcctatcccatctagatccaaaatgacttgccagaaatgaaggctgaactgcaaaggtgctcaaatttctgttgtggaagtttgacatctgtttctcactaaacttggcaaaactcttcagtgatcaaaccaccccctccactcagatcttcagcatcaaaaactttatgaattggtgattccctttcttccagttcatcctagtttttaaaactagtgacaagacgtgagaa

SEQ ID NO: 124336 - DNA, 327 bp, Glycine max
tttctccaagcttcaagctttagttttcatgttgttcatgttgccccctctatctctatcacaacctggataagaggaaaatgcactggactctttgggagaaactaaaagtttctaaagcctctgttggtttcgggttcaaaagactcaaacattttaacaatgctatattggtaaagcaattttggtgattaatgaccaatgaagaatgcctatcctctaaggtcttgaaagccagctactttcccttatctcctctcgatgcaaaaaaaacaacttttagaccttgcttcacctggacaagtatcctttcttctcaagcaacta

SEQ ID NO: 124337 - DNA, 323 bp, Glycine max
tacaaaacctatgtatctttgcaaaaactgttcctcttgttgcctccggagctttttttcccaaaataggcattgtggtatgctctggaatatgtgcaaatcatctgcttaccctaattctgcacaaaacaggctttaaataggctctgaattcgcaacgttgcgcttatcgccaccctcgcgcttagcgtgagtaagtgggtttgagcttatcgccaattgtgcgctgagcctggctgaagacaactgctgcgcttatcgcactgatctcgcgcttattgtgcgaccttgatattgatgtcctgccggattcttctatcgcg

SEQ ID NO: 124338 - DNA, 329 bp, Glycine max
tacatctccaacataatggttaattgtgaatatgtctaatgagttgagggaacatgctgcagaagatttcaaaaataactaaagaagtaagaagataatacacaatgctatattaactgtaattgtcaatcatattatattcagaataaaagccattaaccacaggaatgcttttcaaaacaaaagaatgtttggaggtcacagtcacagtaatgaaaagcatggtatagcttaagcaaacaaaggagaaacgataaggtttgttgaaaaaaattggtagcatataatatttaattttattaaaattaagacataatactgtatgcata

SEQ ID NO: 124339 - DNA, 327 bp, Glycine max
tttcgcaaagcttacggtaagatctgggactcttccatggcagaggtctccacagaggccattgcctccctcgcccaatattatgaccagcctttgaggtgcttcacctttggggacttctagttatcacccacggtggaagagtttgaagaaatcctgggatgccctctgggaggaaggaaaccatacctcttctcgggattctatccctctttagctagaatttctaagatagtcaaaatctcgacgcaggaattagaccgcggaaagcaagtcaaaaatggggtggttggagtaccaaggaaatgtttggaagcaaaagcaaga

SEQ ID NO: 124340 - DNA, 217 bp, Glycine max
tgtacttggtttatacatgatttacacatgttttatgtcttgcaagatccaattagggcaaaattggacgatgtcatgtgtgattttcaaaatctgcactattatgcaaaattttgctattgaaatgtgcagcagaattctggctttgtgcagaaaatgatgcgtatttgctggttgtggaaagaggatgacagactggatattgatagaactctgc

SEQ ID NO: 124341 - DNA, 321 bp, Glycine max
tgcatactgacttgagtatggcatacacatttcatgtttgatatgccttttaaaggcttgaagagtgtgagaaaacgggctgtgttttctggaaaacgcgatgaacttgctaagcgagcatgctgcgctaagcgagttcatcaatactcattgtatgtaagcattatctgaagaaatcgctaagctcgcttaccgcactaagcaagttcatcttttgaggaagaacactaatcctcttgttgaactacctgtggctaagcgaggtagaatcgctaagcccaggtaacttaaccattttttttgtgatagccgcgcgctaag

SEQ ID NO: 124342 - DNA, 291 bp, Glycine max
ttgaggacttggtctatgccatttctatgttctatttaggccccaaaaaaggcatattttctctttctacttatacaattgaaaacatcctgtgcaataaatatggtgacgaaatggataaacccatgttgagactgctcattcatgtgcgagcaatgactcccacaacccaaccatatctttgctgagacaacaacttaacccatccttgcactgcatccatgcatccacaatggccacgactcagtgtaccacaccatatgtgtaccgcactttccgtgactaactgcc

SEQ ID NO: 124343 - DNA, 282 bp, Glycine max
agcttgaggtatgactcacagtataagttttgggatcctcattctatttgacctgcgcacggcagacatcctgaatggccacactgtcattgaaacttggggcaaggaatcacactgaccatcgtacttaagaccttactggaatcattaaaagcattttttgctcctatggcgaataaatgtatgcgctataagtgcctaattatagtttttcgatgaaagggacattggcaacctgtcgttctcgccacttgggctatatagatggacggccagttcttt

SEQ ID NO: 124344 - DNA, 440 bp, Glycine max
  unsure (1)..(440): unsure at all n locations
taattataattctggttgtgggatatactactttttcttacttcccacttattccccattgctcctctattactttgagtattagctactatcccatactttcatctaccgtgtccttggccccattacaaccttaaaagaccttttgatcctcatatgcatgtgcttgtgatgtggttgtcaattntagagtcttgccaagtctatgtggtgtttgttttcatgggtgctttgagagtaaacagtagcctacaaacttgagagatagagtgcatatcttgtgaggctgtatcacttttcattcttgagctgattgactatcttgccatgtttgagatgctcggatgattttcatgacgaccttgattctntaactctntacgtgtnggatgttacccattcntttcataccttgagattcattgaggaagtatgtatta

SEQ ID NO: 124345 - DNA, 336 bp, Glycine max
  unsure (1)..(336): unsure at all n locations
cacaagcttgtggctctattagacgatgtttgatttatacacttaacaacaccattgagtngaggcatacctggcacaatcctttccattntgatcccatgctaatagcaaaacttcctgatcaaatttaagctatatgatcttcaaccatgtcccgttttctaccatggctttccatgagacatcctacaaacttctaccctgaagtgtgtaaacgatgcattgtgaatgattacatatatgtattattcactgtatatatatatatctatatatatatatatatatatatatatatatatactcctggtagaagtacgtatattgtgggaaaga

SEQ ID NO: 124346 - DNA, 138 bp, Glycine max
gagcttgcttgccgaagctatcttgttttttgttcagcgcaccacaggggcggccttcaacgatgagatctccccatttgggggcaacctagagccaattgttacaagacactgaagctcactatgctattttaatta

SEQ ID NO: 124347 - DNA, 406 bp, Glycine max
tatggctctagtcactactatgtgaatccatttcctatgcatcattgtaagatagggggataagaatgacgcatgcactagaaagaggaaaatcaggctctttaaacaatagacacatcaaatgtctgagaggagactgtgactattgatcatgtaacttggtctctgcatttcttttttctctttattccatatatgatacccatagccccaccctcacacgtagggtctatagaataataaatccatctggaggctcttagatatggctggactctatcggcatcaatagctatcaatcttctttggtgacaaaagtgctatcaatatatcacaacttatctatgttatcatcatttatcatatgaaggatacttttgactcatatctgcctccgttcatatat

SEQ ID NO: 124348 - DNA, 328 bp, Glycine max
agcttgaacatccaaggaagcttctattattttcaacacttcacgggagcgcgctacctggatggcgttcctcatattagggaccacttggaccccatttttaccaactacccaagggactaaaactatattttctactcccaaagatcacgccgttatttatacatatacggtgcctttacaaacgacttaagaaacgagcctgaaatgtgctttgagaccaaacgggctctaactgtacactctattatcattagaataatacaactacatatccacctatgacatcccttaataccttattctgagctgatgaccattaaattct

SEQ ID NO: 124349 - DNA, 330 bp, Glycine max
gcgctcgaacatacaaacacggttatatattgtgtaaagggcactacaactcaatgagcataactggtttgcccaatttattggacttcctgatccactttaccataaaagcaacccagtgatttgaatggtgtctgaaaagagcaaaaaactcgtccatgtttaagacacatcaatgtcccccacactaaaccttttgggcacctgggccagatgaaaaagctacatgggacctatccatggagcttatttagagacaaactatcgcctaaacatttacctgttttttaatgagactccacggattaaaaggaatggaaacctccaacc

SEQ ID NO: 124350 - DNA, 330 bp, Glycine max
ctagcttttaccaaagaagaatgttgtggtctactatacaaagtttgatgaattcaaagaggaactctagagatgccacttcgatgaggagttgactgattttgctgaccgcaacatcgatgttgctattgtgaaggaattctttctaaacctctatgacccctaggacaaatcacctaatcaggtgagggtgaaaggtcatcacattaaatttgatgaggatactctcaacacattcttgaaaacccttgttgttgtggaagaaagggaaacactttgtgcatattccagatttgcacttttgaggcctgacccttatgagttagctgc

SEQ ID NO: 124351 - DNA, 483 bp, Glycine max
  unsure (1)..(483): unsure at all n locations
taattataattctggttgtgggatatactactttttcttacttcccacttattccccattgctcctctattactttgagtattagctactatcccatactttcatctaccgtgtccttggccccattacaaccttaaaagaccttttgatcctcatatgcatgtgcttgtgatgtggttgccaatattagagtcttgccaagtctatgtggtgtttgttttcatgggtgctttgagagtaaacagtagcctacaaacttgagagatagagtgcatatcttgtgaggctgtatcacttttcattcttgagctgattgactatcttgccatgtttgagatgcttggatgattttcatgacgaccttgattctttaactctttacgtgttggatgttacccacttctttcataccttgagattcattgaggaatatgtanttattnntngtgtctattatntctcattaatgcctctggagttgta

SEQ ID NO: 124352 - DNA, 317 bp, Glycine max
agcttgaagggaaactttatgcctttgtccacctagttactcagcttggccagaattaaaaatctggcccttgtgcaagaagttggggtctttgttcttctggctattccccatataaaatctctattcttcttttgcagcaatctggaggtcatgagccacctggagcctttgctgcaaatatttataatagaccttcttagcagcaaaaccaacaaccgcagaataattatgaccttttcagcaacagatacaatccaggttggaggaatcatccaaatctaagatggacaagtcctttacaacaacatcagcct

SEQ ID NO: 124353 - DNA, 426 bp, Glycine max
  unsure (1)..(426): unsure at all n locations
gcttctaaggaggtgagcttattatgagaggggtgtgtgtagctaagctctagcttctcaaggaagttntctcaaagaagcttctcaaggaagttgtctcaagaaagcttctcaaggaagctacctagtctataaatagaagcatgtgtaacacttgttgtaactctgatgaatgagagtcttgtgagacataactcaaagntcaacttctctccctttttcttccttcaatttcgtgctcccccctccctctttctctccctctatcttttcctccattgaagcatcctctccaagcttcttatccaaggctcatcttggtggtgaagctccttcttccatggcttattccttaatggatggcgcctcctctcacctactttcctttgtcttccgctgcatcttcattggtggaaatcaccatta

SEQ ID NO: 124354 - DNA, 326 bp, Glycine max
agcttttaaaataatcaaagatcaagttagggttaagacaatataggttgcacacaaagagatctccaaaattgttcaagagacttaaaagaattgattagagactctgatgctcatatgtttattcataattttaggagaaagcatgaggtgaataattcattttactatgattatgaggttgataatgaaaggaggctaaaatatgtattttggaccaatggcgttttgtcgaaaaattattctttgtttggagatgcaatttcatttgacacaacttacggtacaaataagtatagcatgatttttgcaccattcacaggtat

SEQ ID NO: 124355 - DNA, 533 bp, Glycine max
  unsure (1)..(533): unsure at all n locations
ggccacttactagtagaaatggagcataaagcatactgtgctttgaagnnttttaaatttgatgagactctatcgagggagaaaaggaagctgtaactcttggagctggaagagataagattgaatgcatacgagccttccagactgtacaaagaanaggtgaaggcttatcatgacaagaagttgctaaagaaagacttccgaccaggccaacaagttctattattcaactcaagattaaagttgtttctagacaagttaaaattcaaacggtctggaccattcaccatcaaggaagtcaagccttatggagcaatggaattatttgaccctcaatcagaaactccagatagaagttggacagtaaatggtcaaagattgaagctataccatgatgggaaaatngagagaatgaccaccattctgcaattacaagacctatagaggtaacatacatcgagctagtgacgttaaagaagcacttactgngaggaacctanattttcttaatttctcatcattttctataatca

SEQ ID NO: 124356 - DNA, 326 bp, Glycine max
agcttttctttgagggttgattggttttgttgcgcacaatggcatgatcactggctgacatgttctcaattagctcagttgcttcttctagggtcttcagctttatttttccccctgcagaagcatctatcagatgcttggtttgtggtctcagcccatctatgaacgtattcaattgaattggctcggaaaacacatgagtaggagttcttctcaataaacctctgaacctctccaatgccacactcagagattcatcagggaactgatgaaatgaagagatttcagctttcccctctgcagtcttggactctgggaattatttc

SEQ ID NO: 124357 - DNA, 439 bp, Glycine max
tgccacccagctcgcccaggcgagctagggtgcttcctccatatgcaccgacttctggagaacttcctggaaggcccaagagggcctggttgctatttgcaccccctctttactaaatacaccccttgcctttattttgctgattctttttccgtaacgttacggaaacttacgaattacgtaacgatacttgttttccttccgtaatgttacggaaccttacggattacgtaatcatccctttttttttcctttcggaatgttacggattacacactaacacttccttttaatttccggcatgtcacggaacttcacggattgtgctacaatgctttcttttgacttctgctatgtcttggaacttcacgaatagcctaacgatgggtgccaggtacctccgagttgtcaaacgagggtcgcatcccaacaatggatg

SEQ ID NO: 124358 - DNA, 331 bp, Glycine max
agcttgcatctacagtttatatttctccttaaattaaattaaaacacagaattagtcaagtaggcccaaatgataaaactacataattaatttgacaattaaggctaattagtaattaaaatggtgacagaaaggagtaagaaataggagaaaataatgacacattaaattcccccacacttagccttttgcactcctggccaaaatcaaaaagcagagcaaggaacaaatccagagacattaaagagagacaaacaaacacaaaaacatttacatatttctcaatgaatctcaaggaattaaaggaatgggaaacatccaacacataaag

SEQ ID NO: 124359 - DNA, 370 bp, Glycine max
  unsure (1)..(370): unsure at all n locations
ccttaagcacttctctctctnttcgaattgcttggaaaaattgtttccgtgaagaaaatccaagccgaggcgcttccgaaacgtttccgtaacgtttctgtgaagaatttcgcgaaggtttcgaccgttcttcgacgntcttcattcgttcttcatcgntcttcgatcttcaacgggtaagtacctcgaaccaagcttttcgattcattctatgtacccgtggtggtccacattgtgtttcgtgtatttttattctcgtttcatttactttttatacccnctctggacgtgcttaagccattttatttaagtcatttctcgtttaacctaaaaataaaataaatttccaccgatcgtttgaattgtatta

SEQ ID NO: 124360 - DNA, 327 bp, Glycine max
agcttccacaaatccctcatgttagactaggtctaaactaaacaacattattgtaacaatataattaaaaccaaaacttaacctacaaatccctcatgtaaggctaagtttcaatcctgcttcaatcaagttctaaggcaataatacatttcctaatgctaaagtcacctaattgtgcacacaaatgggtgatcagaccaaaagcatacaaacattaagcattgaagggagcattgaacacagaaaacataatcaattagatattaggtatttacatcagctgttcattagaaatccccaaatagggtgtttagccaaccattaaaa

SEQ ID NO: 124361 - DNA, 357 bp, Glycine max
  unsure (1)..(357): unsure at all n locations
tcctgactcaccataaaccttgacccacggtgagaatgtcaatccttaccctcggaagcaaaaaagaatagaagggaaatttccaatctaagaanagagaatgaaaatntccaatgaaagaggaaaaagataagataggaaattcccaatcaaagagtgggagaaggaaaaaagaacaggaagaaaattcccaaccaaagaatgggagatagtaaaaaaggaaggaagctcctggtcaaagaaaccagaagaaatgtgcagagaggtctttggaccacacgatatctgaacagtacagaattgtcactaaatgaacaaaaaggaatgaaaggaaaccacgacctaaaatggtcttct

SEQ ID NO: 124362 - DNA, 279 bp, Glycine max
aacttaacgatcacctagatcatggaggctccaccttggagaacttcgctggtgtaaaggatcgccctctgcatttttcttatggcctaccacaaaaattattcttattatagagtctgagacgaaaatgttataaacaaatcattctttcacaattatcctatgacaaattgagatgaaaaaaaagtcccctgcattaacatcatcgtttagcattgctcactcccctgcaggtctctgggcttggggactgactggggggtccttatggggattaag

SEQ ID NO: 124363 - DNA, 377 bp, Glycine max
ctcagcttgcattgcttctcattatacgttattttatttgaatttctaatcttcttacagagaagaatgacttgcttcttatatagtcctttctagtaagcatgaaaaattaatggatgacaacacaatgtattatgctctattaaaaatattcttattatattattttatttctttaaactttaaattagtgggagattgttggaaaatattttcttataattcgaaatttataattaaaatatcttcttattaattatgtcttttaaagataaaatgctcttataattagttttcgtgaataactaaaagcatctcgctacttctattcctatgttagaaagctatcttttactggctcacatgtccttgtgaat

SEQ ID NO: 124364 - DNA, 299 bp, Glycine max
agcttacatcacttatcctttaatttttctcccaccagctatcaaccttacgttgccttacaccattcagccacattccttggagctgaaactactacctgcgtaccttaaatatgcctatttaaatgttgctcagaagctcctaatcaatatatccaacattctttcacttgagcatgaggataagtccgtgcacgttttgagaggccacaaaatgggcattggatggacacttgttgaccttcttggaaaaaaagcttacatatgcgtgcatcagatacggtttgaggatgattcta

SEQ ID NO: 124365 - DNA, 465 bp, Glycine max
  unsure (1)..(465): unsure at all n locations
gctttggagaagacatggaccactcatttatttaaaaaggaagtcgtatctagtcaaggtctgagagaccatacaagtttcctaatgatttctaattatgtgggccattaagtctatcatatgctgacaatagccgagaagcccatgaatctcttctggggcggagtangtgtctgtcatcgccttggccttggctaacaatcggggaagttcttgactgccgttcaaagtaagagcaaaccgatccatccacatggttgcctcttggtgtaaagagacgatcacccttcctctagcctctttntccgcgtatacttgggcatactcatccgcgattctatgctcgtgggcccgggctagacctaactcttcttggtacttggaacgatagctaacatgctggtctctgtctcgcataaacgttgagacaacttcttttggacttgaacancaatcaactctctt

SEQ ID NO: 124366 - DNA, 318 bp, Glycine max
gagcttgcaattggatgaaaaatttttttaattttatgcccaaatacgttgtgctatgcttggattttaaagaaagaccactctgtttgctaatagaagtactaaggtgcagagttatttgagaataatgttttggattggactacagcaagaaagttccagcctaagtgaatatgaaaaaataccagaaaaccctatcgagggcaagaaataactgatagacatattatccaataacatgaaaaaaaccggttatgaaataataaaaaaaaaattccgaaattaaaatcgttgctcacttatatggtattattattt

SEQ ID NO: 124367 - DNA, 431 bp, Glycine max
  unsure (1)..(431): unsure at all n locations
tggagtcttgctggttttgcgtcttcttggtccttattgaggtctggacttcttctatggtaatgtcttgatctttgccataaagaattgaatccttgaaatgttcaaaggattttggtaggaattcagaagcaagagtgctttattctcctcttcaagctttacttcaatattttccaaattatcaagaatcttgttgaaatcagccaatttgttagtggctgttcttgactctgtcatcttgaaggtgtacagttgttgcttcaagcatagccgatttgcaagggactntgtcatgtacaatgactccagtttcaaccagattgaggctgttgtcttttctcttgcaacttctcttanagctntatgtccaacggcatagaatgatgcacttcttgctctatcaatcatctctgatttctcctttgagc

SEQ ID NO: 124368 - DNA, 328 bp, Glycine max
agcttattaaaaaaagaaaatttttttatttatggaggatccaaatagcctttttttaaaataaaaaaaagggcactctgtattttttttattgactcatacatctattatttatttgatattggatggatgtataatgtcatagagaaattatttttacacaaataaggatagtctgattaatatgaaaaataaatgctccgcaataacattaaagtaaaaaaaaaaaaaaaaatctattgtttactggttttggggtttgtgtgggggttctataaaaggattaggaaatgggaacataacaaaacataacattgggataaggaag

SEQ ID NO: 124369 - DNA, 359 bp, Glycine max
ccaatagagctcggtaccatcttaatccccaaatcatggagatccaacacgcgaaaacacttgaacgtgtcaaagattttattcgcaggtgacgtggccatctttacctcatgtggaagccgagaattgtttgtttttcccagcaaaagaatggtccttaggttcttcgctttctcgaacaaagcctcatgaatttcgcactgaacatccaacgcacaatcaaaggaagctcgcaccactctctcgtgaactcatttgccatctgaatccactacgatattctcgtcccatgcaacaatactcgccagttcatgcattaaacgggtcatcttgtagctcttcacaacaccaaattcgtc

SEQ ID NO: 124370 - DNA, 339 bp, Glycine max
agcttgatgtagagcttgattgtgtattatttaaaagtgatactaaacaatacttgtaacttgtgtgaagttagtgaaatttgatgattttccaagaattggacgtactctcaatggtagagatgaaccagtataaaactttttgcatttgatctttcttgctttcctttaagttttatctaaccaaagggtgtgaatttgtttttagatttaaatagatatctcgggttttctaaaaacatttttacatcatctaatagtttttttgaaaaatctataatatgctctttacaaagttttatcagatgaaaactttgttttaagtgaaaaaagatttta

SEQ ID NO: 124371 - DNA, 430 bp, Glycine max
  unsure (1)..(430): unsure at all n locations
tatggaggctggatctttgagcttcaatgaagtcctttaatggtgattntctagcatggagatgcagcggaagacaaaggagaagatgtgagaggaggcgccatccactatgggaataagccatggaagaaggagctttaccaccaagatgagccttggataagaagcttggagaggatgcttcaatggaggaaaagaaagagggagacaaagagagaggggggagcacgaaatngaaggaagaaaaagggagagaagttgaactttgagttgtgtctcacaagactcttattcattaaagttacaacaagtgttacacatgcttctatntatagactaggtagcttcgttgagaagctttcttgagaaaacttccttgagaagcttctttgagaaaacttncttgagaagctagagcttagctacacac

SEQ ID NO: 124372 - DNA, 328 bp, Glycine max
agctttttcatcagaacgttgtcatcgttatttacaagacgagaagggtatcaaattcttccatttcccttaccttttctttctcccaaacacgacctaactgaacgagcttagaattagatagagattgggggaaagagaagaatgaagttgtttctagaagatgctagaaatattactgtagcagttcgttattcaaacctaggaacataatcaaccctaattcccaaatcaaaccctagttaagaaagagagaattcccgataacctaagtgagggaaaagagaaaaagaaaggatcatcacaaattaaacctaaatcaaaacct

SEQ ID NO: 124373 - DNA, 424 bp, Glycine max
  unsure (1)..(424): unsure at all n locations
ngtaaggaagcttctaaggaggtgagcttagttattagatgggtgtgtgtagctaagctctagcttctctaagaatcttctcaaaaaagcttctcaaggaagtttctcaaggaagtgagcttagttattaaaggggtgtgtgtagctaagctctagcttctcaaggaagttttctcaaagaagcttctcaaggaagttttctaagaaagattctcaaggaagctacctagtctataaatagaagcatgtgtaacacttgttgtaactttgatgaatgagagtcttgtgagacacaactcanagttcaacttctctccctttttcttccttcaatttcgtgctcccccctctctctttctctccctctntcttttcctncattganacatcctctccaagcttcttatccaaggctcatcttggt

SEQ ID NO: 124374 - DNA, 272 bp, Glycine max
cttataattttacttactggtacaaaattaattaaggctttatgggtatttattcaaactaaagccgttttccagggggtttttgaccaaattatgaataatttgtcattatcatttatgaaacattcagtcattccgtaggattatgcacttgcttaaatttatttatctgttgactactatacaccgccatttattgagaagaattatatactttgatttaactggcaccgatgcaagaggaccttctgcgcatgaatgcagagaaccaa

SEQ ID NO: 124375 - DNA, 344 bp, Glycine max
  unsure (1)..(344): unsure at all n locations
aattctggtacaactgaatagcttactaactaattcagcccactaactaactatntctgtaaagctgtttatactgctaagagatctctcattctgatgcaagctgtgtttatttctatccaacaggattgctttttattgtgttgattggtagtatactcattcttttagtagaggggactaaaataattattgtcaaaaatcaatgacacaatgtcatgaaaccttggggtcatccatgatgaattcctatatggttggttgaattcatatttccttgtgatgttaaatgaacgataacctacagaattaattagcccttttggtctatagttctacatctg

SEQ ID NO: 124376 - DNA, 295 bp, Glycine max
gggtttaattttatgtgattggtgaaaatcattacttaccatataaagggattggggaggggtttaaagtgggctttcattaaaacaatggtgaaaaaagaacaagtagacatgttgggcataccaaagaactaaaaagaagtgatagataagccctatgtcaagctctgggggacaattttgaaattagatgggatatgcagccaacaattaataatgctgggggaatcttatgtctttggagcgaggaaactttttaattgaggagatgattgggagtgatttcatttacttg

SEQ ID NO: 124377 - DNA, 528 bp, Glycine max
  unsure (1)..(528): unsure at all n locations
gctttatgaaatctctttgcgggtaatcgattataggattttgtgtttcaattacatagttcaaaattcaaataagttcaaaatgtaaaacatgccatgttcatgatctctncaattgaagacaaatntgaagagcttaatttgttaaattttgtgtaatagaacaattgagtgctaaattntttctattgcaattccttgtatttggacattcttcaagggtgcattatgagtctccaagagaccacccaaacttctatttgtgtgtaatagcttagtgtaaaccgtgtagactaagtgaagagccagttgggacccccaaagggtcatccaagccttcacataggcaaccgtctagctggtttaaatttttttaccttcactgtcaaccgctagatgctgcttttacaatangtttacttatcttcacaccttttagtgttatttgctagttcaacataatgctttactttgttcaaccctacaagaagacacactangactacatgagcttatctcattatgtat

SEQ ID NO: 124378 - DNA, 323 bp, Glycine max
agcttgaataggacctcagtgtgttattttatgaccattttaatttcccgagagcttccgttgttcattttcgagcggctctatatgtgaagcaccttaatctaacatccgtgtgaaaaggtatgaccatttgaatttctcaagagcttccgttggtcaatttcgagcgtcttgatatgtgattttccagaatcatacattcgtgtgaaaagttatgaccatttgaatttctcaagagcttccgttgttcaatttcgagcctttcgaaatattatgcgcccgaatcgcacattcgtgtgaaaagttatgactctttgtatttc

SEQ ID NO: 124379 - DNA, 356 bp, Glycine max
actcagcttatatatatcgccccgctcggacataacatggaaaactctcgggatattcatatcgtcataattattcacacggatgtccgagtcgggcgcattatatgtcgagaggctcggaattgaacaacggaagctcttgacaaattcaactggcataacctttccacggaagttccaatgaggcctatcacatatccacacgctccaaactgaacaacggaagcttctgacaaattcaaatggtcataactcttcactcggatagtccaatcacgcgatcacctatagagaccctctcaaacgcacaacggaaactctcgagcaattcaaatgggctaacatttccactgaga

SEQ ID NO: 124380 - DNA, 314 bp, Glycine max
cgctttttttttgcccaggctaagatgagccgatttagaaacccacccatattggcccccaagcgcgcgccgggtatatttccttaattctgccggggttaagaaggttctcatttccccttcattcatggatttgggccaacatgagaccccaattatttatttattcctagaggcattttaccactttttttttttttaaaggtttccttgcagaaagggaggaaaccaaaacctgaaaactatttttgaagcacctctgaatgaatctattccacaacatttaatttaataagaaagagtggcccccccca

SEQ ID NO: 124381 - DNA, 499 bp, Glycine max
  unsure (1)..(499): unsure at all n locations
ttacanagaaagaaaaccaatatatctcacttaaggtgtgtttatatgtaaatgctctgttctaaacaatggaaataaaatatcttcgcaaatgtgatgcacaagccaatgagggtatttttcttggtgattcattgcaaagcaaagcatgtagtgtttaataggagaactttgtgtgtcgaagaatctgtacatgttgtatgtgataaaactaactctattgttcaagaaaattctttggaagatgaagatgcagattttcaagataaggatactacacttgaagatgaaaccaaagttgaagagcttgagcaaagcaaagaaatcactgccacacctcttatagacctcccaagagaatgaagaactcaaaaagacctctccttggacaatattagtggtgaaatatcaaagggagcatctacttgctctagactgaanaacaagcttgtgtggcactatncatcgcagaagcaaaatacattggcagtgaaagtgg

SEQ ID NO: 124382 - DNA, 329 bp, Glycine max
agcttctaatatttataggtcttcttcaacaagtttccattgtctctaaatggatagatttcttcacttgagcttgcatttgaagattgtggtcgttggagcatttaatgctttcattaaatgcacatactttttcatgttgaaaaatcactcttttttactttcgtgtggaatacttcaacaaaaatcacttcctttgtgttagagtaggtctgtcacagtagagcacatcttttgatgatgtttggcaacttccaggtcttgagcttcattttttctttataggatccgacacaaatccttggagaattttttttctacaaaacgaa

SEQ ID NO: 124383 - DNA, 467 bp, Glycine max
  unsure (1)..(467): unsure at all n locations
aatgtanggttgcatataagaattgcaaatatccgactatcgaaacatcgagagcgctaaaaataagttatgagcaaaactttggaaaatgagcgatagagcgattttaaacattagatagcttaaacttggaatctgtgcctctatataaattatcttagaattatttattttttggaattgctgatttatttactattgtattgttgagataaatgcaagatctatgactgatgcatgttttgaaattgtgatgattctctacagataaaattactgaaatgcacgcctgtattttattatgattattgaatgataagacccgaaaagtgtgaactctggtaatatattgcatttttattgtcgcgctgtggttgggctagaggtgtaaccctcgcaaatgttgctctattgtagaagtatgatacacgcatttctagattatatatacatataacatgtttatt

SEQ ID NO: 124384 - DNA, 323 bp, Glycine max
  unsure (1)..(323): unsure at all n locations
agcttgagncttagcattacttttgcatacccttgctaattggttattatgaacatgatgtgttattatgccttgatcggagtgtgtgattcctgtgtattgtgattgatgattgaaaggtgtgattgatggatgaaaagtgtgattgatgaaaggccaagtgatgaaataatgtgagatatgctaagtaaattgtatttggctactatatgttgtgttggttctctctagtagttagaaatgtgataactcactcccggtttgctatttgtgtttggatcctgtgatgatattgaactttgtgttcgggggagcatatgaat

SEQ ID NO: 124385 - DNA, 264 bp, Glycine max
aagaataacggactcacacggcgtttgtgtatgtataccagccgcacaaataccggttaaccctgaaacccaaccatcatctgctggtgacccttcgtgcgtatatatttaagtggaaagcaaataagctagctatacaaatatgccaacccttaacaactgctttaagattcacgtaagtactgtatcatcatattaatcgatctccttttcttcacaaagagatcgaaacaatcataacgtttaacaattctaacaagccct

SEQ ID NO: 124386 - DNA, 246 bp, Glycine max
ctgcaggcgtgcgcacttgccctctggataaacattatttgttctctttttggggacatgtcggattcaatttgggcaaaattgcatgatggaaacacatgggttttaaacctgcactttttgcacaatattgcttgcggaatgtgccccgaacactttgattcatgctgaaaaattcttgtgcattgcttggtgctaaaacgggatctactattggggtggagacctttgctcgcttaacccaac

SEQ ID NO: 124387 - DNA, 356 bp, Glycine max
  unsure (1)..(356): unsure at all n locations
gagattataaatatgtgaccatggcatgagtntcaatgaatgatctctcatctatcatctatctttcaatctatctttcagtatcttctttcatctctttcaacagatctttctaaattatgtctcttcattnttctaaaagtatttttcaacactttctcttccaagaaaagatttttgttcaaaaactagtgctattcatctttttcattcacttatccctttgccaaaagaaccaaagactaatcgcctgaattcttttgtgtctctcttctcccttacaaaagattcaaaggactaaccgcctaagacttctttggattcttcccttctccttaagaaaaagatacaaatga

SEQ ID NO: 124388 - DNA, 189 bp, Glycine max
aactaacttggatctataatcccaaggctggcaatcttgtgagttctgaaaatctgggctggacagtagcgcgagtatgttaagcgatgatcaagtgtagggctgggcgcattattgtcagctcccccaaaattggatttgagctgaacgtttatgctagctaaaaattgaacacttgatttggtactg

SEQ ID NO: 124389 - DNA, 362 bp, Glycine max
  unsure (1)..(362): unsure at all n locations
gtgatatactctgatgtgtgtggcccaatgcactgtgtatctcttggtgagagtaganacttgtatcattcctagatgatatcctaggaagatgtgggtgtatatcttgaagagaaagagggaagtgcttggagtattctagaagttcaagagaatgatggagagacaaacttggttcttgatgagaactatattctctgatggacgaggagagtatactaggcctgaatttgatgaattctgtgaactggcacgtattgtgcatgatgtgacacctccctacactccccaacataacggtgcaacatatagaagaaatctggcagtgatgaatatggtctcatgcatgcttaatggaaaga

SEQ ID NO: 124390 - DNA, 346 bp, Glycine max
tgcaggcgtgcgaactttcacattgggataccattaatttgtctctccgaccaaactgtcttgaaagaaatggaccaacaacttttctgctgcaaaaaacccccccatctttcgggcatacattccaacatgccctttccgacatgtcgtccctttgtgcttatcgaaatcccgtactttgaacttgggagggatgaccatgtcatgcacgaaacataagtccgctaaatccgaaaacgggtaattggcgaggccctctactactattagcctctcttgaagcgcatcaatctttcccatatcttatgtgaagggaaatggaatcttttaccggtgcgggagaaaa

SEQ ID NO: 124391 - DNA, 296 bp, Glycine max
aatggagaaaatggattgctggttggcttccatcaacaaccatttctatcctaattaatggaagccctacgaaggaattggcccccactagaggtttgaggcaaggggaccctttaactcctttgctttttaatatagtgggtgaaagtctcactggtatgatgagagggcccttcataaaaacctttatagaagctattcgtgtgggaagcaaaaggagcctattaatatcctccaatatgttgatcatatagtcttctgtggtgaggctacttagagaatgttcttgtcttgaa

SEQ ID NO: 124392 - DNA, 321 bp, Glycine max
agcttaaccggcactttttgctctttttaacttagcccctttttcacctgaaaatgcacatatttcatcattaaatccattggaaatggtctggagacagcttttaccataaaacaagaattatttacaagaatactccaaaataaccataaattgggaaactatttaagttttggaaaatgatttctatacaaaagttagtcgtataaggcgactaacactacatacaactgaaacatggtaaaaaaacaatgtacagtaggcatcgacattttctaaaaccgcatcacccttactagtgattgaaaaaaagctttaatg

SEQ ID NO: 124393 - DNA, 462 bp, Glycine max
  unsure (1)..(462): unsure at all n locations
acctataaaactaagcttcatcctaattgagtgtgcattacttcttttccttatcatttgatatttgtagtccaaaaaagagcaaacaatctaatcaaagagcaaacaatctaatcactttgctctcacttgaattgatgctacatttaaccttcttacaaactgatgaaaattattatcaagggtgagatagaaattccccgatccttattatatgatggtgtaagtgagccaagtctcacataggtgtcgaactgtcgatgaatcctaacttacccatttaatattatacatactctctcaccacactcaatgcatatattcttatctacatctttagacagtaaacactctaagaacctaccatattaaaaaaaaaacaatagtaattgcacagtttaatcaaaacaaataatatactcacaataaacaacagttgacatnagtgacataagtgatagc

SEQ ID NO: 124394 - DNA, 332 bp, Glycine max
cagcctatcataatcgattacatttttatttttgagaccatgactggtttattcaggagtctctgccttaatcaattaccatgggatataatcgattacctctctttctataagtggttcagaagtaaaccagaacactttaatcgattactttgagtatctaatcaattatattgttcttgagctggttctagtttcttggaagaacactttaatcgattaaaaagataatctaatcgattaccttgtagatttaatcgattacaagcggttataaatgttttctctataaataaccacctcgtgttctctctaataacaccacattttga

SEQ ID NO: 124395 - DNA, 381 bp, Glycine max
  unsure (1)..(381): unsure at all n locations
atttatatagtggagaaattcatttgtggccttgagatgagtagtggtcggagtctccattttttggcctttgatatagaatgtttggtcttatgcacatcaaatatcacaaactacccaccaaactcttgaaatttgtagcatccaccttttatgcttcgtcaaactttgataacttcattntgcactccaccggtgttctaattggcttgcaactatccatcttaaatttattgagcatctcctttttgtaaatttgctatgaaataaagattccatcttcctttngctttacctcaatgccaagatagtatgacattagttcgatatcggtcatcttgaactccttaatcattgctttcttgaactcttcanacatac

SEQ ID NO: 124396 - DNA, 295 bp, Glycine max
agcttcagcttcattagatgtttgaagaccttattccataatgattaatgtaaaatataatattattctcctcattccataataaatgttgtttcaagtttttttacaaattccactcacacaagcatctgctaatgacttcttctaccaatccgttattgatcaatggcttctgtgcaaaatcctgtgtgcatgcactagtcaggttcaactccagggttcaattagatatagatatgattatggatacccccatcaccatgacaagatcagtaagcaaaagtattattctgtc

SEQ ID NO: 124397 - DNA, 325 bp, Glycine max
agcttgtggcgtcacctcgatctcatcaatgtcgggcaacccaaccaggtccctgtgcgtgggaccatcttcggccatgtacccctacatgtgcacgcgcaccagcaccaccgcatgctacactgtcacacgcgactgttaggaattttataattcctaactaattaatatgggctacatattatattataacatttatattaattatttacatttagataagtttaatataaagtgatctaattcaatgagcctattagactgccaacaatagaaaattgatatgggcttaatgagcagaaaccaatttggcccattaggggat

SEQ ID NO: 124398 - DNA, 383 bp, Glycine max
cctctagttcaattgggatgattaatgaaaatgctagaactagccaaatatcacgtttgtggattcttgctctttagccttaccaacatccaagttcagagctgaatagtatttgatgttatgtttcaccaaaatgtgatctttatagtgctagtgtatgcctatattctatttggatcttatatgagaattggtgcccttaatattctagatgtatgttgaaacacatgattgtaagtttaggttaagcaacctgctagatccccaactttagtttatatttcatcatttcatgttataagtattttaatttgccattactgtgttattaatccatcatgcttcgaataagagagaaacctgacaattttgtttacttgtac

SEQ ID NO: 124399 - DNA, 323 bp, Glycine max
agctttgatgcaacatttggttatgtttatgaaacaacgagatgatgcgctccatgagaggttggatcaaatagagaatagagatcataatgaagaagaaaggaggagaagagggaatgatggtgttcctagacaaaaccgaattgatggtattaaactcaacattcctccatttaaaggaaagaatgatccggaggcctacttggagtgggagatgaaaatagagcatgttatctcatgcaacaactatgaggaagaccaaaaggtgaagcttgccgccacggagttttccgactatgctcttgtgtggtggaacaagctac

SEQ ID NO: 124400 - DNA, 347 bp, Glycine max
  unsure (1)..(347): unsure at all n locations
tactcagcttggaattcagacatttctgtagatgcaaatacatgagtcactaatgaatgcttaaagntgtttggattgaattggcctaattgtttggctaaacttgctgcactatggtgggtacattgcacatgaattgctgtagaatatcaaattctttctttcaaaataatacgcactgagttgtgatttttattagttgtatggtatcacatacaattaataaaaaccacacaaaaattgattaacttcttggttgctatacttgggataactaaaataatatggttatgtatttcgtgcaaaaaaaaaattttatgctaaattntagttggatgtgtctttgt

SEQ ID NO: 124401 - DNA, 333 bp, Glycine max
agcttgcaatagtcttttcgtttatgatggcgaatgcaacggtcttggctaatgggaatctgatcacaccaagagcttgtcgatctaggaagacccattcttcttgcttcatgtaggctggcttaacccctgataaaggttgatacaacttcttctgatataaataatcctctatctgcatcttccaaaagctgaaatctctgccggcgaacttctcgaacttcatcttcccctgttctaatgccattggtcccaccgcctcctctaaactgagaagactcccactcattcctctaaattaaagaaatcccgcggtgttaacaaaagctcttg

SEQ ID NO: 124402 - DNA, 487 bp, Glycine max
  unsure (1)..(487): unsure at all n locations
ctntgctgcanaagtcctttttgctggagtgtttttttgttttgtgctaaaggaggtcttcgtcattggaagtgcggtagacagactntgtggttgatttaaggatggcctttgtggataactgggtggtggggtaaagaggaggtttgttattggctgagtaatgacattgttgggttggtgggaaacttggccgtataagaatgtgagtcacagcatgggtttctccctctttctcaccctcttcatttgccccagctttctcagtcgtcctagtaagatgatcaaatttgcctcttttcggatccacttcgatctttgtgctggcgaagaccaaatctgtaaaacttgaaggtgtgtgacccaccattcttttcatagtagaacaccggncacgtgtctactatcattatgataatctctttctctgtnttggggggtgctactgagttgcaagactctcatcttgggcgtttcttgaagattc

SEQ ID NO: 124403 - DNA, 322 bp, Glycine max
agcttggattgattctgtctgtctaaagattaatgtttagtaatttagactacaacatagaacataagagcatgattgattagagaaatatatttatatgcttcagcttgtttgttagaaagacctaacatttctacctacttctatcatttttacttacttttcattttatagattttagcataaaaggtagtttaaattttgtttgaaattatcaatcatatatgttctctcaacaatgcttcatttttgaacttaattcaggctaacattagtttcttgtgttcgatactcaaattcatctgttttaatttgtaaatac

SEQ ID NO: 124404 - DNA, 450 bp, Glycine max
  unsure (1)..(450): unsure at all n locations
tattccctagtggatggggccgtccctcttctattctccttgccttccgctgcatctccatggtgaaaaatcaccattgaaggaccacattgaagctcatagatccatcctccatagaagctgcataaacaagcttccatcagagagacatgtgcatgatcaaattccggttggtcgccctcatacgtatgggtgaaagttgtctgtgtcctcctcangcaccggtacaacattgngtgctgatagttggaggcaagtcgatgatgggaagattattgtctgacacatgggaccacctgacttccaatgctttctcctgantagatatccagactaagattactgatgagccgaggtgagtnggctactaacagcgactggaacggaccgagtgcttgtttcatatatctatgctacaggctcatatggggcatggcttcatgctctgca

SEQ ID NO: 124405 - DNA, 325 bp, Glycine max
agctttgccgatttattgttttttggcgaaaggatcgaagtgggtctgagaagaggcaaatttgaatatcctactttgatgaataggaagcctaaggcaaatggagagaataagaaggagggaggaacccatgctatgactgtcattccttcatggccaaatttcccaccagctcaacaataccaatactaagccaatatcagccattctcattacccaccaccctatcagccaagaacacccaatcatccacaaaggccacccttaaattagccacaaaacccgcctgctgcatatccaataccaaacaccacccttaacatga

SEQ ID NO: 124406 - DNA, 321 bp, Glycine max
tgagctgcagctgccacaaatcttcttccggcacttaaaaactttggtgggcatataacgcttcctctaatcccctgcaagaatgcaattataacatctaactgctccaagtaaagattctttgcagctattatactcacaataactcttaaggtagtcatctttacaactggagagaatatctctgtgaaattaattccttgtttgtgctgaaacctctttcccacaagtctcgcctgaatgcttttctatcatcaggttcttcctctaacctatagacccagctattttgtcacactttctttccttctggcaatttaa

SEQ ID NO: 124407 - DNA, 475 bp, Glycine max
  unsure (1)..(475): unsure at all n locations
ctaagctttgagtaaaggatgtgactcttcaattcttcttgaatcttgatcttgattcttgagatcttgaatcatgtttgaggctttcttcttgagtcttgaattcttcttgattcttgaatcttgattcttgagatggatgttctctgattcacttgagctttgttgttcatcacttttgtcatcatcttttgatgtcatcattggtatcatcaaaacacccttgaatcattgttgattcatcatgaagctntgcttccacatactgctcgatagcattttccatatagcatatgtaatctttggaaggttatcttctttattatagcatttttggtgccatttgtggcttgtaagattattcattatagtggatcgatcagacataaccacagtatgatatacaaaccagccacatgtcaacaaacatacagatcatcctctcagttatctgactaacccaaccgaccactac

SEQ ID NO: 124408 - DNA, 335 bp, Glycine max
agctttgggttcgatggccccaatgatatctatcccccacatggaaaaaggccaaggggcagacatgacattcagaggatgtggcggaacattgacattgtccgtgtacgcttgacatttatggcatttccttacatgggcgtagcaatcgctttccatagtgagccagtaataacctactctaaggatcttcctggccatagcatgcccattggcatgtgtcccaaatgaacccccgtggatttcctcaatcatgtagttcgcctctttggcgtctacgcatcgcaggagggtcatgtcgtggttttgtttgtacaggatggtaccactcacaa

SEQ ID NO: 124409 - DNA, 587 bp, Glycine max
  unsure (1)..(587): unsure at all n locations
ttgagcacaaatcctgactcaccataaaccttaccctcgaatgcatataaggaaagaaggaaaggaaatttcccatcaaagagaaagcaaaaaaggaaggaaaggaaattcccaatcaaagagaaagcaaaaaaggaaggaaaggaaattcccaatcaaagagtgggagaaagagaaaaaaagaaacgaaaggaaattcccaatcaaagagtgggagaaagaaaaaagaaaagaaagaaaattcctaaccaaagaatgggagaaagtaaaaaagaaggaaaccatgacctanaagtggtcttctccctttgattaccaaccaaaatcctgtgcgctagcgactttttgccccacactaaacaaaaacaganaaggaaaaaagccaaccaaaaatcaaaagccaaaaacacacaaaagcaaaaaaaaaaccatcaaaagaacccattcccaagggaagtcttattgatccatgctcacgcatgtaatttttgatttgatangaaantaattgcanagtcaattcatgacatatctatggntcngaattatgatgaaacacttacctgtgcgagaatgatcactttgag

SEQ ID NO: 124410 - DNA, 326 bp, Glycine max
aagcaaacgcagcatggcacttgaccaaattaacaacattattctttctccgatggcaatagagccgggaatataaagaacccccccaaatgaaagaacaaaacttgagccaaggacaaagacaaaaactctaacgaggcggaccattgaagacaacacaaacccggacgctagcctcatcccatgtggaaccaaagcccaataccaaagaacatgccagctatatcagctgacaaacagagaccaaaactaatacaaaccgcccaaagcgaaaaaacgccagaagaacaaaaaaacacaaaagccgggattaacaaagcaaccaa

SEQ ID NO: 124411 - DNA, 415 bp, Glycine max
  unsure (1)..(415): unsure at all n locations
ctcagcttcacattcaacttcgagcgtctcgttatattatacgactctatcagacatccgagtaaaatgttattgtcggttgaatttgctcagagcttcaacattcaacttcgagcgtctcgttatattacgggactatatcagacatccgagtaaaaagttattgtncgttgaatttgctcagagcttcaacattcaatttcgagcgtgtcgatatattacgggactcaatcagacatccgagtaaaaagttattgtcatttgaatttgctcaaagcttcaacattcaacttcgagcatctcgttatattatacgactcaattagacatgcgagtaaaaagttattgtctgttgcaattgctcagagcttcaacattcaatttcgagcgtctcgatatatgacgggactcaatc

SEQ ID NO: 124412 - DNA, 332 bp, Glycine max
agcttgttgtcgagtgctaagtgtgttactgttatcttgtgatcgtgtaaaggggtttgatgagacctgtatttatattagttgagcatggttattggtccttgtttgtagggattgttgtaaccttgtaaataatttttggcttgtagataatagccaggagcttatagataatgttagagaaacatttatttataaataaaaggtagaacataatcgtaccttgtagataatgtgtggcattatagataattaattacctgccaatggataagatattcaaatacgtttaaatattgataggttagggacaacctatttgttagggagcc

SEQ ID NO: 124413 - DNA, 310 bp, Glycine max
ctgagtgtgtgatgagatcgtgtagaggggttttatggaacttatatctatattagctgagcgtggctgctagtccttgtttgtacgggatattgtagtctttgcagttaattctcggcttgtagatattaatcaatagcttacatataatgttagagataaacatttgcttatagataaaaaggtagaagataatcaaaccttgtagataatgtgtgggcttataaataattattttaactgccaatagataagatattcacatacatttgaatattagtagggtagagataacctgtctgttggggag

SEQ ID NO: 124414 - DNA, 304 bp, Glycine max
aaccggaacttttttttaattaacacaaggtggagtttattcaaaaaaaaaaagtcctagtgagagggattctcctcaaatcttgagtgaattaaaaaccccctggctggaataaaggacttttacaaccttttgggggtggcccccctggaaagaaggagaacttccttcctatcatactcaaccttggtctttcaaacccacatttccgaaaaatcacctctggccgaaaattatttgggaccataacttccattttcacacacctcaataaagtgattcttgagcccaaattgaatttcaa

SEQ ID NO: 124415 - DNA, 404 bp, Glycine max
ctatgcttcctgaaagtgtgagtccatgaagaatctccttggaaaagacatctttaaattcctgcaataagggttgaacactacgagaaacataaatagttaactgattagaattatcactctctctcttttgtgtatcactctcttcctcgggtgtatcactcttctctgtcatattcctttgaggagcctcactattttctatctcttggtctctcttttctctcattctgaatgggtcatcacatgcttctctaggggatagaggtttaagagtaaacgacgaagatttgactattcgtctgtagggctcttctttgctacggttcaacaaacgttgcatttgtatagtccacgccgccagaaataagcgctgagagtcgtccagttgatgatatacacca

SEQ ID NO: 124416 - DNA, 361 bp, Glycine max
gatacagctgagctgaccggctggcatcctagcctcaacatactctattgatttctatccaaggacatggttaaaggcaacgaatgccaacacaactcttagaggcggctactaaataaggccctctaatcttaatgctagggtccctctcatcctaaagcaactgatatcccaaaaggatttattggtatctcactcctaaacatatcatctgtaagggtcagcctcatctaactaaaatgcgtactaccacgcctaacacaaaaggtgatccccaaaggtctataacaaccttaagatactccacatactacaacccaacttgaaacacacctaagcacctaatcgatgaaaccactac

SEQ ID NO: 124417 - DNA, 407 bp, Glycine max
  unsure (1)..(407): unsure at all n locations
tgaagcttctttatgcaagcagcgagtaanacaggttgctttggactagatctcactcttagttgggaatcatgggtggagcaaatatgaacatattccagtctacaattccaaaagttgaaaatgaaaattcacactacagctgaactataactatgcatcatatgcatatctatatctatatataaatgtcatatttgacattacaatttgaaggacagattgaaatatacagtcaagaaggagttatacaaaaagaaaggattaatggatgttgatgcatgtgtcatcagactgcagctcttacatttaagatagagagctgaaccccagatggcttcaagtcttgatcgccaccctcatcatgttcactcttgcatgagcaatagcaagcatataatataagc

SEQ ID NO: 124418 - DNA, 327 bp, Glycine max
  unsure (1)..(327): unsure at all n locations
agcttgccaggcccaattttaatgttatnggcagggttactcacttactatttactaatgaacccattcttgaaggtaaactaagaaacagatcatggattgaggaatggatgcaaggtttaaaaaacacacatttcatcctgtctcttatataacagccttaaagaaaatggataatatcagccttcccttctaaacaaaaaaagtagtgagatgcaagaacagtgaaataggctatgatgctagttgtatatgataatgcaaaagaaattgcccgtcaacaaaaatgctaaatcatattgatctaccacattaacatatcatgct

SEQ ID NO: 124419 - DNA, 328 bp, Glycine max
agctttgatcttagatttccttttgccttctcggcagcctaaagaaagaatgcatatttagtgctccaacgccatatgtgaagaagttaatcaagttaatggagtaagacatatattcataataatatttcataattaaagaaaacaacagacctgcattttagcctcatcccatgttaatccaatgcctttaccaaagatcttgccatctatttcgacctaaaatagagataacaaattattttagatactgccagagcttaaaaaatgccagaagatgagtaaaaccaaaatgccgggataaacaaagcaacaaaaatctattatg

SEQ ID NO: 124420 - DNA, 475 bp, Glycine max
atggaaacagaatataacaatggaacattcttgtgaagctaaagaattaaccttccaatccatgttaaggagatcttaatccaaaaagggaaggggaactagtggcaaacagtttcctccaaatgtttaaattgtgtttactccaatcaggacatccgaaggacaaaggtacaagtaagagtcattgccattactttattttagcaagaaacaaagatgaagttaaaagtagcataatataccgtaagtttagaagtggccttaagttgatttattaagagtggaactgtagcggttcgaatcaacagggttgttagaactatggctgcccacctgaaacacagaagctataatattaacaatttccattcaaaactaatgcgtcaccaaatcctagatgtattattttatgaatttatgaattatgaatgaatacaccttttgataatcaaattccagaaattacatcacatac

SEQ ID NO: 124421 - DNA, 327 bp, Glycine max
cttatggggttctgaggctttatcttttattgggcatgtatttgatgaaatgttggtgaaaaatgaaatacctaccaagagaaagaaagcccaaatgaggggagaggttagatataagcctaaaatccatcccagccttgaggcttaattttcttttttcaagatcatttaatagagtcccttaacacttgagcttgtggggttctgaggcactatctttgatggtacatgtatttgatgaagtgttgttgaaaaatgaaattaatacaaagagagagaaagctccaatgaggggagaagttagatagatgcctaaaatccatccta

SEQ ID NO: 124422 - DNA, 443 bp, Glycine max
tcttgaacaaagtatgccaatggtgtgccagagtcaactattgttcctcgattggtagttgctacaaatacatttgaactgtgaaacatagcaagttagtgaacatagtgaagatgataaaatcacgcaaatgttatttgttctcatatccccatacaaaatcaagtaatcagtaattcaaagagagatagatttccttggatattctctccattatttcttaccttatacgtgaaagcggagaaacacggtagtagtaatctgccccgaatccagtaatataactaacggtatggatgaatctgcatcgaatcaaatcaaacaaaaagttgatagattaaaagaaataagacacaaaaattgaaagtgaggaaccataacaacaaaagggaaatagataacaaccaaaggcagcaatggaacagagaggattgatattgaaa

SEQ ID NO: 124423 - DNA, 335 bp, Glycine max
agcttggagaggatgcttcatttgaggaaaagaaagagggagagaaagagagaggggggagcacgaaattgaaggaataaaagaagtatagaagtggaactttgaagtatgtctcacaagactctcattcatcaaagttacaacaagtgttacacatgcttctatttatagactaggtagcttccttgagaagctttcttgagaaaacttccttgagaagcttctttgagaaaacttccttgagaagctagagcttagctacacacacccctctcataactaagctcacctccttgagaagcttccttaagaagattcctaaataagctagagct

SEQ ID NO: 124424 - DNA, 416 bp, Glycine max
  unsure (1)..(416): unsure at all n locations
ntattcacgatgtaacatgcagtatttacagctntagcccatttatattttggaagaaaagtatcatttagtaaagttctagcaatttcttctaaggatctatttttcctctcaacaacttcattttgttgaggggttctgggtgaagaaaaattatgctcaatgccaggttcatcacagaatgattcaaaatctttattttcaaattctcctccatgatcactcctgatagatgcaattttgatatttttcttattttgaataattttagcaagtttctcgaatgcatgaaaatcatctcttttataagcgagaaataatgttcatgtatatctagagtaatcatcaacaataacaagagcataatagtttactccaaaactcatagttctagagggaccaaaaagatccatatg

SEQ ID NO: 124425 - DNA, 324 bp, Glycine max
  unsure (1)..(324): unsure at all n locations
agcttatntgattgttaatactgtctgtaaaggctattgatctctgcatagaaagttattggagtggcatcaattccatgtaccttgggacctggctcaaaatctttagaagcctctccaacttgcgacattcttgatccaacattcttaaattttgcaccaaccataaactgaaaatttgatttaaaccctgcattttttagctctaaatattcattcttgttgcacttgaaaagtatctgatctggctgctgaagatgatgattaggattttcaagggtaagagccaaagacttgtcctcattttgagttgattgtaagcat

SEQ ID NO: 124426 - DNA, 333 bp, Glycine max
tactcagctgtaggagagaaggtattcgactcccacatatactgctttgttgtgtgagaaggttggggatggaattcacattcttgggatgtctggtgcgaccataatgcttgctgcacttggatacatgtcaccgacaatctcgggaacactgatcacaggtatgctggtattctatatgatacttggcatagctgctggttatgcctcaatgtcgatgggaggacaaacaactttggcgaacagaaaggctcggtgtcaattgcatggaaagcgtgcgtgtttctttccacgacattcctttttgattctcacaaccttgaacactctatt

SEQ ID NO: 124427 - DNA, 325 bp, Glycine max
agctttgacattctaacttgttttgaaggtttggttaaacttaaaagttttttttttatggataaatgcttacgagtctacttacatgatctagttgatttgaaggcttaataataatgagatcatgattttttatttttctaaatattcattatagacttaatttatggtgtcatctttaacttaccatcacttatgactatcacccaaaaaattataaccaagattatattacatattacttttcatcaaatcatgtttgacttgaataagcctcacttgttaaaaaaatctaaaatcaaagaccatcaagtatttatcatat

SEQ ID NO: 124428 - DNA, 372 bp, Glycine max
  unsure (1)..(372): unsure at all n locations
cttgaganacttctttgatatacttctttgagaagctagagcttagttacacacccctctaataactaagctcacctccttgagaaggttccttgagaaacttccttgagaagcttccttgacaaacttccttgagaagcttccttgagaatattcctagagaagttagagcttatgtacacacacccctctaatagctaacttcacctccttgagatgagaagctagaagttagctatacacctcctataatagctaagttcactcccatgccaaaatacatgaaaatacaaaaacattcctactacaaagactactcanaatgccctaaaatacaaggctaanatcctatactaataaaatggccgaata

SEQ ID NO: 124429 - DNA, 313 bp, Glycine max
agcttgagtcggacctcggtgtgaaaagttatgaccattggaatttctcgagagcttgcatttttcaatttcaaacgtctcgatatattatgcccccgaatctgacatccgcgtgaaaaattatgaccaatagaatttctcgagagcttgcggtgctcattttcgagagcctctatattggatgcccttgtatcggacctctgagtcaaaagttatgaccatttgaatttcttaagaatttgcgttgtccaattctgagcgactgggtatgggattagcatgaatcggacatcccagtgaaaaggtatgacta

SEQ ID NO: 124430 - DNA, 333 bp, Glycine max
agcttagcaagatgaagtagctttttatcctcttctcttgtccacccaatctatacacaaaaagcatcaaattgaaaaatcactcattagaaaaatatcacaacaattaataacatagttggtacatactccttatcaataacatcttaaaaaaagagaggctcttaaacccaaagaaagacttgttaattcaacgattacttaactcacaggaatagacaggtttcttgggtttaggagcaacaacacttgaagactgagcattagatgacccttcactcttcttgctctttggtgtctctgcatcaccaccttgtatattgattctcatat

SEQ ID NO: 124431 - DNA, 316 bp, Glycine max
  unsure (1)..(316): unsure at all n locations
ctttcttgtctcccacgcgagctttgaccactggtctctcttcccgcgatgcttcttttcatgtccgcctgagtgggcttatagcctaaaccatacttcccacgatttccttgggtatctatcangctagttatgcagccgttggttttgcctaaacccatcccgtattcataaccgttccccaacataactcgggccatcattaccgctgcatcggacagacaaggctgcccaaagagggagtccacggaggaaatgctgaccacctcaaaagactggaaagcagtttctaacgattcttctgcggcttccacat

SEQ ID NO: 124432 - DNA, 331 bp, Glycine max
agcttctataataagtggagatttttttattttatttaattttctaacatctggttataacatattgtgccttgaactgtgtcttgaacatgtgatatgtttgtgttactgttaagctaggatttctttttcttcattgtgcgggccttccgtctgcaccattatctctttctgtggagtcatctgaacaaatgaaaaatgctaaattctatcaaaatgctaaatattttttaaaatatagaaatcaaaattaggtattttgaaaataggaaaaaaattacatttaagtttttttttttttaccggaggtccatatgtctagtacttaaaa

SEQ ID NO: 124433 - DNA, 349 bp, Glycine max
  unsure (1)..(349): unsure at all n locations
aaattgattctggaatattgcctcgtaacttgctgtgggataaagacaatctctccatggaatatgatgagattgcactaatatggcctgataattggtttcctgatagatctaaatccaccaaagatgacaaagataaacaccaagaaggaattgtcccattcagtaagttgccatataagcttaacgatgttaggtttgaaaaccctgttatattgttaggcagacggccctccaatctattatgtgaaagatccaagtgaatgagatgttgaagatttgtaagcgtcgatggcagctcaccctctattttgtatgtctcatatccaattcgtganagttggttgat

SEQ ID NO: 124434 - DNA, 320 bp, Glycine max
agctttgttctttttataaaatgagatagttctggactcattacgttacctaaaaacctttgggtggatccaagtgcaccgatcattcatttgcatattcatgttttggtggcatactcactgtcgcaacctacccttcggccggagggcgacgcgtgactcgcgggatgcgtgttccacaaaaggaatacgcgcggagtctccaccaacgtttatttgaggaaaacgtcagaaaaaccagaaaagacgcgatctacgaacttttaagtgaaaggttcgggagttgtatttacgcacggggaaggtattggcaccccaca

SEQ ID NO: 124435 - DNA, 390 bp, Glycine max
aaaaactaagctagggttgggcatagcaccccacctgacgtacgcaaggtcttcttatccccgcgacatatcttcaggtaccactctgtggtcgacaataaaagcacgaagattcacccttcgacactaactcatctcaagcttgtaggattatggggcacccatcacatgtggtactaggtggcggtcgggcgatggtgcgcaacaagttttccacatccacaatgcgcgcatgaacccaccatcccctgatgcccacctccaactgagctcacgtactcccacatagcccatattctcgtttatgtcaacaccgggttgccagcgatcctctgaagcttacactacctccaagcagaacaacgttcatactgcgccatctctcacagc

SEQ ID NO: 124436 - DNA, 251 bp, Glycine max
tccctaacttgaaagactacaaatgtttagaagaggcccttgcaaccatgtcagccaagactgatggttcatcagaagttcaaggggtggtaaccatcctgctattaataccctaagtacgtttcctgagaaactcctgtgaaaaatctcccttgataagattgttttaaatgacttacttgagaagctaaaagcttactactcacaccccacttttttctgaggagacctgcttgaaacaaatgctttac

SEQ ID NO: 124437 - DNA, 242 bp, Glycine max
ttcatgccttacaaatatttaccaccattccttctagtattttgaagttagaatggaattctatctgcatttatggttaagttattaaatgagacaagccaatacagctatttattttaaaactactcttggtatgactaattatctttaagtgtgttcatgtacgcatatcatgaatttcaatattacactgcggtatttcaacggaagagtatatgaaaacaatgatggtgtaatatttg

SEQ ID NO: 124438 - DNA, 337 bp, Glycine max
tggcatgcaaacttggaggaatatgtggtactccacatatgtgggactacggggcgattgggtgatggtgcaaatcaactctccacatccacaaatcacacataaatccaccatccctagttgcccaacttccactgagctcacgtactcccatgtagcccttatcctcgatactctcaaaaccgggtgcccatcaatccctccaagcttccaaaacatttcaaaaattcaacatccaaacataatgaactatctaaaacccagaaaacagggcagaagctgaaaactctggccaaaacacaaaccaataccataactttgcttactcaaatacccc

SEQ ID NO: 124439 - DNA, 337 bp, Glycine max
atgtgttgattttatgctcttgaacggtccatgttaaccgataaaagcaaagataatcgttttaggcgttgaaccttaaaatggttttaagtgacttttgcagacaaaacttggtttgtgagttgatattagccttaatttcactttggtagtcatcatttcattcgaagaaactttcaagaatgactccgaaggagtctctgcgagattgtattataatcagcctattgtatgttaacccaggtacagtgtgacgatcggctcaatgttcttaacagtgataacaaaatatacacaacgagtgctgaaactatttctttttccagtggggacggtt

SEQ ID NO: 124440 - DNA, 312 bp, Glycine max
ttctaagctttttttttggccacccaatctatacacaaacaagcatcagaaaagaaaaatcactgcttagaaaaagagcacaacaattaataacatagctggcacatactccttatcaataacatcccaaaaaaagagaggctgttaaacccaaagaaagactcgtaaagccaacgataactgaactcacaagaaaagacaggttttttgggagtaggagcaacaacactcgaagactgagcattatatgaccctgcacctcactagctctttggagtccctgcatcaccaccctagaaatagactctcata

SEQ ID NO: 124441 - DNA, 328 bp, Glycine max
agcttaacaaggctctctatggcttaaaacaagccccaaggcagtggtttcacaggttaaaatctactatacttcagtatgggtttgtgggaaacaaatgtgattcttctctgttcatctacacacatcaggagcatactgtctatcttttagtctatgtggatgatatcatcatcacagacagttttgtctctcttattcggcagctaactttcaaactaaacattgccttctctcgtaagtaactgggtcatttggattattttttgggactagagatcaaatatcttgctaataattctatactaatgactcaaagcaattatat

SEQ ID NO: 124442 - DNA, 449 bp, Glycine max
tatataaatgcttcaatatcttatatagtaaaagcctcttttcataatgactcaatcatggagatagattttcctacaataatggactgggaaaaaaattctttataaatttgttcaatcaagtccatttctagatttacctatacgaagaagcctaaagaataaaaggaagccagtaaagcatccatttaatgcaatatggtcttagtgttttaaatattctccacatacattgatgcctcaatatatcataatatgcactctaaatttgatgtcataccaccactgtatgtgcccgaaggatccaaaatattccaatagagaagtgaaggcaagtttgtgcccatgccaacagccatatcctttttacctgtggagtataaaatataattagtatataatcagtacatgactttaaactttcattgcattgatgtaaaatcattaat

SEQ ID NO: 124443 - DNA, 326 bp, Glycine max
agcttgtcggtgaacacaatggtagaatggaaatctcaggagatgaaacagataggggatgtgttgactccaaaacgattcatattggaggcgttacgcgagaccagagtgattgaatgtgatggtaataaaggagattcatgcttgatgcattcgggagtgttacacgatgtagaaaggtgcccaatagctgaggatttgctgcagggactgatatgtagaggtcaaattgaaatccacagtgcaaaaaaggaggatgaaggggtattcatgcagtcgagtggcaaaagcctttagtaattcatttcaccagagatattaccact

SEQ ID NO: 124444 - DNA, 434 bp, Glycine max
  unsure (1)..(434): unsure at all n locations
ntgtgcaaaggttcttgaacaagactcgaaccgatggtggtgtctgggataaaatatcaaatttaagagaaatcttgctcaaataataatggactaaggaaaaattgaatgatacatcctgtcttagtaaaatttataaaaaggggtaatgtaaagtaactaatactggtatgacgcagcatcattttactaataataaccaactgttttttgtgttggtgactttctattactgtttagaagtgtcattagtaactgtcacatgtataaaagtagtgtcattgtcatttaagattagtgagatgtgcaatgtgctatctggatactgattggcatagacaaacaactgggatgctaaagttgtgatgagtgcagcttcacataaatggtcaaatatatgttagtgcacaaatagtaccttgaattctgttttc

SEQ ID NO: 124445 - DNA, 307 bp, Glycine max
aaacttatggaattggattaaaccctacacccgaagtgtaacaaagggtatctttaccactcttaataagatcggcctcacacaaagtgtgtgaataaatccaagcacgaaaagacaaaagaattatttcttaatgcgagttagactatatcaaaaggtcacttattcacatatgatgacatatttaaaaaattcaaatctcataaggaacctaattttcaacatttatacgaaataaacatcaaattaaagaatatttactaaagaaggaaaaaaatcaccttgtgcggaatgatatcaagtgttc

SEQ ID NO: 124446 - DNA, 322 bp, Glycine max
agctttggagtttccaagggttttatagggttcttatttaccccaagctttttctggctgaaattcttcagagggctttccttctgcggccagcatcttgggatgatcccagcctttgatgacaactttccaggatctgctatccattgattggaggaacgccaccattcttgctttacactattcatagttgctcccatcactaattggtggtctggtcaatgaacctgcttctatctccatgggcatcagaatctatctccctagatctcactcattgatcacgagtgcctgctgtgataccaactgaaattctgatacc

SEQ ID NO: 124447 - DNA, 239 bp, Glycine max
  unsure (1)..(239): unsure at all n locations
aactaacatgcccgacagatatatatttagaatcaacgatagagacttgtacaccatgtctagtctaatcatgcataacttttcattacagtatatagctcaattaatatatacatgttntgagcatgtcaatatgaatagcttgtgatatttatatgattcatgaggtgtgataacatgttatattgggagtatcacatcgcgatcgagactaagtcgatgtgatgaatagagtatgt

SEQ ID NO: 124448 - DNA, 326 bp, Glycine max
agctttgtgtaatcgattacactgatttggtaatcgattaccagtgattgcttatgaataaatcaaaaaatgtaactcttcaaaaggtttttgactttttcaaattggttttaagtttttctaaaagttataactcttataaatggtcctcttggccagacatgaagagtctataaaagcaaggctttgatttgcttttcaatatacttttccaatcaatctattataattctttacaagccttgaatctctttgatcttcttcttcttctttgtgccaaaagctttccaaagtttttctggttttctaaaccttgaaaacttccg

SEQ ID NO: 124449 - DNA, 407 bp, Glycine max
  unsure (1)..(407): unsure at all n locations
tcgaatggtcatcgcttcattcttgtggcgatagattatntcaccaaatgggtcanagaggcttcttataccaatgtcacaaggagtgtggtggtcagattaataaagaaagaactgatntgtcgatacgtactccctaagaagatcattactgacaatggcaccaatctgaataacaaaatgatgcaagaaatgtgcggggatttcaagatccaacatcataactccaccccctatcggccaaagatgaacggngctgtggaggttgcaaataaaaatattaagaagattattcaaaagatgatggtgtcatacaaagatnggcatgagatgttgccttttgccctgcattgatatcgaacctacgtatgaacttctactggggcaacgccatactctttgtttat

SEQ ID NO: 124450 - DNA, 276 bp, Glycine max
tcaagggaagaaaatatcagctaccttcaacaatacatctctgatctcttgtgaaccatgcagctggggcggctatagactctaagccacctcacctttctcattaacatttctggggaagcatctcactatgcttgtgttgcccaccctaattaaaaagccaccgtttgaccggattaataactaatgaggggtgattatcatttatgagttctgtccatttgcctaacttcctttaaactaaataaaaatactgggttgagttgtattgcttaa

SEQ ID NO: 124451 - DNA, 364 bp, Glycine max
  unsure (1)..(364): unsure at all n locations
tattgcaagcagcttgatntcttgcccttcacatgcgatcgctgtaatcaagttccttttcaattatctctctttacttttgaataaatatagtgtagctatttgtatatgccagtgcattctattccatgtgcatcgctctagactgtcacggcatcttcgttatatttaccaccttttttccacacatacgttattgtcttgaaaatacctagtaaaattaggccgcgtctttctctctctcgatatttattcccctcagcaaggtgattgtcctagaagaaaaaacgtgtttttctacaaagaaacactgatggggggagaatccataactcctactataaaatatttgtaaggatacatc

SEQ ID NO: 124452 - DNA, 332 bp, Glycine max
agcttaaaaaaaaatcggtggtgctgtcttcttggacatacaaacttgtaaaaattactgggaattggttactttgaattttgagctgaaatttttactgcattttctagacatctgagaaaagttataaaaaaagaaccaagtgatttggataaaagtgaaaaatacaaaaaatcatacaagttggcaggaaaatcagtatccagaaaaaaaaaaggtgaaaggggaagtgtgcttgttgttttggctcaaaagttattctataattggcgcctatgttataccaatcttagttacgaaatttcaattgaaaattactatgaaaacaagtg

SEQ ID NO: 124453 - DNA, 452 bp, Glycine max
  unsure (1)..(452): unsure at all n locations
ctaagcttgtgtncacanaggacgcccgctcaaccacaaagggccctcactcattacccagctcctacacaacctctccctgtcagcagttccaatcctagcatgagtgccaatccgggaaggaaccctccagtgaagaagcttctggagttcgccgcgattccgttgtcgtacacaaacttgtttccatctttgatcgccaaccaaatggcgatggtgacccccggaagaatttacctgtctcctttcccttggtggtacaaccccaacgcaacctacacgtatcatgggggtacctgnggcattcaatagaacaatgtgtggccttcaagcataaggtccaaagtttgatcgatgtggggtggctaacattccaagaagacagtccanatgtaaagacaaatccacttgccaatagtgngggatcaacaattaatgcaagagaggagtgc

SEQ ID NO: 124454 - DNA, 324 bp, Glycine max
cgctctaatgaagcggaaaagtttattatcatttgtaaggatagagagctatcagatggtggggattttcatcaccatatgggttcgtcgcaacttgcttaaacatattccgaatttgaatgtgtcatctgtaggggttggagttctgggctatgtccgccacaccgattctatccaatttctttacaacatcccttttttttcttttctgcttgagcttgccgtattttctccctactcactttattaccattaagatattctttttcctttcgctatatatagctcccctgcttcctagattatcacatgggttcttattta

SEQ ID NO: 124455 - DNA, 329 bp, Glycine max
agcttcaacattcaatatcgagcgtttcgatatattacgggactgaatcagacatccgagtaaaaagttaatgtagtttgaagttgctcacaacttcaccattcaatatcgagtgcttcgatatattacgggactaaatcagacatcagagtaaaaaggtaatgtcgtttgaattatcttagagctgcggtattccatttcgagcgtctccatatattacgggagtcaatcacacatccgagtaaaaagttaactgtcgtttgaatttgctcagagcttctataatcaatttcgagcggctcaatacattacgcgactcattcagacaa

SEQ ID NO: 124456 - DNA, 352 bp, Glycine max
ctaagcttgagcgattcaacgacaatcaatatttactcggatgtcttgattagtgtctctgaatatatcgagaagctcgaaatggaataccaaagctctgagcgaattcaaacgacaataactttttactcggatgtcttattgagtgccataatttatcggaacgctcgaaatagaataccgaagctttgagcaaatatcaacgacaataacctttatactcggaagttggattgagtcccgttatatattcagacgctcgaaattgaatgctgaagctctgagcaaattcaaacgacaataactcttttactcagatgccggatagagactgagaatatattgagacgct

SEQ ID NO: 124457 - DNA, 341 bp, Glycine max
agcttgcatgtgcgcattgctcattgtttgcacatgcaaagtacatctggcttaagtggccatgcattaagcctccaaatgcacgcttagcacacatgcacgatacaactggcttctagtttggcgtctcacactaagcatgcactgacatgctgagcgtgtaactccatttcttcaacatcttccacacctatgttgttgtgttaaattctacaaaaaattagaaccaaaacactgtgaattcaataactttagcattctctggataaaaactcagaagaagctaaattcttatcttttagataaaaaagaaccatttaaagacaagaaattgtattatt

SEQ ID NO: 124458 - DNA, 435 bp, Glycine max
  unsure (1)..(435): unsure at all n locations
tactaagcttgcttctcaaagattaacttanaggtaggggtattttgtttgagtcttatattntgggaaaagtactcgttgaatatatttgtattttacctatgtttgcgagctcaatctgtaagccttattcagaaggcagcagtgagatgtcactatcatcttctccctcttctctctctttntgtattctatatatatgcaacatattgaatctaataaaagtgtgagagaaattgaggcttttattcctcctcaccttcatttcaagttggtatcagagcaggtgtcatcgtcgccgtccacgcgccgccgtccccgcgccggaatcgtgtcgcgcctccgccattcccttcgtcggctcctcctgagtccgttccagccctcagtttctagtttcgtcacctggaacgctacaaccctattctctccttc

SEQ ID NO: 124459 - DNA, 329 bp, Glycine max
agcttgaacttgatcgtgatttttgtcttaaaaaagatgaagaaatgctgaaaatgaaaagaaaaacaaaaagtctaatcagtaagattattcaataaccaaaaaagagaggaaagaagataaaatgaaaaagaagccaagctagttagaataatcgttattaaaatatatccttgtctcataaaacttcttgtttttttttcctattaattactaattaatgttttttctgacattcaatttgcaaataggttcgtggagattatcctaaagcagagcagtatcttgaaagagctattttggctgatcctggcgatgctaatgttttg

SEQ ID NO: 124460 - DNA, 476 bp, Glycine max
  unsure (1)..(476): unsure at all n locations
actcagctatgtttaagcccacaagcaaaaatatntcttattagtatttataaagtaacaaacgtctcatgtgttgataaaaaaaatgttaaatatgttagtaaaaaggcccaacacatttaatgtaaaaaatctctttcaaaatttactttaggcctcatttatcattangtcagtcctactagtggcacctctccgaagagtgtcaccaactcaagtgtgtgaatgacttagtcgtgtcacccttaatggcttcacccaatcaaacacatttttcattagatgcacttcccacaatgcatgaaagactacatttggttgaaatacctgtttgactatangtgaagccacctaaggtggcaccaccaagtcattcacacatttgaagtggtaacactctttataatagcgtcccaagtggaatgtgttgataggcccatcaatacctacgtacangaatactcatctgataaatg

SEQ ID NO: 124461 - DNA, 249 bp, Glycine max
agcctggttaatttttgctttttcacacgccctactgtttgagtcggggaagcggtgtctttcaaggttattctgaagatgccaactgaatctttatttacccctgttccaaggattcaagaatcaaccctcgggattggatattcgtgattcattcctcaagtttttcgaattgggattgaagattattctccatcaaaattcaagagtcaggggaagactcgctcatgattaggttcaaaatgtttt

SEQ ID NO: 124462 - DNA, 447 bp, Glycine max
  unsure (1)..(447): unsure at all n locations
tcaatggctcaatgagcaaggggaaatgatagtcaatcaacaagtnaagatacctttttctataagagactatngcgatgaagttntatgttatatactccctacggaagcaaggcacattttgttgggtagagtatggcaatatgacaagaaagcaatccacaatggtctcaccaatgaaataaccttcacccatggaagcaaaaagttaaaacttgttcccttgacaccttcaaaagtggttggggatcaagtacaaataaaactcaaatgggatgaggaaaataatagaaaaagaaaaaagaacaacctttaatggttaaggaggagtgtaaagaggtaagtgtcttctccaagaggttagctaaaatggaaagtcattctgcaacacagacaaacattaaagatacttgccttgtatgacaacctcacatcttctcattttgt

SEQ ID NO: 124463 - DNA, 325 bp, Glycine max
agctttgatgatatgttcttttccgactaaaggatcaaagggggtctgaaaagaggcaaatctgatcatcttgctttgataaatgcaaaaaaaaaaaaaaaaagctggggcaaataaaaagggtgaggatgaaggaaaagcccgtgctgagactgccattcctatacagccaagtttcccaccaacccaacaatgtcattactcagccaataaccaaccttctccttacccaccgcccagttatccacaaaggccatccctaaaacaaccaacaagtctaactaccccactttcaatgacaaacaccacctttagccataaccaa

SEQ ID NO: 124464 - DNA, 451 bp, Glycine max
  unsure (1)..(451): unsure at all n locations
tgttgcactcatagcatattatggagctgttattnttgtcttttttctccttgaacaccttntgaaacaataagaaacacactaaaggggggggggggtgaatagcgtgtatatcaaagatataaactttttgtgatataaaggataatatagatagttatgtattaaacacaaatcgtctaccgaggataaatcaaatatataatgaagattagtatggttgtctagtgacatataaaattcttgaaatagctattcgaataaacacttactgttaaagaggtgatagaaagcgttattaaaatgattaataaattattatggagaaaagtagaaacacttgatctatactgatttacttcacctgagctacattcaagtctcctttacttactattaaaggattctactcaatcaaactcgatacacaacaagttttaacctatcattc

SEQ ID NO: 124465 - DNA, 342 bp, Glycine max
cttagagtgacccgcggcatgcaagcttcttttgtaccttgaactagcaatcaactcctctttcagaaccatgctatgtgctcgcgactggtccctttcttcccttcgcaacttgagttcattattgctaccccatagagctccgcgaaatttgttccgaccatactcttccttgcgaaccctcttggtctcttgtttaagggcttttgcggtaattgcattctcttcccgtaacccagcgcactccttacgaacgtgtgtagcagccaacttgaacttctacttggcgagttttgcctttcctaactcgcttttgagagcttggacttcctcggtctcttt

SEQ ID NO: 124466 - DNA, 458 bp, Glycine max
  unsure (1)..(458): unsure at all n locations
tctacttatgtggcaaggcgggcttccttcactgtcttgtctcaaccgcgagctntgaccaccgcccttccttcccgcgatgcttctctctacatctgcctgagtgggcttataacctaaaccatacttcccacgatttcctttggcatttatcaggctagttatgccacccgtgtctttgcctaaacccattccgggttcgtaaccgttccccaacataactcgggccatcattacttctgcatcggacaggcaagcttgcccatagaaagagtccacggaggaaatgcttaccacctcaaaagactcggaaagcggttctaatgactcctctgcggcttccacataatgcatagaggatgggcagctcaccaagatgtcttcctcgcctgatacgatgaccagatgcccttccactacgaatttcaactttggtgagtgagaggcaacactccact

SEQ ID NO: 124467 - DNA, 335 bp, Glycine max
agcttgtgctattccaagttcttttaccatacctttaagccagatggcttccttcactccttcagctagggccatgtattctgcttcagtagctgaaagagcaacaactgattgttgatttgctttccaattgattgttgtaccaaacaaagtaaacacataccctgttaaggatttccttgtgtctacatttcctgcaaaatctgcatctacatagcctgtgattgctgcctcatgtgtcgtccttttgtaccttaatccagctttcaaagatccatttagatactttagtgtccacttcacaacttcccagtgtgcactgctaagatctctca

SEQ ID NO: 124468 - DNA, 377 bp, Glycine max
  unsure (1)..(377): unsure at all n locations
gaaagtggaaaggcatgataattatgacatgcttgagaaggttctttctatattttggctgccccatgagggatactttgcatctangtagcatggaaaatacctttcaatggtatgtatatatgtgtgtgaatatctgtatcatggaaaatatctttcaatggtgtgtatatatgtgaatatatggcatataatgcctcgcacagtgtgaatgagtagcanaaaatatatataagaaaaatgcctttcaacatatgcgcatctgaagatatgtagcattatgagccttttataaaatgtacccatgtcaaagatggcctgatgacgcttgctaaatgaatatatgatgtggaattatcccttatatgtatatagat

SEQ ID NO: 124469 - DNA, 323 bp, Glycine max
agcttctaaactttatacaagattgaagctctgataccacttgttagacattaagatattacaaactatttccccaattaaaattctattttaatttcaatgcaagttacaagttcccttaaaaatgaactattaaataattattcaaataaaacaatctgaatataaatgcaaagcaataataaataaaagattttaaggaaagagaaagtgcaaactcagatttatactggttcgaccacacccttgtgcctacgtccagtccccaagcaacccgcttgagagtttcactatcttgtaaaatccttttacaagttctgatc

SEQ ID NO: 124470 - DNA, 314 bp, Glycine max
  unsure (1)..(314): unsure at all n locations
tgagctctaccttagtttgttgctcttcttagtaagctcttaattagtgtggtggcattgtccgaaggctcttatcaaattattgggtcattttgtccacttggctaaccatataaaagtatcaataagaatggtaatgtggggtttcattttgttatggcagctgattgtgcttcttttggttttcaagcttgacgagagtgacacgccgagaaaagtttccatccgtgccggtgatggttttcacaacttgaagggaaattnttatttatcggtttgggtttgattgggatgattatgcttaattatttggt

SEQ ID NO: 124471 - DNA, 352 bp, Glycine max
atcctaagacccacctgcggcatgcaagctttgaagatagcatggtttaccaccttttaaatctccaggtgcaatccccaaaaaagggaattgatattaactcttccaaaattacatttagtccctaccatgaatgcacaaataccaaaatacctttttgcttctttcctcccatattagcacccacctcatcctttttgacaaaccaatgaaattatgattccatcgtgtaacaatttatgcaacagaatcatgttttcattatgctttttgtttaaataaaaaaagcacaatgtaagtttaatttcattgtacattgtgcaacaaaatcttactttcattgtactttctt

SEQ ID NO: 124472 - DNA, 445 bp, Glycine max
  unsure (1)..(445): unsure at all n locations
ctcagcttctcagggaagtttctcaagaaagcttctcaatgaagctacctagtctataaatagaagcatgtgtaacacttgttgtaactntgatgaatgagagtcctgtgagacacaactcanagttcaacttctctccctttntcttccttcaatttcgggctcccccctttctctttctctccctctttcttttcctccattgaagcatcctctctaagcttcttatccaaggctcatcttggtggtgaagttccttcttccatggcttattccctagtggatggcgcctcctctcacctcttctcctttgtcttccactgcatctccatggtgggaaatcaccattaaagaacctcattgaagctcanagatccagcctccatagaatccccacaagcaagcttccatcanaactggaacatgtgggtctacgaacttaagt

SEQ ID NO: 124473 - DNA, 318 bp, Glycine max
agcttgtctcagcatctatgctagacttaaaccaacatgttagctatcatcgccaagtacgaagaagagttaggtctaaccccggcccacgagcatagaatcccggatgaagatgctcaagtatatgcggaaaaagaggctagaggaagggtgatcgactctttacaccaagaggcaaccatgtggatggagccgtttgctcttaccttgaacgggagttaagaacttccccgattgttagccaaagccaatgcgatggcagacacctactccacccccgaagaaattcacgggctttctgggttttggcagcatttg

SEQ ID NO: 124474 - DNA, 501 bp, Glycine max
  unsure (1)..(501): unsure at all n locations
tccctatttcctataatagggggagaagtgaagggaaaaaatgttcagctctcctgcgaattcgagatcacttgaaattagtgaaaaacattgtttccgtgtagaaaatccaagccaaggcgcttccgtaacgttgtcatgggtgattctgcgaagattttcaaccgttcttcgacgttcttcattcgttcttcggcgatcttcggtcttcaacctgtaagttcccgagatcgaacttttccattcattctatgtacccttagtggtcctcatttgttctcacgtgtttatattntcatttcatttactttgcgtacccccgtttgacgtgctttagtcatttacttaagacattttctctcctaatcaaaaataaataaagtttcaccgatcatttgaattgaacagtcgtaatttctgttgaatgaaatccatcatcggcatgccgaccatgttgaaccaaagaggtaatatatctatatccaattcttcataaataac

SEQ ID NO: 124475 - DNA, 326 bp, Glycine max
agcttgaaccaaaaccggtgttagtgttaccttaaactgtgagtgaactactagctgtgagtaataatctttgcataaatctctaaattttagaatgaaatgtataaatgaggacatgatgaaggccatgattgtacatacacaagctcttttgaccaaactgcttaccttgaatgataattgcatcctttgctccctttttgagctgaatgatattataaaaaatttgaaccctaaacttgaataattatctcctgataccttgtttagattttaggagagcatatggttcaaggcaaacttactctaaatttgggggagggaag

SEQ ID NO: 124476 - DNA, 411 bp, Glycine max
  unsure (1)..(411): unsure at all n locations
cacttgtaaaaacaacaaaaacatacatattactggtggttttgaaaatgatataaagtaaaggctgaaaactccatttctgtgcatattgccatgaaagaacatgaatcctcactaacttagtgagtggtgctaccagtatagaataatatgggacacaccttttgtaacactttgtaaaccatgcaagccgcataaattccttatacttggtggagtgggccactcagaaatgacctttattctttagagtcatgggaanccttgatcactatttaaaaattagaaaagtatgaataaaaataccttttctgaatttcatgtgatattctacccacagtatgacaacttcgtgtccaatgatacctaatttatgaactaaataaacaactactatgatctttgtctaat

SEQ ID NO: 124477 - DNA, 327 bp, Glycine max
agcttatagtcattacttggtgagaaccatattccaaagtcgattgttcctttgatgtagcaaataattgattttatggccttgggatgagtagaggttggagtctacatgtattaactgatgagtctagtagcatatagaatgtctagtctcatgcacgtcaaatatcgcaaactacccaccaaactctggaaatttgtagcatcaaccttttctgctttgtcaaactttgataacttcattttgcagtccatcggtgttccaattggcttgcaactgtacatctcgaatttcttgagcatctctttcgcatagatttgctatgaa

SEQ ID NO: 124478 - DNA, 303 bp, Glycine max
cgtgcaagctcataattgacacacggatatatttttatatgactttcacaaccatatggattgaaccgacattgggctacattcaacgaattagagttcataaaagattatctgagcctaattgtcacgtaacggccagaaccaaatgacctttgaatgggatcactcctttatggacaatgaaaacacggggccagcacgtatctcaatgcttttagaattccccctatgattgtacaagccaatacactaattcaaagattaatgggttaattgggatggccctcgatcaatactctgctt

SEQ ID NO: 124479 - DNA, 358 bp, Glycine max
aactggaggcgtgcgagcttttgactgagaaaagcttttttatattttaagcacagacaacggaaccgagtcaagggagtacctttttaatgctataagaccttttttgggtttctttggtatcaccacttacatacaccatgaaccccaaagaaaagttttaaagatcactcgggccttataacctaaaaaaggacatcccgctacataataatcagaataatgatcataataataatcagagtaatgatgctaatgatgataacatttgtaacttcaatcaacgaaaatagaacaaaaaccccaccttagagagagcttgaaaaaaacctgctctgctttcgtgtgaacaaaaaaa

SEQ ID NO: 124480 - DNA, 326 bp, Glycine max
cattcacctcttcatgtacactttcaacataatctcagtattcttatcacaccattctgctttctttcttttcacaggaacttgattgagagacatttcacaagcttaatgaaacaaacaaaagcataaccctaatccataacaatattgagaagaaaaagaaattaatgaagaacctgtgatgctaacaaaggaagaagaaaaaatggcgaaggatgatcggaagagatgaccaaggatgatcggaagagatgacgaaggagattggaagcatgggagaaaaattccgaggaaggcacagcaccgcaagttctcaggaacgagag

SEQ ID NO: 124481 - DNA, 189 bp, Glycine max
ggcttaggatctgtgttatatttatacgagcatgcctcgtatgctcgcactactctagtaagaattgcgactgttctcgtgccagaaggctagaaacttgggacgagatgttcaaataaattcatggaataaggctaagggagagttgaacaggcctttgcactgacagagcttggtgtactgcgatcg

SEQ ID NO: 124482 - DNA, 326 bp, Glycine max
agcttgacatatgtccacttgcagttgacaaaattggaattttaaaaaagttaaaagattgacacgtgtacactttttttttccccaaaattattatctttccatctaaactcactttctctttctcactctctccgttaacatttctattttctttttctttgtgttctgaagaatttttaggatttcgttttatttctctctttggccacttcatctcattttttccttttttgttttcagaaattttaaccgtttcttttgggttttttgtttgtgtctctctggtgttgtaatttgtaggttgtttatgtgtttgcatgtgt

SEQ ID NO: 124483 - DNA, 447 bp, Glycine max
  unsure (1)..(447): unsure at all n locations
actcagcttatgaganagcttctcanagaagccacgaggaagcttctatatgaagcctcttaatgaagcttctagagaaagctacatgaagctgcctcggtaaaaacgctgcccagccttcattaaccgttggatcttctcgaaatttggtctgaaacttcacaaaacacttttccatgatctgaccgttgggatctttgagaagatgtctggagtatgctagaagcctcttaatgaagcttctggaagaagcctcttaatgaagcttctagagaaaattacatgaagctgcctcggtagaaacgctgcccagccttcgttaaccgttggatcttctcgaaattggctttgcaacttcacaagacactntaccatgatttaaccgttgggatctttgagaaaatatctggagtgtgctagaagcttccgttcctgagagcatctctt

SEQ ID NO: 124484 - DNA, 318 bp, Glycine max
agcttgaagcttgaatataaatcttgaagatattttggcttttacatgcccaactcctttgagtggcatttatattggtttttatattgaatggtgcatcttagttcatatcatatctgttgggtgtcatgcatcatcacaagtaagtgagaattttttttcctgaagttagaaaatttcttcaaaggcaaaactctctattttaattgaatacaggcatatcgcaatcgattacacaagttgtcttaaccttgcatagttatgtcatgtatcgggttaatcaattacagtcatattgtaatcaattacacaattgtt

SEQ ID NO: 124485 - DNA, 557 bp, Glycine max
  unsure (1)..(557): unsure at all n locations
actaagcctctaagcacaacaacacagaatctaggtgtccaacacccctttattaatgggttntctaggcttgagaagagaaattgagaatgaggtaaatttggagcaaactctcacctcacacaagtttataacatcaatctaaacttgctcaaactggatttacacctaaaattccaccgaatcaaaatttgactcctcaacacccaattttgccctagaaaatggctcttggttcactttggtcatttgtttttctctctagcacagtccaagctatctcatatgtcctanatgatatttcaagctaggattaactcactttaacctccatttaccacagaatccagatttaaccttccaactctcagagcctcacttcttttccactcataacactacattctcactttctaaccctagggtaactctatccttcatttctaacacgtttccataaggcaatttangacataaacatcacaagcatcatcattaaaaacctaaaactgaatgggtagcttaactcatccaacatgggcagtcacatgtttcac

SEQ ID NO: 124486 - DNA, 330 bp, Glycine max
agcttggctctggccattaatatcatctcattcttaacttcctttgtcttggagcagatatcccgttcaagtgagtgctttgcggcatcaaataatttaaatgtgaccttctgattatcaatacccatttccagattacctttccccatatccaccacagaattggcagttaacatgaagggacgacccaaaatcagatggactttagcatcctcttcaatatccatgacaacaaaatctgcagggaaggtaaattgttgcaccttgaccaaaacatcttcgatcatgccataaggccttgtgatggaacgatctgccagctgcaatgtc

SEQ ID NO: 124487 - DNA, 386 bp, Glycine max
cgaagtgagaaagtgtggaagagtcagtcttcctacttttatttgttgaccacagagtggtacctggagatatgtcgcgggggtcaggagaccttggggacgtcaggtggggtgctattgcccaaaaccaagcttgatcaatcctgacccaacccgggcatagtcagtcagtgagaacctgtgacatacctaaacaggcgagctcctggcagtcaaccaataaaagaacaaagaccataaagcaaagaggcttgtgtggtggctggccagctatggatcttgagtgatatctggaatatggcctctggtaattgattaccaagggtgtgtaatcgattacaaggcttataaatgaagacaggaagttaagatggtctctggtaatc

SEQ ID NO: 124488 - DNA, 192 bp, Glycine max
aaagggtctgaggggagcacattttttcatgctgcttggacgaactaaaaaagagcgtgcaatgatgagggtgaaaactgtggttaaacccatgtcgagactttcattctctatgtggccaagtttcccaccagtccaatactggcattacttagtcgataacaacccttttacttacctaccacccaaata

SEQ ID NO: 124489 - DNA, 451 bp, Glycine max
  unsure (1)..(451): unsure at all n locations
ctctgttcttcgntcagcactaagcttacatagtctattcagacttccctttcattctctacaattcatgcttaanaagggcttttttgtccatgaaggcgcgcttagtgtcatcttcgtgcttagcacgagtaagtgaaatttggcttagcgccattctcgcactaagcacagaagagacaatcttcttgctgaacgagctgatgacacgctgagcgcgtgatgacatggcagattctcttcaatattcatctcactcgctaaggggctgatgtctcgcttagcggttgagtctcgctaagcgcacggtccangcttaacgaaacaacaacttttgcaccttccaattnttcttcttttntacttggaattgaagtgaaatttacattatattcatatggaaagcttctactgagcagatataaaaactaaacaagaaatatttacaatc

SEQ ID NO: 124490 - DNA, 324 bp, Glycine max
agcttcctcggggccattcctgcgaaggcaaacatttggaaagttagtttacaagaaatataacaatcattacaaacaagggccaaacaacacttctcatggcccgagtgtcaacatgcactttataaaataatcatattggggtcgtgctattttatgacacatacgtatttgcacacataaaaattttgtgtgaagcattttacgacacctatccatgtacatattttttgacaaaccttttcatgctacatcctatatatatacacacacattttttggaaggcttcttttgttacctactcacaaatacacatattttga

SEQ ID NO: 124491 - DNA, 394 bp, Glycine max
  unsure (1)..(394): unsure at all n locations
tcatgtgtgtcaaatcatgggttctattcatttctttcttgcttgtaacaactctgtacattgtctagtcctacgacctttctgtctatttctcttttgctttcttccgacctttgatcgggaattntttctttttcttgctttccttcaatctttgattggggattttctctttttcctttcctccaatctttgattggggattttctctttttcctttcctccaatctttgattggggattttctctttttcttttgctttttgaaacgtgtaacatcctggaaatttctacccggaatttttgaacacaatgtattttgaatgattatatatatataagtattattcattggatatgcagatatgttcttggtagaagtanggatagtggg

SEQ ID NO: 124492 - DNA, 326 bp, Glycine max
agcttcccaaatacaatgacccatgaccaggagtaggaccaaacagtcagaggataccctccaacaaatggtagcaaccatacttggcaaggcccaattggagaaagacgaaggcccaaaggcactcccaagaatcttgattgttgaaggtcaaaactaatttgaaggcccatatcgaatatttttctattctttttaattttaattaaataaattggtgccttttcagttgcacctcagctacactaatgtattgaactcgttttgaagaaaaggaacttttggcattttgagaaaatacaagagtattttgtgaaagcttctct

SEQ ID NO: 124493 - DNA, 328 bp, Glycine max
agctttgaaggtgcgtagcccaccattttccatagtagaatactggtaatgtgtctactatcattgtcatcgatttttcgtcattgaggtgccacttgagctgccaggttctccacctttgggcgtattcttaaaaagatccgtgcccctttttcttttttttttttcacatgttttgtagttgcatcctatccgaagacattatactgacactgcctaacgaaggcaaccactaggtccttccaagaatggactcgggaaggttccaagttagtgtatcaggtaacagctaccccagtaagactttcttggaaggaatgtttcatca

SEQ ID NO: 124494 - DNA, 355 bp, Glycine max
atcctgtatactctaactgcacgcatgcgcgctcattagtctcggctgattaagattaattcggggctactccatgcactcctctaatgacaattgcatcatttctgtcttcagcaggggtcatgtctccaagggttccaccactggccccatctatcatacttccactccatgttatagagtccttcataaaaatattggaagagaagttgctctgaaatctggtggagaaggcaactggcacatagtttcttcaatctctcccagtattcatataagctctctacaatgagttgtctaatgcctgaaaaatcctttctgatggccatggtcctggaagcatggaaactttgtt

SEQ ID NO: 124495 - DNA, 382 bp, Glycine max
  unsure (1)..(382): unsure at all n locations
tgtccttggtttagacatgattgatacatgatttgngacttgtatgtattaatttgggcaaaattggatgagggaaattgtgatttcgaaaatctgcactctatgtagaattttgctgtcaaataggtgcagcataattttggctttgtgcagaaaatgttgtgtatttgctggttgtggaaagagtattacagattgggttctagacgttttctagcagatcccaactgtcataatgtagatttgtgtgctagagacttccagtaaaattntcgagtctatccaacggtttacgaattggaacgaagagaatattactgnggtatctgagtgtgaaaagctgtgatattggtttgtcgtttgggcagagatttctgcctct

SEQ ID NO: 124496 - DNA, 320 bp, Glycine max
agctttaaaccacattatattactttttacacagggactctaaatataaaattaataaacaagactctttttaccgtagaaattcaatttaagaaattttgcattcctcatgcgttcgcagcctgttctgttccaatcaatagctatattttgtttcataactttagatatgcagttgaaaattaatagaataaggtctattgcatttaaatgaaataaaataagtctcaattgaaattttagaattttactgcgtctcaagagttttgcatatgcctttcggaaaattgatcaattttgcaaaactaagatgttgacag

SEQ ID NO: 124497 - DNA, 494 bp, Glycine max
  unsure (1)..(494): unsure at all n locations
tactaagctttatgatttcctttcttaaagaattttttaaaaagaactagtcttttgcccgtgtcgacacccggatttatactcctattcgaatattatcaacacatgtgtaaagntcaataacgatatttatttatatgataataatgttgagttatgtttaaaaaaaacagcataaaataagaatacaaacaaatatgatgttatgatagattgttggatggtgttgatgtaacaataaaagagagactgctcaataaaaagaggtaaatgagttcattagatttttggatataattattgatcatttaataatcagaagtatgacgatagtactatatacaacaatattcacctgataagtagatattntaaatcaatttactctagtggaggtgatataataacaaacatccaatagttgccttggtcatgtgatgctgcaacataaagaaataaatgtnatatatattaaaattttgtaaattaatatt

SEQ ID NO: 124498 - DNA, 335 bp, Glycine max
agcttgtgcaaatcaaatcacttctacatctcatctctagcatgcattttctttctttacccactcctcacgtttggttttttagggaaaaacaccataactaaacgcgccgcaagggatccctatcgcaccagatccaaatctaaaacgatgggtgatcaagaggagacgcaggaacagatgaaagccgacatgtcggctctgaaagaacaaatggcctccatgatggaggccatgttaggtatgaaacagctcatggagaagaacgcggccactgccgccgctgtcagttcggctgccgaaacaaacccgactctcttggcaactacgcacca

SEQ ID NO: 124499 - DNA, 410 bp, Glycine max
  unsure (1)..(410): unsure at all n locations
tcactcttcggatatgtaatagattatggtgttcatgacattgagttgaattcatttacaaaaatggctctacttcaattatgtttcaatgctgcanagtcaggctacataggccaactttctatgttgcgaattcaactaattatgaaatttcctatgctgccaattcagtctacataagccaattttctatgatgagaatacaactaactattaaagtaaacaaaatgacactcaatgtgtcttcaatgaagtaaccatgaacaataagcattcttcattaagtaacattcgctcttggctgtacatgaagtggaccacaacacttctcacattcaacttaacataaagatttacttatgccgacangcgagactacaacccaccaacattaggacacctccaaacat

SEQ ID NO: 124500 - DNA, 325 bp, Glycine max
agcttgtcaaaaaggtgtagctgttaaaaactcttttcaaagtaaaaacgttgtttttacttcaaaaccctttgaactacttcacatagacttatttggggcctctagaactatgagtttgggtggtaattactatggcttagttatagtagacgattactcgagatgcacatggactttgtttttgaaaaccaaagatgaagcttttgatggtttttgcaaacttgccaagggcattcaaaatgaaaaaaggtcttaacattgtttcacttataagatatcatggaggtgaatttcaaaatgagtctcttgaaatgttttggga

SEQ ID NO: 124501 - DNA, 375 bp, Glycine max
  unsure (1)..(375): unsure at all n locations
cctacgagccctcttggtctcttgttccaaagccttggtgggagctacatttacatccctcagttcggcattctcctttctgatcctaagagccactgatttgaacctttctttgactgttngagcttgctcgagttctgtcctaagagcctacacctctttctctttctccgctgcctcaacttgctgccttttagcggntctcaaacttgggagccaatccaaaccttgcacgtgggctttcaaccactcacggtagccaccaatgggccccctacctctgagctctttgtctttcttttgtaccaccttccatgccttgcggaccttctgaagtgtcccatgttggtcttcttgaagcctcgagaaatgaca

SEQ ID NO: 124502 - DNA, 270 bp, Glycine max
atctgatgaatctgacaactctaatggatccataaatgatgaagtgactttcatgtccaggaagttcaaacagatgatgaagaagaagggaaagtttcaacattcctctaaatgtaaagataccaaattcaaaaagaagaacaagggggaaagcaatgagatcatcttatttgagtgtagaaagtcgggacatataaaggtttaaatcttcaactaaagaagaagagatactccaaggacaagaagaagaaaagtttgatggttacctgg

SEQ ID NO: 124503 - DNA, 449 bp, Glycine max
  unsure (1)..(449): unsure at all n locations
tcatcagatgctgcatttcggtatcagctcctcttattgaataacgatatgcacttcttgcattggtaaattgctttatcgtggtgtaactgtcggcattgtgttccttcaacgttagcaagatgtttttcggtttcaccatcgactntgtcatatcagcaataattttcttttcttccttagtcaatcgtccggcgtatggatgtccaactaaggacttcgccaattcatgattatgaatcccacagatcaacttcaccatccaaccttcctctccacgcactggtttcccacgaagcctgaagggacaaccacatttcctactcccggtgtnctttctaacgaattctntatttctacacttgtacgtaccactcctttcacacnncaataacacaaatgaacttcttcctctgctaccggtctctgtgtcagatctcataattact

SEQ ID NO: 124504 - DNA, 324 bp, Glycine max
agcttctacaataaccaatgcttttttacacatgttcacggaatctgcgccacgtcctcttacaccctaaacgtcaaagtcaagaatatgatggggaaggcctagaaatgaggtccaatttaatagatttcagactaataccctgctgacatccgtaaattctttgaataagtctatgttcgtagcccatgcatcatcatgatcatccccaaagcctgtcactagaagagatcgttccacctaaaacaaaggaagattacttattaaaacatacatactacaatcatgaagcactagagtaatagtatttcagaattcacattg

SEQ ID NO: 124505 - DNA, 322 bp, Glycine max
  unsure (1)..(322): unsure at all n locations
tgtcgcanagcttaccgacagatccgngacctanccatggcttatggcttcacagaggccattgccatgctcgcccaatattatgaccagtcttagaagtgcttcacctttggggacttctacttatcacccacagtggaagagtctgaagaaatactgggatgccctctgggaggaaggaaaccatacctcttctcgagattctattcctctttagctatacattttaagatagtcacaatctcgacgcatgaattagaccgcggagagctagtcacaaatgtggcggctggagcaccaaagaaatgtttggaagcaaaag

SEQ ID NO: 124506 - DNA, 330 bp, Glycine max
  unsure (1)..(330): unsure at all n locations
agcttgatggattcnatgaatgaaattaggactccccttctcaaacagcacaatcctttattttctaatcattgtctattgttgctatacacgttccacataggttacaaaattaatgtaaggaatgggaggaacaataaaatataagattaagaaaaaaacattgtctgatttttttaaaaatttcatgtttaagttatattttggcaattcttctattcatactagacaggaattgtaattagacacctacattttgttatttcaaatcaaaggtgcgattgataagttcgttcatgaatctctggtattaataggaagatccaaatc

SEQ ID NO: 124507 - DNA, 348 bp, Glycine max
  unsure (1)..(348): unsure at all n locations
ctgaaactgagtctggctctttgtcttggagtttcaccccaagaatgtacttgaccgccatttagatctgatagagcattcctatcccatctagatccaaaatgacttgccagaaatgaaagctgaactgcaaaggtgctcaaatttctgttgtggaagtttgacatctgtttctcactaaacttggcaaaactcttcagtgatcaaaccacccnctccactcagatcttcagcatcaaaaactttatgaattggtgattccctttcttccagttcatcctagttttanaactagtgacaagacgtgagaaaacagagcaacataatggaattcactccctatacaca

SEQ ID NO: 124508 - DNA, 332 bp, Glycine max
agcttggattacctttttttttgaatctttccttcctaagatggagccaaacccaccccccctcattaagaactatctcctttcttcctctattgcccttaggcgaatacacctttgtttgggtccctattcggatcttaaacttttcatgcgacttatttacaaactgtgacctagataccccttctttatgtatataaaaaacgttagggggcaggggaatgaggcctaatggggttaagggattgaatccataaacaacctcaaaaggggaatgcttggtggtcttatgaacccccctgttgtaggctaatttctacctgaggaagaat

SEQ ID NO: 124509 - DNA, 69 bp, Glycine max
gacgttttttttttatccgcgaagttgagaggtgaaataggcgtttttctatacgccgaattgtggaca

SEQ ID NO: 124510 - DNA, 318 bp, Glycine max
agcttagatgcttgcggcaatatgcgcgctgagcgattttaatatccgctcaacgcccactcctctgtactcaagatacatgatttcagctaagcgatcctagaggcccgcttagcaagagttgtaggttttctaatctgtagatctcgctaagcggtagaatccacgcgctaagctaagccctttttgtgctaaaaaaaatattttgaatgtgaagcttggctaagcgcggtgtccactaagcgacgggccttgaaaaaccaaacgtctctctcgcttagcgaggcatttcgctaagcgagagcgtcgaaaatagct

SEQ ID NO: 124511 - DNA, 435 bp, Glycine max
  unsure (1)..(435): unsure at all n locations
tgatcaanacaattatctaatcattccaatccattcaaatcatacaatttctcattcaaatcattctcaaacactcatttcatacaaaacaatccactacatatcattttcaatcaattcgctgttcaaacacactttntgtacaagcaaacaactcanagcactgaaatttaaataactcggaatttaaagaactgaaacataaaaactgaaatttaaatgactgaatataaatcataaaataactaaaataaaataaaatgttcaaaatgcacaaatttaaatgtcatactcctgtggttgctcctgtgcatgctcattaagatccaacacccgagcaactggtgaatcctaagggataggctgcttatctcagatgctggtgcanatggtatggcatcataaggtatgggtgctanggatggctctggaatc

SEQ ID NO: 124512 - DNA, 316 bp, Glycine max
agcttaatgatacaaataatttcataatcctaatccataacaattcaaaatttaatgagaagaaaaaaaattattgtagaattggttaacatgtgatgctcacaaaggaagaagaagagaggactaatgatgaccgaaagatgaccaaggatgatcgaaaagaatgaccaagatcggaaccacgggagagtaaggcacaacatgttgaggaacaagaaaaagaaattttgagggtttataaaatgaagagaacatgctttgtcattttgaattttttttaggacataattgttcaagtgttatttatggaacatat

SEQ ID NO: 124513 - DNA, 418 bp, Glycine max
  unsure (1)..(418): unsure at all n locations
acacctcttcatgatgtatatgccttattgaagagggtgggaattttcatgacatggggtgtatttgaactacgggaaactatgataatactttnttttccgaccagtattatgaatatcccagcttgaaagagggttcaatggaattgagttatttgaaggtagatgtgcatgtcttgattaactctaataagagcaaaagtagggcaaaaattatggttggccacttgacagctctccttttgttaattattagtagttccagtttaaagcattacccacatctagggtagataaccctctcaaatatagctggaaatatatagctacacatcatttttatctttttataccacgctctattgtcaaaagtttaccatatgtagcatatcttacatggaaatcacacataaacaca

SEQ ID NO: 124514 - DNA, 342 bp, Glycine max
aatgatgatgagagagaagggggggggggaacaaatttatcctcaatgatgcttactataacttatttctgattatccatgtctgatattcacacacatagtctctattatagcctatttcaacaaattggaggatattgatttctttcaatttccttgatttgattgattggtgccgaatttctattataatattattttctttttcatcctattatacaatcacatctcactatgacttgcgcataacttaacatcacgctttcaacgtactcttagttttatggttctacaatttcctctctagctgtccaattatgattgctcttcttcactaatctc

SEQ ID NO: 124515 - DNA, 275 bp, Glycine max
ctatcaatcttattcagttaatcaactagagctataacaaatgtccacttagagataaatataaatctctataataaatatataacgggaagaaacattagtaaaacaagttagtgggtaactgaaaaaaaacatgactacaagttatgtcacatcacatagtacaacatcataacatatatatatatatataacttatgacatggctgagtagcaattactttatgtacttactgtgcttatgctcaatcgctaactaacgagatctctcatat

SEQ ID NO: 124516 - DNA, 228 bp, Glycine max
tatcttaataagctggacactgtgacttatgtgaattataaccctaagtcactttccttttttcttattctgaccctttttttttctcttagatctttactctatcaaatctgtggacctctctgtatctcggggctcttttttctgctgtgttctggaaaactgagcatgactaacactctactccactgtctaccctaatatgaggttcatataattcaccctttt

SEQ ID NO: 124517 - DNA, 491 bp, Glycine max
  unsure (1)..(491): unsure at all n locations
atctcataggatagttcattccagtctcttctattgctattcagcattgcttaaatatgcttnactgccaattatatgtnngtagatgtttcactacatgatcattgtaactttctcgtcaacaggcaaatgcaaatcacattatcctaacatgaaacttatgcgtggaattaatgaagtcacatatctgacanaatatngttgttctgttaataatataaatcattcaatcaagaaagcatatatgagtctctcagtcacatataatatntcatggtctttaattgtggctcaatgcttgcagtacaattagaatctaaaagaggctataatctagcnaagatactattaatatataacaagacttataatcacataattagagactgatgtcttttctaacatctcattgtagaaagaatatatcgacagcaaataaacatatatatgaaatatgtaattaagtaatacatgataattattttaattct

SEQ ID NO: 124518 - DNA, 336 bp, Glycine max
tatctacctacgtactggtaggaccaacgcagaaaatctttctgtgaatagaaatcgtggtgcaaactgacatctgtagtaacaacattatttatggccactattattccttgtctaaatgataggtcaattgatttttatgaaactgtgttacaacgaacatttaatcattggaaatgtttcttctttatacctaagaacatgtgttaaaaattaaattaaacaaatactttatggaattctaatcaaattttccttgtctttatacgatccaatatttttatcattatattgttaatagacaataatctgtaaaagaataaacatatttaaatt

SEQ ID NO: 124519 - DNA, 113 bp, Glycine max
gttgttagtgcaaatcctctgaaaaaagacaagaggagcagaaagatagaagaaaaatgaaataaagtatataaagtgctgctaaacactgctggaaaaatatgcacttcgtg

SEQ ID NO: 124520 - DNA, 191 bp, Glycine max
aatctgcccactcccagcagcagtgtcttgacacacttgagccatggctgggcttgccctttatatcacccttgttttggactttcaatcgactcatttacatctgtttcgagtcgactggtactattccttgctcgagtcgactctataccactcatatcgtgagactcgtgctattttgtcgtgcgatt

SEQ ID NO: 124521 - DNA, 202 bp, Glycine max
aagttttaattgtgggaactgtaacaacttgacgaccatcgaactgaatattgtatggtggaacctaagtgagaacatctaccactgtttgtgcatcttcatatgtctctcttgtgtaaggacgctactgttatggaaagctatattctctgtcggatctacttgatgacttgatgtaatatcttctatctattaatgatgt

SEQ ID NO: 124522 - DNA, 193 bp, Glycine max
tactcacacaccttttatactaactacctactgagattctttctaagaagattcctaaagaagctagagattagctacacatacctctctaatagctaagctcacctgcttgagatgaaaagctagagcttatctacacaccgtctataatatctaagctcacccccatgacatatatacatgataatacaaa

SEQ ID NO: 124523 - DNA, 267 bp, Glycine max
  unsure (1)..(267): unsure at all n locations
atttttttttgaacatacaacatgtgtctgctctaaaatgcaacatacttattcgcaaaatgcatgtataaaatgtctctgtcaccataaatgaatattgagcctattagaactaattatgtgctgaaatctaaaatagaaaatctatatatttgacaccttcattctatatngatgtatatattctatctatattgtccctacactngatatactattaaaaggtaggcttagttatacattaacactattacgatcattaataat

SEQ ID NO: 124524 - DNA, 375 bp, Glycine max
  unsure (1)..(375): unsure at all n locations
atgcacacatcaccaacacccttttttcacacactgtgagttgatatggtgccctatactcangccatgggaacataaggagtggaggtgaatctatggtcatgctgggtctccgtacttcttgataacagtgaacactcatctatagtgtttctctttgataacatatttgtgctggtagtccctactgtcgtaatatgtttgtcgaatgggatgatacctctataaaccatcaagagagatatgaccaccttgggaatatcactaanagcctttatgttcctctgttatgtccctataatatgtgacaaagcgaacacgctgcgtgattttacatactgcatgctataaatgcatgacacgtttgtgatgtta

SEQ ID NO: 124525 - DNA, 189 bp, Glycine max
tcttagatacggaaagctccacaatactgtaaatgagtctcgggaaaaagaaaaaaagggccatgagaaaagaaagtactgtggtacaacttttaatcacggtcctctttttaagactctgaatttgaatttaactctgaatactccccccttatcactctctgaattgaatcaacaactatccccctt

SEQ ID NO: 124526 - DNA, 237 bp, Glycine max
tctatcaccgaaggaagctatagtagagatgtgattgttaggtatcatagaagtacctataacataaaaaatcaggtactgacgtgcctctacaactaaataactagcttatatgactgaagctgaaatgatagagtgattagctaggcaaatgtatgggaatatacgttgtcaaaactatcattaggtaacttgtacatatttatatcattatgtgattatcatgggttaaacatc

SEQ ID NO: 124527 - DNA, 314 bp, Glycine max
attaatcttagtgatttttattacctttcactgaattacttaaataataacttactgattaatttaatctacttattctaattgttttatacattagaatagaatataccctattatgcgaaaaaacttagtgaaaacccaaaattggctatataggaatcactgtcttaatcaatggtattcatataacctgataacttttgtgagatatgtttttagagtcttaaatggagaagtttaaaatacgaacaaagtttgttgttaaataatacacttagtgggggacacgcgataatgtgcttgttatgagtcca

SEQ ID NO: 124528 - DNA, 188 bp, Glycine max
tcgagtcataacagaatcttgatcagaaccccatcaaatgtgtagtgtccctcaccagataacgcctctcgaccagatctgtcattatccacctgtgttatcacaaagccaacattgacacatacatcagtacttcataccaacctatgtcattaagcttgacaatcgagtcagaacaaacataagta

SEQ ID NO: 124529 - DNA, 474 bp, Glycine max
  unsure (1)..(474): unsure at all n locations
gatacaattattgacatatttgatgatgacatatgtgatgaacatatagctcantgatcaaagaacaactcatgttaatcaaagaacatctcatgtgaatcaagaacaagtcaagagttcaagaaaagaatcaagaagaattcaagactcaagaagaaagcctagaatcaagaatcaagattcaagggtcaagatctcaagaatcaagatcaagaatcaagactcaacattcaagaatgaagaaaagactcaatcangaatagtatgaaaangggttttcaaactgtgaatncacataagtgtttgacagaccttaccanagagttgtactcttggtatcgatacatatggtgaatcgatacagtacaaatgatttgaaagtgtcaactgattacaacgtcatttttcaaggctgtatcatacaatgttgtatgatacagtgcctgacgtgaattaatcaattgagagcacatc

SEQ ID NO: 124530 - DNA, 382 bp, Glycine max
  unsure (1)..(382): unsure at all n locations
gagtggcatttgtataggttggtatctctggtgtcgcatcttaatacattngatatatgtatcgcatcatgcatcattatggtctgcgtgaagaacatgctctatgctagaatatcttcttcagaagcaaagctcttctttaatcatacaacctattgtatcgatacacaagtgctgaacctgagagaagctcatatggttatgatacaacatctatatcgatacactttgttgaacaagatgattgtataatcttgcttgtcataccacaataacaatctcttctgtaatgtcaaggacaacattatcatactaggttatcatactgtctagtattcaatgtgaaacactacatctaatattatcatctcgtgatacatac

SEQ ID NO: 124531 - DNA, 388 bp, Glycine max
ttcagcgttcattatacggactcaacgagtctgatgaatgtattgcgtcgattgctcacctggttaaattcagcgtctcattatactggaccaatcgacttcgaggaatgtatgcgtacatgctgcactcattaattgacgccataatacgaccatcgactcaggaatgtatgcgtcaattctacacttggttaattcacgctcatatttcagactcatcgactccggggaaagtattgcgtaaatagctgcacttggtttaattcagcgctcattatacggactaatggacttcgatgaaatgtatgcgtacatttgctgcactcggtataattcagcgttcattatacggaccatcaactcgatgaagtatgcgtacattgtgcac

SEQ ID NO: 124532 - DNA, 367 bp, Glycine max
  unsure (1)..(367): unsure at all n locations
tgtgtctatctctgtgacctgtgtatgagtatgcagctgtattgggtttgaaatagccacaaataatagtcaatccgtctgatttgttacacacggtactttgtgttgctttgatggaaggaatatgggtgcttaacagtcagcttttaactatgctcctgatatgtacacgaacctacatgtgatggtggaacgatcctgtgtctactgtgtgctttattcacagatgtaagaaatgaatccaatggcaaaaatgctggagatgtatggtgctgnggagttggtgatgtctttgacatanttnatattgctcaaaagttatattgctgtacatggcatggtgtgcttgtaacaacatgtaatccac

SEQ ID NO: 124533 - DNA, 358 bp, Glycine max
ttcgctatgtcagtcattgttccccataagccctataactataatttataaaatctctttatattaatgttaagatgaattgtttttatacaatttattaagaatacagatttttgtcttaaaatacatacattcattgctgctactaaagattgcataatggttctaacctaaatatactattttatattttcattacctgttctaccatctaactatagtgacattttgatcatcataatgaaagagcgcagtgcaatattaaaataactcgttttactgttttatatttgtctataaagattctttgcagcatttctctcttcgattatgcaatataattcatgagattcgctaa

SEQ ID NO: 124534 - DNA, 213 bp, Glycine max
  unsure (1)..(213): unsure at all n locations
aatataattgattttataattcacaaacttattatacatataaattatgattagatgattgtataanaatctctcattgtataaactttttanannaaaaaacgagaggattatagattatattatattattaaaaaaagacgtaatcgtactggtgatctcttagatattataatcatatgattgtaatgcttcgatatttcattatatcac

SEQ ID NO: 124535 - DNA, 467 bp, Glycine max
  unsure (1)..(467): unsure at all n locations
gcgtctctatatatacggcatacaatcggacatccgtagtanaaaagtatnggtcatgtaaatttctcagagcatctggtttcaatntatagcatctcgatatattacggtactcaatccgacatccgagttatatagtaccgtcgtttcatattgctcagagcttcagttctgaatttcgagtgtcacgatatactgcnggacacaatcgaacatccgagtataaagtattgtcgtttgaattgctcaaacttctatttcaattcaagcgtctgattatacatgaccaatcgacatcgagtaaaagtatggcgttgaatagcttgactccatttcaatactagtgctaatatttacgggatcatctgcatccgataatagtattgcattgaattgctagacatctgttcaattcagcgttcgattatacgagactatcgacatcgagtaatgtattgcgttaaatt

SEQ ID NO: 124536 - DNA, 370 bp, Glycine max
aataaactatgctacaggaaaaaatctatgcgatgacgaatgggaacaaatacccacagcacagtagcacattggctccaaatgtgatgcagttgcatgtgcctatacactgaacaactactagcctttttgatacaacattttggtagcacttacaagatggcatattatacaactaacacttatatgtacaagtgtgtattagcctctcattggcatattgacttttctgaactggctgatcaaagatgaagactgtgatacttctggttctgtctacctgatagtctcaatctaatgacctgcctgtctgacagctatatcttccttgaatgattgccatcgtctcttgctaaaaaaacaaaatgag

SEQ ID NO: 124537 - DNA, 173 bp, Glycine max
  unsure (1)..(173): unsure at all n locations
tactcaatcggacatttcttttatnaagtatagtcgnntgaattttctcanagcntcgacattcaattccgagcgtctcgatatattacggtactcaatcagacatctgagtaataagttattgtcgtttgaattttctcagagcctccgtattaatttcgagcctctcgata

SEQ ID NO: 124538 - DNA, 309 bp, Glycine max
  unsure (1)..(309): unsure at all n locations
atctcgacacatttagagttattctattatgtaggaaaaaatcacttagcataataatgcaaagaatgatattttgtatatatatggataaaattatgattataataatatatacagagtacttaacaatgtacttggtaattgacgtagtattatgaaaatgacaatatttttgaaatttgatatagagaaggtatcatgatgatattattttatggagactatataggtctaaaagaatnaaaacggagaagaagtgagaagcacgtcaccttgtacgttttataaatataatatatttgtaaaata

SEQ ID NO: 124539 - DNA, 357 bp, Glycine max
caactgttgttcctattatgtatttgaataatctgtttatgtaaagcgcttagatatttcattgataatgtaaaactggcaattatgtaaagagtagtacgaatgtaagtgcagtgactactctcttttggctagctgcatcacctatccatttatcgcctatctgcaagatctgtgaggacacatcttacttatctaatggtaggtttctgtgctgaaacacctgtggattctagacacatggtcttaaatatgatgggtcggtgagctattacgcctgctgaacatgttgtataggattactggaagatgtctaactgaaaaagtgacttctaatagacgcgtatgatttattct

SEQ ID NO: 124540 - DNA, 305 bp, Glycine max
  unsure (1)..(305): unsure at all n locations
tcactgctcgtttgaccataataaagattaatctcttatattctcttgacttctccgcttctgctacaatcatacttgtcacataaacaatgaattgtgaagaatgatctccaagacactcaatgtcaaactacatttatatctaattacccatttaacttaatcttatataaacaattattacacatntattaccgtttcatttgcaacacctagtgccatcacggtgactcatttggtgcgaactcctttgctaataccgtctctgttttaacctccatctggcctgtttcgcagtcatgtga

SEQ ID NO: 124541 - DNA, 273 bp, Glycine max
  unsure (1)..(273): unsure at all n locations
atttccacacaaaatgaaacttaatgacgctatcaccatgtcaaaagaacaaacgcgaaccttgttgtccgcatattctgtgtacgtcatgggccgactgacccttgcggcaatctgccgtacgtcaggtctttctgtctgaatcactctgactgtgatcgaatacggaaagcgtctgacgcgacaatgacgggagccgacactctactccgcggggagtgtctgaatgcgctcatcatgggaaggacctngttttgtgcgtgtgtgtgtctc

SEQ ID NO: 124542 - DNA, 321 bp, Glycine max
tcttaaatatccattatatctgttctttcatccctgcacacattctctcttaaacgcgtattgcagttgtattatcttgtgcgtatgcatgagtatcatattagtggatttaactaaagatcagtactctgatgacttgaagtcatgcactggtatgacttgtgtattatctaatcatgtcgataatgaagtggaattgatttaactaaaagctgttactattgatgtaatgatgtaaatcatgtgacattatatatgattggaataatacataaatatatcagtgtgactgtgtttatgtgacacctgaagaataatgac

SEQ ID NO: 124543 - DNA, 177 bp, Glycine max
accttactgatctgttagaacaaaaactttatcaagaaagagaatgtttggagcagacagaatacttattagtcctcctaaagacatctatgacgagagaaacagctgcttcatgcatgctaaactggacgtgtctgtgtatctgtggagtgtgctctggaccagaactcaaattac

SEQ ID NO: 124544 - DNA, 349 bp, Glycine max
catttttgataaagaggaagaagggacttgagtattctacagacttatcataaagtaccaagtgtacactgttctattatgacaagagcttctgatagcttttgaaaacttcttgaaactgactttcttcccaccattaatactaactacctctgaatactctgaaactaatctaccccacacccttatactaactactcttgaaaaatgctgactactccacccttatactactacccatgcaatcatgtatcaaaatcgtctctcaatgtctaaatgcgaatcatgtaaccttctataaggcaatcatgcaaaatgataactattattttcaaaatgtcccctgcct

SEQ ID NO: 124545 - DNA, 56 bp, Glycine max
tatctcccacacatacttaagcccgatttaacgatcgataatatctccaacgggag

SEQ ID NO: 124546 - DNA, 317 bp, Glycine max
  unsure (1)..(317): unsure at all n locations
atcacgtcggggatatagttggatgctgccttagtagagctatcaagatatccaaacattcgattgcaggacttcaaacgtacttaanacgtggaatgaagttccctcacccctcttaagggagtataaaccctctatcctgagcacatcaagctcatggacattgactactggtgatgtataaatggctaaccgttgatgcatatttggctcctcgtctaatgctcccatttatttcttgagctatttcattccgtaaatttatatatatctcttatacttgtattttgggataaattgggggtatgtgattagtt

SEQ ID NO: 124547 - DNA, 278 bp, Glycine max
cgctactacttctgctcacgcagcttacactgtcttctccactttcttcttatgtcgctgatggctatagctaacctactccacgattcttggtttataggtagtatgccgcgtgcttgctaaccatccggtcataccggtccacttactggcatattacgtgatggcaacaggtgcaagaggatcacaagaatgtggcactaagctgaagagtttacattttgcgtcaatagatgagtggagtacaatttctgctgacatacatgccccatcattac

SEQ ID NO: 124548 - DNA, 238 bp, Glycine max
cactgtgtctcaagccgcttgaactctgagccatggctgtgtttaccctgtcaatcccctgctttgtatctttcgatgacaactacatctacatctgttcttcgagtcgactacgtcttctccttttgctcgatgacgactcaatggcaaactcttactcgctgacgactacgagcaacagggcaatcatgaacagggtccacataccgcaatgatactctatgacagtatcacacga

SEQ ID NO: 124549 - DNA, 408 bp, Glycine max
cttatctgcttatatacatggcttacctttatacttaaatctctttttgtttatatcatataattagtggtgaaagaacgtcttattaaatatcatactgataaacactttatctgaatgttattcaaaacatctatagaaaatctttaaagaatattctgaaagttgaaagatttgtttaccactctgagtagtattgagactcgaatcttgactataaatttttgtttctttctctaacttgacacacatactaccaaccaaaatgttattgtggactagaaagatattatttattacatgatgattgaattttttgaattgtaacatttcttactctatttatattatcatcataatatatctattcttcaaaattacatctattataacattatttcttcttat

SEQ ID NO: 124550 - DNA, 270 bp, Glycine max
  unsure (1)..(270): unsure at all n locations
atgtaactgatttgatngctataagtattgatatggtttaatgttnggcttattgtttcctacatcanangngatatggaaatagttaatgcataagcaatgaanacaaaatgtcgcaccaactaattaatgcaagggtgtgagtgtatatatcagctgaagcttatgggcataacaatgttaagctaacattgtgagtctactttctacatactggcatangtgataatggaggcatatagttgtgtttctttacattgaagtctactt

SEQ ID NO: 124551 - DNA, 189 bp, Glycine max
ttctacacgcagttcacaagatctaataacctattgtacgactcataaaacactacgaacaaaacacaaaaaattgagcaaacctgtatcaccattcatgtcatgtgactgtcatttattatataatgggcctaccaacagtataactcttttgtatcatcaccactgtgtgacgaaaccagatcatgc

SEQ ID NO: 124552 - DNA, 262 bp, Glycine max
cttatctacttcttctactgtttctctctctcactgactctaactcacttgtactttgtcaatccaagaccttttgactaaccacctcatgggactaattagttggaactcttacaaattcgggatggtgtggaaatagggagttacagtatgctataatattgaaaattggaaaagcactgatatgggtagaactaccttgttagtctttatatataatgatggttgtgtaaaaagttgtgatgataacggggcatttata

SEQ ID NO: 124553 - DNA, 129 bp, Glycine max
  unsure (1)..(129): unsure at all n locations
tctactgatgagacatgtttatgtaattgttcatacacaatgtattgatgccaacatactatggtcactgaaagaatttantacttttatggatataactgctgccatcaatttttgattttgctaata

SEQ ID NO: 124554 - DNA, 170 bp, Glycine max
cacaggtttcatctttttaactagactcttaactctaaaatctgaacttttgaactctgactgctctcccccttatacactactctgaactctggactactactcccccttatacactacctaaaactgctttcccctttctatccctcagtaatctcttggccgctctt

SEQ ID NO: 124555 - DNA, 128 bp, Glycine max
  unsure (1)..(128): unsure at all n locations
atgactgagatcacatagcattgtatttccatgcctgctatacataataacatatgtcactgagtgtatcgatgtggtggtcntcgaggtctatttacatttgttgttgtgatgatagtcacaatgat

SEQ ID NO: 124556 - DNA, 364 bp, Glycine max
  unsure (1)..(364): unsure at all n locations
actgaattagtgaaaaatcgtttcatgaagatatccaagctgtgcgcttccgtacgcgtcaaaacattctgtggtgattcctgaatatttccgacgtcttcgttcgtctttgtcgtcttcggcttcaccggtaatctcgaatcaactgtcattcattcttgtaccttgtggtccacttgttgcgtctttatttcattcattacttccgacccttttgacggctataattattaagcatttccgctatcaaatataataaattcaccgtattgaatgtacactgtattctggaaatgaatcaccgtcgtctgcctacactggaaccaanagagtaatatatatatatcanaattcttagaataac

SEQ ID NO: 124557 - DNA, 103 bp, Glycine max
tctatttcaaatacggctatctaccatggtgaattacctagtatgaacctagactctgatccgctaacatgagctttcatgcctgggtgatgtatcctactga

SEQ ID NO: 124558 - DNA, 409 bp, Glycine max
  unsure (1)..(409): unsure at all n locations
ggctagacatgatacatgtcacggtctgcgtaggttctaagattattggatgccccacatnaatcccatgactcataaatgcaaaactgatgatttggacactccatgcacaactggtcatgcatgcacctatgcggacactcaagtgtcaaatctttatggtcatgtgatgctaaggctcacgattcatttcctctatttaagcaacccactgtaccaaaatatgtcctttatcaatatggcattcatcgatccatttcggcttcggaaaatcttacagcattcacccttttgtgtagaacatcttcaaaaatggtatatcaaaaatttttttcaagaacagtgaaacgccctatagaagctgtatttttagcagacaactatatctttttcacttcttgctactgct

SEQ ID NO: 124559 - DNA, 320 bp, Glycine max
gaatgccgaacgaagatatatgaatacatctaccagcgctgttgctaaagtgaacctgatgcccccatctgacctcgaaccaattaatcatacaaccttatatatagtatgcaaagatatgggaaggatggacgggcccatgatgtgtaaattcaaaatgagcactccttcccacatatggtgtgctcccaacttacaccagccaatgtggcgacactcctaggaggatgtcaaaactccgctccatactcatgaaagcaacaacctcaatctgatatgcacatgtctctcaaaccgggtggagacacatgaaatgcact

SEQ ID NO: 124560 - DNA, 429 bp, Glycine max
  unsure (1)..(429): unsure at all n locations
gtctgagaaccgctanagggaggaagttgatgttccgtttgaagacgaagaggngtaggctcttaggacaaaactcgagcaagctcaaacagttaaagaaaggttcaaatcagcagctctgaaaatccgaaaagagaataccgaactgagagatgtaaatgtgactaccaccaaagccttggaatgagaaaccaagagggctcgtagggaagaacatggctggaacaagttccgaggggctctgtggggcagtaacagcgagcttaagctctggaaggaggaaagggaccaatcgcgagaagacaatttgatcttgaaggatgagttgaaggcttgctttatgtccaagaaaagtttgtctcagcggttatgcgagacaaagaccaacatgttagccatcatcagctagtaccaagaagaactaaatct

SEQ ID NO: 124561 - DNA, 500 bp, Glycine max
  unsure (1)..(500): unsure at all n locations
ctcagctcgaggantatggngtacccatcacatgtggtactaggtggcggnctgtctatggtgcacaacaagttttccacatccacaatgcgcgcataaacccaccatcccctgttgcccacctccaactgagctcacgtactcccacgtagcccatatcctcgtttctctcaacaccgggtccccatcaatcctctcaagcttccacatcatccaagcagaacaacattcaaacagcacaagctatcacagccaagcaaaacagagcaaaggcagaaaactgtgctcaaacaccaaccaaaatcacagctntttctcgcttaaagaccccagttacaattccttcgatccaattcgttaaccgttggatcgactcgaaaattntactggaagtctctagtacataagcctacattgtgaccgttgggatctactaganaacatccagaactcattctgcactanaactntcacagccaaccacacacgaagcattttct

SEQ ID NO: 124562 - DNA, 254 bp, Glycine max
ggaacaaacaccgattatggacggttaaacacagaggacaactaattctatgtggaaaatagtcaatgctagtgagtaaatgttgactgcaatatgtatacagcgttgggtctttctaaccaaaaagttgacgcatatgacggatattcttttatagatggtgttctggagatctatgtcgcagcctacgtactaaaccttgatctcctagaagtttagacttatctaacctaagcttacgcgcagatctttct

SEQ ID NO: 124563 - DNA, 264 bp, Glycine max
actacctagaatagataccatggatagccttttttatccttgtttcccgttacttgttttgaagctcactacaagccttaaatgaaaaaccatgatatcaccatatcttttatgaattttggagccttggaactgttttgtgaataactgtggggggctgtttgatccattagataacttgttttgtggctattcttcatgatgtattttgtgccatacttgatgtacattgtgtattggttcaatgctggacatgatgacatg

SEQ ID NO: 124564 - DNA, 534 bp, Glycine max
  unsure (1)..(534): unsure at all n locations
atactcagctataatattttatcctgaacctcgatatttggaattttttattttatttctaataatatcctcttcgcatttgcatatttgaattttttatctatcttctaataaaattgtattttgcgttgagtccataataaaacaacacttttattcttgatctttgatattttaattagcgaatcttgttatagttctgactaataactaataaaaaataattattagagaacaaatacaaaatttattaagtaatgaggaactacaaataagtgttaagaacaaaaaaaattatttttattaagaacttatcacaaaacaaatatttattacaaaacaaacataataatcgaatatttattaaggatgtatactatatgtaagggttttttattagtaaaaccctattacccgtcatcttctcaataatacaaatgccatttactattctgttataacactattgaggacaatactgtgggctgacattcagagaanggataacttgaattgccatgtgaatacttcata

SEQ ID NO: 124565 - DNA, 443 bp, Glycine max
  unsure (1)..(443): unsure at all n locations
tactaagcttctnagaaaaaatttagattaatcaaattaagggtttttctattttgagagcttctcctttgttcttgagttaaagaaatttgtcgtgttggttctaccggcaggtcacagttaggatcatgctctcttaaataactntggttatactgacaagtcctgattatgatcaagttcctcttaaataatgttaaggcctacctagattgngaaatgaaggttgaacaactctttgcttcccattatattagtgaagagagaaaagtttcattggctacccttagctntcaagggtatgccctctattggtggacttccctcgttaaggaaagaaggactcatggngatcctccaatagagtattggaatgatcttangagtgcccttangaagaggcacattccctcctactatganatggagcttatggacaagct

SEQ ID NO: 124566 - DNA, 335 bp, Glycine max
  unsure (1)..(335): unsure at all n locations
ctaagcttctatccaggctcatcttggtggttaagctccntttttcatgtcttattccctagtggatggcgcctcctctccnctcttctcctttgtcttccgctgcatctccatggtggaaaaccaccattaaaggacctcattgaagctcaaagatccagcctccatagaagctccacaagcaagctttcatcacatcttacggcagtacatcttgagatggtttttgggacaagtcgtccctttatacttgtcgaagtccggcactttgaacttcggnggaataacaacatcgggtactaagcaaagatccgtcatgtctgcgaacggatagt

SEQ ID NO: 124567 - DNA, 483 bp, Glycine max
  unsure (1)..(483): unsure at all n locations
ctctgtgtcttctntaataaagatcttatgatagaaacaccatctagtgattctgtgttaacttctaatgtgtgttcgaattgtcttgtggaaatttctggtagtacattctttattgatctgatttgttttcctttgagccaaattgatgttattctgggtatggactgattatcttccaactatgtcttgttaaactaatttgataaaactatggtgtttgatgattctggagtgagtaaggatatgatgtttatctctgccaactgagttgtgacttctttaaaagaagatactcaagtgtacatgatcttgtctaacctggaagtagagacaaagggttccatgtgtgaacctcctgttgttagagagttcccggaagtgttccctgaggatatntccagtctaccacttgagagagagagatagagctntncatagacctggtacttgggtgctgatccatatncatagccccttata

SEQ ID NO: 124568 - DNA, 332 bp, Glycine max
  unsure (1)..(332): unsure at all n locations
gcctgacccgcaaagcgagatccagcatttggattgatatgaaccggtcgcttcaataccacacttcacactctctcaagattcaaccttctctctgctgtcctattatcaattatattatattccattcgtaagaataaaaaataatagataaagcatcagcatcagcaacatcttctaccacagttagaatctttcagatcttgttggtcggactcggatcccccattcctcagatctctgaacccacgatgccattctgctcttgacagtgacacctcacgtgacanattctgcgaactcgtcagaatctcgttcttctttctctcccc

SEQ ID NO: 124569 - DNA, 313 bp, Glycine max
  unsure (1)..(313): unsure at all n locations
gaaaattaaaatcacaaataaaatgtaaatatgttacaattagagaaataactacctntccttcccacactttggctgccacatgatcaatatatgatgtcaacactaatgtatcttgggacctgcttggaaaaccttgtgaatcagcaactacatcctccatgaggcaaatttactgtatggtgttccttttaaaaacaatttacaaaagagggtcctgttcataacaaattctggtgggggtctgttatttacgtgcaatccgncattcctactaacggcaagcttgtatcgctattggcagcagcgggac

SEQ ID NO: 124570 - DNA, 430 bp, Glycine max
ctaagcttctatccatgcacatcttggtggtgaagctccttcttccatggcttattctctattggatggcgccgcctcttacctcttctgctttgtcttccgctgcatctccatagtggaaaatcaccattaaaggacctcattgaagctcaaagatccagcctctatagaagccccacaagcaagcttccatcatttctccccaatggtctacctctatgagttaaaacacttacattttccgcaaaacatgaatcatcattttgagcaaattgattaaaatgagtctccaccctagatagatatcttgcacaaaatatcaagtattcatgagctaaatatctttctgcaatagatccttatggatgtgctcaattacgaacaaatatctttctccccaatggtctatgttggatatcccctgcagcta

SEQ ID NO: 124571 - DNA, 354 bp, Glycine max
ataagagagagaagtaaagtgtgatttatttataacggaatcgatcaaggcaatatgacctctaataccaaagggacttttctgattttgagaaataattgaatttattgtgaaaggaatattatatcacgcacaaagaaatactagtaaataagttcaataccagggacagacaatatgactaaccgacaaagtctataactaggaactaaaatgagataattctaaattctctattatgactatagaaatatgaatcattatcaccaccatagcagactgcttaagagagatcaatgtatatgaaccatcaacatgattgctagaaacatagaaacaagagcattcttaagt

SEQ ID NO: 124572 - DNA, 425 bp, Glycine max
tattcctgatattagaaaatctttgctgtagatctttgtcataaactatatgatgacgtattagttaaatatttgataacactatttgtgacggctcataaatcacccatatttgtttcaaagacgcattaagaatgaagtgctttctctctctcatacttcacccttatttgatgctctctttctatccgcctcttctctatcttcctcttgcgtgggaattcaaagaacgcaccccaaactacaacgacaccatatcactaaccatccaatctaccacaagccacaattgtgaacccgccccataactacaattggcccagatcaacacaaatatagagtgcgttcaaggaaatgtctaggttgttatttgaggtctcgatctaagctgttgatttgagttcaaattctaggtgcactctgtt

SEQ ID NO: 124573 - DNA, 233 bp, Glycine max
agtgcgacatgtgactttgaaagccaagatagccatgcggagaagcatagtcgatgtaatatgatagaaatgatttttggcaaccatagtagctcgcgtggagagcgaggctgttatggaacaactactcgaatgtgatgagtgaaatgtgagaaagatgtgtggtgctgggacccgagactatttgtggtatatattgtgaactgaacggtggatgggacagctatcttctt

SEQ ID NO: 124574 - DNA, 304 bp, Glycine max
caagaatgaattgtcgaactcgcgactacgaatgcactataagacagctcaattctatttcttgatgcacgaatatgctcggcgaggagcctataagccatgcaagacaggtgaaggaagacacgatccctcgcacgagaaaagcaatgcctatacctcgaggacatatatacaataagcaatataaacatataccaaggagaacccctgaggaccttcacgccagacaaccactcttctgggccccgagacagaactcgaacaccgcagcggacataacatcttgcgtagaccacacaacaac

SEQ ID NO: 124575 - DNA, 498 bp, Glycine max
  unsure (1)..(498): unsure at all n locations
cattacggacactatgatactcagctcttaaacaatgttgcttctggtaatcaattaccattagctggttatcgattaccagagaaaaaaatgcctttttcagaaatgttaaaatatttttaaactttctctaattaatttaaaaattatgttttgaggccaaaccttttcaatcattatgagattcttttaacaaaaatagactaaggcgtatcttttctctcgatcttgatttggacttgaagtaaacttgtgttgcttctatctttagcatcatcaaaaccttcatacacatatattcacacttatggatctagttagatttttccacacaaaggtataagcttcttctttgtttttcttatacgctctttgaccacaggcccatggtcatcatcctctattaccttccctttgggtggcctttgcaatgcatatcgcccttntgtattcctttatcctctcctattcttcttataggctactatnatctctatc

SEQ ID NO: 124576 - DNA, 400 bp, Glycine max
  unsure (1)..(400): unsure at all n locations
ntcttggaaaanatgcatcaagagattctcatctctagagtatgtcctcatcttccgatagtacattntcaggtgtttcctgtggcaagtagtcctcttgtacttatcaaaatctggcaccttgaactttggggggataacgacgtcaggcaccaaacataactctaccatgtcggcaaacgagtaatgaccagtcccttcgatggcctgtagcctctcctcgatgagatccaatttctcccttccttccactactagaggcagtctccttaccgagaaatgcaggggttgcaacgggtgatgttgaggagcccttgtggcattatgctgaggcataccactatacgctggtccctcagtggcaaacgtaaggtatgggtcaaggtcacctgagcatgat

SEQ ID NO: 124577 - DNA, 404 bp, Glycine max
  unsure (1)..(404): unsure at all n locations
cgacagcggtcgcgaatgatagcattaaactttgtttacatattctgactgcacgaaanagaacaatctagtcaacaataaactgactaggagggagtggttaaatagagagtaatcacgtcacatcattggctccaaaatagtgttntactaaagtgcacgtatattgagtatgctttccttcgtgatcctcatagcacaaggtaaaaccttcatatctaacctatggtaaaatagaaggccatactaagatatatgctcatcattagccatcctttctaaatgataaaatgaagggataagacaaaaaattcttcttgatcaagtttaattctccttccctttagtatctattttcttttatgttctcttgaaacaatttacgggaaggaaatggcattcca

SEQ ID NO: 124578 - DNA, 365 bp, Glycine max
gacactatgatactcagcttgaaagtgtgttttcaccttctcgctaatccaatgtgctgtcttagcgagcgtacgctaagcgcagcactcatgggctaagcgcaatgaagactctcgaagaatatgagttgtacaggttcgctaagcacaccgcttcatctcactaagtgcatcacttcacttcatctgctaagcgagaaggcacgcgcttagccgaaattcactaatgtgcgctaagcaagccatatgtgcacttagtgcatgagcacgaacaaggccacctatttaagcctgacatcggatcttagagagtgagtgtggactacgattcagagctttgcatgtctatgcgttctagagagaga

SEQ ID NO: 124579 - DNA, 241 bp, Glycine max
  unsure (1)..(241): unsure at all n locations
tagggctcgatcgcggatggaggngcgtgtagaactactgtaagctctggtgactatctctggatttctctcctgtgtgagctgccgctgtaaatgtacagagagtgcctaatatctcattactctgacagataacttcgtataatgcccttatttttcccaagttgacatctattcttataccacatgataagcacattccaatcttgatgagcccgcctagaatttaatgaagcctctg

SEQ ID NO: 124580 - DNA, 479 bp, Glycine max
  unsure (1)..(479): unsure at all n locations
tacccatcacatgtggtactttgtggtttctttctatggnngcacaacaagtttcacattcacaaatcgcgcataaacccaccatcccctgttacccacctccaactgagctcacgtactcccacgtagcccatatactcgtttctctcaacaccgggtccccatcaatgctaccaagcttgcccaacattcaagtaattcaacaatcaaacaatacaaactatcacagccaagaaaaacagggcaaaagcagaaaactctgcccaaaacaccaaccaaaatcacagcatttctcacttaaagaccgcagtaacaatctctttgttccaatacgttaaccgctggatcggctcctaatatttactggaagtctctagtgcataagcctacatattgtaccgtgggatctactattgaactttcagaactcactctgcactgctcgtttcacaaccagtaatgcttcacattttctgcac

SEQ ID NO: 124581 - DNA, 407 bp, Glycine max
  unsure (1)..(407): unsure at all n locations
tgagacttcctactnttattctttgaccactgtagtggacctggagatatgtcgcggcgtcaggagaccttggggacgtcaggtggggtgctattgcccaaaaccaagcttgaccaatcccgacccaacccgggcatagtcagtcagtgagaacctgtgatgtacctaagcaggcgagctcctggcagtcaacagataaaaggaactaagaccacaaagcaaggaggcttgtgtggtggctggccagctgtgaaacttgattgatatatgggatgtggcctctggtaatcgattaccaacggtgggtaatcgattacaaggcttaaaagtgaagacaggaagctaagatgggctctggtaatcgattaccaaggcgtgtaatcgattaccacgcttgataatgggat

SEQ ID NO: 124582 - DNA, 385 bp, Glycine max
  unsure (1)..(385): unsure at all n locations
ctcgctggcgtggcttctatggatgctggaactgcgagcttcaatgtggtccttcattggtgataantcaccatggagatgcagcggattgcataggagaacaggataggggaggcaccatccactacggaataagccaatgaagaaggagcttcaccaccaagaattgcctcgtataataatctagagcaggatgctctaatggaggaaaagacagagagaacggatgagaaccaatttgactgaatcaaatacggaaagaagtggaactttgaagtgtatctcataagacattcattcatcaaagatacaacaagtgttacacatgctactatttatagactaggtagcttccttgagaagctctcttacaacaacttgcttg

SEQ ID NO: 124583 - DNA, 472 bp, Glycine max
  unsure (1)..(472): unsure at all n locations
tttagtccataggcgttttaacgtgaggcccactgtagctctattctggttaagccattttgatagctctattgatagttaagattcatagatcttagtgctcataactatgtgtatataaatagttaaattctcaaggtaatacacaccattatattctattcattgttggctgctagttagtatacctgcatcctgacttaacctgacttgagtgtcaaatgcctctattatttgaaggaggatgatcgagcactaataaaaaagacaagaagatatacattgaaacataatgaaagaaagtatccgacaactttcgtgtaggtaaaaaacaattcatataatatcgattacctatcctatactatgtgaagaaacgatcaanataataaactttgtatctcctaacaatgattagaaaacacacgttatattaacatatntaaagaatactctaataatcatactttat

SEQ ID NO: 124584 - DNA, 381 bp, Glycine max
ctaagctcgcgcacgggtttccgactatgctcttgtggggtgactatctcaaaacgagagagcaagacatgaagagccaatggttgatacatggacggagatgacaaagatcatgacgaagcggtatgtgccggctcgttactcaagggacttgaaattcaagctccaaaaactaacccaaggcaacaagggggttgaggagtatttcaaggaaatggatgtgctcatgattcatgcaaatattgaacaaaatgacgaggttactatggatcgatttcttaatggtttgactaatgatatccgtgatatcgttgagctgcaagagtattttgaactggatgatttgctacacatagcaatccaagtggagcaactattaaa

SEQ ID NO: 124585 - DNA, 477 bp, Glycine max
  unsure (1)..(477): unsure at all n locations
acactatgatactcaagctggcattcatatcctgatgaggatattccatatgttctatttatctggactaatacatttgccgcccaagtttcatggtcttacaggtgaagatcctcataagcatcttaaggagttccatattgtctattccaccatgaagccccctgatgtccaggaagatcatatctttctaaaggctgttcctcattctctggagggagtggggaaagattggttgtactaccttgctcccaggtccattacctgctgngatgaccttaagagggtgttcttggagaaattcttccctgcatctaggaccactgccatcagagaagacatntcaggcatcangcaacttagtggagagagcttatatgagtactgcgaaagatcaagaaattgtggcaagctatcctcccaccaatttctgtcaactcctctgcatattttatgaggactgcatacctaattcct

SEQ ID NO: 124586 - DNA, 419 bp, Glycine max
  unsure (1)..(419): unsure at all n locations
tgtggactataccttcaaccaaacacggccgtgtgtctgtctctgccttgatntaaagcgggttgcagcaccagctccgcttccctaaccgtactggaggcggttgtcgaggctttgtcctctatggttttctagagttttaacatgacctccgagatggaagccatttgatcttttaaggctgatagatcagccttcatctgttcctgcatgccctcttcattatccatttttctggatcgagtgttatatgggtgccttggtgttttcttagttatgatgaatgtcctaaagaaataaacaaaggtgagtatgccaccacaacatgaatatgcaaatgaatgatcggtgcacttggatccacccaaagggttttaggtaacgtaatgagtccagaacttctcatttataaaaagaac

SEQ ID NO: 124587 - DNA, 361 bp, Glycine max
  unsure (1)..(361): unsure at all n locations
atggggtacccatcacatgtggtactatttgtcgttctgtcgaaggngcacaacaagnggtccacatacacaaagcgcgcataaacccaccatcccctattgcccacctccaactgagctcacgtactcccacgtagcccataccctcgtttctctcaacaccgggtccccatcaatcctaccaagcttccccaacatcaaagtaatacaacattcaagcagcacaagccatcacagccaataaaaacagggcaaaggcagaaaactcttgccaaaacaccaaccaaaatcacaacatttctcaccccaagaccccagtaacaactcctacgttccaattcgttaaccggtggatcgactc

SEQ ID NO: 124588 - DNA, 375 bp, Glycine max
  unsure (1)..(375): unsure at all n locations
gatgcaccacattatgtccatgacacacatgcanatatgatgatgtggaaactatatgcgacactggtcatgcatgcgcctatgaggacactcaagagtgaaatatctatggtcatgtgatgctagggattatgattcattccctctatttaagtcaacccaatgttgacataatatgtgctttgatccatctgtgcattcatccgaggccatcttggacgtacggtgaaatttgacaggcgttcacgccttcaggtgtacacacatttgttccataaaccaactatgatcggcgaagtttccatagaagagttggaagtcatctcttatcaaaagcatgtcggatattcagctaaacaacatatgattccattc

SEQ ID NO: 124589 - DNA, 486 bp, Glycine max
  unsure (1)..(486): unsure at all n locations
gtggcatggagggacttctatcacttgtggcctttgatgttggcccatgcccctacttctcttctctatggcgcctctatatacatcggcacgcgtgggcttatagcctatcccaaacctctcgcgattttcctttgaattgaccaagctggccacaccattattgttctttcctaagcccattctgggctcatattcgtgccctaacatcacacgggctaccatcatcacaacatcagacatgcagggtcgcatcgggagggattccacagaagcgttgctcactagctcaaaggacttaaaagccatctcccaaggattcttccacaacttcaacatatggaatagaagaagggcaaccaagtagaatatcctcttcccccgagacgctgacctagcgtccctccaccatgaacttcatctttngatggagcgtcgatgggaccaccccaatagatagttgtaggccagattgatatccatcac

SEQ ID NO: 124590 - DNA, 262 bp, Glycine max
  unsure (1)..(262): unsure at all n locations
cttgatactcagctctaacttgtcaagaagaagctctgataccacttgtttatctgtggcctcagatatcntaagaaggggggggtgaattaagatattccaaacttttcttcttatcaaaaatctatcttactctttacttaagttatgaatgcccttaatgacaatcttcttacatattaattcanatgaagcaactcgaattatgaatataaagcaatcataaataaaggagattaatggaagagaaaatgcaaactca

SEQ ID NO: 124591 - DNA, 375 bp, Glycine max
acaaatctcctagacttgtatgcatcacatgcatgcctcttgaacccttaccacccaccctgtcatcatgccgagactaaggatagccaacacccataaccttctcaatgaatgctcaacaaaactacagggctcctattagaatgtacatcttaacagaacacgcgttccgacgatatatatttgttcgataccctcttaagatacgtatgtatccgttacccgggtacatccatctcagataaacaggaccacacgattcgatttctctgaccaaacgcactatcaattgaatattgatgccacagaagtctgggaaaaatcatatccgactgcgcaatatattgcggcctcactttcactcataaactttca

SEQ ID NO: 124592 - DNA, 381 bp, Glycine max
atctgtattctatatagtgccaatatgtatcaacttattgctattgaagcatgcctaactgtccacaatgcctaacacaagcactagtgtggtgcacacacacacacattttagataaatactaattatattactctgctgacccatatcatatacacttagtgaggctactagaggtacgctcaatatctattcatcctgatggaaagaccctatttacttgacatgaagataggttgaaagtaataaacagttagattatataatattatctttgcagcatgctggaactgattatagatgtcatatgcaatgatgagttatcatatgtgttttcatgggaacctgttatatgccatgatactgttgatatgtgatcga

SEQ ID NO: 124593 - DNA, 497 bp, Glycine max
  unsure (1)..(497): unsure at all n locations
atatagatatatgttgggttttatacttctttntttgtttatgcanggatgaaagtgaggagcaactaagtgttagcatcataaagaaagtgacatttgattccaatgtgaagacctatgagcctgttttggcggatgaagttgtggagaggaaaaatgagcaagctttggcccaaccaaagtcatctttctctgaagatagttctgtgacttcaacggngtcgaaccctcccaaccataggtaccagaattgccgcgacagtgacgatgaggaggaagagattgattatggagacagtgatcttagtgatggtgatgaggatgatgatgatgccatcaaagaagaatgcaatgaagtgagtgacgactttggtgaagatggcatattggcaactactgtttctgatgatcatgtgtttgttgaagaagatgttagtgtgaagtccattgggccaaccttattgtgagagacaaagtgcttatgttcatcctgtgtt

SEQ ID NO: 124594 - DNA, 453 bp, Glycine max
  unsure (1)..(453): unsure at all n locations
ctgggtttggcaatagcaccccacctgacgtccncaatgtctcctgactccccgcgacatatctccaggtaccactctgtggtcaacgaataanagcaggaagttcacccttctacacttcctcatctcaagcttgtaggattatggggtacccatcacatgtggtactaggtggcggtcgggcgatggtgcacaacaagttttccacatccacaatgcgcgcataaacccaccatccnctattgcccacctccaactgagctcacgtactcccacgtagcccatatcctcgtttctctcaacaccgggtccccatcaatcctcccaagcttccccaacatcaaagtaatacaacattcacacagcacaagctatcacagccaagcaaaacagggcaaaggtagaaaactctgctcanaacaccaaccaaaatcacangctttctcacttaaa

SEQ ID NO: 124595 - DNA, 417 bp, Glycine max
  unsure (1)..(417): unsure at all n locations
acttgatctaagcttaattaatatatgactanactgaaaaattattcctatatntgtgtatatattaaattcgntttatttcttatcctatttaccagatcattctaatccaaatatttcaattatcttttattgttttctcttcaataataaccttatttttctatgttttttttactttctttcatcaatcattatgcacattttattctttgttatatctctaccaaacaaaatcttagcttaagagagagaaataggagaaataaatgctagatgagagaacaaaaagttgacaataatttaaaaatgtgttaacacccaaaattgtcattacaccaagggagacctaccctccttttcgtccaaaccctataacacatcccctgtcatggtcagttcggttaataatccact

SEQ ID NO: 124596 - DNA, 298 bp, Glycine max
gaagaaacaagatcatggtcacaataagtgccactgatccagccagaataacaagtgcatgattgtatattctttcctccgttattgctctacaagattaaacaacaacagaaaggactttgtggaggattagcagttatgaacgaaatacgttcttttggaaattggtgtacataaatggtaattaaattgttcaacgaccagattatctgttgggactcaaagtccaaacacttatcggaacctaaatactactactaataatggcctggatcttatgctcagcaataatttaaca

SEQ ID NO: 124597 - DNA, 169 bp, Glycine max
aaatgaatgactctcaatgccaacggagacatgcttgtatagactcttcatgtctggtctcgaagacccttcagaagagttatcacttttagaaaaacttaaaacccatttgaaaaagtcataaccttttagcagagttatatctttagacttttcagaaacacacact

SEQ ID NO: 124598 - DNA, 304 bp, Glycine max
ccctatgaaaaccgccagctgcaactatgatattcaagccgtatcacatccgattgataaattacacgagcacatcctttatctcagtggaaccattgaaagctctgacctgtgataatgatttcacctaatagctaattatgtccaacactacagtaaagtatatgaatgcataatgtccgtctctctgagtgtctattgaagatacactggctacgtatagcagctgaacataatataatgctgaaactactcgccataatgactgtgtcagacaaacacgtctgtgatcaactcctgcact

SEQ ID NO: 124599 - DNA, 456 bp, Glycine max
  unsure (1)..(456): unsure at all n locations
gaagagagagagtcaagagattcattgattcaaggctcgtaaaggattgtaatagatcgttagaaagattggaaaatgaatgattcanaatgcanaacaaagccatgcttttatagactcttcatgtctggtcaagaagaccattcagaagagttataactnttagaaaaacttaaaacccatttgaaanaagtcaaaaccttttgaagagttacatctttagatttttcagaaacaaacactggtaatcgattaccaaatatgtgtaatcgattacacaaagcttttgagtgaaataatgtgactcttcatatttaaatttgaatttcaatgttcaaggacactggtaatcgattaccaaaacattgtaatcgattacagcttttgaaaatattggaacgtgtaaattcagttgaaacatttcaaaactatttgtactggaatcgataccacata

SEQ ID NO: 124600 - DNA, 269 bp, Glycine max
cgcccaactataagcttaagaatattctttggttcaaaccgcaaaacttggagggactcttaatttcatatatctcttataccatataagcactcattcttatttggatggttaatcaatagaagtggtgacatttaccgcatagctagatattatcattcgcctttacttattattaaaaaaaaatcatatctggaagcgtatctctagttcaagccccaataattatgactgggttccaacgaagaatctggaaaaattctttaatc

SEQ ID NO: 124601 - DNA, 197 bp, Glycine max
tatgtcctacaatctaacttaacgtctagaggacccatcatccaatgaatctcagccgatagatgcccatcatctatatattatgtgtgcccaatgcatgaacatctctatatcatcaacattgagttatataagatgacaccgaatgtcttgagtaagataacgatatcgtgctaatgatgagacaaccttcgatt

SEQ ID NO: 124602 - DNA, 419 bp, Glycine max
  unsure (1)..(419): unsure at all n locations
caagccggactaacacatttgactgtgtgaaatgacatctacttctttctcgtaagngcagcaaggagcgcggcatgctgttgtgaatgaacctccatctccttgaacaagacacatagatacatcgatgtcgctccatcctgatctgttggagactctcttagactcatcaacaatagatagctataggtggagatgggcgggaagcaccctgctattagaattgcatagatagcattgcacaacaacgcctaatcactatgatgggatgactcgaaaagctatttgatgtccataggaatactccattgtttccatgcgcatatgatgcttgtgtgagatagacaattgttgtgcttcacacagtatgcaatacttcttctatcggtccgcttgcactgtgagacaggtatttcata

SEQ ID NO: 124603 - DNA, 388 bp, Glycine max
  unsure (1)..(388): unsure at all n locations
tgtgacatggagttttcacatatcacatcctattattctatcatactcactgtaacatatagaggcgtatgcatacatcttcttacgaggtaattacataataatcctaagatgagccattctatccataagactgagcaaggggatagaaagaaaaaatcacatcttcgatctcgtgcatgctttatccactaagacttcaagaagatgatccacctaaaagccatctgcttccttgaacacacaatgtgagatcatcacaatgacgaccacatgcggaacatgcaacggttggcttactaaagcaaactactgtacatagaagtataatcatatgcgattagancgaaaggggagaaactatactttataagcttcgaagatacta

SEQ ID NO: 124604 - DNA, 507 bp, Glycine max
  unsure (1)..(507): unsure at all n locations
ttgtacccactaatgatcaacttgttgtcatttacaaaacccctaactaaagaaaggttgattntgctaaagaataaaattggaatggactctataaaagaatgagttaatgtttatatgtcctacaatctaacttagtgtctagaggacccatcatccaatgaatctaagttgatagatgcacatcatttatatattatgtgtgcccaatgtatgaatattntcatatcatcaacattgtgttatttaagatgaaatgtagtgtcttgggtaagataatgttattgtgcttttgatgagtcaccctttgattggtggaccttatgattgcatttcataaagcccaaaanatgggttcatcttcaagaatcaaaacaaccatcccttctcttatcanacccttcaattacaaaaattccccactttctttctcattnttattctctctctgaaccctanacacaaaccctaantctagaaagcttcaaccttgcatcatgtcaagtg

SEQ ID NO: 124605 - DNA, 324 bp, Glycine max
ccatattgagggtcccttatgagaaaccttcctaatgggcattctaaagaaccatcaaaatagccattctgatgtttgatgagaatgaatccatacttgatgaatacctttgatgaagttcaaatagatcttttattctgaagaagcacaacttcatgattcttaacacttcttcacaacttcagcattctgaagttaatacttcatacatacttagtacaagttacttgctgattgttagtgttttgtcaacgtaaactaagcagattcttcaatctttgtttgagttctcacagcactctttggacactcattacaaaaggt

SEQ ID NO: 124606 - DNA, 438 bp, Glycine max
ctcagctcgaacattaactgaatcctagttcccttatgacttatgttaaatgtctgctggctgatcattagaattgatgaactcagtggtaatctccttggacaactaattttctcgaatgaagtgacaatcaatctctatgtgtttggtcctctcatgaaagactggattggacgcaatgtggagggctgcctgattgtcacataataacttcattcgtgcaacttcacaaaacttcaattcttgaagaaggtgcttaatacacattagctcgtatgtgaccaaattcatagatcgggactatgctatgtcctctttgatcgtgaccttctgatagagttatcaagccaaatatggcatcgatatatgaattaacatgatcttcttctatcaaccctcatgacaaaatccgacttcttgcatttttattttgtgacc

SEQ ID NO: 124607 - DNA, 437 bp, Glycine max
  unsure (1)..(437): unsure at all n locations
agttcttcctcacaactgtcctaagcaaagttcccaatgtcctattaacaacttccgttggcccatcggattgtggatgacaagtggatgaccataacacaatagtgcccaacttgcatccacaaagtcctccaaaaatggcttaggaacttagagaccatatcactaacaacgctgcttggcaaaccatggagtctcacaatctacttgaaaaacaaatcttccacatgggaagcatcattaatatttttacatggaataacntgagccgatttagaaaacctatcaacaaccacataaatggaatctctaccattgcttgtttttggcagccccaaaacaaaatccatggataaatcaactccaggatactaccgaattggcaatggagtatacaatacatgaggctgtaccttagactatgccatcttacatac

SEQ ID NO: 124608 - DNA, 403 bp, Glycine max
ctcaagctcttcgactcattctatgtacccgtggaggccacattgcgtttttgtatttttattctcgtttcattcactttctatacccgcttttgacgtgcttaagccattttatttaagtcatttctcgcttaaactaaaaataaaataaatttccaccgatcatttgaattgtattatccgctaacttcggttaaaatgaattccgaccgttcggtcgtgccgtaaccacgttggaaatataaaaagaggtaaaaattaatataataaataaataccttttagtaaaataaagcggaaaatcaatcggaccgtttctctttgggatttctcatttcttaatcgaattgactaataactaaagtgaaactaaggctaaaatcaactcgcctagtcatgctcg

SEQ ID NO: 124609 - DNA, 293 bp, Glycine max
  unsure (1)..(293): unsure at all n locations
tctaaatgagctactatgaagcacagatttaaanatatatatatcgctctaagaggatattcatgtgtgtgtatctatttatgagcaggttatctaagggcacgcagaatcacataggtgctctggagaggatgagttctgcggcaatgaacatgccacaacgcctccgaccaccaatgatgtgagaatatgccaactaccacggcgagtgacgttcacgatggtcggacaagattacatataatcagcaccccgcttcgcagggagtgaagattatgccttttacttggaaa

SEQ ID NO: 124610 - DNA, 359 bp, Glycine max
ctcaagctctccgtatccgcacttggagagatctgattaccgccttcctaatgctgtatcagtacaattctgatatggctccggaccggactcaattgctcaatatgctcaagatagatggtgaaacctttatagaatatgcgcagctatggacgcgattggcggcacaagtagctcctcccatggttgagagagagatgatcaccatgatggcagacactctgccagtcgtctactatgagaagctggtgggttacatgccgtccatcattgccgatctggtgtttgccggcgaaagaatcccggctggattgacgagaggtatagttgatcacgtttgcttcacacacgtgaacgcc

SEQ ID NO: 124611 - DNA, 298 bp, Glycine max
  unsure (1)..(298): unsure at all n locations
aagcccggcgggttcgctganaagcgtggaaggatcggtctgggttattatcctacacatgctgacacaagaagggtcaccttacaatgtgaagaaagaaacctaactcatttactatggtggtgaccgcatatggaaagggatcttgagcgcctcatttgcaaaagctctgacagcgtgggatggatgcatgagaaccatgctgttgtgctatgctaagaaacgttccataaaaagccaagttgagtcacccccgctcccaatcttcccattgaatagttgtggatctggagaaccc

SEQ ID NO: 124612 - DNA, 376 bp, Glycine max
tcagcacataccttatttctataaggatattctatcaacagacctccaatctttaatggagagggttaccactactggaaaacccgaatgcaaatttttatcgaggcaatagatctaaatatctgggaagccatagaaatagggccttatatacccaccacagtagaaagagtttcaatagatggtagttcatcaagtgaaagcataaccatagaaaaacctatagatagatggtctgaagaggatagaaaacgagtacaatacaacctataagccaaaaacataataacatctgccctaggaatggatgaatatttcagagtttcaaattgtaagagtgctaacgaaatgtgggacacttcttgattaacacatg

SEQ ID NO: 124613 - DNA, 439 bp, Glycine max
  unsure (1)..(439): unsure at all n locations
acactatgaaactcagcttacagagttggttntggttattgaaaatatgtttcctgttcataacagcttaccgaagagtcactacgaggcgaagaagatattatgtcccgtaggcttggagtaccaaagaatccatgcatgtccgaatgattgccttctctacagaaatgagtttctggatatgcgattctgccccacttgcggactttcacggtacaaggccaacgatggggaaggtactgaatgttcaaccaccgctagtagtcgtccaacaaaggtttgttggtatttgccaataatacctaggttgaagcggntgtttgcgagtgtacaggattctaaatacttaaggtggcatatagatgaaagaagaatggatggtatgatcaggcaccccgctgatggacacaatggaagacattgactcttgatccatctt

SEQ ID NO: 124614 - DNA, 363 bp, Glycine max
  unsure (1)..(363): unsure at all n locations
cgcgcgatccgganattccatatgtggcggaagtcgataagatggtgttttccgcaatccgtaagtttccgtaacttcttcgaaagctaaanaagagtaaatacataatccgtaaggattcataaccttgcggaagaaaaataagtatcgttacgaaattcgtaaagtttcgtaacattacggaaaaagaatcacaaaaaataaggcagggggtgtatttagtaaaagtggtggtgcaaatagcaaccaggcccacttgggccctccagaaggcttgtgcttctggaggaagcaaccttgcttacctgtgcgagctgggcggcaagcttctcccctattttgctataaatagggggagaagtg

SEQ ID NO: 124615 - DNA, 460 bp, Glycine max
agaagctacacacagatgcttaaccactcaagacagcagctaaccaataacagtgcttaaccaccatataggtggaagcaacatagcttaaccatcgagagtagaaactaaacatggagcttaacctctaagacagaagcaaaacaatatttgaatgcttaaccaccataaaggcagaggcgacacaccaatgcttaaccaaaggcagaaattggacatcgatacttaaccaccatggacagaagcaaatgactgtttttgttattacaagaatataacacctaaaagctgttgatgaatggaggggacatggatagtatacacagaatatatattcagtggacgcaacgcaccaatgcttaaccatccatggcagagatctgacatcaatgcttaaccaccatagatgcagatgggacacaccaatgcttaatccatcatggcagagattgacatcaat

SEQ ID NO: 124616 - DNA, 278 bp, Glycine max
cgggcacctccactgtctcggctattacgcttctttgaccactgctacaccttcccacgaggctgcttttcatgtgcgcctgagtgggcttatagcctaaacgatgcttactacgacttccttgagtatttattatgctcgatatgccgccgctggttttgcctataccctaccacggttcttatccggtacccaccatagctggggccactaatacccgtagattcggacaaacttggcttgccaatgatggagtccactaaggatatgcttaccac

SEQ ID NO: 124617 - DNA, 334 bp, Glycine max
  unsure (1)..(334): unsure at all n locations
actcagctcgagatggtcgctgagcaggtgtaagttggactgcgtgtgtcctttcatatgccttcttcacgctaagtcattgtcatcatgttntcgcatcaatttaattacaatttctcttcttttgaatgctgctagtcaagaattgaaatcatcattatcctatctaaaccaacacatcatattgacgtcaccgattcatactcctcactatatagctagtgaatgaacttgaatatgtgcgggtcaaactacaacacggcccaactcggctcaaacacatgcaagctctggtccaggataattgatggtcaatttacattggctgagcatt

SEQ ID NO: 124618 - DNA, 407 bp, Glycine max
  unsure (1)..(407): unsure at all n locations
gctcatagagaagaacaatgatgagacattgagagactgctatgggctcactattatgccttacactttactctatccttctagtgaggagggattgactttcacaagaattcccactaatatctctatttaatggctctatggttgctgaagcactgtccctggctntaaataaatgtgaaatacaaagaatttgattccttcatcacttgagaatgtttaagttatgtatctggagtggctgaatgtacttacttgccatatatcttattctgggataactgaaagaccctaattagtaaaacccacactattcaatgacatattaaacaacaacacccaagtttctccccactatgatgaggtcactacatgaatcagacaatgccataatgtccacctgatct

SEQ ID NO: 124619 - DNA, 305 bp, Glycine max
  unsure (1)..(305): unsure at all n locations
ctcgctattcgcatggntcaagcttaacgagatagcaactattgcaccttcataatgttctcctttttacctgatatagaggtgaaatctacattaaattcataaagaacgcttctattgagcacatataaaaactacactagaaatatgtacaatcctaccaaaaataaccatatattgcgagattatatacattctataaaagttttctatacagaagttagtcttatgagatgacttacagtaatcaagccacaagcattgtaattaagctagatagaagcaatgaacacagagaaatagca

SEQ ID NO: 124620 - DNA, 278 bp, Glycine max
ccccacgccgtcgccatatagagactggcaacgcttctaatcaacactgtgcaatatatcgacattcaactttatatatctcttccccttacttacagttcttatgtgttctttatgcctttgtatgttctatcttcttgtggtcgacaaaggcgtttcccttatgctcctacgtattgctcgattttgatgagaaaatcagacctacgtacttcttttgtgaacaaagcgtttcggcttaattatattttatcactttctgcaagatatgtctttat

SEQ ID NO: 124621 - DNA, 381 bp, Glycine max
  unsure (1)..(381): unsure at all n locations
tcttagtctcagctgatgaagatgaatntgtgactacttcatgcttcttattaatgacaatagcatcatttctggcactaaattgctgggagtttgaagccatcttctcaattaaatttatggcttcagcaggggtcatgtctccaagggctccaccactggtagcatctatcatacttcgctccatgttactgagtccttcataaaaatattggaaaagaagctgctcagacatctggtggtgagggcaactggcacatagtatcttaaatctctcccagtatgcatataggctctctccactgagttgcctaatgcctgatatatcctttctgatggtcgtggtcctggaagcanggaatatgttttctaagaatactc

SEQ ID NO: 124622 - DNA, 373 bp, Glycine max
  unsure (1)..(373): unsure at all n locations
caggtttacctgctacaatgttaatgccagagtctccaaattgatgcacgttatctntgcaatcagctgtatgttattctatttcactcctagataagctaaataatcacacacaaagcaaatcagcatttatcatctgccttcgtatgtgacatgaatgtatcaccaaatactgaatctcaagacaatggacaatcgctctattatggactgatggggaaccaatgacctatgtatatgaaataagcgttagccatactttgtggtatcatagagtcacaaaacttagaactggtgctaccagtttacctgctacatgttgagcagtagctcccaatgatgcaatcatcttgcagcagctgatgtaaatgat

SEQ ID NO: 124623 - DNA, 380 bp, Glycine max
  unsure (1)..(380): unsure at all n locations
tgtagaacggctggacatgatatatgacatgttattgtttcggttttcggctcacggataaaggaatggtccacattatttccatgacacgcgcgcaacaatgatgatttagaaaattatgcaaagctagtcatgcatgcacctatgcggacactcaaacaatacgttgtggggtcgtgtgacactagggctcaggactcaagcatcaatttatgcattcgtcacagtncattttgggtgttcggaatatgccacatcattcacccttcatagtaatggtgctacctaaacatatgcatatttngtgtgtggcatcttagctacctaaacatatacatacatattcaaagcattgtagcaccgtcacatatacatatata

SEQ ID NO: 124624 - DNA, 407 bp, Glycine max
  unsure (1)..(407): unsure at all n locations
tctaatagtcaaataaatgtcatagctagtatataaattctagaagntaactgacatgctttatcgaacataacctataagctaaagaagtaaaaaatgagatagaaaaactacctcgaacttatgctctatttgacaattaggctatgttaggaaagacacttcaactgacttctatcttcttttagtagctaacaagcttatttgactttcgataaaaaaatttgtagtagttatcaattgctctagcatttttgaacgtacttgaagacattttttaaaacacttgcctatctcaactgggggaggcttagccattcaatttgaagatgggatgcaattgcctttcttgtttatgctaactggccccaggacgaaaagcccaggcgtggctatttggaactggt

SEQ ID NO: 124625 - DNA, 386 bp, Glycine max
  unsure (1)..(386): unsure at all n locations
ctgatggtgttgagaagaaatcacatgtntgtcatcatcaatattcttatgattaatctgatgattcttgtgaacttttgaatgagttattgatgcttgtttactccttaaatattcgatnttcattaatatttttttatttatntattactttatagttatgtagaaaaacctgaaaattatcctgtcatatgaacaaaatgggttgttagaaataaattagatgaacatggcatagtaagaaacaaaacaatattgctttatgcattgctaaagcggaatatatctctgccggcacgttgtgtgcacagatgttatggatgaagcaacaattatctgactatggtatccttcttgatcacatacctattangtgtgataatact

SEQ ID NO: 124626 - DNA, 326 bp, Glycine max
agagaatactcaatatctcgtttataactttctctcatgtaaatgagctaaagatcttgagctgttgttagtaaaacaagaagagaagaaagtgacggtgtatattaactcacaacttcgaaatcctttgattgtgaagacttattcttaaaagtgaggagtgtcactttcttgagttcaggaagaacacctgctctgtcaagctaagatatgccgaatctgttgaccaggcagtatgtatcttgactcttgagcttcgagtgtggattgacgcctctttttgtgcgcatgaactgcttaacagcacgctgcaatacgggtttcta

SEQ ID NO: 124627 - DNA, 286 bp, Glycine max
  unsure (1)..(286): unsure at all n locations
ctaagctgccagacatgccacgcgctctatttcaggtcctgtgactcttaaatatatatcattgatctaatgaatggaatctgtggcgctttgtagactttgtgaactctgtactctcaaccatatatctggtttagctcatcctacataaatacaccaaataaattattgcattgcatcaatatccgttatgcttcagtgccactgaacanaactgatgtgctcattaggtactccgcctcacgccatagccctctattagaaaattgagcttaacacagagaaa

SEQ ID NO: 124628 - DNA, 377 bp, Glycine max
  unsure (1)..(377): unsure at all n locations
ttcatctgacttatcttatttctgtcctaagaattctgttgcattgagtaatacagatcactcgcgacacaatacatgaacatgccagatgattggagtcctaccattgatcagttcatatggagatttactctaagaggggtctattaaagccctatgcatgatatagcactgcagaacttaacgggtgcaacccgcgaatatcttggaagaggaggatcntctattaatgtactagcaatgcctaccacagacctatttttcctttcgacaactacatttaggtgaggggttctatgtggtcaacagttatgttcaatgccgtgctaatcataaaataactctattctttatattcgactcgcctccatgatcac

SEQ ID NO: 124629 - DNA, 499 bp, Glycine max
  unsure (1)..(499): unsure at all n locations
gctcgatgatnacatctncctctntctcaagctatttcttcttgatatcatcaaaagcttcatgatttacattctcccgcttcttgatgatgacaaccacctgtatgttatgagcaacaacaaagaaaatatctattcgcatatagtttactcccccttggtttacaatgattgcttatatgagacaatcgaagattgcatattttttatatataaaaagttggctcataaaaacaatagataatgggtcttactatattatactttatctatctcttcccctttgtcaacatcaaatacacatcatgaatagaaaggagaaagatgntaccactttgttgcaatgtatgacaatcaagtgataccaaaaggcgttaaaccattcttcaatattaatcaactctaactagtcaatacacatctttcaactcatctactcatcatctcaatatttcatcaattattaatacaatactactttccatatttatataaaaaa

SEQ ID NO: 124630 - DNA, 299 bp, Glycine max
accacagagaggtacctagagatatgtcgcggaggttaggagacctctgagacatcaagtggggagctattgcccataaccatgcttgatcgattctaacccaatgcggtcatactcagtcagtgacaacctgtgacgtacctaaacatgcgagctcctggcagtcgacctgagatagaacaacgacctcttagcaaggaagcttgagtagaggctggtcacctatggatgttgagtggatctggaatccggctctggtatcgattaccgcggtgcgaatcgactactcgccatagatg

SEQ ID NO: 124631 - DNA, 473 bp, Glycine max
  unsure (1)..(473): unsure at all n locations
tcccaacatcaaagcanaacaacattcaaacagcacaagctattacagtcaagcaaaacagggcaaggcagnaaattctgctcaacacactaaccaaaatgacagctcttctcacttaaagaccccagtaacaattccttcgatccaattcgttaaccgttggatcgactccaaaattttactggaagtctatagtgcataagcctacattgtgaccgttgggatctactaganaacatccagaactcattctatactactctgtccccagacaaccacacacaagcattttctgcaccaagctaaaatcctgctacacctattttgacagcaaaattctgcataagtgcagattntgaaaatcacacttcctctcatccaatcttgctcanatcanatcctacaagtcccaaatcatgtatcanacatgtctaaaccaaagccaagcttcanaccacagcaacacaaaatct

SEQ ID NO: 124632 - DNA, 445 bp, Glycine max
  unsure (1)..(445): unsure at all n locations
tgtgaacctgcactgtaatcccactcgtacaattctacatctatatattagcacagaatagccacaaaactagatcatacgatcctacaggtaagatagacaacactgctctatttattatagaattgaatgccattatataatacacataatttacttaataatggaaggagtgcttcgaaaagagtattaaatatttgctagcattntcagtctatacatttattagacaatgttgtcataataaccaatcaatggattgtaaaagcaccctctcaaacttctttccctttcaaaataaatgaagacaagagacataaagcatccttcctagtttaacccagctcaagtccacccaaacccctttccctcttaaaatagaaagggaatgtttacattctgcaagtaatttcaagcatgaattagacacttgaaagaataataa

SEQ ID NO: 124633 - DNA, 435 bp, Glycine max
  unsure (1)..(435): unsure at all n locations
agctntgcagaattggtcttcgccagtgaaatgatctatgtgggtccgaaaagaggcaaatttgatcatcctactatgacgactgagaaaactggggcaaataaagagggtgaggatgagggagaaacccatgctgtgactaccattcctgtacggccaagtttcccaccaacccaacaatatctttactcagccaataacaaactttctccttacccaccacccagttatccacaaaggtcatccctaaatctaccacaaagtctgtctaccgcacttccaatgacgaacaccacctttagcacaaaccaaaaaacaccaaccaagaagtgaattttgcagcgagaaagcctgtagaattcaccccaattccagtgtcctatgctgacttgctcccatatctacttgataattcaatggtagccataaccctag

SEQ ID NO: 124634 - DNA, 384 bp, Glycine max
  unsure (1)..(384): unsure at all n locations
gcttcgttacctagagtatttacacgtactttcaaggtgtatttgttacttacatcacacacctccttggctaaattcacatacatgcatactcaaagcatttcggggtaccaaaaattgcacatgtgcacatcttggtatttctaatacctatacatacacaaacttcatgatgaatcttgactatctacacaataaggtgcctacatttatgctcttttaagnttttgctcctaaagccgcatgcaaatcaagtatattctgctgactagagattgtctcaaattaaaaggtatacattatttgtaatgtatcttcttacatacatgcaacatattatgtatatttttgtaaacatttcgctaccagaattatatgtacata

SEQ ID NO: 124635 - DNA, 471 bp, Glycine max
  unsure (1)..(471): unsure at all n locations
tgcaagctggaaaatcctaatgagtcattagagacatctatctttcttccttcaaattgccccatgtgtggcatctcttgtcaatgtcaagattcacaagcgattctcctcaaattttagctagcccgcatcaattaaaccttgcaccttatgcttcaaggtcctacaatgctcaatggaataccctgaggcccttccatgataagcacatgttngcattgagtcgtctcctcagaaaaatggaggttgaggaaccttggctggggttatggctaccattgaattatcgagtagatatgggagcaagtcaacaaaggacaccgaaattggggtgaattctacaggctcttctgctgcaaaattcctttcttggggtggtgtttggttatcgctaaaggtggtggttggcattgggcgtgtggtaagcacgtaggccttgtggatgttttggggatggcctttgtggataac

SEQ ID NO: 124636 - DNA, 403 bp, Glycine max
  unsure (1)..(403): unsure at all n locations
taagctctatattgtgcacgcatggtgcatgtaataaactacgtttatagctctctatataaggtgtaatgaaagtccaccatatagttaaagttggcataaaatgtgcttattcagccacctgtattagtatttgtagcataaatgaatcagttaagaaacagaacttaataaaatttattttgatccacacctgtttattaagtttgcttctgagtgtagcatttatatcgatatttgtntttcggaatgatgattgatgtacgtgttcaatcaggtattactttgagtcttacttttattntggaccgtgctgcccatcatcacaggtacaaatgtntgtaccaatgaatattntaatatgtgttcactgcattattgacaatgatatatgctatacaat

SEQ ID NO: 124637 - DNA, 492 bp, Glycine max
  unsure (1)..(492): unsure at all n locations
accttacagtcacctgcggcatgcaagctgggagaggatgcttaatggaggaaaagattgagggagagtaagatagaggggggagcacgaaattgaaggaagaaaaagggagagaagttgaactttgagttgtgtctcacaagactctcattcatcaaagttacaacaagtgttacacatgcttctattaatagactaggtagcttccttgagaaaacttccttgagaagcttctttgagaaaacttccttgagaagctagagcttagctacacacacccctctcataactaagctcacctccttgagaagcttccttaagaagattcctaaagaagttagagcttagctacacatacctctctaatagctaagctcacctccttgagatgagaagctagaacttagctacacaccccctataatagctaagctcacccncatgacaaanaacatgaaaatacaaaanaagtccttactacanagactactc

SEQ ID NO: 124638 - DNA, 299 bp, Glycine max
  unsure (1)..(299): unsure at all n locations
tcgcccagtattatgatcagccgttgaggtgcttcacctttggggacttccagctatcacccatggtggaagaatatgaagagatcctatgatgccctctaggggggaggaaaccatacctcttcacagggttatatccctcattagctagaatttccaagatagtccaaatctcgacgcangaattagaccacaggaagcaagtcgaanatggtgtggttggaataccaagaaaatatttggaggcaaaagcaagaatcctggcatgtaaaggcgagtgggccccattcatagatatt

SEQ ID NO: 124639 - DNA, 146 bp, Glycine max
attatggggctgagcaccgggtccgctaccctaactgcattggatgcggtcgtcgtggcattatcctctagagttttctggagctttagcatggcctccgtgatagaagccatttgatcttttaaggccgcccggtctgtcctcat

SEQ ID NO: 124640 - DNA, 227 bp, Glycine max
acaagcaagctttcatcaacatattaattaataattctaacatacgaagcaaagatatttgcaattctatgcgataattctttatgatatttattctcatatctatattgattagtcgtaccattgggggcgaatatattgatatggtatatattatgtgtatgtatacataaaacatatattatgtgagctatattgagagtatacatgtgcgctattcataatca

SEQ ID NO: 124641 - DNA, 452 bp, Glycine max
  unsure (1)..(452): unsure at all n locations
agctntntgtcttacagatagcaaaagaaagtctggattgtgctgacaaccacttgggtatctctgcatgtcacgtgactccagtgtcagtatgacagaaattgtggggcggccgacaaaagcgaggctcttgctcctacatatcctcaaatgaggaattcagacctacgtagttctggataacttgtgagactaaaaatagtctcagtgttttcttcactaaaatgcgaacatgctttagtaaagagagaaaacttccaattaatcagagcaacatatgcctttcggatgaaaaacaatgtgtctaccggggaaggggagtacgctgatgaaatcctcccataacctcaaatgagaatttggatgttagcatttcgtttctatatgaccatttagaggaaacactgggttcagcaaaaatagaagaaactcactcaaagtggatcaatctc

SEQ ID NO: 124642 - DNA, 391 bp, Glycine max
agcttgttggaaaatatggttcatcttacactttaaagaagccggagcattggttaaaccaaatggcattaccaaccactcataatggccatggtgagttcgaaagactgttttatgtctagctatcctcaggttggactagtatttggtgataaccagaccttaaatccagtttagaaaaatactttgcaccaaatagttcatctaacagcttgtccacagtaggcatagggaaattgtcttttacagttaaagcattcaaggccctatagtctgtacaaaatctccaactaccatccttttttttttttactaaaataataggtgatgaaaagggactattactaggctgaattattccttgatctagcatttcaattaccatcttttc

SEQ ID NO: 124643 - DNA, 449 bp, Glycine max
  unsure (1)..(449): unsure at all n locations
caagctttagccatttattatggncttcgtactgcttgtaataatggttatacacatgttctttgtgagtcaaattcaacactcgctttacatctcatctagaacgaagttaatgagtaccatccatactctcctctggttcagcttatccatcatcttttggctttgacatggatagtttctttcaagcatactctgcgggaagaaaatgcttatgctgactggcttgctaaatatggggcaacgcatgcagagtcatacaaaatatggaatgtttgtccatctcagttatcaactcttgttatgactgacaaaatgggagcagttcattttagggtttgattggtggtttattttctttctttctggcttggttcagctctcccatgtataaaaaaatatgagatggtctaactcggttgagcatgaagccagtattatataaattt

SEQ ID NO: 124644 - DNA, 164 bp, Glycine max
  unsure (1)..(164): unsure at all n locations
ctcagctctaccaatgactacctgaataattccttgatagcccttttagcctttgttccctnntccttgtttgaagctcactacaagccttaaatgagaaaccatgatatcaccatatctttaaggagatttggagctctggaatctgtttgggaataagtgtg

SEQ ID NO: 124645 - DNA, 482 bp, Glycine max
  unsure (1)..(482): unsure at all n locations
ttagactcacctgcggcatgcaagcttgcactgcccaaagtggacatctttctcttattacgttgaagccaccattgatgtcccttatgatgtcgttcagtatctcaaaaaagcctacgatgatttgaaagaacccttgacctgttttctcaaatcttccaaagntgattggcatttctatgacctaattctcttctgggcagacactttggattctaaaattggtataaagagttccttttataacatctgtacttcaccatgtatgggcttcatcggacccccttcagtttgttagaccttgatacctcaataatcttaagagggataggcttagaatgcagaanaagcaacaacaatcaatntaacaatgttctttaaacatgcaagacacaattgattgcaacaaaataaataagataagggaagagagaatgccaacacagttntatactggtttggccacacccgttcctacgtct

SEQ ID NO: 124646 - DNA, 339 bp, Glycine max
  unsure (1)..(339): unsure at all n locations
taatatcctcttcgcatttgcatattttgaatttttatntattntctaatagaattctattttgcgttgagtccataataaaacaacacttttattcttgatctttgatattgtaattagcgaatattgttntagttctgactaataactaataaaaaataattattagagaacaaataccaaatttattaagtaatgaggaactacaaataagtgttaagaacaaaaaacaatatttttattaagaacttaacacacaacacatatttattacanaacaaacataaaaatcgaatatttattaaggatgtatactatatgtaaggggttttttttagt

SEQ ID NO: 124647 - DNA, 413 bp, Glycine max
  unsure (1)..(413): unsure at all n locations
tgcggcatgcaagcttcaccttctggtcctcctcatatttgttttatgagaaaacatgctctattttcatctcccactccacgtaggcctccggatcattctttcctttaaatggaggaatgttgagtttaatagcatcaattcggttttgtctaagaacaccatcattccctcttctcctcctttcttcttcattatgatctctattctccatttgatccaacctgtcatggagcgcatcatctcgttgtttcattaacctctccaaatgttgcatcaaagcttgcatttggaattgcgaaagccccactccatcattatggatagtacctgacatctctaacaaacaaatcaaacgtaacaagacaattatagttgctgttngaataccccccccactcagtgtatcacac

SEQ ID NO: 124648 - DNA, 217 bp, Glycine max
  unsure (1)..(217): unsure at all n locations
cagaagctctcgagacattcgaatgggtataactnttnacacggatgtccgattcgggcgcataatatgtcgagacgctcgaaattgaacaacggaagctctcgagaaattccaatggtcataacttttcactcggaggaccgattcacgcgcataatatatcgagacgctcgaaattgaacaacggaagctcccgagaaattcatatggtcataac

SEQ ID NO: 124649 - DNA, 236 bp, Glycine max
tgtgatagaaataataatattccatttaataataaaactacaggtgtacctttatttttgctcccgataaacatgggggaaaatctaagcgcattgccactgctccattccctgaaaaactggctatcttctgttcaattaaaaaataaaaccattagcctccctacaaaaattgctgcctgagagaaattatacacaccaatagttgatgccaatggagataacattacaatatc

SEQ ID NO: 124650 - DNA, 200 bp, Glycine max
  unsure (1)..(200): unsure at all n locations
agctntccaaaattatttcttcgcttccttatgtcaggagcgagtcgaggagaaaatctccgttgtcctggaccgccgcgacgtctcgttccgggagacgcccctccacctcgctgtccgcctcaacgacgtcgccgcagcgcgcgccaaagcctctgttagcgtcgatatctccctccacaacgccgttggttggaacc

SEQ ID NO: 124651 - DNA, 481 bp, Glycine max
  unsure (1)..(481): unsure at all n locations
taagtganctgaggcatgcaagcttgaacgattataaagagaaagattttatttttgtattattggataaanagctcggtacgttcctaaatatataaaacgttgacaaactcttttcgaatgcgacacatacactctatcaataagggcaagtgacacacgatattatatactcttcactatcaagaacttaacatctaaatctcccatcattctaagaatacatcaatgggttcatctattcaaaaataaaaataattatttattcttaaaagtactaattcaatttgatgttactagctaataatgtgaaatgtgacggaacaaccagtaaataaaatttattaaattaaatttaaaagttatggattatgtgacacaaccattagtaactctattatactatacaaatatccacttttattatgtatactatttattgttgcattcggttatgtcgagtgctgctatttctatatat

SEQ ID NO: 124652 - DNA, 166 bp, Glycine max
gcatctgggaaaatcttcacagcattcaccctttaagggtgtacacacttttccaaaactaagtatgatcagcgaaattttccaaagaaaagatggaagtcattctctttcaaaagcctgttggttttcagcttgacacttatttttcattttcccttcttttttt

SEQ ID NO: 124653 - DNA, 262 bp, Glycine max
atatatattatattatatattattatatattatatatgatacatttgacgtatttgggtaatcatgggtcatacttgtaaatacattcttcattattaggaggattttccctttctttctttttaatgaattttgtgcatgtttattatgctgtgaagctatatcatatatcaaacccagtatcttttaaattttctatgatgcagacctcatactggtttctaccgattatgtgaatttttgagtcctgtcctcaattcct

SEQ ID NO: 124654 - DNA, 148 bp, Glycine max
agcttacccattctgtttaaggtttatgattttgtttattgatgttggtgtgccgaaatttctgatagaaaactgatagaaatgaacggttgagttcacctacggttaaaaagagagaatggttgtgatatgagcggaaaactgtgag

SEQ ID NO: 124655 - DNA, 187 bp, Glycine max
  unsure (1)..(187): unsure at all n locations
tcagcagatgactattgtggntcatgctgttatgggtgcagaatacgagataagaaaggaactgactccacttggttggttgattctgtacgcaatggtgcagtgatcctcactggatgtaaagctgagagattcatacttgaaaatgtaaagaatggaatgaagaacaagaagtgcttacgagtga

SEQ ID NO: 124656 - DNA, 430 bp, Glycine max
  unsure (1)..(430): unsure at all n locations
agcttggtcagagcaatgaggaatttattttttatgtgaaagaaaagagccatttatagtgtaaattgagtgttgagaggttaaattttgaataggtggagaatttaccttaaaattagtttgagcaagtctaatttaatgttatagacttcatgaagacgagagtttaccccaaaatcacccaattttcattttcacctttcaaaccctgaaaattcactaaatntggtgggttntgaatacctataatttgctttaccttggtttgaagtttgtttntggcttgaacatgatttataaatggtttacgacttgtaggatccaatttgagttgaattggatgcatgtaagctagattntgaaaatctgcaaaaatatgcagaaaagctgcccaattatgcagcaaatcttgccattatgccgaaaaaaa

SEQ ID NO: 124657 - DNA, 430 bp, Glycine max
  unsure (1)..(430): unsure at all n locations
tgtcaaaagtacatcgntntcactatgcttcagctttcgtgttcaatttcgagcatcccgatatattatgggcctcaatcggaaacttgagacaaagttattgcagtttggatttgcagcagacttcgtgttcaatttcgagcgtctaaatatattatggaccgcaattagatatcaagtcagaaagtgtgggcatctgaatttgctcggagcttccatgttcaattatgggcgtttcaatatattatgggactcanatngacatccaagtcaaacattgtgctactttgaatttttaggagatctatgtcaattgnagagtctaatatgtatggccacaacggattaatgcagaaggatgcattaatttctaagcatttgtcatttcgatctcataatttggactatcgcatcatcaagtatgcgttga

SEQ ID NO: 124658 - DNA, 278 bp, Glycine max
taaactctgaaaatcaaatttcatgattacttctccccttttgagaagacaccactgttgttagagcacaccaaaaaaaaatctattgcttatagtactcccctggtttgcaagatgcttttgaacagtgaaatttatattttatatgtaacaaatgctataaaaaaaaaattttacattaattttatttcctccctttgcacataaacaatatgataagagaaaagagtccctgtgcatgataaataaggatccaacgcttaaaaacatcatataat

SEQ ID NO: 124659 - DNA, 115 bp, Glycine max
aaatctgtaatagcaacctttaaaagttattatatattattttcactttcactatcaaggcaactggcattggcgtggcatgttcacttgcttgagggcataaaccaagttcatg

SEQ ID NO: 124660 - DNA, 392 bp, Glycine max
  unsure (1)..(392): unsure at all n locations
aattaaggcgagctgagcatgaagcttctgcctattggctataattttggtttgttgtgaaaagaaaagggntcagcccctttggcacttctctctctctcgaaattgctcaggacaattatttccgcgaagaaaatgcaagccgaggcgcttccgtaacgtttccatgagtaattacgtgaagattctcgaccgttcttcaagattcatcgttcgttcttcgttttcttcagtcttcaacgggtaagtacctcaaaccaaacttttcaatttattctatgtacccgtggtgggccacattttggttcgcgtatctttattcttggtttcatttgcgtcttatacaccctttttgacgtgcttaagacatttatcttattcatttctcgctt

SEQ ID NO: 124661 - DNA, 342 bp, Glycine max
  unsure (1)..(342): unsure at all n locations
catgtggtactatgtggcggttttgcgatggtgcacacacaagtgttcacatacacaaagcgcgcataaacccaccatccnctattgcccacctccatctgagctcacgtactcccacgtagcccatatcctcgtttctctcaacaccgggtccccatcaatcctcccaagcttccacaacatccaagtgatacaacattcaaacagcacaagctatcacagtcaagcaaaacagagcataggcagaaaactctgcctaaacaccaaccaaatcacaggttttctacttaaagaccccagtaccaattccttcgatccaattcgttaaccgttggatcgact

SEQ ID NO: 124662 - DNA, 368 bp, Glycine max
  unsure (1)..(368): unsure at all n locations
tgcaagcttgactagtcttaagcatagattattntttgcttaagcatgactaagcttaagcatatgtggatctaggcttaagcatagctgcctgtcaaatttcctttggtgcatttcaaacttgattcatgaaccaaatgagctaaagttgcattaaaaattgagctcattatataaatgagttgaacttcagctgcatataattcgacttgttagattcatgaatagacttgagttatatatatatatatatagatatatatgtatacctgtacctccaattgtccgcttggactgacaacattgcaccattcaatgtgaaaactcctcctacatgccgcaactatgctgtaaacaactaccaccta

SEQ ID NO: 124663 - DNA, 118 bp, Glycine max
ctaagctcgcgcgtcgcaatgatacataaactttgtcttacatattgactgcacgaaaagacaatctagtcacaataactgacttgaggagtgggtaaagagagaatcacgccatatt

SEQ ID NO: 124664 - DNA, 294 bp, Glycine max
tgatatctcccccaactgcagcatctatgaatcggtcggtctgtggcttgagaacactcctggtctgtttttcaaggactgctgcagaaaaagaattgtcgtacccgaaccctgcacactcctttcgaatgtgtttaacggacaacatgaacttctccttggaaagtatgccttttcccacccgctttgcgacttcgactaccttctttatacgaggatatacaatttctctctgttcgatctgtgcgtaacaagtctctgccccgctgtaaatatctttaatataatttgtta

SEQ ID NO: 124665 - DNA, 373 bp, Glycine max
  unsure (1)..(373): unsure at all n locations
agcttgcattagtataacaccttcaatttcaacttattattctccataaatgacgaattgatctttaattcttcttaagtacttaaggatgaacctaaccactttccaatggttctcaccaagggttgcttgatattgactaattacacctatgcataaacgacatcaagatgtgtcaagtcatgttgtacatgatagctcccactgcactagcatatggtactctactcatgtgttctctttcctcacgagttgttggacaattctccctactaagagtaattccaacacctacaggcanataacctcatttggaattatgcatgttatatctctctcatatattatcaatgcgcatacattgggacagtcc

SEQ ID NO: 124666 - DNA, 73 bp, Glycine max
gaagaatatctccaacttttatggttatcccaagacctagcatggaagcattcctcgccaacaataccaacta

SEQ ID NO: 124667 - DNA, 278 bp, Glycine max
cgtcattgagggtgccagctgagctgccagatcgatccacctttgggtgtattctttgaaggatgtgtgcccactctttgcacatgttctgtggttgcatcctatccggagccacatcagaattgtactgatactgcctaataaaggtaaccattaagtccttccaagaatggactcgggaagggtccaagatagtgtaccacgtaacagctaccctagtaagactttcttggaagagatgtatcagcagtttctcatcttgtgcgtatgccccatct

SEQ ID NO: 124668 - DNA, 457 bp, Glycine max
  unsure (1)..(457): unsure at all n locations
agcttgtgcagctaatccatattattatggcatttgattttatcttttattctggtttctattccatattcataatatgtgcatttcatttcatattttcttcatacttaatcatactgaatgactgtttggtaatttagattgacgttacttattgctggcaaaagcagaaacatgttcgatttgtttgaatctaatttctgtaaaaattttctcaaatgcaaatcatgtgacttttgaggaaattacatggagatatatttttgatgtttcactcccctcccctatatactagcttctatgagtggttaatttccacattatctggtttttggaaattggtttcctcatcaattaaactcttaatgtgctactccataattatcagctagagaaaattgtactgcnttgccngacgactagtggtctntgcactcatcatcatcctgatcatgta

SEQ ID NO: 124669 - DNA, 298 bp, Glycine max
acataaaattcaatgtaacactgttcacatgcaaacacagcctccaaatgaaaccgccagcacattagtttaatcactcgtgccctgactatgattatgatatatactatgacagccttccctctcctaatgataaagaggtgcatagccctttctcatcctgctcagttattcagatatcatcgaaagacttgactaataccaatgacattctgtcgtttgtatctgctgagatgggtcttcaagtagtattatctaatgattgtaccagtgctataatcgctggggaggccaatgt

SEQ ID NO: 124670 - DNA, 419 bp, Glycine max
  unsure (1)..(419): unsure at all n locations
tcacctgaggctgcagctagcgagtacatacatttggtctctgtgtgctcttttctaatgnngnataatggggtgtagctttcgcaatttgtgtttgtgctgattgtttatctgatatagcttagctgcattgttcgcctctgttgactgtttgcttaccatgtttgaatgaattctgttaggcttttgtgtgtgtttggaacccatgaacttgctaagcatgcatcatgtgcttagcgagttcttgcataatagatttatgtatgaatttctggaaaaacattcatgatctcactaagcctacgacgtgcgcttagcgagttcattccatcttgattcctgttcatgatttatggggatttcgtcctttgcgttcctcaacactcatcgacgtgctcctaaccctttctttattttac

SEQ ID NO: 124671 - DNA, 64 bp, Glycine max
tgggctttctaacgcagttaacttatctgacaaaatagcattagctcttttatatagattaagt

SEQ ID NO: 124672 - DNA, 285 bp, Glycine max
agcttgcatgaattacacatgtattgttattcttattacttgtgccttaggatgacttgaaaccctttcgttttgaggcgaaggttgatcctaacaactatcttggtagcatgctccgctgtagaatcaatctgtactagaattgaaccaatggggccgctcgacccttgtttgccctattcaaatcatgttacgtacattcacattccccccctttgatgatgacaaacatgacaccatctaagcgcgcttgattacactctcccttttcatgatgacaaccac

SEQ ID NO: 124673 - DNA, 434 bp, Glycine max
  unsure (1)..(434): unsure at all n locations
ctgcagcttgctgattacattctcccttttctttatcatattttaattcttcttgacatcatcaaaatcttcatgatttacattctcccccttttggatgatgacaaccaccttgaggttagaagcagcaacaaagaaaaaatatctatttgcatatagtttactcccccttggtttcgcaatgattgcttatatgagacaagtgaagatttcatatttttcatatgtaaacaaattgtctcataaacaatagataatttttcttactattttatcttttatctttctctccccctttgtcaacatcaaaaacaaatcatgaatagagaggagaaagatgttaccacttggtgcatttttctctaccattgtanggagtaaagaatcaaattcaatgggcttccatatctttagtctatggctttataaagact

SEQ ID NO: 124674 - DNA, 237 bp, Glycine max
  unsure (1)..(237): unsure at all n locations
atcaacaagtgcactaagtcatacaagtggtataaaacggtaagagccgagtatcgtatcacacggagtttggtttattcagaanaatgttcattcaataagtagacatttgtgtaacatcatgaaatgganataaaaacaggatatagtagtaattctagagataactacaaaattaactaagtaaatgtgagaaataaatagatgattaaaccgtgggcctttctactaagtgac

SEQ ID NO: 124675 - DNA, 440 bp, Glycine max
  unsure (1)..(440): unsure at all n locations
acccatcacatgttgtactatgtggcggncgggcgatggtgcacaacaagtttttcacatccacaatgcgcgcataaacccaccatcccctgttgcccacctccaactgagctcacgtactcccacgtagcccatatcctcggttctctcaacaccgggtccccatcaatcctcccaagcttccacaacatccaagcaaaacaacattcaaacagcacaagctatcacagccaagcaaaacagagcataggcagaaaactctgctcaacacatcaaccaaaatcacagcttttctcacttaaagaccacagtaacaattcctttgatccaattcgttaaccgttgggatcgactccaaaatttactggaagtctatagtgcataagcctacattgtgaccgatgggatcttctagcaaacattcagaactcattctgtac

SEQ ID NO: 124676 - DNA, 350 bp, Glycine max
  unsure (1)..(350): unsure at all n locations
ctcagcttctatccanggctcatctggtggtgaagctccttctttcatggctttattcctagaggatggcgcctnctctcacctcttctnctttgtcttccgctgcatctccatggtggaaaatcaccattaaaggacctcattgaagctcaaagatccagcctncatagaagccncacaagcaagcttccatcactaactgcctgagaattcttttgattctcccttccccctcttgacaaaagattcanaggactaaccgcttgagaaatctttgatcttccctttccttaaacaaagattcaaggactaccgctgagatattttgttcccttacaagattaagggac

SEQ ID NO: 124677 - DNA, 364 bp, Glycine max
  unsure (1)..(364): unsure at all n locations
agctttntgtaaagctggttgcccattgattaatattttctgtgnaagccttctcgagactcctaaaccaagaccatagtagaaacatagcatcttcaaatagtgaattaccgttggacgttgcattaaaaaacactatattatttctaagcttgcaaatagaccaagctaaggctaaccaccagtattgccatctggttgtccttattccatcgagttgaacaccaacatgttgaagaaagtgctgctttggactaaacggaaatacgcctttaatctgctaccatgacatggtgtcccaccagatgggtcgcattttacagcaatggaaaaacatatgggatgcatccttctctgaattcct

SEQ ID NO: 124678 - DNA, 334 bp, Glycine max
  unsure (1)..(334): unsure at all n locations
gtagtttaccatgaatgctactcttaaaacaaaaatggcatacaacctcctccaataaatacaaacatcaatggtaatttagagcaagcttatgcgcatacttctttacgaacgttcacttgcacaagacattcttataactaagaataatgcacccatatacaatcaaggcaccttcgttacctagaatattatatgtacttccaaggtggtattggtacctacatctcatgaacttccttggctaaattacatacatgcgtactcaaagcatttggggtaccanaaatggcacatgtgcacattccggtatttctaatacttatgcatatac

SEQ ID NO: 124679 - DNA, 89 bp, Glycine max
agctttatatagacttcagagcttttatccgttattatgatcccaactagctggtggctaatagcttgagcgtatacataaggcgcatt

SEQ ID NO: 124680 - DNA, 261 bp, Glycine max
ttgaagatgtcagcaatttgatccacagaagatacatgacatacttggagcaatctggattcaacaagctcatgaatgaaatggaaattcaaagcaatatgtttggacctagtgtgtataacaggattcttggtcagaaaaatggcgctgacattatcacataacaataatggaggacgtctaataggaacacaaagatcttgaagcaagttgttgatccacaacagctcagcagcagtgtatgcgagtgaacaatactta

SEQ ID NO: 124681 - DNA, 108 bp, Glycine max
aatgacattgctttatatctgatctctaaaattaaagatgttaatcagcttcttcaacgtgtcagcagttaatactaaccactaggacctcaagacgatgatctggat

SEQ ID NO: 124682 - DNA, 352 bp, Glycine max
  unsure (1)..(352): unsure at all n locations
agcttaaagtangcccgagtttatattcctattagangnnggcgaagaatgggcaatcagaataggaattccttccattctggggctgaacccaactaatgcttttaaaaatggttcattatatgcagttgaaatatggaaagtaccggtttgcaaattttgggcaaaagatgaatccagtcacatggatgctgtcgctacttcctaacatagttaggattatcgatgtccttggtacttccaggtccaccttgacggagatgccatggaccatgctgaagatattcattgactcaacctcatatgttgcgttataatgcacaatacttcaactgtacatcattagcataca

SEQ ID NO: 124683 - DNA, 151 bp, Glycine max
ggggggggggagaagaaaacacccccccccccccagagacaaagaaggagggaagaaggaaggagaaaggaaaggaagcgggggaggaaaaggaacgaagaaaaggaggaggggcgagaggacgagagaggaggaaggaacacaagagaag

SEQ ID NO: 124684 - DNA, 174 bp, Glycine max
  unsure (1)..(174): unsure at all n locations
ctgcagctttgtttaattacagcgctcgaattcttctgtttcaatcagacatccgagtgaatagttattgtcatttgaatttgctaccaccatctgttttcaattacgagcgtctcgatatactacaagacacaatcggacattcgagtaaaaagntattgtcgggtggatttg

SEQ ID NO: 124685 - DNA, 174 bp, Glycine max
cccacattatttccatgacacatatgcgaaaatgatgatttggaaatattatgccaaactggtcatgcatgcacctatgtggacactcaagtgtcaaatctttatggtcatgtgatgctaaggctcaagattcatttcctctattttaaataaacccaatgtttccaaaatatg

SEQ ID NO: 124686 - DNA, 318 bp, Glycine max
  unsure (1)..(318): unsure at all n locations
agcttgaagctcanagaanagcttgaagaagtttttttgaagaagttntggcttttacatgcctaactcccttgagtggcattttatatttgctgttatcttggttgttgcatattagtacatttgatatttgttttgcattgtgcatcatcatagtgtgtgtgaagaaaagtntctaagttagaaaaatggcttcataggaaaaaactctttgttttaatcgattacagcgttgtccgtatcgattacaacaagctagctgcttccaattgntggtatgggattttggctcacaaagatgttaccggtgattgggtg

SEQ ID NO: 124687 - DNA, 379 bp, Glycine max
  unsure (1)..(379): unsure at all n locations
tgatgataccaaagaattcaagaatcaagagaaagaatcaagaagaagttcaagtntcaaggtttcaagaatcaagaatcaagaataatcaagaacaagattcaagactcanagattcangaatcaagagaagacttaatcaagaatagtttaaaaagttttccaaacattgagtagcacaagaaatttcacanaatcataccaaagagtttactctctggtaacgataccagatatagtatcgataccagtgggttaaacgttagatttcaaatcaaatgaaagccattgtgatggtatcatacacttatgtatcgatacatgatgttcgaaatcattcaaagacatttcatgctgtctgaatcttcnagctatttta

SEQ ID NO: 124688 - DNA, 400 bp, Glycine max
  unsure (1)..(400): unsure at all n locations
agcttatagntattggagggagaaatttatttttcttattaatcgaaccttncaaggaacgaagaattctttgtgcggcttttacatgacgagaggtaggagcctccgtatagcgacacacaactcccaccgtatatagaatatcgggccttgtattggttagataccttaaactccccacaagactcttgaagggccgggagtctaccttctctccttcatcaaactttgataacttcaagccaccttccataggtgtgttcacggaattgcaatcaagcatattaaatttcttcaacacttcttttgtgtagctttcttgtgagacaaagataccatgctctggttgcttcacttccattcccaagtaatatgacatgagtcccatatctgtatatca

SEQ ID NO: 124689 - DNA, 270 bp, Glycine max
  unsure (1)..(270): unsure at all n locations
gcggaagacatacgagaagacgtgagatgaggtgccatccactatggaataagccatggaagaaagagcttcaccaccaagatgaaccttggataagaagcttggagaggatgcttcaatagacgaaaagaaagagggagagaaagagagatgggtgagcatgatattgaaggaagaaanacggagaggagtagaactttgatttgtgtctcacaagactctcattcatcatagttacaacacgtggtacacatgcttatanttatagac

SEQ ID NO: 124690 - DNA, 355 bp, Glycine max
  unsure (1)..(355): unsure at all n locations
gcttattctacacctgaaaagagttgatattattcccnacagaagcggctactaatattttttgaaggcaccctctctataattatgacttaccacagcctcctattcctcttccattcccacctagagcatttccaaacaaaaaatggaagatgcagaaaaggagatcttggagaccttcaggaaagtagaggtgaacatacctctgctagatgccatcaagcagattccaagatatgctcaagttctaaaggagttgtgcacccacaagcgtgcggtgactaccacccctatcattcaagcacctgattgggcagccccatttgagctaatgtgcgatgcatccaaatacgca

SEQ ID NO: 124691 - DNA, 304 bp, Glycine max
  unsure (1)..(304): unsure at all n locations
catgcaagctntgaagaaacaagacatgaattacctacttcaatcattctttcattntttcttgcaaaaatttctgtaaattcttgtaaagatacaaaactctcaaaacaccttgtatactttgaaagaaaggactaaaagtgctaagtgatatatttgtctataagacgattatactatttagtcagtgtgtaatcctccaacaaatcatattgatttgtttagagctagcagaggcttgataagacaaagaatatctgtgttaagtcaagcttggagtaaagcttgcacgcgtaagagacag

SEQ ID NO: 124692 - DNA, 293 bp, Glycine max
  unsure (1)..(293): unsure at all n locations
tgtggcctgtcttgtgctctaatctagtagtcccaatcttcaatattntcttcaaagctttttcttcatgtttttgcttcaatatttcctctaaaacacttgtaatgtccttctttctggtcaagaattaaaatgatattaaaatcttcattattccattaaaaataacaataaagtaggagaattctaatcatttntagctaaaaatgattatcaattaaacataaatttcgtagttatcaatgagacttntataattattatattagaattaaaataatatttatttaaaa

SEQ ID NO: 124693 - DNA, 379 bp, Glycine max
  unsure (1)..(379): unsure at all n locations
agcttaccttgaatgataattgtatcctttgtttcctttatgagnngaatgatattgtaaaaatttgaaccctgaattaaataattatctccagataccttgtttagattctatgggagcatatggttcaaggaaaatntaccctaaatttgggggaatggagttgattgggatgtataagaaaaaggtaagcatcaacacactcaacaaataagttgtatgttaaaaataaaaaaataaaaagagccctctaagaaaatatgtgttgttataataaggtcagaaccatatgaaagtgaaaagctagtgagcaagctaattatattgaaaagataacttggataaatctaggatttgtgctctcttatcatctaaacct

SEQ ID NO: 124694 - DNA, 254 bp, Glycine max
tagatgtcactagcctcaaggaattagaacgaatgatgggacctctccaaaggcaagccttccgcaaagtgtacgggaagattctagagttgaccatagcggaggtatttacggaagctgtcgtgtccctcgcccaatactatgaccagccgttgaggtgtttcacgtttggggactttcaaatagtaccaactattgaagagtttgaagagatattatgatgccctctcggtgggagagaaccgtatcttttc

SEQ ID NO: 124695 - DNA, 475 bp, Glycine max
  unsure (1)..(475): unsure at all n locations
agcttggagactcaagtcttacaaaattaacatatttattatattatcataaccaaaacaaaagaaggcattactgaaactctccaatcacaaacaaaaaaagatggcaatccactcagactcccttgttactaaaggagcatccctcagttagccttgcccggccaccgggtggttgacacaagacagtctggcagtgtccgcatacaacaacagtctgagagtggctaaagacagtggttctgcagtcatattcataccactcaagtattaaaacaaatccacaatcaaattcataacactcgagctattntatgtacacaatcaaaatcaataataggaagggaaaaaaagacgatccaacttacatgttgaagcaaccctggcacttaacatccttcaaaagaggaataaaacatgcagacaaaaccaattatgcaaaaattaaaaatccatatgggagacgaataccctt

SEQ ID NO: 124696 - DNA, 450 bp, Glycine max
  unsure (1)..(450): unsure at all n locations
gtctgctgactctccattcttgatatcaattctgtataantcacaactctagtcttgtatttcaagttcatgtcctctatatataaattagaacatcaatcctcaacacgggtgatcttatgagtcattctccaagaagacctcgtgtgggagtgtttcttcaacaatagcatttntaggacattttcttaacctcttatctctgtcaagctatctcttcatctttattttaaaatagaagttcaataattttttaagacaatattaacaatagttgaaaataaccatgtatcataatatacattattagcacanatctaaatatagtttatatgttaaaaacaacaaagtatttatttagaactgttgagatcatgcctttgaagtgtgcatagtctgaataagcannattgtattgtgctgtatggacaagtaaattctgatctatat

SEQ ID NO: 124697 - DNA, 492 bp, Glycine max
  unsure (1)..(492): unsure at all n locations
ttaagtcacctgcggcatgcaagcttgagacnttcaatattgagcctttgntccttttttcatttcatggaagcttcattaaaagtaaggggagtctttcacttcttgaaccctaaccttgttgcctttggaagctaggcttctttgcatgttgttttcatgtttaaaatttcgtgtctgcagccatgactagaactgcacaatatgttgtttttatggaagtttaaaggttaaaaatgagttctttgggtattaaagcataggattagccttaaatttcacttaaataagagtttcctagtaaaagttatgaataaaacaagttttaggatattntattagataaaatctgtcacgaaaatgaactaactagtatatttgtatggactgtttttcttaaaattttgacctcacaaatgagtttgttaggtgtgaaaatgtanggtagcatataacatctgaanaactgattccccgaatacctagaacact

SEQ ID NO: 124698 - DNA, 427 bp, Glycine max
  unsure (1)..(427): unsure at all n locations
tctctctgngagacaggngatcaccatngcaactngagccanatgaaccgctctctatggccagcatgtntaagaaatcanttgcaatagattcagtgataaaatccaagctacttgatttttttgccattctatgtgatttataatttgatttaacattaaggtagcatccttggtcaataaaatctgatgtctcangaagcatatctgcatccttgatgcaagttatactgacacatgaactactgcgtttatgtttgccatcatctgccatagtcccatttacacaactagtgcatatgctatccatcaaatcaaatcttgtgttcttgtcaacaaatatgccatcttccttaacaatatcatccacattaataatatcaactgtngacanatcaactgtttgatttcctgtctgatcaagttc

SEQ ID NO: 124699 - DNA, 465 bp, Glycine max
  unsure (1)..(465): unsure at all n locations
agcttagagatcaaccacattgatagagaccttatgtttttacttatgaaatcatactgttagtaatgtagtatacaataagtgancnacctacaagtttagttgaactcatgagaaatgaaatcaaaatacattactgaaaaatatccacacttataagtcagaacttgtcaacaaatacagatgagttttgctttagagtctagaattttttttatcactaatttatattttttaataatttaactattagttaggttgaataaagctcgatagaaaattttcaagaaaataacagcacggtatgtcagacttttcttacatcagccataaattggttgctagaattatcctaaaattgaatgagagaagcactgccatccaaccattagtaccactaaagcccatcaaattgacttggcatcacnggccattgataatacattacaagaatatattaatata

SEQ ID NO: 124700 - DNA, 372 bp, Glycine max
  unsure (1)..(372): unsure at all n locations
tttatctaatacattcttaatgattaactganaattaactganatttattataaaaaatgagaaaactatgagtgaaatctattcattggaatgcactngtataattntattntttaaataaatntgaattaataataaagaatgaaaaaattactcanaagaatacattcattatattgtgtaattggtcaagtatagaatgcatctataataggtgattcgcctataattggtcaagtatagaatgcaacttgacttttgactnttgtcaagatcaataaatgtttcatgttgtgctagacttatatataccttcttgcangaagatgatagccgaataaaacaagttcagaatttataagagcacgtga

SEQ ID NO: 124701 - DNA, 466 bp, Glycine max
  unsure (1)..(466): unsure at all n locations
agctntattatgccctctcccctcgacggggatttcttcttcggcgaagacgagatagttgttggcagtgatattattgaccagccctccgaaaccttctaccgagatgtcttgggccacatgggcctcattcagaacttttattagcagagcccgatgaggctcggagctcatgagtaactccaacagcgagacccgggccggagttttgttgagctgttcaataaccttgaattcgctctgctgaattatacggaggaactcactggcttcctctagtgatacctcctttttaccatcctttntctccggaagacctttcgccggaatatctttattcgaagcgtggggtgcttcaccatcttgttcctccaccacttttcctttccccttgacgttcgcgggttggactggtangtccggaggcgcanacacacgaccgctacgggtcacacaactcagtcct

SEQ ID NO: 124702 - DNA, 340 bp, Glycine max
ctaagcttctagtctagatgatgaactcgagttgagctacctcatgcactcctctaatgactcatggcatcattttggcgctaaactgctgagagttggaagccatcttctcaattaaattcctggcttcagcaggagtcatgtctccaagggctccaccactggcagcatctatcatacttctctccatattactgagtccttcataaaaatattggagaagaagctgctccgaaatctgatggtgagggcaactggcacatagttttttaaatcgctcccagtactcatacaggctctctccactgagttgtctaatacctgagatatctttcctgat

SEQ ID NO: 124703 - DNA, 306 bp, Glycine max
  unsure (1)..(306): unsure at all n locations
agcttgtaanattatcctcacctctctcttctattatattgtcatgggcagatggtctatgataatataacatggagggagtgttccagtgtttgcaattcattggatggatgtctgtttctgataccgaacctatctcagctgcattttctgactcttggtcactatcttcattgagtacattaattaatttggaggtacttcttgtaccatctttgatgctccttccgaaggctggggagtgttggggatgacttccactatactatcaaacttgtgtaataattgactattattgccccctac

SEQ ID NO: 124704 - DNA, 373 bp, Glycine max
  unsure (1)..(373): unsure at all n locations
atgttcctttaaatgctctacaattttagacatatgaatttcattaatgtatgactaaggtcatcatatctgtngaaattaaaagtcaaagaaataaaatgagtcagaaaagaactataggatgagaacagaaacctgcaatgctcatgtgtatcacctaatacatatccagtgtctgtagaanaatcaattaatatcacctaaattataagacttgacatagcacatatgtaatgtagtataaaaaaacaacaatcaagttagcaattaatgtcacaaatgcttacagctagacatatcataagagatcccgcataatgaacagtgtcttcttgcaccttgaagtacattatcacttcaaatacaacacatg

SEQ ID NO: 124705 - DNA, 171 bp, Glycine max
aaaaaggaaaaaaaagaacgatgggccggaagagccaacagcgataagaaacgcgaccccccaaacccggaaaaagcatacggagaaacacaaaagtcggcgagcacacaaagaagagcccaggaagccctcaacaggaaaaaacagacgaacaaaaagggaaaacccacg

SEQ ID NO: 124706 - DNA, 355 bp, Glycine max
  unsure (1)..(355): unsure at all n locations
atgggtggcactgaaactgtggagcaccgcctccaacaccttcctctcggaagttttgggccatgtgggcctcaatcataacgtttattaaccnagcccgatgaggctcggagctcaagagtaatctcaacagcgagaccgcggccggagttctgttgagctgtataataaccttgccttcgctctgctgaattataccgaggaacttactggcttnctctagggatacctcctttttaccatcctttntctccggaagacctttcgccggaaaactttattcgaagcgtggggtgcttcaccatcttggtcctcaccacttttcctttccnnctgacgttcgcggggtggactg

SEQ ID NO: 124707 - DNA, 179 bp, Glycine max
  unsure (1)..(179): unsure at all n locations
cttgtctcaacctcttgaggttgaattcggcagnnggcttacccacacaacgaattgtatctacctccataacaacaagccaatggattaaattacttaacttttnnnngcttcctgtggctgatgatgctagcaattaatgatcccttgctaccctgcaatgaacattctcagattca

SEQ ID NO: 124708 - DNA, 370 bp, Glycine max
  unsure (1)..(370): unsure at all n locations
agcttcaacatttatattcattcttagaaaatttgtgattgntcctcttccttcaatcaagcagaaaaatgggtttccgtttaccttctattcgacgggcatcaaaaggggttcatcattgccatatcatacttgaacctaccttcattccaggacttgttgagtcaagctaaggaagagtttggatatgatcattccatcggtggcctcgcaattccttgcagtgaagatgttttccaacatataacttcttactcgaatggacaataaatcttgcactgttggagacactgacttatttagtagacatattatacaataggcatcttctcaacctaattgtaaagagtaccaactttttattaatgac

SEQ ID NO: 124709 - DNA, 438 bp, Glycine max
  unsure (1)..(438): unsure at all n locations
accttgaatcaattcctttgatagccctttttagccttgnttccctttncttgttgtgaagctcactacaagccttacgtgaagaaccatgatatcaccatattcttaaggaattttggagctttggaattgttttgggaataagtgtggngggtttttgtttcattggataacatgtcttgttggctatgcttcatgatgtatattgggccatacttgatgtacattgtatatatggtaaatgttggacatgctgaatgagatgctatttctcaaaggctacagacgtaataaagaaattcgaaacaagaaagaaaagcactcagttgagtgaatatgatcttaaatggcgaaagaatgatgagactctctgttctactctctttgataaaatgtatctctacttctttctatgttcttagtctatctaatatgcac

SEQ ID NO: 124710 - DNA, 311 bp, Glycine max
  unsure (1)..(311): unsure at all n locations
aagaaagtcgtatctagtcaaggtctgagagaccatacaagtntcctaacgatntctaattatgtgggccattaagtctatcatatgctgacaatagccgagaagcccatgaatctcttcgtgggcggagtaggtgtctgccatcgccttggccttggctaacaagcggngaagttcttgactcccgttcaaggtaagagcaaaccgatccatccacatnggtgcctcttggtgtaaagagtcgatcaccctctctctagcctctntntccgcgtatacttgagcatactcgtncgcgattctatgctcgt

SEQ ID NO: 124711 - DNA, 381 bp, Glycine max
  unsure (1)..(381): unsure at all n locations
agctntctcggngccattttctgttatatgctttatttggaaagntaggtttaccagtgggatactattcttaaaacaaaaatgacatacaaccttctcccataaatacaaacatcaattgtaatctaaagcaagcctatgcgcatatttccttacaaacagtctcttgcacaagacattctattaacccgaaaaaatgcacccatatacaatcaaggcaagcttcgtacctagattatttacacgtacttccaaggtgtatttgttacttacatcacacacctccttggctaaattcacatacatgcatactcaaagcattntgtggtaccaaaaattgacatgtgcacatttgggtattataaacctatcatacacaac

SEQ ID NO: 124712 - DNA, 306 bp, Glycine max
gcttctatggaggctggatctttgaacttcactattgttcttcaatggcgatgttcagtcatggagttacagtggtagacaaatgagaagaggagagaggaggcgtcatccactatggaataagccatggaaggagaagcttcaccaccaagagagtgccttggataagaagcttatagaggaaggttcaatgtgggaagagaatgatagagagagagagagagagagagaaagtggcatggaaaattgaacgaagaaagggagaagagttgaactttgaaatgtgtctcacaagactctcattca

SEQ ID NO: 124713 - DNA, 413 bp, Glycine max
  unsure (1)..(413): unsure at all n locations
ctgcaagcatgcaagcttctacctatgcttaaacatgaatgaatattttccttgtggcgnngnnataaacaacgaatttgtgaaacaaaatacaaaagggtaacttgtatgagggagttgacactcctattatatcaaacgaaaaaaaaaagtgcagccaaaatttctgcatgtggcccgggcaacaaaaaaagtgaaaatcataaatctatctattttaaactcgaatcagtcttactctttgcaggaacaagaataaggagagtcacgttcgacctacccgttatcatgcctaagtgcatcttttgaggccagagtttgaatgaaagacgaacaaattgataaagagcacacatctataaaatgaaaataaaagatgtatgatgaggaagatagaggggtatgccaattta

SEQ ID NO: 124714 - DNA, 420 bp, Glycine max
  unsure (1)..(420): unsure at all n locations
agtcacctgaggcacgcncgcttgttgcggatcaagttgatctgcaatatttttatgtatcaacttaaaccgtaagcttgttgcggatcaaaatacattacgaatcatctcattccattattgcggatcatctcattccatttgcggatcatctaaatccaaaactacctctactgcggatgaccccctaaatccctatgcaccctaaaaactacactacaccagcaaacatggaagcacaaaagcaatggagaagaacagggaagaagaaaggaagaagaggcttacctcgtcgtcaatggagcagcatgaacagaagaacaacgcgcacagccgaggtgaagaccaccaccaacatgccgccaacaatgctgaacaacaacacgcaccanaagaacggccttaacaagcatgccgaca

SEQ ID NO: 124715 - DNA, 300 bp, Glycine max
  unsure (1)..(300): unsure at all n locations
agctcttgaagatatgatgtacattcttttcttttgtcnttnaaggttcttggtctgggcccaagaaagcttgtttaggtctgccacaacaacggtttatatatgtnttggatggttatttaactggcagcttaatgatgattaccatacaaatgagttaaagtctggttataagtgcttgttcatctgctcagataattatggaaaaaagaggaagaanaaagaacagagcagaaattttgctcacatttagatctttgcatttgcatgtactatttcttgattccaacctaatggata

SEQ ID NO: 124716 - DNA, 349 bp, Glycine max
  unsure (1)..(349): unsure at all n locations
aatgggatcatatctgccaacatnattcattgctgaagctccttgaaatcctnctaatgcatagatgcaaccatcaacagctcctatggagcaaccacaaaatggcattcagtccagggcatctctcctaccaagccagctcattatgacatcaacaattctgatacttggacccatcatgctccacatccgaaggggaaaggaaatcaaacctttctttggttcatcttcaaacccaacttttggcatcgggggcaaccttgccatcttctggaaagagggtgcaatgcataccataatagcttatcatccttgactttcgcanaatgtaagccattcttcttggttc

SEQ ID NO: 124717 - DNA, 455 bp, Glycine max
  unsure (1)..(455): unsure at all n locations
agctttcgtangtgaaatcaggcgcttcccattcccttatagncctctcatggcgtggagggtgtgccatgttctcagaatgatcaaaatcaaaatgctcaaaactataatgctcaaaaacaccaataacagaatgctcaagatgctcaaaatgtactaaatgatgcgtaactaatctatgaaatgtcctatctatctcaagatcaaagggttgtaagtcagatggatttcctctagtcatacactagattcagcatgcacaattaattgtcttcttatgcacgtaacagcgtccgtttgaactacaactaccatcaaatgatgtccaaacgacttgaaattctgtgagcaaccctcataaacgattagaagatgcacataatatttcaaacaataattaaagtctaactatagaagctcacattggtcagtctagaataataagagaataaaac

SEQ ID NO: 124718 - DNA, 302 bp, Glycine max
  unsure (1)..(302): unsure at all n locations
gtctataacattaatctaaactcgctcaaactgggtntacgacgaanactctaccgaatgcaaaattgacttctcaacacccaatctaccctagaaatggctcttgccttcactttgagtcactcattngtcttcttttgacagnccaagctttccacagtccaaatgacattcaaactangatacctcactctaatctccaataccactaaaccagattggctttcgaatctcnagcatacactttccactcatatactacttctacttttaacctaggtaactctacctactcttatcag

SEQ ID NO: 124719 - DNA, 348 bp, Glycine max
  unsure (1)..(348): unsure at all n locations
agcttataagcgcggtatgggatataatgtctgtgttcgcgatatacgaagatgatgttccgagtacattggatttggtacgaccatgccctcctgatttccagctaggaaattggcgagtggagtaacgccccggcatttacgcaacgagcataatgtaaacctttacgattttaaaaagctctatagttgggcctaggctttaaagtttttccttttggtaaagctttgagtcttttgtttttgaatatataatacaaggatctttcttcatctgttcctacgtctctacccattctcattcatttgcatgtntacttncttttctgaaacggcagatccgatgac

SEQ ID NO: 124720 - DNA, 377 bp, Glycine max
  unsure (1)..(377): unsure at all n locations
tttaatggagagggtaccactactggataacccgaatgcacatttttatcgaggcaatagatctaaatatctgggaagccatataaatagggccttatatacccaccacagtagagagagtttcaatagatggtagttcatcaagtgaaagcataaccatagaanaacctacagatagatggtctgaagaggatagaatacgagtacaatacaacctataagccaaaaacataataacatctgccctatgaatggatgaatatctcagagnttcaaattgtaagagtgctaaggaaatgtgggacactcttcgattaacacatgaaggaactacagatgttaaaagatctaggataaatgcactaactcatgagtat

SEQ ID NO: 124721 - DNA, 312 bp, Glycine max
  unsure (1)..(312): unsure at all n locations
agcttgccgngccatcatcattttggttctaattctatttctggctcatacccctcccttaacatatgtctggccctcatcaagagaggccttgataaacgcgttgcattggaagaaccctcacataatcctttgtcacactactctaggcttgagaagacgtttccaatgactctttcgcaacttacatatagggtggagaagatggacaactcacttgtatattttttttacccgacactataaccatgttctttccccatacacttcaatttctcgtgcaacgatgacgggaccaccacaacataatgg

SEQ ID NO: 124722 - DNA, 454 bp, Glycine max
  unsure (1)..(454): unsure at all n locations
agctntctcccaagtcctaaatgacattttctatctagtattaactcactttaacctccatttaccacagaattcagacttagccttgcaactctcaaagacctactcttttttcactcataacatcacattctcactatctaaccctaagttaactctacccttcacctctaacagttgtcaataagaaatctcaacatataaacatcacaaacatcatcacaaaaaccctagaacagaatgggtatgtctaactcatccaaacatggcaatttcaacaagctttcaacaagagtcttcacaaataaccatcatgaagcagaaaactaacaaaactacccatgatatctcccaaaaccccatacccacgaagatcataggagaaaggaagtcacccaacttggatnttcgaggcccactcgagccacgcacttacaacccgaaatgcctcctt

SEQ ID NO: 124723 - DNA, 388 bp, Glycine max
  unsure (1)..(388): unsure at all n locations
atgcaagcttaattcgaatgcatcaatganaacaactatcattctattttattatcgacatctcattttataagaaaataaaataaacggccaataattatagattgacaaaaccgaatttctaaaagtgatcacactaaaattgattattccctaacgctaattataaataaactgaattaataccctattggtggcattttccatgatgagaaaagtggaacataacgtgattatacaatctttaaactataagaacctatatagatatagaagataaaaactgaagatggtgacggaatatttgctggaccaaattttactcttcttaatttaaaactcacgtgactcttccacataaaatctatactttaattcatatatttga

SEQ ID NO: 124724 - DNA, 244 bp, Glycine max
  unsure (1)..(244): unsure at all n locations
acacatgaataaagacttcggcacacgtgaatactgatgacaaccccccgtgttaaagactctgtctccaagatctttccagagcattngaagaataactattgttccataccattatgtccaataatgagtggtagaataagaacaatangaaataatgcttcttcgttattattaataacagaagagctacagtgctctttgaaataatgtgtatcatactaccaaagtaaagaccactgag

SEQ ID NO: 124725 - DNA, 420 bp, Glycine max
  unsure (1)..(420): unsure at all n locations
ccacccttataataacgaaactcaccttcttgaaataaaacatggattaaacaacacactatataaaattaaacatcaattataattactaataatactttcagggtggtacacttcctctttaagttatttatgcaacgcactctgttggcggtgaagcttatccttacatggcttattctctagtggatgacgtatcctctcatctcatcttcattatcttttgttgcaacttcatggctgaaaatcaccatngaaaaacctcattgaagctcanagatccagcctccataggaacttctcaagcaagcttccatcaatcatcatatatcttactaaagatataactgatgctaatgtagtgcagtctgctagttcatctcccaaatgcttatgtagtacaagcaaatatgcaataca

SEQ ID NO: 124726 - DNA, 353 bp, Glycine max
  unsure (1)..(353): unsure at all n locations
ctcatgcacatcaatctacttaaacaccacattctttnttaccagttcatttaaaggtgcaacaagtggactacaagtcttcacagatcttgtataaaaactttctaaaccatgaaaacttcttacctcattaacattcttaggtacatgccattccctaatggccttttacctttttttcatccacacttattccttttgaactaatgacaaagtccaagaacacaacagattcagggcaaaagaatacttttaagaatggatataatttatttctctcnaacattaaaacaacatagtcctctatttcttgttagatcaaatgtatcaaatacatacaacaaattccaatg

SEQ ID NO: 124727 - DNA, 385 bp, Glycine max
  unsure (1)..(385): unsure at all n locations
agcttgaaggataggtggatatggagatggattaggattttcttttaacatcaatcaaaacaatgaatgtggtgaatctttaaattctcatgcaatggcgaaagtagcagattttgaaaaatataataataaatgagcgagtttgatatggaactcttgaaagggatagcaagtttcatgtagcatgggccangctctagagctagcaatgttggttctgagtacaaatggcagcctactggaaagactaaccaatcttcatgaagcaaggtttgatcctttagaggagttgctgataacgatccatctgctccccatggagttcgactcttgatcgangactatccttatgcttctgttgggctacacatatgggatggtatca

SEQ ID NO: 124728 - DNA, 228 bp, Glycine max
  unsure (1)..(228): unsure at all n locations
atattcctcacatcnccttctaatcatctccacctatatataganatatgcgcatgctacaagaccaaagctaataacagaatctctaaggcactaaataacagaattataaaagcataaggtactactgctcctaacagaactgaacactactgctcataacagaatggagcactacaaaataacggaattggtaccaaaatcccttatacataatccttctagtgc

SEQ ID NO: 124729 - DNA, 411 bp, Glycine max
  unsure (1)..(411): unsure at all n locations
cccttaagtcacctgcggcatgcaagcttaactnttatattattataaatagattaggtatttatattattttctaacaatctctcacttagaatttatattaagcttagacatttataccacaaaattctttggacatgcaaccatatgttatttacttttagactaatctttaaagaatctggtccatctcatatagcaacaaggaaccattgcgattttcaccataacctaacgactaagtcacaatgagtattgaattgttaagttattatcacaataaatcttgatattatttataaatcttgacctggttgtattcctattattggtatagtattgaactattaagtcattatcacagtaaatcttcaatggtcttttaatgtcatcaaccacatgtaaactagt

SEQ ID NO: 124730 - DNA, 332 bp, Glycine max
  unsure (1)..(332): unsure at all n locations
tagccttgagcttacatggntaaatatttcttatcaagctattggttaaagcttcaataaaataatatagttacggcgaaagagtgtcaatgacttacattataaaatatctggcttttgagtgagaaaaaatagcaactttttaatataagtggtaaaaaaaacattattntntatacaagataaataaaatgatagtttgtagctcctttcaacattaatatcatctaaccaacccagtcatttggcattagaatctgcacataaatctggtattaaattcttttaacattggcccatgtattcttatttntacttnggtttttataact

SEQ ID NO: 124731 - DNA, 335 bp, Glycine max
  unsure (1)..(335): unsure at all n locations
ggacctaaaattcttacgagttgtacagatagaacatgttcattctacgcaaatcttcagcactccccctccatctggatggtacatatctatcatacccagaatggatatgatatactgatacacattccttaatcactgtatttacactctattgttcgtagactattggcatgacgaaacataattgacactcatgatcctatgatcaattgtctncttaatgaaaggtctttctatgcgcacatgctctgttatcacctgatgaatcggatcctcacaatacttaatagaaccttagtatcccaacattccgtggagtgtatgggtaccct

SEQ ID NO: 124732 - DNA, 411 bp, Glycine max
gatcttaagcgactgcagctgcagcttagaaagtacagagagtttgtctattgtacaaagatccaggaagctctatactctgtctgtaaatagctccccgcatcccttagagcttcttgatgctacagattgcaaattattgaccactgtatacttcccatcaattgctgaacaatttaaggaaaatatgagagagattctcttttggaattgcctggaattggatgaacattctctcaaggctattggcttcaatgcacgtattaacgtcatgaaatctgcgtaccataatttatctgcacaggtgaaaaaatgttgatttctatctaaatatacgagatcatagaagcatattatggagctctataactcctctcatatggctaggaactaccgattgcaatgactgtc

SEQ ID NO: 124733 - DNA, 431 bp, Glycine max
  unsure (1)..(431): unsure at all n locations
agctatagtaatcattacaccaattgttttttgactatgaangaantttntaggagtctatgttttaattgattaccaatagatataatcgattactgctcttttaaaaagtgtatcaaaagtgattaagaacactttaatcgattacattaaggatctaatcgattacatggttcttgaaaggtttccagtttttgggaagaacacttcgatcgattgaaatgataatataaccaattacttcttcaaaacaattgattacattgtatatttaatcgattacatgcagttataatcattttctctataaatagccaccttgtgtttcacttcaagaacttcagatacaagtctaataagtgctaattatatgacctgaaataaggataagaaaagaaaaaaaatgccatatacagtgactcacactcaat

SEQ ID NO: 124734 - DNA, 274 bp, Glycine max
  unsure (1)..(274): unsure at all n locations
tttaacatctaactgctccaagtaaagattctttgcagctataatactcagaataactctaatggtagtcatctttacaactggagagaagatctctgtngaaataattccttggttctgctgaaaccctttcaccacaagtctcgcctgatatcttcttctatcatcaggttcttcctttagcctatagacccacctattntgtaacactttctttccttctggcaagttagttaaagaccacgtcttattcttatgangggatgtcatctca

SEQ ID NO: 124735 - DNA, 390 bp, Glycine max
  unsure (1)..(390): unsure at all n locations
agctntttaagtattaaaaatanaattaacactttctataatgattaaaagaaatcacagggacaaaaatgaaaaanaaatactaaattgtaagaacgaaaaatatatttaaatatatgttttatgctatgaaaaattcaaaaagatatattttatatatattgntattgtaattaatgttttataatatatagattaataatatttcgtataaatttatatatgtatacatttcccctcgggaggggggctggctcagcccttggttgctagttcttacttggtttactctctcgtggcaaagcaagggcattaaagaggcacgatcagataattatcgcctattatcgtctaatcacaccctcactggtggatttgtacttcttttgg

SEQ ID NO: 124736 - DNA, 355 bp, Glycine max
  unsure (1)..(355): unsure at all n locations
ttctagatatattccatatgagttctagctagaaaagtagtcatgaataaactcatattttcttcttcacaaatattangtgggaaaggcaaccagatttgagtcagcaattgggttttgttcacacccagaatttgggcaagtatttagtagtccccattttccataagagggtatcaacaaacacatttcaatntattctgactaaggttaatcaaaggttgtcctcctcgaaaacctgacaattattcttcgcangacgagcaactcttggtaaatctgtccttcanngcacttccacttatgctatgcactctacctacanttctagagccgatgaatcatgtcatctgtg

SEQ ID NO: 124737 - DNA, 461 bp, Glycine max
  unsure (1)..(461): unsure at all n locations
agcttactttatcacanagctttctgcatctctctttattgctacaggngacagtatatcaggtcgaatgctcaatgcttgcccaagttttatgtatgctggacccaaagatgtcacaatttcacgttactcaatatccctaacaacttcattctggttatggaaagaggacaaaaagaataaccaaaatgtaatctcaaaaattgcatttttgaacaaagactatgaaatataaagaaactgttactatcttcagagaagcctaaatatntatctatagtccatacataacaaaagctcaagccataagctcttcagtacagaactagaacactttctgatacagcccctattattcattacttagatatataacagaaatctacaataatacttacataactcattaatagtatggtaatatagtcgaattatatatttactggatgcaaagccttagt

SEQ ID NO: 124738 - DNA, 315 bp, Glycine max
  unsure (1)..(315): unsure at all n locations
cacattatttccatgacacgcgtgcaacaatgatgatttanaaatatatgcaaagctagtcatgcatgcacctatgcggacactcaagcatcaagttttggggtcgtgtgacactagggctcaggactcaagcatcaatatatgcattcgtccgagtccattttgggtgttccgaaaattccacagcattcacccttcaaagtaantttgctacctanacatatgcatattttgtgtgggcatctttgctacctaaacatatacatacatattcaaagcattnttgctacctaaacatataccatatatactttt

SEQ ID NO: 124739 - DNA, 321 bp, Glycine max
agcttgcttggggggcttctatgaatgtgttttctttagcttcaatgagggcccttaatggtgattgttcaccatggagatgcagccgaaaacaaacgataagaagtgagaggaggcgccatccactaaggaataaaccatggaagaaggagcttcaccaccaagatgagccttggataagaagcttggaaaggatgcttcaatggaggaaaagaaagagggacagaaagagagaggggggagcaccaaattgaaggaacaaaaagggagagaagttgaactttgagttgtgtctcaaaagactctcattcctcaaagtta

SEQ ID NO: 124740 - DNA, 428 bp, Glycine max
  unsure (1)..(428): unsure at all n locations
agcttgagatgaggaagagttgaaggtttattcttcctgctnttattgntgaccacagagtggttcctggagatatgtcgcggcggtcaagagacactgtggacgtcaagtggggtgctattgcccaaaaccaaacttgaccaatcccgacccaacccgggcataatcggtcagtgagaacctgtgatgtacctaaacaggcgagctcctggcagtcaacagataaaaggaaaacaagaccacaaagcaaggaggcttgtggtggctggccagctgtgaatattgtgttatatgtggattgtggcctctggtaatcgattaccaaaggtgagtaatcgattacaaggcttaaaattgaagacaggaggctaagatggtctctggtaatcgattaccaacgggtgtaatcgattaccaggcttgaaaac

SEQ ID NO: 124741 - DNA, 326 bp, Glycine max
  unsure (1)..(326): unsure at all n locations
aagtgggcctgggtgctatttgcatcccccttttctactaaatacaccccctgcccttttttttgctgatgccttttacgaaacgacacggaaacttatgaatgacctaacgagactgagcttacttccgagatgttatggaacctcacggattacgtaatcatcccttttttgccttccggaatgttactgaactttacggattgtgcactaacactccctgttaatttgcggcatgtgacagaacttcatggagtgcgctacaatgctttcttttgactntcggcatgactcggaacttcacgaattgcctaacgatgagtacc

SEQ ID NO: 124742 - DNA, 384 bp, Glycine max
  unsure (1)..(384): unsure at all n locations
aaaacttgatctctctctcaggtggtaaataggatatatcctcacgaaactctcttgacatacggaggtcacacatggaaaccttagtctctacttctacgttagacaagatcatgtacacttgagaatcttctttagagatgcaacactcggttggagagataacattnatccttactattctanaatctcnacatacagtttatccaacacgttacaaacatggtggaaataacagtcatcccaaatacatcattggtcaagcaagaataatcataaaatgttaccaattcacggcactcaactcataaagaaaaagattttttctagccactagtctctgatgagctcgaactcttaaagttcttgactgctattcttttg

SEQ ID NO: 124743 - DNA, 496 bp, Glycine max
  unsure (1)..(496): unsure at all n locations
acccttagagacganccgaggcatgcaagcttgtaggattatggggtatccatcacatgtgtgactatgtggcggtcgggcgatggtgcaaaataattctccacatccacaaatcacgtataaacccaccatcctctgttgcccacctccaactgagctcacgtactctcacgtagcccttatcctcgttcttctcaacgccgggtccccatcaatcctcccaagcttccacaacatccaaagtattccacatccaatcatcatgagctaacaaaaccaagcaaaacagggcaaaggcagaaaactctgcccaaaacacaactcataatcacagcttttcacatacaaatacctccagaacatttccttcagttcaattcgataaccggtggatcgactcgaaaattttactggaaagctctattacataaatctacatcttgactggtgggatctgcaagaatatgtccagatacccatatgtactaccctttca

SEQ ID NO: 124744 - DNA, 227 bp, Glycine max
agcttatagaaaggatacgctgattgcatattttatcatcttttataggaaagatctcccattcttaagtgccaataatctatacgcgttatggcacattatggatgaacaatgttggattcaatgtcagatatggccttataatttggggtgaggtagcacaatccatttctcacttcaactgaaccaattcgtccttgagtaatctcattctgcatcaagcatga

SEQ ID NO: 124745 - DNA, 101 bp, Glycine max
  unsure (1)..(101): unsure at all n locations
agctntcaacaagtttcttttaaattatctatatgaagcagagaactagcaagaccacccatcatatctcccaaaaccccatacccacgaaagttaagaga

SEQ ID NO: 124746 - DNA, 418 bp, Glycine max
  unsure (1)..(418): unsure at all n locations
atgaaaaggcgcaccatcgggcgtggtcgaaagtgacgatgaagccttaggttattatggaatgaccatgaccttcttggttgaccacaacccttatgagttgacctcgacccttatgaatggaccagaccttcatcaattgatctctcttggttgaccatgatcctcatgagttgatcacgacccgcatgaattgaccttggcccttatgagttgaccatgaccctcatgaattgactaaaaccctcatgatttgaccatggccattggtgaatcttgacgttgttctatagggctggtatcacttaattgtagtcgtgttgattaaccataggtgtggtcaatgtaccatggtcgtgatctaatncagaggtctcgaatcttcataaatgtgtgccatttcctactctttcactca

SEQ ID NO: 124747 - DNA, 223 bp, Glycine max
  unsure (1)..(223): unsure at all n locations
gtatctcttaatagggacaagatcgctntaagcaatgatcaaataccgcgtcaaatccaagacagagatgaatcgaggtaagtggtagcatgggcacgatttgctacgcaatggtattttctgcttttangttgctcgggacgggtacgaatggacactangcccgtggcaacanatcactatcctgcgttcggctctggacgatcgagaagcgctactggga

SEQ ID NO: 124748 - DNA, 475 bp, Glycine max
  unsure (1)..(475): unsure at all n locations
tccttaagcaccgcggctgcagcttcattacgaatttgcttcccttntctctctttaattcactccccancagtaaatgccatttcccttggttatttggctctccattgatgtggtttggtgctttagttgctcattttttgcaaaattcgtgaagcaatttgcatctgaatgcatgctttgtttgtggagttgaggacttgaatgaggaggccttangcctatgttgtattctgaagcgatgggggatgccacattgcccccattctcttgcaatttatgtccaaacatgcgcccatcaagtgctcggtgaaatgccccaatgatatatgtatatgattttgcannaatgggatggtggggctgtnttatgtatgtagagacagcatatgaaagtcgaaatagacgcccaaatgctatccccagcttaggaacccatacttntagcttcaatgcaagaaaacatacacatgac

SEQ ID NO: 124749 - DNA, 338 bp, Glycine max
  unsure (1)..(338): unsure at all n locations
atcacactaagctctcacttatggtagtgtaatagggcctaatgtcttgttatccattnttatgagatcaaagacagaatcattaaagatgacaagaagtggctttagtctttggatgaaaacattgtncactctgtctttgacanagcatacacaagcatcatcaaagtgatatgtcgagactgaacgcaacacctgaatatngtctttatgggctggaatgtcttggccatttgaactggacgacaaagcttttctagtgtcaccccaaactatttgattccagaatgtcttggcatcaatacatcaggtctcttcactagcttcttctacttgtc

SEQ ID NO: 124750 - DNA, 363 bp, Glycine max
ctcattacgctatctaacaatcttggggtggatccaagtgctccggtcattaatttgcatattcatgttttgtgggcatactcaccgttgtgtatttctttaggaatttcatcataactaagaaaacaccacggcattcctataacactcgatccataaaaatggataataaagagggcgtgcaggaacagatgaaggccgatctatcggccttaaaagatcaaatggcttccatctcggaggtcatgttaaaactccagaaaaccatatatgataaagccaccgcaaccgcctccactacagttagggaagcggagccggtgctgcatcccgccttgaatccgggcctagacaagaacatgg

SEQ ID NO: 124751 - DNA, 321 bp, Glycine max
  unsure (1)..(321): unsure at all n locations
ctaagctcgcgggggatcaattattaaatatggccttgtcttttttctatatatctataacaccattaaatgccttggacgcaatgacagaccataatatatgtcaggcagactagaaagacatcatgcaactaaaataataatagatacaaaatacttctttcatattgatgcatangaagaattcttacatacaatgtatataggcatatcttcatttacaattacanacaatgcttcagaatatggacaacataaaactaagttcctgaccaaatggcctaagcacatggccataataaacntatcaatatcatattc

SEQ ID NO: 124752 - DNA, 376 bp, Glycine max
  unsure (1)..(376): unsure at all n locations
tgcaagctttctttcattntctctcatatgggagtgttgtctaagatgtgacctatgccttccttcgtaatagtcacgaagttcttcacttacgctcttgcaagagttatgactactataggaggcatgtttttcttttcttaactcttttagtattttccttctttcttcttcccttattatctttttttcatcttgacttatttctttcgctctctttttcctttttcttttctctcttgtttttctttccacaacttaagggatctcaactcatctaatatgttatacaaggggtccttaggagtagaaccctcaccattaacactagatgatgaatgaagactcatgtttggttctaagttatggttctttc

SEQ ID NO: 124753 - DNA, 286 bp, Glycine max
  unsure (1)..(286): unsure at all n locations
gagagatacgttagatggtcactgaagtgttaacaaagcctattntntgattgcaagcatggatggccttcctaatattcctctataatgggtgatttggaaggcgcgtggtgctaaaagatcttgaccaagtccaacccaaaggtaaaataactaaagagttaataaaaaatatttgctattagttnttatanaataaaagactacatatgttggcagaaatgcctaactcatagctctctccttcacaataaaaattttctctctacaattgtttaggactctc

SEQ ID NO: 124754 - DNA, 251 bp, Glycine max
  unsure (1)..(251): unsure at all n locations
agcttgaaatcgctcagaggttaccttttacatattccgacggcgatgacttcccaaacggaagtcctgttctaactcntattagtccatgacatcgtaaaactccacgagcggctgttgtaaactaaagcgaacttgaattatcttaacgcttcccgttcttgttcactaattaagaatgttcttgtaatagactttcggagtctttacatcatctaccattgtcttttcggattacataggactccttt

SEQ ID NO: 124755 - DNA, 262 bp, Glycine max
tgaatctttctttgatatccataaaatctgagattattcttttatttcttaaacacagaaggaaaattcacttcggcaatggttaatactcatggatcaggtgcatagggtccctctagggacgggtatatgcgggaaggatgtgtttgactgctcactgatgacatgatcagaaactacttggcgcacatttggagataaacattgggttgagattgtaaaaccctattatcaatgtggcacagtaggggaggtacggtgg

SEQ ID NO: 124756 - DNA, 349 bp, Glycine max
  unsure (1)..(349): unsure at all n locations
acacaccaaatgaatataatgatggatggctcatattctcacaaaggtaaaatcatcactttcaaatngagctttcaaaactatcatgacatgtagagaagaatcaaggatttcatgtcacanaatgtcaagaacttttattttcaaagcaattactcatttcttgaacatatcctataattcanagaanaacatgcaaagtcgtacgtgcacacaatatngacccacaatattaaacttgagatccgacgaaactaacaccattaacangataacacaactaacagattaaccaaaccaacaatactagcaaaccaaagaacactccccccccatacttaaacacaca

SEQ ID NO: 124757 - DNA, 92 bp, Glycine max
cgcaactagagttcactattgctaccccatagagctacgcgaaatttgatcccgccatactctttcttgcgagccctcttggtctctcgttc

SEQ ID NO: 124758 - DNA, 579 bp, Glycine max
  unsure (1)..(579): unsure at all n locations
ctctcagactggcttagtggcttggtaaagagaatgatatcagaatctatgaattttagacanatattctacccggaagagcacgcactctaagtgatgtttaataaatatgttatagataatttgttgacaactcggacaaataaaattctatccatgaaagatgaaccttaaagaaactacacattaatggatagcatatgttcatagatataattaactntttacagtaatccacccttacatattaaatctgaagtctaatcttaagaataactcatcattctaagtctttcattttcaaaaaaagaaattgagcattctcctttctactaagtggtgggcatagtgtcaagaaaatacgntgctacataatatttttaaaaatatgtgagaaatgacataaattaagggtgttactgtgtccggttaactttatagtcaaatataacatanagatatacgttcagttgactcagtttaatataacatcgaattaaataaccataaccatctctaccgctggttaatcagtatgcagtcttttattatatatattaagtatactcactattatat

SEQ ID NO: 124759 - DNA, 262 bp, Glycine max
tgagtagatgctgataaatgcttcccccgaatggtttgttcatttgagctcttaacttgatgtgatcccaagatactctggttgccttagatcccgtacaaagatgcatactcaatagaatgcggttgtcacaaaactgcaaactcaagtgttgaaatattagctacccataatgctaatgctatgttatgctctgcctccaaaatgatatcgtctgaaggacactttttcctgaactgtattatacatcttaactagcttg

SEQ ID NO: 124760 - DNA, 441 bp, Glycine max
  unsure (1)..(441): unsure at all n locations
gtctcgtatcgattaatcgaatacagtctttataataatcgatggcattagtttttatagacaatgattgatttattcatgagtctctgctntaatcgattaccatgtgatatatatgattacttctctttcgataagtgttntagaagtgaacactttaatcgattacatcgaggatctaatcgattacattgttcttgagcaattctccaatttgtgggaagaacactttaatctattgaaaagataatataatcaattactttcttgaaataattgattacattgtagaattaagcgattaaaggcggttataactggtgtatctatatatagtcatcttgtgttctaacttanatacataagatcattaatggtgaaattgcataagctgatataagtgaacgaagagaagaaaattgctcgtaatagtgactcaca

SEQ ID NO: 124761 - DNA, 426 bp, Glycine max
  unsure (1)..(426): unsure at all n locations
aaacgtctgattgatttttaattattntattcaaagatatttcgaatatcttattattatnttccatttatgggtaacccggttacaatgtgatgatcggtagattttgtttaacagtgattaacgagattacatgcaaatgatcggctgaattcgtgtatcattcattangtgagaaaacggcttaaatatatgattaagcacgttaacacggagaaanaaaatcgaaatgaacaaatgatatgaaagccacaaacagaaatgattgaagctcgattaaaactacccgtgagaacttaacaacgagaatggtgagacagtgagatggcgatacgcacattactacgaatgctaaaggtacgagcactactgatttctcgacatttttacaacactgatgtatagggtagatttgacactctccta

SEQ ID NO: 124762 - DNA, 190 bp, Glycine max
  unsure (1)..(190): unsure at all n locations
acttttttgtagggattgagctgccccatgattggcactntgcacctaagtaacgtgggagatgctttttcaatggtgtgtagatatatgtgaatatatggcataagaatatgtngcaaagtgtgtgaatatnatggcataaaataccttgcanagcgaatgaatagtaaataatgcatttcanaatatg

SEQ ID NO: 124763 - DNA, 456 bp, Glycine max
  unsure (1)..(456): unsure at all n locations
taagatctagtctcccatagaagcccacaagcaagcttccatcaatggtgtactctaattctgcacaagacaggctntaaataggctctgaatctgtgacgttatgcttagtggccacctttgcactagcgcgangtagtggatttgagcttagcaccagtcatgtgctgagcctttgtnaagacaacgatcgtgcttagcgagcagaattagcgcttagcgcgtggccttganatngattctctgcgcttagcgatggatgcgcgctgagcccaaatggtgagctgagtggcaactaccactttagcacttcaagaattagcctcatttaacctganatngaagcagattcattattanatccaatggaaaatattctagagacaactataacaagaaaacaagaaattattataatccctacaaataactataatgggggaaactatacaagtt

SEQ ID NO: 124764 - DNA, 332 bp, Glycine max
  unsure (1)..(332): unsure at all n locations
gcactgattatagatgctcttgagaagatctcgtacttgaaactactgctacacacaagtggcttaatagaatgatagcactaccatctactaataataatgagcgtggcaataactcacanatgcatgagcataactttctagaagaaataacttacttttgaatttaatatactccacatgtaataagagatatcgttattcttgacattctttcacattatcaaccacaaatgtcactcatgaagctcgaatatgatcanggatgtcgtcatgtaaaaactagagaatcaagctagtaactttttgcgaacacttgacatgcatatatc

SEQ ID NO: 124765 - DNA, 374 bp, Glycine max
acacttagatgattaccctttgttttcccccgttaaaatttctaattgaatcgagcaatgatgagctgtattacaactgataactttatcactataaataagatctgaaacaccctttaccaggaagcataaaaataggtcattaagatccaatatgactgaattacataagcttaacatatatctctgatacaatacaaactgctggagtcatatgctgagcattacaggtgtctttctcaacaaactttctgatatagacctttgtatctaactatacctgtatgcttatgacacataagcttaagagtcactacacatgtcaaccaccaaacacatatcgaccacaatgaatcaactccactaagtgtgat

SEQ ID NO: 124766 - DNA, 148 bp, Glycine max
cttagcacgcgctgactctaactttcagatggctctgataccactgtgacagggctcaaatctaagaagggggggtggataaatccacattcctataaagttcctttcgcatataacgctatgcatgatgattaagcgagaacattga

SEQ ID NO: 124767 - DNA, 321 bp, Glycine max
  unsure (1)..(321): unsure at all n locations
tgaccacctcatggactcctctaaggataatagcatcatttctggcactgaattgttgngagttggatgccatcttctcaatcaaattcctagcctcagcatgggtcatatcaccaagagctccactactggcagcatcaatcatactcctctccatgtagctaagtccctcatagacatattgaagaaggagttgctcaaatatctggtggtgatgacagctcgcacacaatttcttgaatctatcctagtactcatacatactctctacactaagttgcctgacgcctgatatgctattctgatggagtgatcctagat

SEQ ID NO: 124768 - DNA, 464 bp, Glycine max
  unsure (1)..(464): unsure at all n locations
ctattaactacattgttgcatcttagtacatttgatatctattttgcattgtacatcatcatagtgtgagagaagaatattttctaagttagaagaattcttcacagacaataactctatgttttaatcgattacggagttgttggaatcgattacaacaagatgtctgaagcttgacgagntaagtctcatatcggtctaatcgaatactctgctcgttgagacaatgactgattnttcacgagtccctggcttaatcaattaccaggtggattaactgaatacttctctcctgntcaagnntgtcagaggtgaacaagaacacctttatacctacggtatctaatggttacattggtctgagttgttttcagatgtcgatgacacttactcgatacttgatatcaattgtattactgaatatcattctttgattatcatacaactatacttttctcatatag

SEQ ID NO: 124769 - DNA, 405 bp, Glycine max
  unsure (1)..(405): unsure at all n locations
agcttttctccccaatttctatanatagggggagaagtgaagtgaanaagggttcatccccttangcacttctctctctntcgaatgtgcttagannaattgtttccgtgaagaatatccatgccgaggcgcttccgtaacgtttccgtaacgtttccgtgaggaatttcgcgatggttatcgaccgttcttcgacgttcttcanttcgtcttcatcgatcttcagtcgtcaacgggtaagtacctcacaccaagcttttcaattcattctatgtacccgtggtggtccacacttggtttcatgtatctttattcttcgttcattcactttttacaccctctcttgacgtgcttaagccatcttatatactgcatttctcgcttaacctacgaatangataacgt

SEQ ID NO: 124770 - DNA, 464 bp, Glycine max
  unsure (1)..(464): unsure at all n locations
gagaccagtcgagagtcgaaggtatgatattggaagacatgttgagggcttgtcaaaggtcaaagagggagttgcccaacaattgagtaggaccgaagaaaacatgtgggccatcattgaccaatacaaagagaagctaactctagcttcaacccatgagcaaaggctagaggatgagtatgcaaaggtatcagtcctacaaatagaaatggaagcaagggagagagtgatcaattcactacacagagaagcaatgatgtggatggataggttcactttcaccttgaatgggagtcaagagattccaagactgctagctaaagccaaggcgatggcggatgtgtactcgacccccaaggaattcatgggctctggtggatcaagtggcttagaataataagaaaggggggtgaataatattctnaacttactaaataaattactctctaggcttactatgtgta

SEQ ID NO: 124771 - DNA, 451 bp, Glycine max
  unsure (1)..(451): unsure at all n locations
gagtgtaactgaaattgaggcaaccaaaagtcacccacaacagccaacaagtcagccaccatttggtctcccaaaaggctgatgcctangttgccaatngngcccttattacaacttgaactaaacctaactaaagcccttctagttgattaacccacaacatattnntggtcagccaactctacaaggattgggccattanttagacaaactanacactctacaatcgagacaaagtggtgtcatttagtcctcctccatttgggccatgatacaactcacaaccttggaactttctccttgnactngngcttgattaaatagtatggacagacttgtgaaagcttcttggcttcttgctctacctgtattgtctcaagtctcaaggatcttgcctgtctgacatgtctataatatgtagagattatgatgtatgtcttaaacattatat

SEQ ID NO: 124772 - DNA, 306 bp, Glycine max
tgcagccatttcccttagagtcttctcacggggtggagggtgtgccatgttctcaaaatgttcataactataatgctcacaatcaccaataacagaatgctcacgatgctcaaaaggtactaaatgatgtctaactaatcaatgaaatgtcctatctatctcaagatcaaagggttgtaagtcagatggattgcctctagttatacactatattcagcatgcacaactagttgtcgtttatgcaagtaacaatgtaagtatgaactacagctaccattgaatgatatccaaatgacttgaagattt

SEQ ID NO: 124773 - DNA, 352 bp, Glycine max
  unsure (1)..(352): unsure at all n locations
ccgcgatctctaagtcacctgcggcatgcaagctgganatntanggacctctgagaccnactntgctgtggactacacacgcagctcgcttgaggaagagatgaattattcacagtgggaatagtgnaacatatgtatggatccttatagaatcaatgggatgagttcatgatgttatgtaattttattctatcntttcaatatatatgtttgatgggccaattgatgtcccaatgcanaattgttgtaaaattgatgtgttcttgtgtngagtatgaatcctacaaattggaatcttttttctaattagcgtgaattggtgaaactgaatgaatagtatgatgtctttact

SEQ ID NO: 124774 - DNA, 145 bp, Glycine max
  unsure (1)..(145): unsure at all n locations
gaaatatggaagtaaccactctgcatacttggggcanaagatgaatcgagtcacatcactgcttcgtctactggcccacatatataggattattgatgtccttgttactttcacgttcaccttgacaaagatgtcatggaccatg

SEQ ID NO: 124775 - DNA, 156 bp, Glycine max
  unsure (1)..(156): unsure at all n locations
atgcatgatttacccatcgacnatatcttatatttctaacttttatcggcgcacaaatacaagtctacaggaacatcaaaaacctaaggtccgcccttggtacaaaaagccgaggtctatccttgttattgaaacccagagtccaaccttggtaca

SEQ ID NO: 124776 - DNA, 318 bp, Glycine max
  unsure (1)..(318): unsure at all n locations
gttgtgctcctctgctgaccaccatacatacctttgcccttccatgcagcaacctggagcaatcgagcagcctgaagcttatgttgcaaatatanacaatagaccttctcaacctcagcagcaaaatcaaccacagtagattaattatgacctctccagcaacagatacaaccctggatggaggaatcaccctaatctcagatggtgcagccctcagcaacaacaacagcagccttgctccttcttccaaaatgctggtggccgagcagacatacattctncaccaatcaacaacagaacaactccagaacagcaaca

SEQ ID NO: 124777 - DNA, 409 bp, Glycine max
  unsure (1)..(409): unsure at all n locations
gctgatccgttcaggtccaacgccttaacagtctcttttacttttatcggttaaaatatacctntcaaaagtctaaaatcaactctacgcgtaacattcttgctntaaaagaactacgtaggtctgagttcttcatcgcacctgaggatatgtaggagcgagggaaacacccttgtagaccccannaaaataatgaaaataaaaaagggaaaatacacaattntgaagtcatgatntgcacactcgattaaaggtttccatccattgtgataggtgtgtggggtgctaataccttccccgtgagtaaacgactcccgaaccctcattttcacaatatgtagaccttcgacctttcattttggtttttctgacgtttcctcgaataaacgctggtggcgactcatgcatt

SEQ ID NO: 124778 - DNA, 386 bp, Glycine max
  unsure (1)..(386): unsure at all n locations
gtcctaatgacattctagactagaaataactcactntaaactcatatntccagtaaccncaaatttggctttctaaacctcanaatatcacccttttccacctacaacactaccattctcacatttaactctaagttaactctctccattctctctgaccagtttctatctacantttaagcacacatatatatcagaacatcattattgaaccctaaatcaacatgggcacgtttgcttacattaaacatgtcaagcttagcaaaattacaacaatntccttcacaaacaactaccctaaagcaataacctagtagaactacccanttatagctccaagaacccaacacccacagatttcaagtgagaagaagtcacccttacct

SEQ ID NO: 124779 - DNA, 276 bp, Glycine max
cagatcagttccagatcagatcagatcaaactcagattcagataagatagactcatcagatagtagaagagttttcaaaactggtgccatgatttttcaaacctttccaagagtttactttgtatcgtaccaatatgtatcttccagacaaaggtttaaaacttcctgattcacgtcaatgttcaaagtgtacgatcatgttgtatcatacagtgtgacttggataataatggagaccatttccaaacttggatcatcctgttgatgtacaggtgt

SEQ ID NO: 124780 - DNA, 289 bp, Glycine max
  unsure (1)..(289): unsure at all n locations
ggatgccacacattatatccatgacacagatgcaataatgatgatttggatactttatgcataactggtcatgcatgcacctatgtggacactcaagtgtcacattatatgcgcatgtgatgctacggctcaagattcattccctctatattagtcaacccaatggttccaaaatatgctcttgtatccatttgtgcattcatctgagtccattntgggcgtacggagaaatatcacagcgttcacccttctggtgtcacacattctttcaaaactagctatgatcagc

SEQ ID NO: 124781 - DNA, 176 bp, Glycine max
ctgagcaaggacgagcagttatgcaagtgggatcatgccactttcattatcacgagttatcaagcacagcggataatctgcaagttgcaagctcgtttcaggatgtcaagacatctcacatgacatcagctttctgcttatgctccccctgtcttcatgctcttactgcagcatct

SEQ ID NO: 124782 - DNA, 412 bp, Glycine max
  unsure (1)..(412): unsure at all n locations
ctgcagctcaagaatatggcctcatanactacttgtttcgcgatggatattctatatataaacctcccatctctaatggagtgggttaccactactggaaaacccgcatgcaaatctntatagaggcaatagatttatatatttgtgaagccatagaacaaggaccttatngtccctctataatggtcggaagtgcaacaataggaaaacctatagcagattggactgangaagaaagaagattactactatataatttataggccagaaatattattacatctgccctaggaatagatgactactntacgggttcaaattgtaaagtgctaaggatatgtgaatacactacantaacacatgtacgacaacagatgttaaagatctatgataacactttaactcgtgaata

SEQ ID NO: 124783 - DNA, 271 bp, Glycine max
  unsure (1)..(271): unsure at all n locations
aaagtgaaacgggtttatgatcccaacatggttggctcgtggtgcctaacacatgatacttagaatgtagtgtgaagtttcacgcttccccctttattgttcttgttttgtagaggaatacgcaacgatgagcaaacatgaanacaaatggtatgcaattntgcagatcanaaagcttgtngaacgcatacgcatgatgatgccatgactcattgcaaatgtgaggctggaatatgataacggacaaatgcangatatgtccattatgatg

SEQ ID NO: 124784 - DNA, 184 bp, Glycine max
  unsure (1)..(184): unsure at all n locations
agcttgaatgacatacagtgaacgtatgacatntgaattctcaaagcttccgtgtcaattcgacgtcttattatatgggcctaatatacacccagcaatgtatactgttgaattcccagatcttctgtcaaatcgaccttcaatatatgcctgatcgaatcattatagcatggcgatgattgat

SEQ ID NO: 124785 - DNA, 346 bp, Glycine max
  unsure (1)..(346): unsure at all n locations
atatgatgtagnaagaaaatgaatgtgagcctctttcccctctgacagacttgttanaataatggtctaanaatactgttaattaatatttgaatctctttccttattactatatatgtgaagggtagagggtgtcacagtgtaaggctgacccattngacaactntacctatatctgtcatnctcaatttacaagacatagcttacttgaaatcttcanactaaagtgggatattgttggtaaagataatatcatccacataaagaaaaacaatgagaatatcaccattatcatnnttttaacataaagagcatactcattgtgacaatgaggaaacccattatc

SEQ ID NO: 124786 - DNA, 335 bp, Glycine max
tctatccctctagcttctgtgaagctttcaaccttctctagtcttcaaatgatggttaacaaaataattggagaagcttatttctaaaatagaacatgctttatacaacatagctaggataaatcgggatgaattttcttgttgtggcactatattgctaaatgttcacatatgcgccactttcctaacccagtatgtgtccacggtgcttgatccttgcagaccagactcctggtatggttaaccagatgtttaaccggcatgttgtggcgtaatatttttgcgataccctccgactggatgattcctgtgaagcatactactttcgacttttt

SEQ ID NO: 124787 - DNA, 272 bp, Glycine max
  unsure (1)..(272): unsure at all n locations
tatttcaggccacgcttaaatgacactttaagtnaaagatccttggaaaaagactcgtatctattcctcatgattgagatacgagagcaaggaacacctgtcaccacaaagaatacataacagggttgaggatataaactaaaagggacgtcaatcaagcatgttgccattcataaggcaccggccctggaggacggtgggtgtacacttctccggtgaaacactccgaacatcactagagtatagatcgatctttcggtttcgacgttctc

SEQ ID NO: 124788 - DNA, 322 bp, Glycine max
  unsure (1)..(322): unsure at all n locations
atgccccacattatctccatgacataaatgcanaaatgatgatgtggaaacttcatgcaaaactggtcatgcatgcacctatgcggacactcaagcgtcaatattttattgtcatgtgatgctagggctcatgattcatctcctctatattagtcaacccaatgattccaagatatgctctnttatcaatgtgtgcattcatcctagaccatctcgggcgcccggagaaatttcacagcattcacacttcatgtgtagacacatttctcacacatgtggtatgatcaatgaatntctttcatagaagacgtaggaaatcatc

SEQ ID NO: 124789 - DNA, 277 bp, Glycine max
  unsure (1)..(277): unsure at all n locations
gagcgagtcacatacatctttcatgatgatcattcanggaactatgtcagcatgagaatgtatcattgaacataacttatgtaagagaatgaagtactcctatcgtcctataccaacatgatgtatttgttttcgacgtcattacttaccacagttatatttcagtgtgatgaactcgaaacggatgtgagattaatgactttcacatttgttgtccgaagacgcatatgagtaaagatattacactctaaatagtctcatgttgatctatgacgat

SEQ ID NO: 124790 - DNA, 220 bp, Glycine max
actagaacacctgctgtgtcatatccatttttgttatttaataccaaggaaactcactattgcttatcaaaataaataattgtagcacgggatgctacatttgatgttgtaaaactgacatggcatatttgtttccatttgcatatcgctaagtgaatgacttaaaatatctaatatatttgtcacgacctccatacactaacaagtcctgttaaattga

SEQ ID NO: 124791 - DNA, 403 bp, Glycine max
  unsure (1)..(403): unsure at all n locations
ccgcgatctctgagtcacctgcggcatgcagctntgagggtgcgtagccccaccatctttcatagtagagtatctatnatgtgtctaccatcacgatcatcgtctccctttccatcattnggggtaccacctgtgccgccagatcccttccacctttgggcgtgttctttgaaagatccgtcccctcttttgcaaatgttctgtatgtgcatcctatccggaaccatatcanaattgtactgatacttcctaacaaaggcaaccattaggtccttccaagaatggactcgtgaagactccaagttagtgtaccaggtaacagctaccncagtaagactttcttggaaggaatgtnatagcaattccctcatctttgcgtattcncncatcttctgacaataca

SEQ ID NO: 124792 - DNA, 380 bp, Glycine max
  unsure (1)..(380): unsure at all n locations
ctcagcttaaattgataaacattcgaactgctggtatcgataccatattgtgtatcgatacacagcgcannnatttgaattcaaatttaatagctcgtgtaaatcacgtttggccactggtaatcgattatatcctctggtaatcgattaccagagagtaannattgttgaaaaagactntntaacttaaatntcttggccaaaccttttgctacttcaattggaattcccttcctatttaatataccctctctaagattctagagactttcttgattatccatcttgaatatctctgattntctctgtctcgaataaagctctgtganacatgtaatccttttgcattatcaaaacatcagcttgatcctttgtctaca

SEQ ID NO: 124793 - DNA, 542 bp, Glycine max
  unsure (1)..(542): unsure at all n locations
ngcttcatctatgtttctgggttcaatatgataaacacaagctatgttattgcataanatcttgagtctagagtgagtagatactccctttgatatttcaccaataattntcttcaatgagaggtctctttgagttctccattctcttgngaggtctataggaggtgtggcagtgatatctttgctttgttaaagctctttaactntggattcatcttcaactgcaatgcccttatcctganaacctacatcttcatcttccanagagttttcttgaacaatagagttagtttcatcacaccacaacattacagattcttccacacacaaagttctcctattaaacactctatatgctntgctntgcaatgaatgaccaagaaaaatagcctcatcgactctcgcatcanaattgtcaaggggttttttccattgttacaacaaacattacatngaaaacccttaataaatatattggtttcttctttgaaactcataggagtctcttatatagtctacagaatctatttaagatagcaata

SEQ ID NO: 124794 - DNA, 383 bp, Glycine max
  unsure (1)..(383): unsure at all n locations
catcgagaatggtgacaagaagtacctccatattaattaatgttattaatgagaatagtgaccaaaactcacaanacgctgtagaagcaaagcttcatgatgaatcaagaatgattcanagatgtcttgatgataacaaaggtgatgaccaaaagctcataggtcaatcaaagaatgagttcaagaaagatagaatcaagaaagaatgagttcaagatgttcaagatagaatcaagaacacttcaagagtcatggatcaagcattcangaatcaagatcaagaatcaagactcaagattcaagattcaaaatcaagagaagactaatcaagatagtatgatagggttttcataactgagtacacatggattttcttaaacatg

SEQ ID NO: 124795 - DNA, 420 bp, Glycine max
  unsure (1)..(420): unsure at all n locations
tcgcacttgataatggagaacacatgaacagcgctaggcaatgacattcattgtgctccgaacaagggtggagtatggaggattgccttgagggtccgcacttangcaatcatgaaactcagctccaaactcgaaagtggaggacacatgaacaaccctaagcaataacattcatgtggctccgganaagggtgagaatggaggatngccttgagggtcctctcttatgcaatcatggaacacagctccaaactcgaaaatggaggacacatgaatgacaacgcaattcattcatgtggctccggaanaggatcagaatggaggattgccttgagggtccctcagtaggcaatcatgaaactcagctccanactcgaaaatggagaacacatgaacagccctaagcaataacattcatgt

SEQ ID NO: 124796 - DNA, 428 bp, Glycine max
  unsure (1)..(428): unsure at all n locations
attaatgtaaaagtgtntaaaatgcttattgatggatgaagaaaataatatngaattatacttgatattgataattcgataaatatttcnattaatctaattattgctcatgaatcttcctttactgaattatttcaaaatatatatataattacctgataatntcattttagtttattcagtaattctatttaaataaatgtgtccaaaatacttgttataaatatttccgtgataaatatataaaacaaaattattaaataataataatattattctgatagattcaaggagattctggaggattatttataacatagacttttaatttattacacgctaattagatgtaaatgtgtaataatatatatattaatattctaattttttgaaattatagaaaattttaaatatatattttagtaata

SEQ ID NO: 124797 - DNA, 126 bp, Glycine max
  unsure (1)..(126): unsure at all n locations
acctgaggcatgcanngcttgttctgtcccttctcctcacttgcaactgtagctntgtgtttggatgttgcttgttntgaactaaagacttgaggcttgtgacatttaattaaacaatcgatataa

SEQ ID NO: 124798 - DNA, 403 bp, Glycine max
  unsure (1)..(403): unsure at all n locations
aatcaaagagtcattcaatcaagaatcaagaatcaagtgaagaatcaagagaagactcaagatatgcaagaattgaacctcaagataagcatcaagataagtacaaaaagaatttgtacagaaacgattaatagcacaatttgtccaaaagaattttcagagaaaaatctttaccagagttttactctctggaatcgatatcataagaccaaaacagtttataactgtttacaaagtagtaattgttaccatgggcatgaatcaataccaatgttntaaacattgattttaatctcaagagcacaacttgtgacaatatttacaatagtgaatcaatacacaatatttgtatcgataccaatggtngtgaacgtcgattcaacctcacatgaaagtacaactt

SEQ ID NO: 124799 - DNA, 499 bp, Glycine max
  unsure (1)..(499): unsure at all n locations
actcagctnccttgaccaacacctgctaatntgaagcacttgcttataacacatgtgtgatatgtgatatatatgtagaaagaacttgatcataatcggatcagtgatgatatatacaaatcatgaanagaattcttttatcttttattttgtacgttgctcggtcttcattgattgatggaactaaccaaacaagtcctgtacacatgaagaatagttcactgctacatcaagatgatgatatgtttgacgaaaggctatgatgaaggacttgtttgggtgataggttccacacgctgagatatatcttcttcacaacacatggaagtggagttggttttgatggatacaccaattattggctcgtcccttctgtaccattggcatgagatatacagaaaagggganaagtanacctatatgattataacgactggtttactactcaatgttcacaaatcatgtatctagatnctatatttgctcccattattactat

SEQ ID NO: 124800 - DNA, 357 bp, Glycine max
  unsure (1)..(357): unsure at all n locations
acctcccatctntaatggagtgngttaccactactggaaaacccgcatgcaaatctntatagaggcaatagatttaaatatttgggaagccatagaacaaggaccttatgttccctctataatggccggaagtgcaacaataggaaaacctatagcagattggactgangaagaaagaagaatagtacaatataatntaaaggccananatattattacatctgccctangaatagatgaatactttanggtttcaaattgtaaaagtgctaatgatatgtgggatacactacaagtaacacatgaaggcacaacagatgttaaaagatctanngataacacttaactcgtgaatat

SEQ ID NO: 124801 - DNA, 116 bp, Glycine max
  unsure (1)..(116): unsure at all n locations
atgaataaatgtggtgaattcacgcttcccttttgttttgtttgtgagaaacgcaggatgagccacatgaaacaatggttgcatttgcagacanaagttgtgacgctacctgatat

SEQ ID NO: 124802 - DNA, 433 bp, Glycine max
  unsure (1)..(433): unsure at all n locations
agctntgactaacttatctgactcanacaatatgatttgcattatgacaccaacactcattagtcgctgactatcacgaagcaaatgctaagatgatcaatatggatgttatatgatacactagggtgggatacactattctgtgggtgctcagtttcattgaaggagagatatcttgtctattatgacctgataagaactgactgtcttgcgcttccaaatgcaattatataaattatatcgtcataacataagccgnagactatcttatatcactgcatatatagatagtacttgtatgcatgatggctctgagcagataagattgtattctctgaactacatcttatatatgtctcggatgattctacttacgtaccacttactacttatggatatatttcacatactactgaactactaagttgcacct

SEQ ID NO: 124803 - DNA, 241 bp, Glycine max
  unsure (1)..(241): unsure at all n locations
cactgactagatcttaatcgtctaacaaacaagtctacaagcttaacacttagtcatgtctctcaagatatttaatgagttgtgaaagatatgtactctacaagagaataaactaacagctntctacataaagaatttgaatgtaagtgttagatggtagcctatttctataagcttttggatgtgtagggttcatcttaattgcttggctctatatggataaaatcttcactcgagctct

SEQ ID NO: 124804 - DNA, 100 bp, Glycine max
  unsure (1)..(100): unsure at all n locations
aagaagattcacgagaagactcatgatatgtaagaacctcaagaacagcatcaagatacgtatagaaagaatntttctaagaaaggattgaatagaacaa

SEQ ID NO: 124805 - DNA, 376 bp, Glycine max
  unsure (1)..(376): unsure at all n locations
ctaagcttaaggctaagtcttcatgtngcttcctctatctctaacaatagcctcaactcataactacaacataattccatcacccattgtcatcaggattcatatgatcatacctcacataagccatagctgatgtcaactatcatggattctcatcatacataattataacaagtgacacacattgacaaccaactaaaccagttatcactactacatacaccaatagccaactaggccaccccanactcagatgtcaacactaactctactccatggagtttcaacacaatatgaagtggtccttatgatccctaatagataactntntgtgatattttgtatgaagttttatgccattntacatngcatttct

SEQ ID NO: 124806 - DNA, 161 bp, Glycine max
actcccaccttatgaagactatcccgggcaagacgatggggaatgagatactcatcttggccccctgctccacctcatagatctgtccccgcatgaactacctcaaccgaacatagtccgtcataccgcggcctcacccacacccgtaaaagaatcatgtc

SEQ ID NO: 124807 - DNA, 268 bp, Glycine max
  unsure (1)..(268): unsure at all n locations
gatatcacccattgaggcatatgcgtcaagctaatgacgttaaaagagcgcttcctgngaggcaacccagntctaatttctttcatttgttttcatgccattgcataagtggaattngctttatgatcattgaanaaggggtatatcagcttatactaacgtatagaatattggggttgatctaaatgttttgagaaagtggactgaanataacttgaaaaacattntcttganatagtccactcgctaagcgtatatcacgcacttg

SEQ ID NO: 124808 - DNA, 346 bp, Glycine max
  unsure (1)..(346): unsure at all n locations
agctggtngagagacttgagtgtacttgataactgtcattaatatgttctaattctatgtcggatcgcttctataaagacatatatgttctggagaaggtacaattatattcaacaatatcctgctttctgttgtctctcacaagaagaatccctggttgtcttttctctttcacgcacccactcacatcacagtcgctagcagatgataaagacacataattaacaaagaaaaaccctatacaagataaccgattgtccgattgatattctatagtaatagtatgatagaaaacattagataatattagcgcgccaccaggggaacccatgacattttatataac

SEQ ID NO: 124809 - DNA, 461 bp, Glycine max
  unsure (1)..(461): unsure at all n locations
cagaccacttagattagacaactttttttgtagcaagccacttctgtagaaggaatcaactattcaactgtgcaggtagaagagaactaccggcaaatcaattgatagccgagactctcactntgttcatcttctacagtgtgtgttatctacaattggtatataagatatttgattatcacaatattatcgatgcattgtacttacttttgtagctcttgatgtantttattgcattgttctatctacaaaggaggaagagttgttcaactttgtctctcanataanaatcggaacaagaatttattgtcatattctatgtacaagtacanaactataacatngntttacaatcatatatgtctgtgatgtgccagcgtggtactgtcacaatcatatgtctgtcatttattaacagattaagccttcacatctcatattacaagacgatatattcacat

SEQ ID NO: 124810 - DNA, 290 bp, Glycine max
gcaaaacactacatgcctaagggccatagtgcactagcgccgacacaacacggcactattaacctgaatagatttggaaggatttgacttgattaagcttgctgttaggtttaaagaaaagtcagtccgaagtttaaatttgtgggagacacaaacaatatgaactgctggggtttatgagtggacttactaagagccttatgtatttcactgaatcacgagacaagaaaggaagagcgctccttgataactgagagactccccaatacctgataactgaagactatgag

SEQ ID NO: 124811 - DNA, 317 bp, Glycine max
tatcacatggtagttcctgtccacaaatctgatgtagttaacccctacatataacaactacaattcttcaaactcacaggttcaaggatttatacattagatataacatgtaagctgtaaacttacctttaaatttgcttatctgcgtaatagactttatctttgatgtatatgtatatccaagataattattaggcttatataataatatatataagatgtgttgtatgattgcagcgatgggtgaagttaatgtggctggatggctatatgatggtagtattatacttggtaaagatgaatcaactcaactcttt

SEQ ID NO: 124812 - DNA, 369 bp, Glycine max
  unsure (1)..(369): unsure at all n locations
aatcttgcatgactatcactatgaactatcatcanaaggaactatcactatgaactatcatcanaagagacagataacaacatgcccatgctccaagaatcaatggcccaaggaagagacttcttaatggcatcccagtcttattatgccaactccattggtttgtattatgatccaacaagtcatgcattttgctaaacatgaagcatganaacttgtgacgacaattttggtttacctattccatatcctnntatttaaaataaagaatcccaactcanatcattacnatgggagcatccatgatatcaaattttcatanatctaattaaagtcttattaagttagagatggtcaaaatttgagaag

SEQ ID NO: 124813 - DNA, 414 bp, Glycine max
  unsure (1)..(414): unsure at all n locations
gctcggacggcttatgccttatagctcagtcattctgggggtaccgccctgctatgcatgcgattgcgagaaaaaggtcaagaaggaacaatttggagtgtagtacgtgtacgaccctataaagtacattgatatatgattataacttcgtgggtcggtaaggtaaagggtttatcctcagctccagatttagaaaatatcatgataataatcctatcnttttagatatcattgagttaaatcttcaagcgattaataataatgtaatgccttntgattcacattaaaatttagcagaatattttttacatataaattaaaaatatgtttataaaaggatagtaaggtgtgccactttaaaaatataaataatattcttgaacagagttatcaagtgcttcacaaaaaaaaaaa

SEQ ID NO: 124814 - DNA, 422 bp, Glycine max
  unsure (1)..(422): unsure at all n locations
gttctttaacaagctgtgaacaatatacttgttcttatataactgtctntgggctnggcggccacactcaacanagtactttcgacacctactgtacgtnggtttgaccaatgctngtatgggaatgttgcgataatcctttaaaaccttattgatacattctgaaagggtggttgtcatgtggccatatcgatgtccttctctatcataagccatcgtccatttttcctttgaaatgcgatcaatccatgttgctatggctggactcagttgacgaaatctttctaaattttgatcacacatacacttgcaaggagtgtaggctgcatacaacttagtatgaataacaattctaagtatatatgagacgtatattaacgtgaccatcatatacgaaatcttacccaatctcttcaacattt

SEQ ID NO: 124815 - DNA, 251 bp, Glycine max
  unsure (1)..(251): unsure at all n locations
cctgcactctgattattagctttngtgaatacataataagcttggtaaaacatgcactngataatactaatcacagaatcaattgaatcctaaaagatggaantagaatacttctcaccctcatcatatgttggatctcatgaggtctttacattgagttgcctttgtcagtaaccaactcagagtgcatatttacagggcttgacataccaaccatactataggaaagcatacattcagaattacgcatt

SEQ ID NO: 124816 - DNA, 226 bp, Glycine max
ttataacaaattataactgcttcttcaagcgacacattacagttactctaacactaacactccatgattgactacaatatgtgaggccagacaaatattaagaacccttggaagatataacagcttgcaatgagaactgcctagaatgctgcaattgcagcacagagtatggagagactgcaaacaggtgaacatgctaaaatacttgatagttatgtgcttgaaa

SEQ ID NO: 124817 - DNA, 345 bp, Glycine max
  unsure (1)..(345): unsure at all n locations
agcttatannctctcncagatcttcatcatcatgaatgtgaatattcagaatagngantntaacagatagatggtagtagtaagtaagtaacacatgcaaatagcatgtacactntatggaaagaattatgcatgcaacccaactgtatcttaccatcaagagcagtgacgaacccatagattccaagcataacactaacataataaagagacactaccttcttttccttatctaatatctctctaataggctgatgttctgcatctacacacagattttgcagtataagggcacgcatcatatattgaataatagtaaccattaatntctaagaataaagtaac

SEQ ID NO: 124818 - DNA, 256 bp, Glycine max
  unsure (1)..(256): unsure at all n locations
cagcttctgagaaacttctgagaagctcttgagaaacttccttgagaagctagagcttagctacacacaccgcctctcattacttagctcaccttcttgagaagcttncttaagaagattcctaaagaagctagagcttagctacacatacctctctaatagctaagctcacctgcttgagatgagaagctaggaactagctacacacccgctataatagctaagctcacccgcatgacgaaagacatgataatac

SEQ ID NO: 124819 - DNA, 345 bp, Glycine max
accgcacttagcacgcgctcactgagatcgtcatgaggtcttcggttgttacgaaacacgcgcgggcgcacgtgtgggtggaaaaactggcatgggaggttgaaaaaagaaaaatgtttttcatgtccaaaaatgtaaagggctaattttaaaggggtgataaattcactttcctattaaactttactttctaagttatcctatgcatttttaatttcaagacactgattattaacctatataaggataaaagaaatcactcgtttctgttggcccctgtgctctcagccacaccgtgaagtcctttgtatcttcagttacccagcatctctggtaaacttcaca

SEQ ID NO: 124820 - DNA, 305 bp, Glycine max
  unsure (1)..(305): unsure at all n locations
gaacgtanttttcccatgaccatgcacctagtatgaaaatagttctccctctgcagtttatctctatccttacacacactccccattaacctcctaaccatcaaaagatcaccttccaggggctgtacatcacattcatattcactctcactacaagaactagaagagctagaagaaggtgcactagtgatatcctcattatccaacacaaccatagtctctttgttaggacatagtgagacaatatgaccctttcccaaacacttaanacaattaatagaactcgcctttgaagaagtgggagt

SEQ ID NO: 124821 - DNA, 395 bp, Glycine max
  unsure (1)..(395): unsure at all n locations
taccaagaaatgctactcttanaacagaaatggcatacaacctcctccaataaacacaaacatcaatgtanatntagagcaaactcatgcacatacttccttacgaacattcactcgcacaagatattcttctaactaagaaaaaatgcacccatgcacaatcaaggcaccttcgttacctagatcacttatatgtacttccaaggcgtatttgctacctacatcacatgcatttccttngctannattacatacatgcatactcanagcactntggctatcaaaaatngcatacgtgcaccattctggatttctaatacctatacatacacaaacttcatgatgaatcttgctacctacacaataaggtgctacatttcatgctntattcaagt

SEQ ID NO: 124822 - DNA, 459 bp, Glycine max
  unsure (1)..(459): unsure at all n locations
gcggacctctctttggtcttgctcaatttatgtgatgatgtgcctcgaatggcacttgangagtttccttcccttntctnttatatgttgtctcttttgttgcatttcattacatgctcacattgaggacaatgtgcatttcaagtgtgaggggagggtattagaaaatctgcnttctatttttttctactttntgtattctgtatcagttctgtgtctggttgtgtttagctgtactttgttctgtcaattcttttgtatctgtatgatgtttgggttatgttgatgttttctgtttttctggtctggtggattcgattagcttcgctgtttatagattaatcgctttacatccaaccaaaaataaataatacagattacactgtgttgctatattttgttgattagacttctcatgtttctagatctactgatcttgtaaatgatatttagtgaagt

SEQ ID NO: 124823 - DNA, 354 bp, Glycine max
  unsure (1)..(354): unsure at all n locations
ctgacttatctccctatctgctcgataatgcaatggtagntataatctcaacacagatatatcaacctctatttcccagaggatacaaactcaatgtgacatgtgcttatcatggtggatgtctatggcatctcattgagcattgtatgaccctgatacataaggtgcaaatgttgattgatgcaagctaggtaagattccaggaggataatagcatgtgagntctgatgttgtcaagcaaaactctgtatgaatctcggagcaagttgaaggggtgtgttagatgtctctaatgactcattacgatcttcatggttatgccactactgtagacaacaatcacaatgctaataa

SEQ ID NO: 124824 - DNA, 368 bp, Glycine max
  unsure (1)..(368): unsure at all n locations
tctcagctanaatagatcacataccttagcttccacaacaattttggtatattactaccgagccttcccctacagtaccaattcctttcgtgttgaaatgataatgatgcgatgtcacacaatgtaatgtgtatgatcaatttctgtgttggtcgataagtactatcaccgtggagacaccaatgagtataacttattcnttgactatgcccgtctctgaccgatctgtttacaacggaaatggacatgccccgcaaacacattgttgtgctgtacggaaaaatctagaattaattctccatgcctcatactgaattataacagtgcctaaggatccctttgatacaatcaacgtaacatgtttcgca

SEQ ID NO: 124825 - DNA, 517 bp, Glycine max
  unsure (1)..(517): unsure at all n locations
agcttgactngagtcatcaagagaatatatatacgtgaccatggcatgaatntcaacaattatcaatcatctgtgaatcatctatctttcaatcgttttcaacatcatctctcatccatctgtcaatatctttcaattcatttctctttatctttcagaaagtttctgatcaaacactttcttttccaagagaagttctttgttcanaaacttgtgctattcatctttatcattctcttctccctttgccaaaagaacgaaggacanaccgcttggattactttgtgtctcccttcttcctttccaagagaattcaaggacccntgcctgagaattctttgattcttcccttacncttaagcagaagattgagaagggactaaccgctaagatatcttttgtttccccattataaagattcanaggactacaccgcctgagaatcctttgtcttaacacattggangggtcatcattngtggtacaagtagagggtcatctacttggattggtgtct

SEQ ID NO: 124826 - DNA, 263 bp, Glycine max
  unsure (1)..(263): unsure at all n locations
gtgttcttcaactctcctcttgaatcttgaagtgttcttcaactntcctcttgaatcttgaagtgttcttgattctatcttaaacatcttgaactcattctttgattgacctttgagctttttgtcatcacctctttcatcatctttggtatcatcaaaacatctttgaatcaatcttgattcatcatgaagctntgcttctacaccagctnttctntgaaaaaattcactggatcataaccagtttttgaaaaaaatgtgta

SEQ ID NO: 124827 - DNA, 379 bp, Glycine max
  unsure (1)..(379): unsure at all n locations
ctgatattggctgagtaatgacattgctgggctggtggaaagnttggccatgtangaatgacagtgtcaacatgggttcctttctcattctcatcctcttcantttgccccagtttctcattcatcacagcaggatgatcaanattgcctcttttcagacccgcttcgatccttttgcatgcgaagaccacatccgcaaagcttgaaggtgcataccccaccatatttcatagtaaacactggaatatgctactattatgggacatctcttcttcgtcatggaatgccacttgagctgcaggctctccactttggcgtatcttgaagatcggccctcttgcctgtctgagtgctctatcgagcatataaatgtctgtct

SEQ ID NO: 124828 - DNA, 213 bp, Glycine max
  unsure (1)..(213): unsure at all n locations
cgcttataagaaagtcgactacatgtacaaaatctgggtgatcaggctcatcccattgctctatgtttgtgcatccacccgggtattcaacggaattcatatactaaaaacaccagctccctatacattgatcatagaatggtattagaggcctcnngacacataagccatctatgctctaaaatcaatggttcctctcaagtcatcttaact

SEQ ID NO: 124829 - DNA, 417 bp, Glycine max
  unsure (1)..(417): unsure at all n locations
ctgcagctttctccccatttctataataggggagaaggaagtgaaagggtctttctctangcactnttctctctntcgaatgtgcttagaaaaattgttctcgtgaagaaaatccaagccgatgcgcttccgtaacgtttccgtaacgttttcgtgagtgattacgcgaaggtgttcgaccgttcttcgacgttcttcattcgttcttcatcgttcttcagtcttcaacgggtaagtacctcaaaccaagcttntcaattcattctatgtactcgtggtggccacacttggtacatgtattttattctcgttcatatatattatacccgctttgacgtgctcaaccatttattaagtatttctcgcttaacagaaaaaaataaattcaccgcacgttgattgatatccgctactttg

SEQ ID NO: 124830 - DNA, 490 bp, Glycine max
  unsure (1)..(490): unsure at all n locations
cacatgtgtgactntgtggtcggtcggcgatggtgcacaacaatgttttcacatacactaagcgcgcatatacccaccatccacctgtgcccacctccaactgagctcacgtactcccacgttgcccatatcctctgttctctcaacaccgggttcacatcaatgcctccaagcttccacaacatccaagcagatcaacattcaaacagcacaaactaccacagtcaagataacagagcttaggcagaagactctgcctaacaccaacccaaatcacagcttttctcatctaaagaccccacgaagaattccttcgttccaattcgtgaaccgttggatcgactttatgaatgtactagaagtctctagtacttaagcctacatngtgaccgttgagatctactagcanacatccagaactcattctgtactactctgttccaaccaacacacacatcattttctgcacaagccaaatctgntgccctat

SEQ ID NO: 124831 - DNA, 333 bp, Glycine max
  unsure (1)..(333): unsure at all n locations
ctaatatataaagttactactcataacgaaggtatgggccttgattaggctcatctaatcttcctaattaaactaattacacatagcacagtccaaattcacaacccaattattcatcaagtgcagaggttctgacttccaagcctaatttgaccctcagaatggtagaatcggaccaatattatttgtgacaaatatgaatattcttctcttagctctccacggagtactcatatgctccatttggaagtttgtagtggcctatatgccctacacaangcagatatgcctagtcagcacaaaaatcctaatataagccacaattatcaattg

SEQ ID NO: 124832 - DNA, 357 bp, Glycine max
  unsure (1)..(357): unsure at all n locations
attaatgtctctctccccacanaggatatgtgtctatgtttccaagcggctgagtttctcttacattcacagattatgggatcccaatactccgtacgtctgactggtagccccaatggtgatacccatataaatgaatggcacggacaatgtcctacagtttaggtattcagctgctgatctcgtccattgagcagaattaccaatggccccataactactcgttgcanagtttatctttaatccggatgctaagtcaanactcctcaacaatgacttgattgtcttacattcttcagagtgcatcaccangaagatggtgcatccgcatactggaggatgttaactggttcactg

SEQ ID NO: 124833 - DNA, 418 bp, Glycine max
  unsure (1)..(418): unsure at all n locations
tactaagctgactaatcagttcaatgaaaaggttatgtaagtcaagtaatctttattctantaaanattaatgagtcaagttgagcttaaccgaacctcggttaactngactcactttcagtctagtcatcactatcagaaggtattcttgattatttgtcaattttcatccggtggtggaggtgcacaagtttatatattctattatttttacctactcatgtgtctgcaccttaaaatgctttagatataaatgactaatgataacgcaaacgaggagtatgattgacgttgatccccctctataaataaccaatatattacatcttaatagttaaaataagactgcttactcaacctaggctgacttaagacaactcatactttatcatatatgaaatgatcaaagtacatattc

SEQ ID NO: 124834 - DNA, 274 bp, Glycine max
  unsure (1)..(274): unsure at all n locations
gacctcttctcctatggataaaatggatatggctgacatctgcattgtgcttccactggcctccatcaataattggcaccttcaccaatgtgatgtgagcaatgtttatcttcatggagaactgtcagaggaagtatacatggttattccccctgacactcatgattacaagccttatcaatgtcgcaagttacttaaatccctatacgaccttaagcaagctagtctactcgataagattgaggttctaactntactgctctcatcgtgtatg

SEQ ID NO: 124835 - DNA, 440 bp, Glycine max
  unsure (1)..(440): unsure at all n locations
atgttngcagaccaaatattctctttccaaatatgataccaacttctcttattagaatgagaatgggcagaaccaacggttgtgtttatgcagcanatagaaacacccttgaataagtatttggcaaacaagtcttganaaccaattaagttgtagtttctcaaggagaatgatctcaccaaaaagctttcagaaccttntctttgtggaccanacacaagctatatgaatatgcactttcatacataagttaaaaataccatattcanatacaagctaataagaaatatataacaatgagagaagcatcacatttatcangaaatgaactatattctgagcacccaaccctcatcaaacaagtaaatattcaagagatgttaaagttgagagtacctcatgagtattgacatatttgtacattatgacagtgactatat

SEQ ID NO: 124836 - DNA, 429 bp, Glycine max
  unsure (1)..(429): unsure at all n locations
tgcttaacacttggcaaagtaagcacgacttacctcaatcaannatagaccctgtgagcacgaatgagcaccctaaacggactgcanagtgaaatgtnacctagataggtccttgcagaagaaacacacaaagagtctntatagtgagcataagttcgtacctaggtatttagaagaaagactcatgaaacatacctaggtagggtggcaagctgtcacggtctcgagtgcgatgaagaagaagaagcttanacagataagaagagagcttatatggagatcgaagaagagagcacgagcantatanggctcgcgcctgatatatttttaaatgtaagtccaacatttggtttcaataanaaataacgatgtaacaaatgatgtagagtaacatcggttttggatgaaaccatgtactatatacgtaca

SEQ ID NO: 124837 - DNA, 250 bp, Glycine max
  unsure (1)..(250): unsure at all n locations
gatcttctcgaaatatggtctgcagcttcanaagacaattntacccaatctgaccgttgggatctttgagaatatgtctggagtgtgcgccgaagttncgtttccgagagcatttctcattngagcgttttcagcctttgctttcgtgtagcttaggaaaaacaccatttcttcttctttctttctttcaaaaccatntataatgtcccaagcactttcttcatcatccacagccaccattagccaccac

SEQ ID NO: 124838 - DNA, 434 bp, Glycine max
  unsure (1)..(434): unsure at all n locations
caagcttcaccttctggtcctcctcatagttgttgcatgagaaaactatgctctatttcatctcccactccaagtaggcctccggatcattctttcctttanatgaaggaatgttgagtttaataccatcaattcggttntgtctaagaacgccatcattccctcttctcctcctttcttcttcattatgatctctattctccattngacccaacctctcatggagcgcatcatcttgttgtttcattaacctctccanatgtngcatcaaagcttgcatttggaattgcgaaagccccactccatcattaggattagtacctgacatctcanacaaacaaatcanacgtaacaagacaattatagttgctgtttgaatacctcacccacttcagtgtatcacacaattatggcttttctctaatgaaacactc

SEQ ID NO: 124839 - DNA, 554 bp, Glycine max
  unsure (1)..(554): unsure at all n locations
gacttctatgatggtgaacttcttcttgactcatcttctacttgaagtggcatctccattcatctntctccttctccattccactgcaatcagacctcaagaagcanaggaatccattgatgaagaagatccaaggcctacaagctccaatggagctacatcatgtggtatcaagagcatcttcatctaggtgacgttctnnttgcttctctatctttttgtcggtcaattcacattaattcctttntcttcatcttattctacatgtatatcctccattgtcttgttntntggttctctctagagtagattcacanaaataaatngattaaatcttagatctacacttgttcttgcatttctatggttanaatttatagatctactctcgaatcatgtnttgtgttgatntaggttctatcattttcagtcataatcttattntctgacccttagatctaatntcttccaaatattgattataaaaaacacaaaatctagngaaatcactaatcatgtgtctatagcatgttagcatataatgcacatatgtc

SEQ ID NO: 124840 - DNA, 391 bp, Glycine max
  unsure (1)..(391): unsure at all n locations
gagatgcagcggaagacanaggagaagaggtgagaagaggcgccatccactatggaataagccatggaagaaggagcttcaccaccaagatgagccttggataagaagcttggaaggatgcttcaatggaggacaagaaagagggagagaaagagagaggggggagcacgaaactgaaggaataaaagagggagagaagtggaactctgaagtatgtctcacaagactctcattcatcacaagtacaacaagtgttacacatgcttctatctatagactatgtagcttcattgagaagctntcttgagaaaacttncttgagaagctctttgagaataattcttgagaagctagagcttagctacacacactcctctcattactaagctca

SEQ ID NO: 124841 - DNA, 394 bp, Glycine max
  unsure (1)..(394): unsure at all n locations
ttaaaaaaaatttattctcttaatgtgaacgtctcacttaatctgaatctgcaaaatatattagatggatttacattaaaagaaagacggatagattgataccggtaagtaagcagtatgttttattggccgaaatatataagagcccgagtgttatggtggcacaactgctaatatatacatgtatgctgctatgtnacggtcaagtcacacaccgtattttataatacaacacgtgccgactacagtactaattaccacattttcttcttaatttgacacatcgaaagacaatctttgtggatgcaaatgcgagccacattaatatcaaacgacatgttacagtagtatgttgtccactgtcatctaatattggctactgtaatatgttcaa

SEQ ID NO: 124842 - DNA, 92 bp, Glycine max
taatctttgtctgaatcaaagtattgatagtaacgttggaattggaatgcacatattcatgacccatcaggagttggacactatggaggaac

SEQ ID NO: 124843 - DNA, 296 bp, Glycine max
tttaaactgatggtatacatctacaaagctctcttgcaataaatgcttgtgggacatggaaactgctatgatttctaccagtttgtattggacaaaacctttcaatattatgtgagacatgtgtctgttagatgaaaactttgacacacttcttgtggatgaattaagctgctctgatgatatgtagcattattatatcttaatctccatggttatgtaggcttttgaagcagcatgactatgattggtattcatttttgaacatacactcatctcgaagtattaactgacctgga

SEQ ID NO: 124844 - DNA, 328 bp, Glycine max
  unsure (1)..(328): unsure at all n locations
tttaacataatggacaacacatgacgtatgtgaaaacataggcgaatcaataatttttatttagaacacaagattcatacagtaaccttttttaataaaactgcttccccacataaatattgaacanactatatatatgggttctttcaattactatcaaacaagggtaagaaacttagacatgaatacagaccaacttcagaaagttgattgtgggcttaagtccgcgtnagcaagacatccgactcatctaattatagccatcaaaatcacagatacggaggcttattanagtacaagttttctcttttctcatctcatctttttt

SEQ ID NO: 124845 - DNA, 356 bp, Glycine max
  unsure (1)..(356): unsure at all n locations
cgcatctctaagcacctgcggctgcagctttatgaatctgaattagacacacttgattttgagtnttggaaaaaggcatgacatctttcatgtaccaatttcaggacgtgtcattgaggacatgagacacgaattgatcttccatgatgctgcactggttactacctgcgattaccggacctcttcaatcatgcttagaaccgatcttatattaatgtggtttagtccatatctctaccttcccagtctgagagacttgtatatggtccttcatactggcgtacttgatggccactagtagaatcgatgataagcttggataaatctcattgctatcaaccttgactcttttttgc

SEQ ID NO: 124846 - DNA, 381 bp, Glycine max
cctagctgaacaagctgcaaaactcgtcgcttgaaaaaattttgcttgtgagaacaactgcgtttgcaaaagtctttgcgagtgacaagtatttaatgagcttgatctaaataaaaaatcatcatatcaaattgatgattaaatcaaaatctgaattgatataaaccaatcattaaaggacatagtgttcattgacaggatatgattggtttatactggttttttggaaaaattaatatataacccaaatggacaacataacgggctacccgcgctgagaaataaagctcctatcaaaaaccatataaatgctaacaatgcacaggcctgttatctagaactatctgtatacttatacaaaatgtatctcaaatacttgtc

SEQ ID NO: 124847 - DNA, 434 bp, Glycine max
  unsure (1)..(434): unsure at all n locations
tctctgagtcacctgcngcatgcaagcttctanggaggtgagcttagatatgagaggtgtgtgtgtatctaatctctagctnctcaaggaagtnttctcacagaatcttctcaaggaagatctctcaagaaagcttctcaaggaagctacctagtctataaatagaagcatgtgtaacacttgttgtaactctgatgaatgagagtcttgtgagacatctttcatagttccacttctctccctcctttattccttcaattgcgagctcgcacctctctctgtctcttcctcattctgttcctccattgaagcatgcttccaagcttcttatccaaggctcatctaggtggagaagctccttcttccatggcttataccctagtggatggcgcctcctcttccctcttctcctttgtcttccgctgcatctccat

SEQ ID NO: 124848 - DNA, 326 bp, Glycine max
  unsure (1)..(326): unsure at all n locations
tcttcgcgaaatttctcacggaaacgttactgaaacacttctgaagcgcctcggcttagaatttcttcacggaaacaatntgtccaagcacattcgaaagagagagatgtgcttaaggggctgaacccttctccttctcacnttctccgctatttatagcaaaatatgggagatgcttgtcgcccatctcgcccatgcgagcatggttgcttccttcagaagcaacagccttctggaggaatcttctcgaggggccaagtgggcctggttgctattgctctccattattactagtacaccctctgccttttttgtgatgtcttttt

SEQ ID NO: 124849 - DNA, 384 bp, Glycine max
  unsure (1)..(384): unsure at all n locations
attacctatacttaacacgaaatacttataacactacacaataaccatagattatgagagtgtgatacaatctatacaatatctatacacaaaagttagtcattttcaccgactaacaactctcccatatntacagttctgcttgtgctcaagcaataagagaacaactcacttgccttaaggatatggatcaggagattacaagtgataaacaaagtactgttgctaataaagaatggaggaaatgccctcatacttgacttacatagatgcagtatcaagagataatgaatgtacctgacaatagatgagtaggatagacaattcattgaagtgttaaaccagctacgctctgttactaaccagtgttagcttcatatacac

SEQ ID NO: 124850 - DNA, 317 bp, Glycine max
  unsure (1)..(317): unsure at all n locations
tttgtacatgcatacactacttatgaattatacaataccgacgacctatcactcatgtgttanacacattcaacacattgtgctacgattaaacacttggttctanatatgaaacctacactgtcactataacactgcgcagtaacacatttatcaagatanacactagtcgggttatagtacactccatagctcacagcacacgtgatgttacatcaagtgttatcacacacttgatgcacactagaactcatgatcacagattcacatctgataatatcacangtctacatcacatgtntacatgtatatcacaa

SEQ ID NO: 124851 - DNA, 284 bp, Glycine max
  unsure (1)..(284): unsure at all n locations
acatcaagtactcattagaaatnccaaacataggattttagtcctccattacaaaggagcagctctcacaaataggacaagggttntagagaaaataccagattacaaagcagtgaggatgtctccttcacctctaagaacctagaatataactcgtaaacctagaatctactntaaagttaggacctttgcttccatgctcagcttntcctctgttctctgcacacatttcgcaatcaattctgacctctntcacgtcgacacactctttttttnttcatgtg

SEQ ID NO: 124852 - DNA, 373 bp, Glycine max
  unsure (1)..(373): unsure at all n locations
tagtaactcagctggccatatattataattctgcagctgcacctggtactggtgcaagagtctatggtctatgttcttctgctgatcaccatacaaatctctgttcttctttgcagcaatctggagtcaatgagcaacctgaagcctatgttgcatacatntataatagaccccctcaacaacanaaccaacaacatcagaataattatgatctttcaagaacagacacaatccaggttagaggaatcatccaaatctgagatgggcaaatccttcacaacaacaacaacagcaacaacagcctggtcctcctttcagaatgttgttggccaagcaggccatatgttccttcttcaatgcagcagcaacaaca

SEQ ID NO: 124853 - DNA, 354 bp, Glycine max
  unsure (1)..(354): unsure at all n locations
cgcgatcttaagcacgagctgcagctgatcaaacatgggaacattgtgacctatcctttagtttctgagagactggattattgcctcgagtaaagatagagcatcattttggtctgacttcattcccaaaaataattcagtctccaagctgtctaatggaaaaattagagcgaagtatgacagtgaactgctggattatatcgacagatctgcctgtgattattatattatcaacatacaccacatgattacaatatgagaggtatctttgaagananacgaggtggatcacacttgctcacaganaagccaagatgctagagtgtagactctactctatcgaaccactgtctt

SEQ ID NO: 124854 - DNA, 394 bp, Glycine max
  unsure (1)..(394): unsure at all n locations
cgctgagcgagaattcacttactcgcactatgtgcgataatggcgctaagcgcaacgtaagagcttgaagagtgacatacacagaggctaagaacagaggaaagaagccaagtnttgaccttntaggaagatctgtgagtctttgagtgagtgcgagactctcagaggtggaggagaacatcccactcctttgtaagcaagcanattctcttaattccttttcttcattgtaaaaggagctttcttgctatggaaggctaaatcctcaattggggattcttgctgagtgatcgacgtacactctgtccctatcttattaacgctggtctatgcggtcattatctctatcagaacttattattgctgcttgtggcttgatacccacatgtgtgta

SEQ ID NO: 124855 - DNA, 208 bp, Glycine max
  unsure (1)..(208): unsure at all n locations
ctgggatctctatcanacactatgctagatgacataccanntgtatctaaaatctcactaatatatagggaggtcaacttctctaaggaaaactngatattgatggggatgaagtgaacagatttggccaatctgtcaacaataacccagatagaatctaaacctctaggggtcctagttagtcccacaatgagatccatagagatat

SEQ ID NO: 124856 - DNA, 145 bp, Glycine max
  unsure (1)..(145): unsure at all n locations
ctaactattcaacaaacataaaaccctaaaatctaagctctagtaagcttctacctagagtaagacttaaanagagaaaagaatcaaggcttacttggatgtgatgattgtgctccacttagcccagatagctgtcgcttacgtc

SEQ ID NO: 124857 - DNA, 353 bp, Glycine max
gtcctaactactgcataaaggtggtcaagcccctgagtccccagtatttaaagctcagaagaaaacctcgccttgttcctacatgaccagtaaggctcaaacttgaacctatacctcattctctcagagctaataatcacctaccattaacacttgaattctatttatcgccactatataatcccatcttgtattataccatagagttgaattgaactgctatcataggatactgataatatttaaagacctcatatcgctaaaagactaccttcaaaatgttttttttcaactcactttatagctacatacttttaggctccctacaatggaactcatgttcccatccactt

SEQ ID NO: 124858 - DNA, 251 bp, Glycine max
  unsure (1)..(251): unsure at all n locations
ctcgctaggagcattactgatcctaaatgttctccaagtttaaatgatctctnaatnaattctagacatctctctgtacggtattataagctatcgagaaantnnatgagttagatagaagctcatgataagctcttctaagagattcagggtccgcaaaatttatctcatcttcctgatctgattcaaactcttcagaagctgcatctaccattaggcatatggtggcttcttcatcatcttcattagat

SEQ ID NO: 124859 - DNA, 414 bp, Glycine max
  unsure (1)..(414): unsure at all n locations
gtgagagctgaatcattgtanttcattcaaatatttgtgtttgagaaagctataagtgacttagtgttaaacaatattcgagtgttcttaaactcacganggagttaagggttgtcangactgacctatagaatacttgttataacctagagtgacangtcaaaataccttgttattaatcagttgattagaggaaccttttacctttgtaaggagattagacctagttaagttgatgaataatatgaacaagtgttcacttcctcttgtactaactatatttcttgacatattctatacactcgatcacaagatgatttganaacctgtgtgaattttatcaaatgacatatttaaacgttataactattatgtgtgggagctaaatgattactctctaattgtgaacactct

SEQ ID NO: 124860 - DNA, 314 bp, Glycine max
  unsure (1)..(314): unsure at all n locations
atgtatgcataatgacactcgtaagctgtatagttaaccacaagtagtgttacagactccagacacttacatctaacttctaaggttctggaatatgttgtacagacttcagacacttacaaatctgacaaatgtctctcgtgctatatgtggaacctatgtagtcagataccttacgaatcaggtcagatatacaaaatcaacaaataaggtaactgtccacattctctcagaacttgntctggatgtctaccaccccttcctttatcttttaattctaatagcaggacctactgaatcatatcagacataac

SEQ ID NO: 124861 - DNA, 384 bp, Glycine max
  unsure (1)..(384): unsure at all n locations
ttatttgaataaaacctaatattaacatttacagaataaaaaaattaaataacaagccccggatcagggttcacccaaattctaattgctgtaaaattggcagctgaactgccaatcctgtanagatagaggaaagctgtgccacaacagaatcaacaatttgagtccacaacttaacattcctcttctaaggctcatagcgatattattggagttatctactcttcaaatactgagaatcttgaacactatgttctgaaaagattccacattatttaatgatacgagattcgatggtataatcttctgaattttatgaaactttttatttatataatacttaataatatntctaaggaatgcatgtgtcatataaatattaat

SEQ ID NO: 124862 - DNA, 393 bp, Glycine max
  unsure (1)..(393): unsure at all n locations
gatctctgagtcacctgcngcatgcaagcttgagccaaatcccaantaccatataccttgacccattgtgagaatgtcaatcctttcccttagaagagaataanaagagaacatctccactcgaagagtgtgagagaggacaaaaagaaaggatattcccgatcaaatgagcatgaggaaacaaatatatataattcctaatcgaagagtgggagacagcaaataagaataatattcctgatcaaagatcggaagaaaacagaagattatacataatggtctgtggaccacactacatcttgacaaatatagagttgtcaccatgtaaacaagataagagaggaaaccacgacctgtagtggcctctccctttgattgccaaccaaatatgtg

SEQ ID NO: 124863 - DNA, 124 bp, Glycine max
  unsure (1)..(124): unsure at all n locations
ctaagctatgctganatatnacaatagaacctctcaacctcagcagtattatcgacctcagtcatagcaatatgaccctctccagcacagatacaaccctggatggaggaatcaccctaacctc

SEQ ID NO: 124864 - DNA, 158 bp, Glycine max
  unsure (1)..(158): unsure at all n locations
tacaatgctcaatggagtgccccatggccnctctatgataagcacatgttgcgttctagtcgtattctctgaaatatggatgttgaggaaccttggctcatgttatggcaaccattgagatatcgagtatatatgcgatcaattcagcatacgacact

SEQ ID NO: 124865 - DNA, 132 bp, Glycine max
ctgccttcttcttggtctaagacctgacactgtctggttccattctaatctcgagatggatgagtgttgggtactaagtgcacctactcaaatatcaaataaatgtcattttcttttttgaaaccccaacat

SEQ ID NO: 124866 - DNA, 319 bp, Glycine max
  unsure (1)..(319): unsure at all n locations
ctccccacttgtgggctttacattcacccnagatatngttacttttgaatcctatctcttggcgttggcaccttctcattgactatnttcttattagaggcatgaagtcataagcttttaaatcttttgtaagcttcaattgttttccactcttgaaggttccaaatagcacacttcttggtattgatcatctgaaacaaagctagctctttatctaagagttcacagcatacatgctgagtgactcttctgagaaccactgcttatcttgaagcctttcaagttcttatacctctgatagctgttaaatcttcacaag

SEQ ID NO: 124867 - DNA, 223 bp, Glycine max
  unsure (1)..(223): unsure at all n locations
tgatgaaattcatgaatactgctctgcaattacaatctggaacctattctggcccattcacttctaaactctcagcaagtttcgatgctcctcgttaagagccgangcaatctcgctcaagctcagaatgattctacctacagcactgagtcgaattgagtgactacaatggtgtcaatcgctacacaaactctggctgtggtggcagctggaatttctcttg

SEQ ID NO: 124868 - DNA, 332 bp, Glycine max
  unsure (1)..(332): unsure at all n locations
agtcgaagagaagttcaagtccatagccatcanagtttganaagagtatgatgaactaagggacgtcaatatggccaccgctgaagccttggaatgagaaaccaagaaggcccgaatggaagaacacgaccaanacaagttntgaggggctttatagggcagcaatagtgagctcaaactctgaagaggtgaaaggaatcatcatgggtcaaaggcatgatctggaaggacgagctaaaggctngccttatgtcgaaaagaaatttgtccaacagttaaagtgagactgaagggaatatgtgggccatcatcgatgagtgcaaagagaagct

SEQ ID NO: 124869 - DNA, 299 bp, Glycine max
  unsure (1)..(299): unsure at all n locations
gtccttgctccagctgctctcgaacacatgagtttgccttggttctttgttgagtgtttnatggtaccccgaagtatgatataatcgatgtgattggttagctgtgttgatatatgttgactgatgattgaatatgactcatgatgaattctggtgtgatgtgagtatgcgagtttgtgacaagtgaatttgaatttaattttgctaaccagtcggaatccgaccaattctcacgtgatctctcatttgccgagctctaactttgccagctacctggattaaaaacatttggcctctac

SEQ ID NO: 124870 - DNA, 157 bp, Glycine max
  unsure (1)..(157): unsure at all n locations
gatctctgagtcacctgcggcatgcagctgtcacaagattacgtgtagatcttatagttgaccatatcagagatatccatagaagccattgcatcactcacccaatactacgaccagccttngagatgcttcacgttctgagatatccagctagtac

SEQ ID NO: 124871 - DNA, 340 bp, Glycine max
  unsure (1)..(340): unsure at all n locations
tgctaccttcaanacaaanacggcatgcaacttcctccaataaacacanacatcaatgttaatntaaagcaaactcatgcacatgtnttcttacgaacatacattcacacaagctattctgcttactaanaattgcactcatgcacaatcaagacgtantttctacctaaatcacatgcatttcctttgttaaattacatacatgcatactcanagtatgttggctaccgaaaaatgcacacatgcacattcgggtatgtctaatacctatacatacacanatntcgtgaggaatctnggctacccacacaataaggggctacatttcatgcttattcaa

SEQ ID NO: 124872 - DNA, 143 bp, Glycine max
  unsure (1)..(143): unsure at all n locations
accgcgatctctgagtcacctgcggcatgcaagcttctntnntgtagtgtgaacccanatgatntctcaatagatatattatatatatatatatatatatatatatatatatatatatacccgagagcgcaaacacttatctc

SEQ ID NO: 124873 - DNA, 414 bp, Glycine max
  unsure (1)..(414): unsure at all n locations
atcctctcattgcatctattatttgatgccagtaccttttgtgtgtctntcattntctggaacactatnttcttntctggtgtggacaattgngataaaataagttctttntatcaagcattcatcaanntgcagtatttcacatgcactttanactctangaaatattngtactggtgacgacgcagaaacaggtagaaagaagaatgtataattatctttcaattcttgtgaaagcatgttcgccgtgatttttatattatgtggtcaacgtaggaatgtgtgtatctacgagactaattatctatatanttctgtcattattgacgttgtagaacaatattggtatcaatgaatcatattgacaatgaagaccaatattattttttgggggtcctttctctctcttcttct

SEQ ID NO: 124874 - DNA, 570 bp, Glycine max
  unsure (1)..(570): unsure at all n locations
gcgatctctaagtcacctgcggcatgcaagctnggtctctacttccaggntagattggatcgtggtactggtcacttctccatatggttccttttttttaattttaacanatatattcaaggggaaatgaaataccacaaaatgcactgtgttgttcaagttttattattaanacagagtgatccangtatcgagctcagggaacttgcttattagacagatgtttattcagaagtaagggcattgttggaacaaacattgataattgatggttaaaaacagaaataaactaattttattggtaaaacagtaaatgcaagtaagttaaagttgacagcaataggtaaaagtgttgggtccttcttacanacaagttgatgcatatgaggatatntctataattaaccatgttcttgtgtctatgctgagcctatagactcaccttgatccttgaagttanactaattaaccaaagtgcgtcgagatccttataaactngctaactaacacatatattcactatcgaaacaaaccacatcatcgctgatgagcattatctgcttatagtct

SEQ ID NO: 124875 - DNA, 308 bp, Glycine max
  unsure (1)..(308): unsure at all n locations
cttatctaccagatcataaaagtgtacaacgaacctaacgttctaatatattggccatcaaatctatcatgtgttgacagtaattgattagcccgtgaaatttctcaggggctgaacacacttcngcgatagcctatactttggctagtagccgcnggaagtcttgacttccattcaaggtcaaggcgaacctatccatncacatggtcgcttcttgatgcaatgcatcaatcaccctccctcttgcttccttttcnngtgtacgctgtgcaaatactctactatcttntgttcatgggtcaacgact

SEQ ID NO: 124876 - DNA, 408 bp, Glycine max
  unsure (1)..(408): unsure at all n locations
ctgcagctctacgaactcctagctataattaagatgtgtacactctgtgtactctgatgaatgagagtcttatgagacataactcacagttcaactctctctcccttttttcttccttcaatntcgngttcccncctctctctttctctccctctatcttttcctccattgaagcctcctctccaagcttcttatccaacgctcatcntggtggtgaagctccttcctccatggcttattccctagtggatggaccttctctcacctctactcctttgtcatacgctgcatctccatggtagaaaaccaccattaaaggacctcattgaagctctaagatccatcctccatagatgctccacaagcaagcttncatcatgtggtaatcatagcacaagagcttcaaat

SEQ ID NO: 124877 - DNA, 369 bp, Glycine max
  unsure (1)..(369): unsure at all n locations
tctcagctttaagctccttaagaaataactnagtgattctataagtttgacaatggactntggngattcgctaaatcaaattagtgagttaaatctaatcttcagaggttaataagtaagattcaatggttttataatcattaagatattttgtttatgaaaataagttgaaaccttttcctacttaagtagaagttaactttctggtaatntccttgatttcaaactattattcaataattctgagaaatactagctaatgtaatataattaagtgggggctcaattctctgttggcaaagttgatgggttcctttacgagaaccttttacttatccttaatttgggatcactntggataggatccta

SEQ ID NO: 124878 - DNA, 290 bp, Glycine max
  unsure (1)..(290): unsure at all n locations
agctatnngcattgctgcactgtgcgtgtggtcttctccagcatttgaatggtgtgtgacaccatatgccacaatggngacaaggggggtaattnttatctctacccttactgttactgtggtcatttacagtacttccacctttatattgcctcggctggtaaagcaccatcaaccacacaatcttgtctcataagccttcgctgctcctgngcttgcaaggcatgtaacactcttgccaaagtgatcttggacagatcctctgtgttctccaacgcaggtattgatgc

SEQ ID NO: 124879 - DNA, 478 bp, Glycine max
  unsure (1)..(478): unsure at all n locations
ggacctaatctagctttgagtaaactggaccactcatttatgtagagaggaagtcgtatctagtcaagggctgagagaccatacaagtttcctaacgatttctaattatgtgggccattaagtctatcatatgctgacaatagccgagaagcccatgaatctcttcggnggcggagtaggtgtctgccatcgccttggccttggctaacaatcggagaagttcttgactcccgttcaaggtaagagcaaaccgatccatccacatggttgcctcttggtgtaaagagtcgatcacccttcctctagccatctttctcgcgtatacttgggcatattcgtccgcaatcctatgctcgtgggccgcggctagacctaactcttcttggtacttggcgattgatactagcatgttggtctcgtctccataacgctgtacaagctctttgaccatgacaggcactaactctcttcaaacatg

SEQ ID NO: 124880 - DNA, 351 bp, Glycine max
  unsure (1)..(351): unsure at all n locations
aagctcagtgcgagagctcatatgctagttgactgagtgatctgtgttctctctacatactgcggaaggtgangtccttggataccaacattaactaccacctaactcccacatctatctagtgttctaacactctcttctcgagccatacgacctaatacgcctagcctaattgtagagctaccaccttcatcagtcaacaatgaacccagtgtatcgcctttatcactcctcaacactanacttggagtcctcatatggacacctaactattgtcttgattagtggaaggactgtctctgatgatgccttggagaatatggatgaattaaagcaagatcacttgagaca

SEQ ID NO: 124881 - DNA, 97 bp, Glycine max
  unsure (1)..(97): unsure at all n locations
tctgatgtgtgtggcccaatgcagtgtgaatctcttcgttatattanatactttgtatcattcctagaagacttcactaagacgatgtgcgtgtata

SEQ ID NO: 124882 - DNA, 296 bp, Glycine max
  unsure (1)..(296): unsure at all n locations
agctctgcctctccttccacgtttgctttcttcttccttcttcttcaccatngnnngccctttgaagctccaaaattccttctcatttctactcncaaatgcaagaagccattttcggagtcgtgaagcacacctctacgtngtggggcttcgaatntcaggtatgggtgaacttcttctcacatgannatcgtgggtgggtgggttttgggagttatgagggatagttctactaggttatngccttagagtaatttattttgaaggaannttgtgaatcatgctanacttgacat

SEQ ID NO: 124883 - DNA, 408 bp, Glycine max
gctttagtaatatatacatatttaatctctttcaaatgtcaaacagtatattctaattaataaaattttatttcaatagtgactgcaagcattctaatatatttaatggtggttgaaaaattgaagtattttgaatgaaattatgtaaaggaaaaatctctcatttaaataattaattaagaaataaattatttttatttgatataaaaagctcataacacacgtcacagcataaaaaaaaagtgacttcataagaaaaaagaggagtattatcacaatttaatgagaattaaaaataaggtgtggaatttgtcatcagttgataaaaaaaaataaggtgtggactttaatatggatatgaaccatccagctacgtaaaagacaacgagcgtacaatttgaagcttta

SEQ ID NO: 124884 - DNA, 225 bp, Glycine max
tctataccacgtgcgacaaatagcagtacttgatgcatattgcatgcgaagatttgccttatatcatgtacatatatgcactgggtactgacctgactacacaaatataatgtgtatcaatacacattaaactactcccaagggactttggaataacgttcctctctatgaccatgacatatcctaccacacatgtgcaaggcgcaatcacagatagatgaatat

SEQ ID NO: 124885 - DNA, 398 bp, Glycine max
  unsure (1)..(398): unsure at all n locations
cattatntccatgacacanatgcnaaaatgatgaattggaaatttatgcaaaactggtcatgcatgcgcctatgtggacgctcaagtgtcaaaattttatggtcatgtgatgctgggctcangatcatttctctatttaaataacccaatgttccaaaaatgtcttttatcaatttgtgcattcatccgagtccattttgggcgtctgggaaaatcttcacagcattcacccttcaggtgtatacacatttttttcaaaaactagttatgaatcagtgaattttccaaagaaaaagtggaagtcatctcttttcanaagcatgttggttnttcagcttgacaacttattntctntnttctccttcttttttttcatcattatcaattggttatttctt

SEQ ID NO: 124886 - DNA, 260 bp, Glycine max
atgattataatgatggatggctcaaattctcccaaaagtaaatcatcactttcaaattgagctttcaaaactatcatgacatgtagagaagaatcaaggatttcaagtcacaaaatgtcaagaacttttattttcaaaacaattacccatttcttgaacatatcctataattcaaagaaaaacatgcaaagtcgtacgtgcacatgaaattgacccaaaatattaaactgaaaatccgaccaactaacaaaattaacaaa

SEQ ID NO: 124887 - DNA, 446 bp, Glycine max
  unsure (1)..(446): unsure at all n locations
agctgcttgagttgagtctagtcttacaagaaggatctgcggacgagactcagtttaagttagtctaaacctaatanggccgtctaaattgggcctagtccaacaagatggatctaatgacgaagcttggattgattcgatctgacgagggatcgagggttagtaatttatgctacaacatagagcacaagagcatgattgattagagaaatatatttatatgcataaacttgtttgttagaaagacctaacatttctacctactgttgtcactcttactttgcattntatagttnttatcatannaagttagtttaaattctggttgaaattatcaatcatacattntctctcaacaatgcttcatttctgaacttaactcacgctaacattagtttcctgtgttcgatactcggatttcatccgtttaaattntaaatacttga

SEQ ID NO: 124888 - DNA, 346 bp, Glycine max
agcttgccgcccagctcgcccaggtgatcattggtgctttctccaaaagcaacagcattctggaggattttttggaggggccaaatgggccctggttgctatttacacccccctttttactaaatgcaccccttctattttttggaattctttttccgtaacgttacgaaactttatgaatttcgtaacgatacttattttccttccgcaaggctacaaatccttacggattatgtatttactcttttttggctttcgaaggagttacggaaactcacgaattgcgcaaaaacacctcttttccatttccgccacattacggaatttcacggatcgcgcaagcctg

SEQ ID NO: 124889 - DNA, 365 bp, Glycine max
  unsure (1)..(365): unsure at all n locations
attattttcatgacacaatgcaaanaatgatgatttggaactttatgcaaaactgggcatgcatgcacctatgcngacactcaagtgtcaaatnttatggtcatgtgatgctagggctcangaatcatttcctctattntaatcaacccaatggttccccaaatatgtcttttattcaattgtgcattcatccgagtccatttcgggcgtccggngaaatttcacagcattcacccttcaggtgtagacacattttccaaanatggttatgatcaatgaactntnnttttttgggaaatcgtctcttttcaaaagcatgtcgttttttagctagacaacttattttttctcttttctaccttctt

SEQ ID NO: 124890 - DNA, 412 bp, Glycine max
agcttagaaacccaaactttttaaatcttcaatgcaagggaaacatgcttacggctaggaatccaaaatttggttttaggattagaaaaacatgaaaataaggacttttttgtaaagatttgagctgccccatgattggcactttgcacctaagtaacgtgggagatgctttttcaatggtgtgtagatatatgtgaatatatggcataagaatatgttgcaaagtgtgtgaatatatggcataaaaataccttgcaaagcgaatgaatagtaaataatgcatttcaaaatatgtatatttgtggataagtagtataagaagtctttcaaaaatgtacccatgccaaagatggcacaagaatgctcccaagtgaatatatgatgtggattgcccctcaagtgtagattagat

SEQ ID NO: 124891 - DNA, 393 bp, Glycine max
  unsure (1)..(393): unsure at all n locations
gcccacaagcaagcttccatcaattgtgtactctaattctgcacaagacaggctntaaataggctctgaatctgtgacgttatgcttagtgccacctttgcacttagcgcgagttagtgganttgagcttatcaccagtcatgtgctgagccttgctaaagacaacgatcgtgcttagcgagcagatttagcgcttaagcgcgtggccttgaaatgattctctgcgcttagcgatggatgcgcgctgagcccaaatggtgagctgagtgcaactaccacttttagcacttcaagatttagcctcatttaacctgaaatggaacagaattcattattaaatccaatggaaaatattctagagacaactataacaagaaaacatgattttattat

SEQ ID NO: 124892 - DNA, 335 bp, Glycine max
gcataagcttttagagccctggttttatcctgaatcagctttgaacatcattgatcttgacaatgtaatgttgcaatttgtgtacatgcttttcccaaggctatatgctatcctttcctaaatcatcttgaaagttgttcccaatgtactcaatcaaagtaattgtatatttggaatttgaatccttttatctgcattaaccctcttgcagaaagcaccgcatgcttacgatgtgatgacacagctaatcaaaacaaactaagcgctcatcctttaagtttggttgaatctttacttcactaatgcctacgaatggcagagccgctttgttttca

SEQ ID NO: 124893 - DNA, 393 bp, Glycine max
  unsure (1)..(393): unsure at all n locations
attagttattttctttaacataaaacattatgtaagttacttcacattagtttgcaaatatatcnatcaagtagacacatatttcatattgactattgataagtgaaatgacaatctatattattgatctaagatatattataaattcataattacttacttcctaaaaatataatactaaatttataaatttatattgatgacatatatgataaatgcatagtagtaactactgaacctttaatgaattatgcttaaaataaatctataatatgatatttagctatgaagatattaaatgactaactataaatttactttcatactagcttataaatttctgccattgtaatttgtgtggatgagcactcactgactgaaatattgcactta

SEQ ID NO: 124894 - DNA, 532 bp, Glycine max
  unsure (1)..(532): unsure at all n locations
tactaagctcttatgganataatgggcactngccgtagaacgtgctattgtgagatngctcaattcntttatagtgactgatcatgcggattgtcgtcttctgaaacaatgtgcgaaggaagcacactttggtcaccttcaaattattgtttatgaattttcaatcccaaggtaaagtgttagctcaatatctctntgcctggctatgttcttttatgtttcatatcttttggtatatctagttgtgatcttgttcttttactttctggtataggttgacgataccacagcacatgcttcctgatacagaacatccatcaattctttctgtcttacaatgcgagaatcaaactgtgattaatgtcttagtggatcatgtaattgacaaatctttgcctactgaaagntaatatcctattgaatgatttttattgcttatgaaaggaaataaagatctttnaaactatgtttctntaatttgtcttcccatcttacttaggtgtctggactggangattctatcccttattta

SEQ ID NO: 124895 - DNA, 382 bp, Glycine max
  unsure (1)..(382): unsure at all n locations
agcttctagtatttataagtcattttctttatgtgtntgntggctttaaatagacagaaatcttcacttgagctcgtgtttgaagattgttgtcattggagcatttaatgcttgcattaaatgcacattcttcttcatgttggaaaaccactctctttagcttccttgaagaacactttagcaggaaaccacttgctttttgtcaaagcaggtctatcacagcaggatgtatcttttaatactatttgaaattccaaagttctgaacttcgtttatttttcttaggattttgacagatcctagaagaatgtcttgtaacatagttcctgcaaaacaaatctcaaacacaaacattaaatgaagtcttaaatgcttcctaaat

SEQ ID NO: 124896 - DNA, 497 bp, Glycine max
  unsure (1)..(497): unsure at all n locations
tgtatgtgtntcctcatggcagtagtttgttgttgagaattcctatggcagtttaatatatatntatntgagcattaagaaacatttggaagtatacaaaatgggttggtactgggaattattttgtcttagagtattntaagtatgcatcttcactgtgatgtgtaataataataataataagaataaataaaacaagggtgttatagaaattattgtttcatagtgattatntntgttactctaataaataattgttgtagaaagtttttttaatttattttgttgaattaatatatttcaatttaatttatatttctggtttggtaagtaaatgttactattgaatgatatgtgtaggatgcacgggatgcgataaattattctattatgaaattgtgatcgcgaatgtgtgtaagtgataattatttgatacgtaatggattgtgaatacatgaatgtgagatgttgatgtttgagtttgaccatgaatatgt

SEQ ID NO: 124897 - DNA, 405 bp, Glycine max
agcttttagcatagcattatctggcctacttctagtctaccttgacagttacgatctcacccgtgaatgttgggaacttcatcttaaggtgtggtgtaaagacgatagctccgagctcatttaacggtttcctatgagtcaaagtaaaataagaagtatttgcatccacaattaagttcctgacagtgaagctccatgagagcttgccttgaccaaaggtggtcattaggtctacgtaacctctgatttctactctttctctcacaaaaacaaggagtggtccatagtgtgattgaaccatattaggtgagacttcgagcctctagaatgtcttccaataaggtgtattcatggaactgcccggtcgataaaaaccttggacctatgaaattggcgatgacaata

SEQ ID NO: 124898 - DNA, 518 bp, Glycine max
  unsure (1)..(518): unsure at all n locations
cagcaaccacanatgactcagatgtgtcagtataacagctcagagcaacaaccacagttgcagttgctacaaaaattgcagcaacagcagcagcagcagcaacaacaacaacagcaacaactcctttccacttctagcccactttngcagtctcagcttctacatcaacaaaatactcatcaacaaaaccagcaattgccgcagctgcctctatcacagggtcatcagcctcaacagcttggaaacaatgctttctcaatggagaagcttctcaatggaaacaactactctacttcatctctgatgcaaacacagcagctntctgtgaaccaaccccataatacacagaaatcactgactaatactagaagctcctctactcttacagatggagatgccccatcatgctcaacttcaccatctactaataatngccagatatctccaaatctgatgaanagaaatcaacatgtaccggcaacattangaggaaccttcagtacttgacccaccaatca

SEQ ID NO: 124899 - DNA, 281 bp, Glycine max
tctttatcatcttcatcagacgaggtatccgccaggtcctcccatgtgctcataagacccattcttttttttagtcttaaagaatttctacttatcttgacttttctccagatttggacattcagacttgaaatgtctatgctttttgcgcttgtcaaaccctaatttcatccgggtataatgtttttatcattcggatatgatgttttgataattgctaattgaattacggtgttttacaccaattacagtgcaagggccacgggtcgcacaaggttttg

SEQ ID NO: 124900 - DNA, 343 bp, Glycine max
  unsure (1)..(343): unsure at all n locations
ctatcattctttgttacaggtttcattgatgaaatgctagctcacnnaatagaagaagaaaggaagagaaatattannattgattccattanatccaattcacttcatcaatnntaacaatctaataataaaatactaccttctttcttaaatatactngtaaccccaattcacatcctttataaanggttgnnataattaanttagtacattanntattataacaatntatattattttctcanaattacccctanaaacgaatatgactcatcatctctctattttctaaccactttctacctannatagtaatatgtgctagtcttcttcttcaatcctt

SEQ ID NO: 124901 - DNA, 363 bp, Glycine max
agccggatcttaagcaccgcggctgcagctttataggtgaaatcaggtgcatccatttcccttagagtcctctcacgaggtggaggttgtgccatgttctcagaatgtgcaaaatcagaatgctcagaatcagaatgctcaaaattataatgctcaagatcaggatgttcaaaatcaccaataacagaatgcacagattcaccagttatggaatgctcagaatgatcaaaaggtataaaatgatgcctaactaatctatgaaatgtcctatctatctcaggatcaaagggttgtaagtcaaatggattgcctctagtcatacactacatttagcatgcacacaactagttgccttgtcatgta

SEQ ID NO: 124902 - DNA, 428 bp, Glycine max
  unsure (1)..(428): unsure at all n locations
ctaagctcctagagagtctacactactctagagttctntaggacgttctagaatattctacactnttctagaaagctctagaatgttctagaacctcttcaattaaggagggatcccaacanaatgaaacanaataagagtgtaaatgttttattngttacccttgtgtgattgacaaaaatagaattagcctaaagggttggcattgactcctnccaatatgaagtcaattctcattcaagaaaaaacttgatgtgtcttgcactcaccaattaatgctaagtgaggatgatactgtgagagggtccattggattcgtagaggaattaaattaccagactcactgcctaccccaatttctcttcaccaataanaatctaacatgtgtgcaatgatgacatgtgtaatttccctgcattgaatggatc

SEQ ID NO: 124903 - DNA, 419 bp, Glycine max
  unsure (1)..(419): unsure at all n locations
gcttacattatgtataaatacattatttctttttttattggngaaactaaaatgtacgcttaaccaaaatttaacaatatttaccaacaaataaagacagttgagtgagtcaaatacaattaaactaaaaacatgtgcaatagaagattaagttttataatcctagtcaattttttgttggatcttgtagagttatataactttgaatgttttatttaattttttgttctaatagaagattaaattttataattttaaattatttttttaggtctcataatgagtccactttctaatatttatttatattttattttaaaataattaaaattaattaatcatttttttagttttatgaaaagagatattacatatcattttttggatctcctccacatttgcttcttcttatacaataa

SEQ ID NO: 124904 - DNA, 122 bp, Glycine max
  unsure (1)..(122): unsure at all n locations
acanaagagattagcacaagttatttttcacanaaacataaaaaataaaactgaaatttgactaggcgcttatcacagcaagctgagcttatcgngccttatngaaatttactcatgggcta

SEQ ID NO: 124905 - DNA, 373 bp, Glycine max
taaaatttatctattgaaatgaaattactggcttatgaaaagctttccaaatgaagtggcattaataccctaacgacttcaaaataccaaaacatcatggatttacattcacatatgccagaaaaatggatatataagaagggggaaaacaatcatgcaagatcaaccacacatttgtaatcactaatatttgtttgtgatttacaaagccaaattaccatcaaccctctaaagtaaactgcacacacaaagctttcaattataaagcaacattcatgttgaaacatccttaccctgccaaagaaagtgctaaattccacaattcggaaaaaaatacgaaattttttcttgaaacaacggccaacaagacaag

SEQ ID NO: 124906 - DNA, 119 bp, Glycine max
tctgctccagaagcttgggattatatccttttttctgaaatcctttagctgctgtagatgacagagccttttatgcacagttatgaaactttttgagcatagattaactactctatctc

SEQ ID NO: 124907 - DNA, 258 bp, Glycine max
  unsure (1)..(258): unsure at all n locations
tgattttgcaattttcattttctggtttcattntttgaaaattgttttcatttttaaaagattagaattctgaaaatatgtttggtttgatttcttgttttctgtttttaggaaataaaaacactgaaaatttatgatatattgacttcttgtcttttttgtatttttaaatttgcttaaaattatattcattgccatctcattttcatttccccaaaatgaggttcctgttctaactgaaaacactgaaaacgaaat

SEQ ID NO: 124908 - DNA, 485 bp, Glycine max
  unsure (1)..(485): unsure at all n locations
ataaagtctcanatatggtagtttgtcaaaaacttcaatatctgagattggatcactgaactcttgaactgacanatgacgagtctttataccaatctnggtttctnttccaagttcttctgatctgaaatagaattctccaccaaggtataatgctagatcatgcacgaggtcatgcattacaaaataattgccccaagttcgattacttgattcgttgaaaaatgatctcgaaactaaatcatcaaaatactcgtaaccaacttctaacgcctttcctctgtttggaagcttcanaagatcttcagccatccacaacaagatcaagtccttctttttgaaatcataatctntagggtataatgaacaataaacaaagcactcgtttaaatgtggagggagatattgataactaattctcanggctgggaataatttacactgactttcangaagttcccanatgtcactttcaagtatattat

SEQ ID NO: 124909 - DNA, 404 bp, Glycine max
  unsure (1)..(404): unsure at all n locations
agcttgcaaaaaggacaaacatgggttatagttctttttnaaaacgtggaaaaaaagattgcttcaacatctgtgaaagcactgcatggaaaaaaaaaagaaaggaaaccaatggtcataaaataatggattagtgaaatatgtagatcgattattnttttttctgataaatattctctttcgatgggaattttgttcaaaacatgattgcttactaaatgttactctttttttcaacaaacattccaagtaacaaattaaagattcataagaagaaattttaatgttaaggattgaactaacatctataattaatatattgaagttaagattgaattatttcattattatttgaattttttatttgcataaataattttctattagattttatttatctttcg

SEQ ID NO: 124910 - DNA, 400 bp, Glycine max
  unsure (1)..(400): unsure at all n locations
tttatgtatacaattaaatctttaatatgcaagaaaaattaatgacattaatatatatatattagtaaaattcattatcatctaaaccacttaataatttcccaaacaaaaaaatccaagtattcttttttggtgaataaaaaaatattgagacttcttatttgacactcaattaaatttatccattttaggataaagtatgacatttaattacgaacttatatccaaatcagaaatcaaatatttaaatcttagttaaggacttagtgtanattacttttgtcaacaactagactccaagcaatatttcatcttattagttattattggggtagaatntcaactanaattagcactgggtcccaacacacgtgaataaaaatgatacncggagttgata

SEQ ID NO: 124911 - DNA, 414 bp, Glycine max
agcttgtataaggaataacaacatatatacattgtcgtgcaccaacaaggaataatggactcacacggttactgtgtatctataccagcagcacaaatacagtttaaccatgaaacccaaccatcatctgctgtagacccttcgtgcgtatatttctaagtgtaaagcaaataagcaagctatacaaaaaaccaacacttaccaactccttcaacattcacgtaagtcctgtgtcatcatatcaatcgatctcatttccttcacaaagagatcgaaacaatcataacgttaaacaattcaaacaagccctgggattcatctcccattcacaataagagaattttcttcctttccctttcgcattaatcctgcccaagctctatgttttgccgatcccatgcggccacacaacac

SEQ ID NO: 124912 - DNA, 396 bp, Glycine max
  unsure (1)..(396): unsure at all n locations
tattcagaaaatagaagntatctcttttatcttagtgagagtgattctcctaaattcttgagtgattcaagaacaccttggctgtatcaaaggactttcacaacctttgtgtgtngccctcgctggaaagagtgnatctttccttcctttcatcatcacccttggtctttcaaaccacaattccagaanatccacctctgcccaganatatctcgtggccataacttccattntacgcactcaaattaagtgattctcgagcctaaattgaatttcanaacgagacctttcacctcgctttggaatcacctcatttggagccctgtagcttcagntattgccatntctatatttctgtccagccaccacttaacctacgttntaccatcccattca

SEQ ID NO: 124913 - DNA, 344 bp, Glycine max
ctacctatatcttccacagcctctcaactggttggctggaaaatgaacatctatctgtctggaacctaaaatcccttgcacattcgcttcacatacccttgcaatacaaaaatgaatccacccaatgcatatcaaaggactcaaataacatctaattagtttttaacagctaaattgggataaatgatcatgagtttgcaaagagcctgagaccaaaaggtaacagcctaataaattaaaagcagaagaaataggaaacggtttgaaaaaagatatttgataaaattggttatgatattgatgcctaccatcacatcagcatcattcttccactaatcacaaaa

SEQ ID NO: 124914 - DNA, 482 bp, Glycine max
  unsure (1)..(482): unsure at all n locations
acaagctcagagaattgagcaaacatgagtttgncaatagatgcaagtgccaaacgtgtgttgtccatagagactccaataggggttccttggaaattgccaccatgcaatgccttgttccttgaaacatcaatcanagggttgtcattcacagagntgatctctctctcaattgacttggttgagaaacgaatcacttcaataagaggaccaagccactgtggtgaagttctaagggcatatctatcttgntttggcttttgcaagggatcaatctcatgcaacttcttagcagctttcatgtangaacttccatccaagatatgctccataatagcagcagcctcaatttgaccangatggtgctctagcttgtgtgtcaaatggtcagtgaattcaggtctcccctgcatcacttcagcaaacatagctgatagaacttcagacaacacagctagtatattagcctcaaagagtaccat

SEQ ID NO: 124915 - DNA, 246 bp, Glycine max
  unsure (1)..(246): unsure at all n locations
ttaaaaaagcctttgaaattaatccaaattaattgatccttaccaccaatcaaaaatatcacattgttcaattttcaatatgataatgttgaacaccatcgtncttgtccttaaagaggatgaaaggagtaacatcaagcaggaagtggaatgaacggtttgggcccatagtaattcagttacacagtaaaaaagaaggaaaccaaaaaatattatcttaccaaaaccttctggatcttttgtgac

SEQ ID NO: 124916 - DNA, 436 bp, Glycine max
  unsure (1)..(436): unsure at all n locations
gaccatacttgactgaatggagaagtttanattgatatcctatanaatcactgcatgacagcaagtataatttgtcgaatntggtaagtcatggtttcgtactttatcttttcacaaactnttgataccgatgataatagatatagctccatatttctgcctctggcaaattctttngataattagtgaacctaatttgtggttgctagcttgcgtggcctgaacgggaatagcagaaaagtaaactacaaaatataagtgaatttctttaaatcgaatngtaattaacttagaattatctgaaagccatgctgcangacttatccgcacttctgtgtggtacattattattgtgcatttatattatgattcacacccanctatggaaatgagaactggtatcgaacaagagcaaataacagattcattccatagt

SEQ ID NO: 124917 - DNA, 395 bp, Glycine max
agcttgtaagatttctaagatcttttttcttgacaactctttgaaaagattgccatcaatatgaagagatgacaatttagagatattcatgagatgacaatttagagagtgatcaaagactttcaaatcgatttccactgaatttatcaatagacagatcaagatatcttaatgttgaaagttttccaaatgatctagaaagggcaccaccaattgagttgttgtaaaaatctagcatgtcaacatttttaaaaactccaatttaatccgtcaaattgggttattttatcatctagggacaagttttttgtgttttttttctcatgtgggtacttttcaaattatgctccaacgggaataagtggtattataacttccagttaccagtcttaaca

SEQ ID NO: 124918 - DNA, 404 bp, Glycine max
  unsure (1)..(404): unsure at all n locations
attcctaatnttcaacttacctatttggaagtgacatcatggccgttaggtcccagctntccattgtggattcagtcacaaaacaaacttgaatatgttggactatctaacacggngattttcgattctatttccacacagatgtgggaagcactttctcaggttttgtatttaaacctctctcgtaatcatatccatggtgagattgggactacattaaagaatccaatatctatcccaactattgatctaagctcanatcacttgtgtggtaaattaccctatctttcaagtaatgtgcttcaggtggatctttcaagcaattcattctctgaatccatgaatgactctttatgtaacgatcaggacgaagccaatgcattagaanttctgaatcttgcatc

SEQ ID NO: 124919 - DNA, 367 bp, Glycine max
agctggcccgcctactcctggtttgttattctgaggctggttcctcaaaacctgcattccgtctattgatctctgggagggggattgaacttaatgcaaatgggcttgctttggagaatctggaggagaacctgactactttcgcctaatctcggtgagttctatctttttctaacttttgcctgacatctcatacttcagatattactttggataaggctaagttaatctacgagctcgtcatgacgatggatataaacttgggatgccttatctcaggtcagatttctctcatcgcacagcatgacacctcgaggctagattttccaaccttgattacttccttgtgcaggcccgaggagtcaca

SEQ ID NO: 124920 - DNA, 478 bp, Glycine max
  unsure (1)..(478): unsure at all n locations
atttctagggttgagaaagtgaaatgagaatgagggtaaattgaagcanactctcacctcacacaagtctataacatcaatntaaactntntcaaactggatntatgcctaanatntcaccacatcaaaatttgacgcctcaacacccaaatttaccctaaaaatggctcttggttcactntggtcatttgtttttctctctagcacagtccaaactttttcataagtcctaaatgacatttcaagctaggattaactcactttaatctccatttaccacagaatccagatntaaccctccctactctcanagcctcactctttntccactcataacaccagattctcactttctaaccctaggttaactctacccttcatctctaacagttntccataagcaatttcagcacataaacatcacaagcatcatcatanaaacccctaaacagaatgggtatgttaaactcatcaacat

SEQ ID NO: 124921 - DNA, 428 bp, Glycine max
gatccttaagtcacctgcggcatgcaagcttatcctgtagctgccttaacttctctagtaatcaattacaacctattgtaatcaattacaggggcgtgttctatgacaattgattacagggggtggtaattgattaccagaccctaaaacatggattttcaagtaaaataagcattaaaactaactattttacacccacaaaagtacacattcaatataagtaagcaaaatatataataataaaaaacaatcatcaaaagcaatcaacaatcatcataactttcaaacacaatcatcaaagacaatcaaaactcaataaaaaacaatcatcaaaagcaatcaataatcatcataactatcaaacacaatcatcaaagacaatcaaaactcaccaaaaacaataataaaaaactcttcaaaaacaatca

SEQ ID NO: 124922 - DNA, 453 bp, Glycine max
  unsure (1)..(453): unsure at all n locations
attagagcctcaatttcactgtctctatgctaggggaatntctctctctaccgaaattatnnttgcaatttaacggtaggagtgtgtgaaaatgagttatgaagatggtgccaaaattttatgatgatccaacggttaacaagtccgggatcatagttttactangacaggtttgggtgtttctaacaaacataaaaggttntgggagaggaagagggagaacgaatntggaaggaaaaaagagcgtacaaatatatcgtaaatataaaaaatgacttaatatgtctctatttataactaggatactctaagcctattatttactctattntctntattntattattctataaaanaaactttattntactctctcattaaataaataaccaattaaaacatccatctattntctananaaatcatttactctatttatgttctaacactatg

SEQ ID NO: 124923 - DNA, 422 bp, Glycine max
gggatccttaagtcacctgaggctgcagcttgtatataaactgattttattctccatactccccaaccttcggaaggaacatcgagaatggtgacaagaagtacctccaaattaattaatgttattaatgaaaatagtgaccaaaactcaaaaaacgctgtataagcaaagcttcatgatgaatcaagaatgattcaaagatgtcttgatgataacaaaggtgatgacaaaaagctcaaaggtcaatcaaagaatgagttcaagaaagatagaatcaagaaagaatgagttcaagatgttcaagatagaatcaagaacacttcaagattcaaggatcaagcatccaagaatcaagatcaagattcaagacttacattcaagattcaagaatcaacgaacacttaatcaagataagtatgaaa

SEQ ID NO: 124924 - DNA, 409 bp, Glycine max
gcagctttttgatataaccatatgttatattctttcatttatggcgggaagaattagcaatcattgacagctcattagagaaatcagaaatgttgggcctggagtattgatggatattgttttggcagcataacttatgctaggaagaattgatggttaatcttaaaccactgcaaattctttttctgattgagtgttacaaatcaaatacttagaatatgagtaaagcttgaataccctttcaggaataaagataccaaatagatgggtgttaagtgggtaactgtgttagctgtgtgactggttagtcattattgtctctctttgggttcctaacattttattattttgtttttggtaaaattcccttccatagattcaaatgctccttacacttcattgagccatg

SEQ ID NO: 124925 - DNA, 428 bp, Glycine max
  unsure (1)..(428): unsure at all n locations
aaatacatccanaacaattttaaaaaataacataatatatatttacgaccaaaaaattatataatatatatataanaataatacaaggaaatatataactaacctagcatagcaaatttaaatattttgtactagaactaaacctaacatacnaaaactaatatcattaaaactataactaatattatttataactataagtaaaactaatatcttttaaaactaaaactaanactacactaaataatntaaattatcaaactaaacctaattaccattaaaataaaactaataaacacaaattttataataacataattatcattttaactanactaagtaacacanattaaataaatacataattaccatttaaactaanataagtaatataattaaattatacgaatatattattaatgaatgta

SEQ ID NO: 124926 - DNA, 382 bp, Glycine max
gagggagagaaagagagagggggggagcacgaaattgaaaagaagaaaaagggagaagaagtgaactttgagttgtgtctcacaagactctcattcatcaaagttacaacaagtgttacacatgcttctatttatagactaggtagcttccttgagaagctttcttgaaaaaacttccttgagaagcttctttgagaaaacttccttgagaagctagagcttagttacactcacccctctcataactaagctcacctccttgagaagcttccttaagaagattcctaaagaagcttgagcttagctacacatacctctctaatagctaagctcaccccttgagatgagaagctagagccagctacacaccccctataatagc

SEQ ID NO: 124927 - DNA, 409 bp, Glycine max
  unsure (1)..(409): unsure at all n locations
caagccccgcggctgcagcttgcttctacaatctccccctttttgttgatgacaactnttgaaatcaagaaacacacacacacacacacacacacacactttttctatctatactcacataattcatctcccctttggttttgatttatgcttatctaaaattaagttgattactcatgtgagttcttgatttaatctctatttctctccccctttggcatcaacaaaaagtcaaagtgcgtatcaaatttgaagtattcaaatataactaagcatccatacaacattcatggaaaaatatcaaccaaatcatgaagcaagaaacatgactagatcaaatatatagaaaaaatcacatagcctataacctaattcataattgcccatcaaaccatgcaaataaagaata

SEQ ID NO: 124928 - DNA, 313 bp, Glycine max
  unsure (1)..(313): unsure at all n locations
gtactcactttctcatanaggctataagtgtcttgcagcagatggcagaatctacatctncaaagatgaataaaggagaatgtctacatgtctcanacccctggtttccaccaatcaaattcctctatggtctgcaagctgaataaagctttgtatgggcttaaacaagccccaagacagtggtttgagaggctgcaatctacttcaattcacttttggtgntgtgctagtaagtgtgcccctctctttnttgtgtacaagaccgcatctcacagtgtatgttctagtctatgtggatgatatcacccttact

SEQ ID NO: 124929 - DNA, 400 bp, Glycine max
acctaagttgattaaagtgttgtgcttaatattttgaaaaacataggttcaatcctggctggaaaataattttaattaatttgaaaatatattttggaaaaaaataaaaaaatcctattggtcacttaacggatgtcaatccctatttcttttacagaaagaataaatgagaattgcgcaagttatgttgggtgtatgggcaattttcatggtgcccatagcaataccctcaattgaaagataagaaaagatgggcttcccaaaactgtcatgaggcccaattaaacatgactttttttagtaggcttaaggctaacctgaaaattgaaattcatttaaaggcttactatgaccgttctaaatatgctaataaaccatgctctgagtttgaaggattaaa

SEQ ID NO: 124930 - DNA, 485 bp, Glycine max
  unsure (1)..(485): unsure at all n locations
aattaattatctaattaagaaatttgatanaagtacgtatgagaactcaaagatcaatttaatcttatttaatttataccataaataattaatttcttttatctttntattctataggatatatatttcgaatntatctaacagtttttgttcgtgacgaaattatatcttagtatctctagaatgtagaacagatattagatggtcatcttttaattatactttacaggaaaaggaagctggagggccacataatatgtctgcttttcctaagtgctcttgtggggtaggtactctataattataaatacattgctaactntaatngaaaagaaatattggtaacaagttatttaatattttctctcttaatatatatacctaactcattgctacttttaaaaacaactgtagcaccctctcgtttaataatgtgaagttatttgatgtatttcanggtaacactcactcaatgtctgtatctt

SEQ ID NO: 124931 - DNA, 428 bp, Glycine max
gtcacctgaggcatgcaagcttaagatttcttggctctttggctaaatccgaaaagagacgatctatcttcacaacattaaacatactatccaggttagttcaaacaagttcatcatgtacctatatcaaacttcttgatgtcaatatctatgccaataacccgagatgcaccagcagtttttgctccctctgcaacctgtcaagtgtaaattaaaaatcattatagaagcccaaaaacataaacacctacaattgtaactgcaaaaacttacaacaagcccaacaattccaaggccaaaaatagcctaagatatatgaagcctaatttattggaaactacatattctagagttccattttaatgttcttagctaaataatcaagcctgctcctaactccacagttcaacatgaaaaatgaattaacg

SEQ ID NO: 124932 - DNA, 299 bp, Glycine max
  unsure (1)..(299): unsure at all n locations
gatgtaactcttcaaatgggttttgactttttcaaattggtttgaaagttttctaaaagatataactcttctaaatggttctcttgaccaggcatgaagagtctataaaagcaagactntgtttttcattttcaatctatcttttccaattcattctttacacaagcaattttttccacattgatttctgagtctctttgaacttcttcttcttctttgtgccaaaaagctttccaagaagtttctggttntctaaaccttgaaaaccngngttattcattctttntatctcttctccc

SEQ ID NO: 124933 - DNA, 427 bp, Glycine max
  unsure (1)..(427): unsure at all n locations
ggatctctgagtcacctgaggctgcaagcttgagcttgagctttttttataggaagataanggtagtttgtaactccaatgtatgggaacttggttcatcttgcatgtaccttggttcttgtttgtaaggcacataagcgccaagagctttgtttcaaaaaaatttaagttatgcatgtttcagtttttagtttatgcataattaactttgatactcttatgttttaagtttacaaaatttagtactataagaaggtgaatggtaacattctttaggatgttacatcgtccatgttggccatagttaccatgttgactacttgggattcaaggatgggaatgagctttatactagccatgtagcattcgcgagtgaccttttggtagcatgaatggttatcatcgaccctgctctgatgggaatttc

SEQ ID NO: 124934 - DNA, 527 bp, Glycine max
  unsure (1)..(527): unsure at all n locations
cattcttcccagaagccgtggctggtgtagatgtgtggtggtctcccttctgttgattctcatagttgtcctctgcaccttcactacgtagttcttgagctccatnggctntatcattatcaccatcctaccacaaggaaaacaatgaaatggataagaagaaagtagcatcacagtgtaacacataaagtagaaacagctganacacaagttacaataatacctgtccacttctnttccttttcttggtgttagtcctttgctagaaggttccccactagtaccttccaacattgnggagtcatcctgaccaccaccatcatcactagattcagctctatcagactcattagcgggcctaacaagagatngcttcccttcatcttgngatataacatggccttcacttcttctatcactctngagagggcttcctttagcagcaacaagatggtcaacagatggagacacatcctttgtagcttcaactacattcatatcnacctcctgagattgccctcagtact

SEQ ID NO: 124935 - DNA, 182 bp, Glycine max
tctatttgccattggtatttctcaaaattaaatgtttctgtcatttgtttaaactgtgtattaaattgggtgtcatgccatcttgtttgaataattgtgagggctgcaaaagattatgtattactggcctgtcatgtttatctagattattaaattattattttagcacggaattttgtaat

SEQ ID NO: 124936 - DNA, 337 bp, Glycine max
  unsure (1)..(337): unsure at all n locations
gaacataanagggcagaaggacatnnccttgctgttgttatctntgtggacatatgaaacaaatcaacatactgacctctatggataaatgctctctcagnttctgaatagcatgttctatacaaccatccatttgatgcaagtaatccttcattctccattcatcttcttcaccagattccaagtcacataactgagaagtcacaccagcataagtttcttcatagccaaattgattaacatttcttgcttctgcttcttgcanaacatttgatatagcatccaactcatacctattgctgacatacatcatgtcattctcactctcaatgagctc

SEQ ID NO: 124937 - DNA, 379 bp, Glycine max
  unsure (1)..(379): unsure at all n locations
agcttgcccgcctactcctgttttgttaatctgacgcttgttcctcaagagctcgcataccgtctatgtatctctgggaggggatttgagctaaatgcatatgggctgcctatgaagatcttgaggaagaacctgactactctcggctagtctcggtgagttctatctttctctaactacgccctgacatctcatacttcagatttacttctggataagctaagtgaatctacgagctggtcatgacgatggatataaacttgggatgccttatctcaagtcagatntctctcatcgcacagcatgacacctcgaggctagagtttccgaccttgattacttccttgtgcgagcccgaggagacacatctcttctctga

SEQ ID NO: 124938 - DNA, 433 bp, Glycine max
  unsure (1)..(433): unsure at all n locations
gagaagtgaaattgagaatgaggtancattgaagcaaactctcacctcacacaagtctataacatcaatataaactttctcacactggatttatgcctagaatttcaccagatcaagatttgacgcctcaacacccaaatttaccctacaaatggctcttggttcactttggtcatttggctttctctctagcacaagccaaactctatcataagtcctaaatgacattccaagctaggattaactgactttaatctccatttaccacagaatccagatttaaccctgcctactctcaaagcctcactctttntccactcataacaccagattctcactttctaaccctagggtaactctacccttcatctctaacagntntccataagcaatntcagcacataaacatcacaagcatcatcatanaaaccct

SEQ ID NO: 124939 - DNA, 396 bp, Glycine max
  unsure (1)..(396): unsure at all n locations
agcttgccctacctgatggattgaatttttagtagccactgccctaccgncacattttttgtagatgccttactctctttattctctcgctcttaattttgaaaaggtgcattcacagccccgaacttcttttgttttctattattaagaacaaaatttgtgattaattctttgacccttgctaccttagataatggctaaaattaagatgatgtttttctttccctttttttatatttctatttggatatttataacagacagaacaggccaaagttaacatggagggtgctcttgatgtcattattttgcggcatatatgggtatggttaaactcttcagtcttcaacccttgccatggccatgaggattcttgtgccttttctttttccgcgt

SEQ ID NO: 124940 - DNA, 517 bp, Glycine max
  unsure (1)..(517): unsure at all n locations
taagctcatatactcactggactgaaactattacatctgttgctttattgcaggatctctgatcgctgaaatgatgttaatttgtgttcaagcttcatacatcttatcattgggccaaaacacattaatatgtagagttcaagcccaaagcatattcatcacccctagctttatttatgatgtgtttcaagtatcaaccactgaagatatggtgatgactgatgaacttttatagacctttgaggaagataatgttgttaacgaaaatgaatttaagcttaatacatatntcttgaacttggttcanacctgccaattatgactgtacttgtagactaatgaatnggtagtctaacatttatctacaggatatctcgttatattgcaatatgactgtactttttgactaatgaatngctatacattaactgcttattatagaagaatatgggaggcaaggatcgaactctagaccatctgatcatatagactgataatatgccatgaagcaactatc

SEQ ID NO: 124941 - DNA, 437 bp, Glycine max
gggatccttgagtcacctgcggcatgcaagcttgaggccatgcctttataatttacctttgataggtaaaaaaagtcaagctcagatgatgtatttttaatcaaagttggattcagacctaataatgactagcctgacatactttatttttacttctaatatcaaggaaattatattacataatgtataaaaaataaccaaattacaaaaaatagttttcaaaatatattaaaaataactaccatacgaaaactactttacatgttttagtttttacattattttttttgtataggattttctacttgaggtaattttatttgtgttgggtaaatatattggaccatcttgttaaaaaaaatttaaaaaatagaataagtgttttttagaaaatataatttaataaacagataaaatggtttattaaaataaacaat

SEQ ID NO: 124942 - DNA, 316 bp, Glycine max
  unsure (1)..(316): unsure at all n locations
atcaacaaagtactttcggcacctactatatgttgacttgaccaacgctgttattggaatgctgcgacaatctttcaacaccttattgacacattctgataggttggttgtcatgtgaccatatcgtcgtccagatgtatcgtaagccatgctccattnnttctttgaaatgcgatcaatccatcttgctatggctggactcagttgacgataatttttaatgtttgatcaaacacatgcttgcaacgagtgtacgctgcatcaaatttgtatcatcaaaagttggtcgtngacatcacactcaaattaaattaat

SEQ ID NO: 124943 - DNA, 367 bp, Glycine max
  unsure (1)..(367): unsure at all n locations
cgggatcctctgagtcacctgaggatgcagcttgagttgcatagttctaatgtttctggtntagntactccatattgttgacaattaacttgggtttctacctttgtgatcatttagtttaatgtgctaagttgtttcaagtttggtctttggcaagtgtgtacaaagttagtacctatcactttctatattttttgttgttcagacctcactatgaagactaaaagtttcaagtctttaatatgttagtttttaaatatttttggaggtagatgttgaaggtacttacgtctggccttgtgggagagctcattttcttgaaggctatgtcagtttttaacagtgttactttattgctatgaaaaat

SEQ ID NO: 124944 - DNA, 405 bp, Glycine max
  unsure (1)..(405): unsure at all n locations
cctatcaatgttattataatgacatcggcagaaatgcagttgagaagagaaaggtgcctatgctntacttgtgatgacatagtttnccctagccatcgttgtcctaataagcaatattttgttccacagtgggaagaagaggatgaacctgcattacaaccagatccaccagacgaggttgagacagctggtgaccccagtttgcaagatcatcatttgtcttataatgctttacaaggctcatcaggtctggggacaatgaagtttcaaggatcaataaatggattgggagtgtagattctactagatagtgggagttcagataactntcttcagcctagactagctcaatgcttgaagtacctgtaaaccaattcctaattgcaggtttggttggaatgaaat

SEQ ID NO: 124945 - DNA, 321 bp, Glycine max
atctgcaaaaaaacataaaccataaactcttgcaacaagtgtagatttctgaatcatggcaagctgagttactaggttgaccaaagcatcaagttttccttcaagctttttattttcagtagatgaagatgaatccgtggccacctcatggactcctctaagaacaataacatcatttcttgcactgaattgttgggagttggaagccatcttctcaatcaaattcctagcctcagcaggggtcatatcaccaagagttccaccactggcagcatcaatcatactcctctccatgttgctaagtccctcgtagaaatattg

SEQ ID NO: 124946 - DNA, 225 bp, Glycine max
  unsure (1)..(225): unsure at all n locations
tataatatgtacccccatagtagttgataatagagagtagtangggctgagtgaaaggagtcagaggagattaactctttatcttaaccctcatactataacatttatacagctactgaaactaccaaatcttcatttaacgccatataaataataattactctgtttcaatatacttacaacacatactattataatatctcagtatcattcaaccactaactg

SEQ ID NO: 124947 - DNA, 373 bp, Glycine max
atttaatgtagatggatgacaccaaatttcatgatttaataaacaagctaagctcctaaacttcattctccttgaagtggtgagttacgaaacataattgtgtagtattacatggatttaatacatgggcataactggatggatgctatgactcaattcaaaaaatacttctgatataatgtttctgtatatcgatgctctaacatttatcctatgcataactctatatcaccatgtcagttacaaaggtagaaaatatcaatacattaagcattatctacatgtgcatcctaactcttgtaagtaaggccctttccaataacactcagtagttggagaaatgcctcttgtgcaatgttggtataaataatac

SEQ ID NO: 124948 - DNA, 402 bp, Glycine max
  unsure (1)..(402): unsure at all n locations
cggtgttatggggataatatcttacggtcttattaaggatcacttagtaaaagtttgttgacataaagtatttgggtattaaatanataattcggaanatatagaattgtatacaacatataagaacttatttcatgctagctgatccacttactagagatatgatactttaaagttttcatgagcacaatgctcatatgagtgtaattctgataataccttagttgaggggtgcttacttatgtctatatcttatgattaaaatatntggagtttggatttctgcaaaataaagtaaaggtatcatttattatagctatttgttgcaaattatatggattggatgatcttataagataaagttgaccattgagatggatgatgaacacatgatgaatttat

SEQ ID NO: 124949 - DNA, 229 bp, Glycine max
tgaccatgactaattccgggaaactgacaggggctagcaacactacatccacaccgctatcgcaggaactggagactaacagcactctgcagtcacaaataaaggaaaacaagaccacaaagcaaggaagcttgtggtggctggccaactgtgaatttttgtgtaaatatgtgggattgtgggcctctgggtaatccgaataactaaggggtggggtaaatccgaatta

SEQ ID NO: 124950 - DNA, 467 bp, Glycine max
  unsure (1)..(467): unsure at all n locations
cactctgatgttcgattcatgtgcatagtatatcaagatgctcgatattaaacatcataatgcaagacannatcaaacggtcataactttngacccggatgtccaattcaggtcaataatatatcgagtcgctcgaanattaaacaacggaaagtctcaagaaaattaaatggtggtaacttttcacttggatgcccgattcaggcgcatagtatatcaagatgctagaaattaaacattagagtgcaaggcaaattcaaacggccataacttttgactcggatgtccgattcaggccaataatatatcgagtcgcccgaaaatgaacaacggaagctctcagctatctcatatggcataaattntcactcagatgtccgattcaggtgcataatatatcaagatgctcanaattaaacatggaagcacatggaaaacttaaactggcataacgtttgactcggatg

SEQ ID NO: 124951 - DNA, 401 bp, Glycine max
  unsure (1)..(401): unsure at all n locations
gtcaccgcggctgcagctgacgtgactgatcatctttgtctagtttcgangctgctgctctgattctgactttacatgatgaaccttttttaaaagatggcgcttggtccgaccccatgtttgcgagaatganaattctgatgaccaatacttcaacactctatcatagaggagatatgatgaatgcatcagggcatggttatgctatgcatgacaaacgtatttatcaaccgacacaagacgcccgaaagaccatcttttcttatccacaatgcattgggcatcatagtttgtttgtggctattaccatggtacctgatgcatgcaactaagaatgcaaggcatgagtaactccatggcggggtatgcatgactaacatagtgactaacgacaatagaag

SEQ ID NO: 124952 - DNA, 413 bp, Glycine max
agcttctcgaaagaacctctctatgagatctagatttgaatcgattatctaagcggagcttttttgggattggtgaatatttaagagtgttcctccatctccttccatgggcatgaagaaaacctcaaagatggcctcttctcccttgttagctttgtttttatggttcaaattttgtggatttttttggtttttgaacctagtaattggaagagattttttgactttttgtatgtttgggtgtcgaatcttacagtttagctcacagatttcatagttttttgtcatactcatgtgactctgattttgattgtttaaccgtgcttgtggtaggacgccatcatcagaaggagaaagaacatctttgttggccttagtgagaatcttacattgctataaactagagagacacc

SEQ ID NO: 124953 - DNA, 255 bp, Glycine max
tgtcgacacgacaagatcacgtgttgctttgtagaaagtatcccacgataaagtccatggataaatcttcccatggctgtaccggtatcggtagaggactcaacaacccaacttggtttctgttatcgtatttggtacactggcacgttaagcattctgctatgaaggcacgagtatcatctctaatggaatcccatgtaaagttttcttggtagcgatgaagtgttttttgaatccccatgtgaccacctgtcg

SEQ ID NO: 124954 - DNA, 336 bp, Glycine max
acttctggtaaagtacgttcaaacaatcactcaaaaaggacatcggtttcatcagctggtgccaaaactagcacaaaaagagtaggccttaaattaggttgtatgaagagtgataaaagaaaatgggccttggaggttcttgcgaggaaaacagctgccacaagcaggaacacagcaaatggaaatcaggaagacaatgcagtttttaaaggaaattatcctttgcttgtatgtaaatgatcttattagttttgtataaaattgttttattttacctttgacattgtcagaaattgtatatggcaattcactgttacttctttctgttattcgagt

SEQ ID NO: 124955 - DNA, 438 bp, Glycine max
  unsure (1)..(438): unsure at all n locations
tcccattccttctagtgttgggaacacctgtgccgtccatctttatgacctcaacttacaagactcaatcatctagggtcttcttcttcttattgctaatatttatngtattattattaaatcttagttaaaggcaaatatttttatatataatagtcatttaatcatatcatataaactaaaactttttattggattatcttagtaaatcacataatatgaagaataacatttaaatataacaatataaaacaataatattntacatataatacgatttttcaattttgaaaaaaatatgattaatataatttcaaataatncatactaatatagattagaagtgtcacgcgcggtttagttgattttttttacanaaatctcacatcaacatataatatatatggtgatgtgtctgactgatgtatattaaattta

SEQ ID NO: 124956 - DNA, 125 bp, Glycine max
tcgagtatcactctgagaatttacgcaggactgtcgaactgttgataaaagtctattgaactgtgggttcttcatagaaaatcggtcccattattgtgcgacagtaatggagctattgttcaagc

SEQ ID NO: 124957 - DNA, 375 bp, Glycine max
  unsure (1)..(375): unsure at all n locations
atccactaagtgcatactntgtgctaagcgctcagtcttcatgcgctaagccaagcttgctcgcgctaagcgcatagacccctgattggttggctgaatagttcaactaagcgtacatcactgtgctaagccccacatctttgtggtaattgaactttaaccagtgggcttagcgtggatgatgcgctaagcaccacttcttctcgggaaaaattttattgtagcagtgctaagccccacatccattatgtaacttgagcttttaagctgggcttagcgggccaggaagctctaagcgccaatctcttatgggttntgaattcttggaaatgcacttagcgcgcctgttgcgctaagcctgaactactctctata

SEQ ID NO: 124958 - DNA, 344 bp, Glycine max
  unsure (1)..(344): unsure at all n locations
agcttgcatctcatactagatatgtgtagatgtgaacatttaaacactcgatttaatattgctaagatttatatacctgtacttaacggaaaatccgtctaaccttactgaatatccttatcaagtgtgagtacgatgccaattctttgacttgaatactcaactatgagtcattgtcaccnactaccggaactgacatataatgaatttgactgagcttaatctgaaagagaacaccgtctttgtgatctattgaacgagacttgctctgccatataacaaaagtgaatggtccaaagtgaccatatgatacttcctataatgtggcacgatgccactccact

SEQ ID NO: 124959 - DNA, 426 bp, Glycine max
  unsure (1)..(426): unsure at all n locations
taatcactttcttacaacagactagcctccggacataatagacatcactctcaatatgtctaatactctcatggaatactggagtataagctatacgtangactgcctgaatatcacatcgtagcttcactagtgactgcagacatcgctatgtattgagggtctctctacaccttgcaacaacagcttgctgtttactcttccatgagacgagatctcgtactacagacgctcgctagcctgaagtggaacacctatcggagggagatcctgcccaatctgcatcgcaaaatacaactatttgagtggttcattgtctgatagagtagaccttgactgaggtccattaatgtatctaaattgaatactgatgattgataaccctccactgaatgaatgttgccttgataggaatgatagctcgca

SEQ ID NO: 124960 - DNA, 391 bp, Glycine max
gtcacctgcggctgcaagctggatgaggaaggtgaatgttaaacttcctgcttttattgttgaccacagagtggtacctggagatatgtcgcgggggtcaggagaccttggggacgtcaggtggggtgctattgcccaaaaccaagcttgaccaatcccgacccaacccgggcatagtcggtcagtgagaacctgtgatgtacctaaacagacgagctcctggcagtcaacaaataaaaggaacaaagaccacaaagcaaggaggcttgtggtggctggccagctgtgaattttgtgtgatatgtggagtatggcctctggtaatcgattaccaagggtgggtaatcgattacaaggcttaaaaatgaagactgaggctaagatggtctct

SEQ ID NO: 124961 - DNA, 496 bp, Glycine max
  unsure (1)..(496): unsure at all n locations
ctcaagcttccacgtgatttcgattcggagacataactcatctagacgctcaatattaacaacggaagctctcgagagatntgaatggtcgtaacatatcacacggatgctcgattcgaggacataattcatctagacgctcgatactgttcaacggaagctctcgagagattcgaatggccataacatttcactcggatgttcgattcagggacataactcatctagacgctcaaaatttaacaacggaagctgtcgagaaattcgaatgggcataagttttaacacggatgttcgattcgcggacataatatatcaagaggctcgaaattgaacagcggaagctctcgagaaattcgaatggtcataacttttcacacggatgttcgattcggggacataactcatctagacgctcaaaattaacaacggaagctctcgagaaatcgaatggtcataagtttcacacggatgtccgattctgggacataatata

SEQ ID NO: 124962 - DNA, 316 bp, Glycine max
tgctgatcacaatgagctatgtgtgaatagaacatgatcagtgtgccttttcatgcattggtacatagcagtttaaatatgattcaatacacatggatgtagttatgtttctttcctacatataaattgtgtgtttacatacatagttagggttggatcttggaattgttatgttgggtgccacatggatgcaaaggagtttggtttggaagaaggaattcctgtacatgcactgatttacacccaatggcctttttaggcagccgctacatatgattatcaacataaacgttgtaactcttgtcatttctgtaca

SEQ ID NO: 124963 - DNA, 288 bp, Glycine max
gggatcctctaagcacctgcggctgcagcttgactgagccataagagattatataacgcgaccatggcgtgagttacacctatcataacgactcactgaaccatcactgtttcgatcttattacaaatcatacctcatccatctgtaaataactcacatatgatttacctttatacataaaaaagagattgttccatcactaacttttccatgaaaagttcttagagaataaacttgtgctggacatatagttcatactgcacaacctgtgccgaaagatcgaatgac

SEQ ID NO: 124964 - DNA, 355 bp, Glycine max
tagcacaacaaatctgggaggctgttcatgctaacgataaaaaagctgtataccgttacattgttaattctgatgttgatgttaatgctgtttatgagccaacatgcagcagctccttaacccttgctaaagtaatgctattacaagagcaaactagccatgatcacggctctactttagcagggaacacattggactggtcctccactaaagaaggccaggtcatggacaatctagaagggtgcaccctacttcatctcgcatgtgaaactgcaaatattggcatggtggagctcctcctacagtatggtgcaaatgttccgcaagtgattcgagaggtcccccccactacatc

SEQ ID NO: 124965 - DNA, 405 bp, Glycine max
  unsure (1)..(405): unsure at all n locations
catgatataagagtctctctcctataaaggaatnggagtaatgatgggtcanagggaaccaattggcaagttagcctatgaagcacgaggatgcttgttgggtggcattntccgtttccggtattgaactgggacgggacaggtataacaaggagatggcattaatttcttgagtacgactgaccagacggagatgacagtgactttgtggggacctattagtgaagtggtggcatacacgtcctcacagtccanaattttaaaaaaggaaaaacataaatttaaattagagcttccaagattggcagccgattcactcnctctctcctctctttcactctcttgaatgcgggtggagagtgcggaccggaagttctgtcgtgtgcgcgacgtgcggcgtacagc

SEQ ID NO: 124966 - DNA, 337 bp, Glycine max
tataacgcaacgtgacaaacaaaagtgggcagttaactaaaatggtcatcattgtcaatgcggaaagtattctgcgcttcactatccatgttcacacattattgcagcttgtggttacgtgagcatgaactactaccaatatatagatgttgtttacacaaatgagcacatcttaaaagcttactccgcacaatggtggcctctagggaatgaagcggctattcctccttctgatgacgcatggacacttatccctgacccaactacaattcgtgcgaaaggtcagcccaactaacaaggataaggaatgaactgattgggtcgaaccatctgagca

SEQ ID NO: 124967 - DNA, 403 bp, Glycine max
  unsure (1)..(403): unsure at all n locations
ctaaacctgatggtactgtggataaatacaaggctcgccttgtagcctannggtttagccaaagagagaatgtgaatntcttcgacaccttttcaccagtcactagaataacatctattcgggtgctaatatctcttggtgctattcatagtctagtggtacaccaaatggatgttaaaactgtttttntaaatggtgaattggaagaggaaatctatatggagcaacctgaaaggtttgtgattcatggacaagaagataaagtctgcaagttagataaatctttgtatggtctanaacaagcacctaagcagtggcatgaaagggttgataacttaatagtctcgaatgggttaaggtgaatgaaagtgacaaatgcatttactacaaatctgtaaataat

SEQ ID NO: 124968 - DNA, 432 bp, Glycine max
  unsure (1)..(432): unsure at all n locations
ctctgtccggatcttgagcaccgcggatgcagcttaagaaaaagatggcctcagcatacccctatttacagaagggaattctatcaatagacctccaatctttaatggagagggttaccattactggaaaacccgaatgcaaatttttattgaggcaatagatctaaatatttgggaagccatagaaatagggccttatatacccaccacagtggaaatagtttcaatagatggtagttcatcaagtgaaagcataactatagaaaaacctagagatagatagtctgaagaggatagaaaacgagtacaatactacttaaaagccaaaaatataataacatctgccctgngaatggatgaatatttcagggtttcaaattgtaagagtgctaaagaaatgtgggacactttcgattaatgcactaactcatg

SEQ ID NO: 124969 - DNA, 330 bp, Glycine max
  unsure (1)..(330): unsure at all n locations
gcatcttctttctggccttcttctttatgagatccaagcttattgtggagtcctanacggatagatacaacaacaacttggctccagatgtgggccgagtaagcatatgcaaagtggccaggaaactcttcaacttagaacaaatcgctttgcactggttgatcctaatgaaatcggntggctggttcagcagttggaanaatgaattcgccttcttggccattctcagtagaaatcaagatagagccaccagtctatcgatcaacttctatacttccttcatgttttgtgggctgcacatggcagttcctacttcgtacttgtttgggt

SEQ ID NO: 124970 - DNA, 402 bp, Glycine max
  unsure (1)..(402): unsure at all n locations
agcttgagggaaaacttgatgccttgttcattctagtaactcagcttgccataaatcanaaatctgcatctgcacctgttactgttgcaagagtctgttgtctttatgttcttctggtgatcaccatacagatatctatccgtctttgcagcaatctggagtcaatgagaaacctaaagcctatgctgcaaacatttataatagaccccctcagtagcaaaaccaacaatagcagaataattatgatctttcaagcaacagatacaatccaggttggaggaatcttccaaatctgagatgggcaaatcctccacaacaacaacagcctatccctcctttccagaatgttgctggtccagcaggccatatgttcctccctaatacagcagcaataacaaagat

SEQ ID NO: 124971 - DNA, 307 bp, Glycine max
  unsure (1)..(307): unsure at all n locations
tgccactcaatcaagtgactataggcacatgatctaaggaatccttgtcgatacaggggaaacatctcttaaagcacaccttctctggtaaaatctttgcaccagtctaaacatctctttaaagtcaacacccttcttctgtgtaaatccttttcaccagtctagccttaaatctctcaatgttatcattngagtccatctttgtcttgaagaccccattacaaccaatgccttatatctcaagcactanctaactccatacacattagtgactagatgctctttattcatgggatcaatctacccc

SEQ ID NO: 124972 - DNA, 419 bp, Glycine max
  unsure (1)..(419): unsure at all n locations
gcaggatgcagcttcatctacacaaggctatattattattctatacttgctcaaactggtgttacgactaaaactccaccgaatcaaaatttgacccctcaacacccaatttaccctaaaaatggctcttgctttcaccttagtcactcatttttctcctttgctcaggccaagctttcccacaagtcctaaatgacattttaaactaggattaactcactttaacctctaattaccactaaatccagatttagcttttcaaaccctcaaagcctcacactttttcactcatatcactaccattctcacttttaaccctaggttagctctaccctccatctctatcagttttctaccaacgattntagcacaccgcatcacaaaacatcattatcacacctacaacagaatgggtatat

SEQ ID NO: 124973 - DNA, 452 bp, Glycine max
  unsure (1)..(452): unsure at all n locations
taactatgagagacacnntaattatctggctttcttatnttcttttctcctaaaagtacttattanaaagtntctacaaactgtgtcatagtaaactagtacataatcattagcatagaaaagacaagtataagacgaagaaaattaccaagttctgccaatagtggtaattatctgtacacttttcacgcctccaagcatcgagattaaatatattcatgccatangcccaagcacaagactttggattgaagctctccttgattaaaggatgagaagaaatcaagtactgtgcataccggtganaagaaccaaaacagatctcaacagcaccattaacctttccatccaaatcaattttccacaaacctgtcaagtctttttgaaccacaacatcatcattcanaagtaagatctttatacaagtaggatacatctctggcaaataaaat

SEQ ID NO: 124974 - DNA, 156 bp, Glycine max
  unsure (1)..(156): unsure at all n locations
actgtgctgtacanacaactgctaaaaattgctcgcacgactgtgagattgggcatgtctctgtgacaccacacgatctctatcttctttgcagcaatctaaagtcaatgagcaaccttgaagcctatgctgcaaacatttataatagaaccccct

SEQ ID NO: 124975 - DNA, 439 bp, Glycine max
  unsure (1)..(439): unsure at all n locations
tagcctagtttactatagttattattctanttcggttaagaatgagaaatcccaaagagaaaacgtccgattgactttccgctntattttactaanaggcatnattgtttattattatattattttttacctcttttttgatttccaacgtggttacggcacgaccaaacggtcggaattcattttaaccgaagttaacggataatacaattcanacgttcggtggaaatttattttattttaagttaagcgagaaatgacttaagtaaaatggcttaagcacgtcaaaagggggtataaaaagtaaagaaaacgagaataaaaatacacgaagcacaatgtggaccaccacgggtacataataatgaatcgaaaagcttggttcgaggtacttactccgtgaagatcgaagaacgatgaagaacgaatgaagaacgtc

SEQ ID NO: 124976 - DNA, 397 bp, Glycine max
agctttaacctttaatttaacccttaaaactttcccggccaccatggtctaaataaaccatggtggatggtccaaaggacactttaaattcctttttaatcactgaccttaccttaaccaggttttggccatgttaggtacctaaaaaaccatctgatattatttgaacccgacacatgaaattgaacagttccttttccttttacaggaatatagccaccattcccaattctgacatttgagacattagttagcttcaaatccttgaataaagtcttatcatatgtcatgtggttcgtacaaccactattaatcaaccaactttcacttgattcactactcaagaagcatgcaccacaaatagttggttctcccttcttgataacaatctgagctc

SEQ ID NO: 124977 - DNA, 448 bp, Glycine max
  unsure (1)..(448): unsure at all n locations
caagatcgcaatctcccaaaggtttcaagcttctaacctagggaatccttttcaggcattgttggcgctagaacaggaaaaagcagtgcaagaattcatagtccaattcgagaagcatgtcngaatggtgaaggggttggaggaaccgtttctggtgaaggtgtttcttanagggctaaaagaagagatcaacactaaggtaaggctctatgaaccaaaaaacttgatggaatctatggtcaaggcttgtaaggtagaagataagaattatgtcttaggaaaattacccgtgagtaatactaaggggtatatattttagaaacccagttatttgggtcagagatttgtaagagaatgacaaccaacaaatagtaaggtagatgaggaaagaagatgaggaaagaataatgtttcacctatgaagaanagtataatcttgctcatgtgt

SEQ ID NO: 124978 - DNA, 394 bp, Glycine max
  unsure (1)..(394): unsure at all n locations
agcttgtttagtaccacagctctgtttaccgtgccgccttccatggatcctacagcgccaatggcaatactggaacatcaaaacacagctccgtcctcatccgcacaaccaccaccaacaacaacacccacgtcaactctgccttccttggctgtttcccaccatcccaaactcaaaacagtcgcacccatggctctgctaccgcttccccgctttcatacgaccaatcgccacttccagctcagtcgtccgttgcccctatcactccgcactgcccaatgtcgttaccgtcatgaccattgccacaaaatcccttacgacaatgacaccatcttgctcggcaatgatgctgcgagcatcagattcatccgcgctgggttggattctttntatc

SEQ ID NO: 124979 - DNA, 493 bp, Glycine max
  unsure (1)..(493): unsure at all n locations
tagctaatggcttcttaatcaaacatggccttcatcctcttcatactcatgtattcattccatactcagagattcatgcanaatccatcacttactgctagtcgttctctcacaattaaagatcacactctcatcgagttgcggctaatgcattccttcataatcaacctgaaaaaccaactaacattntcagtcataatcctaattccatgttctttctcttctaataactgcatgttcattcaaggcatatggtttgcgcatttcagttcaatcacatcatacaatggatcactgaatttcanaacanagcatcaaaccactggataatatcaatgcactattcaatcatgctttatacaagctactaatcaaccaaaaaccataaattggaattaaaactgaactagaatttaaagctgaacatnatctaaatataaatgtctaagactaatatataaatgtcaaatgcgggaatagaatctgacttgca

SEQ ID NO: 124980 - DNA, 395 bp, Glycine max
agctttctttgagtttcctaatctcttattagcactcgctatgaggatgtcatcctcatacaagagaaggcaaagaacacacactttcccctttttccggatgtgtacacagcagtcatatctgtttctaatgaagccatatctgatcaagaactcatcaaatttcagataccacattcgagggctttgctttagtccatacaaggattttttcaacaagcacaccttgttctcctcttcttcaaaaccttcaggctggttcatgtaaatggtttccttaagatttccatggagaaaacctgttttaacatccagctgttcaagttccaaatcctactgatttaccagacccgtatgattctaattgaacaacgttcataacgggtgaaaaaatc

SEQ ID NO: 124981 - DNA, 326 bp, Glycine max
  unsure (1)..(326): unsure at all n locations
cttcacccgacgaagacactgacgagaacttatcttctccttcttggacagagtatggcaagctggaggcaaatacaatctgttgccattagaccttggatgcagctgtgatcgtatacccatatcagctagatcttgacgggtattcaagccatcattcgtcttgccttgaatgttaaagagcgtgccagtcacactgtcacaaacatntttctacacatgcataacatcaatacaatgtctaacgtcaggatcacaccagtgcgaaagataccagagaatggacctcttcttccatatgcgactctgactagtatccttctttt

SEQ ID NO: 124982 - DNA, 412 bp, Glycine max
ggatccttaagcaccgcggctgcagcttgatgattacattctcccttttctaagcaaattcttaattcttcttgacatcatcaaaatcttcatgatttacaattggtacctattttataccaatctaagttatgaaatttcaattgaaaagtagtctgaaaacaagtgccaaatctagaggtttcttgagtgtttttttttatagtttttctactctgctctagagccattctaggtttctctttgagtcctagctatcttttatgtgcttttcattgctttaattgttgaataatccttgaagatttgtcttgttaaaactctattggtttagctttcatttcatttttttgttctttggttattgcttgtctttttgttctgtgcttgggagttgccatatcggaattga

SEQ ID NO: 124983 - DNA, 494 bp, Glycine max
  unsure (1)..(494): unsure at all n locations
tctctcttcttgtntacatgattatatttgtttctaatccttgtatttgtggtatgttttatgacatttgaatacttagtatttcttttattatttgattagtatgagtgaacatgatgattatatttacttgctcttggttgtttatggttatgagttntaaactcaattattntgatgatatatgattagtggtatgtacttttatttggttattatgaatgactntntggattatatgacattntatgaagtattatatttctagtgtgatgaaatggtatgatatcttgtttgatcgtttctattctcgtgtatttggctatattattatgacatttgaacaaattagtatttcctttatttgcatggtatgaatgaacaatttatgaatatgttatatgactatgtgattttctatatatttgatctaagcatgtttctttgctcatgaatnnagttatattnttcatgatnggtttatattcatcaat

SEQ ID NO: 124984 - DNA, 341 bp, Glycine max
tcttgttttgaacttcttctttcacgacaagtacttcaattccatatgcttagcacccgtagagtacttgtcgttcttagaaaagaatactgctgcggagttatcacaatacattttcagcggcctagcaatactgtcgacaattccaagccctgaaataaagttccgcagccaattagcctgaattgtagcctcaaaacatgctacaaattcagcttccatggtggatgcagcaacaactgattgttttgcactcttccatgatattgctcctccggctaagagaaatacaaagccaagagtggattttcttgtatccaccatccagcaaagtctgagtc

SEQ ID NO: 124985 - DNA, 308 bp, Glycine max
  unsure (1)..(308): unsure at all n locations
aacactttctgcataaaattanatgatgttaagatntcaattattcacataaaaaggaagagataagagacnaaaaataacaattcctacantaattaatcccaaaatatacatatacatagcatgcagttatcaccaggcttaaatttctagccaacctctacatcttagcatacttggagtaccaaattctgacgattcaaggaagcctnctcaaactggttctgaacaaatggctatgcatcctggacaagtataaataaataaatattgtgtctgaatggtttgagggtatatggntctctaca

SEQ ID NO: 124986 - DNA, 387 bp, Glycine max
  unsure (1)..(387): unsure at all n locations
agcttggtgggttgccaagaactagtcgtagtcttggtggttaagataaacttgtataaatctctatgtgcattttccttttctctatatcttccttgtactgactgtgggttatttttaagtctattaagtattgtctgtttcgaanaaaatttgtgaaaaaattttcaatcaaaattcaccctctttcttgtgactttgcctttacagtttggttataatgctttgctttgctttgcattgttgactgctaagtttgtgggggagacttgggttcgattctcacataatacatctttggggaggagtgaagagattatgtgtgactaaggttcagacccaggattatctaaaaaattatctaaggctggagcttgtataaatacc

SEQ ID NO: 124987 - DNA, 338 bp, Glycine max
  unsure (1)..(338): unsure at all n locations
tcttgctaaaatcctagataaatctcttgtataactnggatgtcgcagaanagaacgtacttcccgcacagatgcgtcgtaaggaagagaagtaataacatcgatctttgccttatcgacctcaatacctctactagagactgaatgccctaagactatacctccatggaccataaaatgacattnttcanagttaagaacaagggtagtctcagcatcggtcaagaactctacagaggttatccaaacatgcatcanaggaagaaccataaacaatgagatcatccataaacaccttcatacaactctataatanatcagaaaagatactcaccatg

SEQ ID NO: 124988 - DNA, 298 bp, Glycine max
  unsure (1)..(298): unsure at all n locations
atattatactgtcaccggagagaaccctgatgacanaaccatcgatctccttatttctacaggtatgtgtcaactctcatacttaaggtcatgtaacgtgcgttacgtcgttatactggaatatgttggttcggcttatcaataatccagagtatattatgatatcgaaaatctgctactgcgagatataatttaatgacaaccaaggccaacttataatatctgttatgtccatgatgagaatctttgctacagaataaggagtactatctattcatttttgtcctattatagctaa

SEQ ID NO: 124989 - DNA, 362 bp, Glycine max
  unsure (1)..(362): unsure at all n locations
tttaattatgaagatgggggccgcaaggatggatcacttgatcataaaatgcctttataccatgcaagaaccactcttctaaaagctcaagtttttatgaggagacccaacaatgatnttatatatctagacatcatgtataaatctcatccactataataagtttaatattaagatttataactgggctgccttttcatcttgagaaaattgtgtagataaatttataaatatttgataataaaatgatttccatatcttcaccaaagaggaaatacaaaggcatttaaagaatgaaccaagcctaaaaacatcgctaaactntctcccaagtccggttagtatcccccaattttctccta

SEQ ID NO: 124990 - DNA, 320 bp, Glycine max
aatatattatattcatatatattactcaattggattagatctcttagtactcaccattagtacaagataaagagactgttatacatacatagtaggctcacgcctaatatagctctaaatactacataacacttttcctggtgggtgggatctttcatgctcaatgctgacaccaagcgcttggcttactatcaaacacaaatattgatcatgataatttttgtcctaattgaataagaatatatgattatgacggaatatgactattttaatataagattatttataaagaataatagagtccaatgaaatatagagta

SEQ ID NO: 124991 - DNA, 403 bp, Glycine max
agcttatatatacagaatgaaaaattaaaacttcttattataaaccatttttttataatagatgcacaaagattaatgcaggccatagaagtacaggatgaacttactaatttagaatatagatcagatcatattttccttgacttacagacaccacccatattgattctgttagttctgtgcactgcacaccatcattgctcttgcagtcttgctctcccatcatgcaccattttacagaatgttccacgtcaccccgcctagtgttataatgttcatttctgattttggttaataatccctttctattacagacacattactcattcactcactcctccacggctaccaaaactaatttacactttaactataacagtctttatgcattcttccaggaaaa

SEQ ID NO: 124992 - DNA, 366 bp, Glycine max
  unsure (1)..(366): unsure at all n locations
gtggcttcaagagtgtgcaacatgacactggtanaaaaaaacacgttaacttgcgaatagaccccgtataagcaaaaataagcatagttggagctgatttctgtcgggcaaaatggtgagaattttcacgttattagcggatctagaaattataaaacaagcttaaattgtattttaacaagcgaaagcaaagcttagttaaagaggctcgttaaatttatatatgtccagtaaatagtatttccatcgcataattaatcgtttggcttgagcatgggatatataggttcccttctcttgtgaatgtgctctaaacaccgnggtatgacgatgatgagtaatgagtaatattaaagcgtggcacaa

SEQ ID NO: 124993 - DNA, 405 bp, Glycine max
agcttgtgtcatttagcttgacatgtattattagctattaagtgtttgagactttccaaaccctcctagatcagtttttgtacaagtcagttaaaaaaattacggatcgcggctttatatatccacatatagctgggttggcaaaattaaccaaaataaactaagggttttactcaacctatttcaatggtttttatgaaaaacctctcaactccatccacattatgagcaataaatgaccaacaaggttcacctgtataacagcacaaaaatcacaaatattatatgagcatatgctaactcattgaaccaataaatagaaaattatgtgaaaattaacaaatgaggatatgataaacgaaatagtatcaaagatatgctattgccagtagaaatgttgatgca

SEQ ID NO: 124994 - DNA, 310 bp, Glycine max
  unsure (1)..(310): unsure at all n locations
ctgtttcttggtacatgttttttcagttgtcacaacctgcattggtttaaaaatgccatgtcacccaaaacattttaaagaacccgcatttttattctatcttttatatttttttggtttcatgccacaactggcatgtgcttanacatctttttcatttgaaaagtaatttgacttaaatttattaattttagaccaaaaacattaaactttataaaaatgtcatggtactttttactctctctgtactagtggaaaaatgagtagtggtgaaaaaaatctataaagaaatgtcgatggnggtagtatg

SEQ ID NO: 124995 - DNA, 424 bp, Glycine max
  unsure (1)..(424): unsure at all n locations
agtccacctgcacgcctgcaagctngctctaaatttacattgatgtttgtatttatgggaggaggttgtatgccatttttgttttaagagtagtgtctcactggtaagactaactttccaaatgtttgcctttgcaggaaatggccccgaggaagcttgcctcaaagaggtccaggaaggacaaggcagctgaaggaactagttccgctccggagtatgacagtcaccgctttaggagtgctgtacaccagcagcgcttcgaggccatcaagggatggtcgtttctccgggagcgacgcgtccagctcagggacgatgagtatactgatttccaggaggaaatagggcgccggcggtgggcaccactggttactcctatggccaagtcgatccagaaatagtccttgagcctatgccaatgctt

SEQ ID NO: 124996 - DNA, 469 bp, Glycine max
  unsure (1)..(469): unsure at all n locations
tactaagctggcantactcggttaantnctcttcttctactgagacagtgagtatattgaatctaatattanaattaaaagttattatggaattgttaatgcttgtgattctgacttatagttactgcatatatgtgtntatgttattatagaaatggtgatattgaagttcaaactcaatcacaagtgatacaagctgatagtgagggtgatgctgatcctacttattcaccttcatatttaagtggggatgacgatatatacttggatgatgagactatagcatcgtttatgtctaaaaaaaagcaaaggcaagtgtgcaaccttcaagtgatgaagataatgagcagtcagacaaagattcgtggcactcagaggaagtgaagagcccaattagtacagatgatgangatgatgagaaggttgttttcccaattttaatccaattcaacctttggtcaagttacct

SEQ ID NO: 124997 - DNA, 397 bp, Glycine max
agcttgcacagttcataaaatttatattctttaaaaataactatatatgaatacctatattagagagtataagaattttttttaaaaaaaatataatgggggttctccttctgtgtagatttgcatcacttatgttttcattaagctggaatataattactatatttcagaaaaaagagaaacattacttgatcattaaaaacagaattcagcttaagttcgagcttcagctgctgaagattgatcctcttcctaataacagactcccacagggacaaagtagtaatccatacattatatagagttttctgcaccattgaataaggtttttgtaaatacaatttagccaactatttgatatattccatcatactgaagcagaagaactactttaaaa

SEQ ID NO: 124998 - DNA, 468 bp, Glycine max
  unsure (1)..(468): unsure at all n locations
ctcataatnttntcttaccttctttcatttgtgttcttcatttttctccatttatctnctcacatgtcttgtttaaatattgtaacatgattctttacgggttccaccgattaaacttgctatagaagttagaattgattttctatggttcanatttcttggtcttagttcttgaaccatgaattgtgttgagtttaagttccctttgagtttgtcttgttatttttgtggctgaaacctaaaccataaaattcttacaaaaatattaaagtagaaggaaacctcanaaatctagagtgacttgttcacctattgtagttttgtcatagaagtcatgtctagtcatgaaacttgtcacataagaattcttatngtgngctgaatttaatttcttgttctttgctaactcattngtcatgagtgatgaanattctttacctattattgattgagtcaatcttcatgtaa

SEQ ID NO: 124999 - DNA, 406 bp, Glycine max
  unsure (1)..(406): unsure at all n locations
agcttaagataaagagcanaataccgttcttgtatattctgngnctggtggctgctgnaaaagatcttggttctatggacgtggaagatacgagaaagtacatgtacacatgtacatccgtcaaaagatttgaacaatttttaatgttaaaatttatattataattttgtgcacaagatttataagagagagtaaagatacaccattcagagaagggttgaagctactttttctttggagtgtggtggagagagaatcaacagtcacacaaacaacacaacacaaacgagggtgatgaatcaaactcaagaagaaaatgaaagcataacagtttgttgtcttcaacacacacacgacccagctatcacattcacattacactcgagcattcattctattattatta

SEQ ID NO: 125000 - DNA, 498 bp, Glycine max
  unsure (1)..(498): unsure at all n locations
cgtagcatggctgcacttcatggaacatttattatggtnaccgcttctccctgcttactgtgaacaaataaggaaaaccaaccctggtagcattgcgtctgttgntgccactggacaagaaaattgttntcaacgactgtntatttcttatcgtgcatcaatttatgggtttataaatgcttgtaggccacttttagaacttgacagagcacatcttataggaaaatacctaggtacattgctctgtgctgcagctgttgatgccgatgatgctttgttcctttggctatngctgnntgtgactcagaaagtgatgaaaactggatgtggttcatgtcagaattgcggaaacttctatgagtanacacagacaacatgcctagactgacaatattgtctgaaaggcaaagaggcttggtggaggctgtagaaacacatttccctactgcttcacatggtttctgtctgcgttctnngtagtgaaaatttcgtgataca

SEQ ID NO: 125001 - DNA, 408 bp, Glycine max
  unsure (1)..(408): unsure at all n locations
ggctgcagcttgaagtgaaatcgaatttctcgacttaagtacgcaacacaaagaatagtttactctagaatcagaaggtatggtcaaaagagtattctatatgaaatatatctcaatacgagtcctcgaactatagagtatcaacattgctaagaacaagaaatcacgaacaaccatactatctatgcaattaaggcaaaacaccatactactaacatacctagaattataaggttcttataataagtatacaacgtacatataagaagtatgaatttaatagttaataaggatgtattaaagaatcacaaacttcaactactgcattcacgactacacacaaaataaagtgagttaagcgtcatgcgtttacacatnaacgagacatactcatccaagacatatatt

SEQ ID NO: 125002 - DNA, 448 bp, Glycine max
  unsure (1)..(448): unsure at all n locations
aatcttctggttattcttgtataaactggaatcagcaatangctttgcattgttaggctgagttaatgcagccactgtagcgtccctaaattaatgactggtttaatagtaataatttaaataacaaaaaccacggtaaattttttttttcttcttttcccttttcatatctttctcttttcaccataactaggtttagaaggaaaatcctcactacagagtcctgaatggccagttcacaactctattcggagtcatttctttcttaccactcataatctctaaactaattttgctgttcaaaaggaagaatgtaccagccattactttatgtcgtcacatgaaaataaaagaataaaatacggtcggtaaactcttttacaaataaagtganatgtttcttttcagtacaaactgacataatatttctcatttaagtgtcaaatat

SEQ ID NO: 125003 - DNA, 90 bp, Glycine max
  unsure (1)..(90): unsure at all n locations
agcttgactaaaaaacctaataatgtatacactaacctataaanacactcactttatgccttctacctatggaataccatactcttcatg

SEQ ID NO: 125004 - DNA, 145 bp, Glycine max
aaatgagcgtccaatatccctcatctccctgctcttctagtttctagaactcttattgttgctatgcgaagagatttacgacaaccccttctggtgcccctcattccattaactacggagtagcggtgttcacgtctgccttgct

SEQ ID NO: 125005 - DNA, 410 bp, Glycine max
  unsure (1)..(410): unsure at all n locations
agcttgatagcacgcagagtctaacttcatcgtctgcgcccttcgtcaatcgcggccgacaagcctgttgacacccggagatttacgtcatcttccgcgctcacaagatctgtcatactgacatttgagtcacgttgacgggcggaaatacccgagtggttatccgtataaacattcttttttgctgattgtaagacgaaaagcctgatagcacgcacagactaccatcgtcttctacgcccttcgtcaatcgcggccgacaagcccgttgacacgcggagatttacgtcatcttccgcgctcataagatctgtcatactgacatttgagtcacgctgacgggcggaaatacccgagtggttaccgcacaaacattcttttttgcctctgtacgacgaanagcctgatag

SEQ ID NO: 125006 - DNA, 221 bp, Glycine max
  unsure (1)..(221): unsure at all n locations
tttcgtctacagacagcanaaagaatgttatacggataaccactctggtatttccgcccgtcagcgtgactcanatgtgagtatgacagatcttgtgatcgcggaagatgacgtaaatctccgcgtgtcaacgggcttgtcggccgcgattgacgaagggcgcagaatacgacattagtctctgcgtgctattaggcttttcgtcttacagacagcaaaaa

SEQ ID NO: 125007 - DNA, 415 bp, Glycine max
  unsure (1)..(415): unsure at all n locations
gggatccttaagtcacctgcggcatgcaagcttgcctanagaggtccaggatgtcaggcgccgaagaactattccgcccgagtacgacagtcaccgctttaggagcgttgtacaccagcagcgcttcgaaaccatcaagggatggtcgtttctccgggagcgacgcgtccagctcagggacgacgagtatactgatttccaggaggaaatatggcgccggcggtgggcaccactggttactcccatggccaagtttgatccagaaatagtccttgagttttatgccaatgcttggccaacagaggagggcgtgcgtgacatgagatcctgggttaggggtcagtggatcccgttcgatgccgacgctatccccagctcctgngatatccgacgtattggaagagggccaggaatg

SEQ ID NO: 125008 - DNA, 106 bp, Glycine max
  unsure (1)..(106): unsure at all n locations
cattattcacggatattggatcgaaaaaatgatagctgacgtcggcatggagagatgaccgatcgaggtctaannaagaagcatcaccggatgccgccgacaaaca

SEQ ID NO: 125009 - DNA, 408 bp, Glycine max
  unsure (1)..(408): unsure at all n locations
caagctttctagtgaggcttctttgagaatcttccttgataggctcctttgagaagctagagtcttaactatccacacccctctaataactaaactaacctccttgaaaataaaacatggataaaataacacaacaaataaaatcaaacatcaattataattgctaataatatttcaaggtgttacagcttgtccaaagtagccttgggcatgatgttgagggaagagccattgtcgataagcactttggccactatgtggtgatggaagcttgcttgtggagcttctatggaggctggatctttgagcttcaatgaggtccttcaatggtgattttacaccatggagatgcancggaaggccaacgacaaaaggagaggggagccccatccactanggaataagcca

SEQ ID NO: 125010 - DNA, 415 bp, Glycine max
  unsure (1)..(415): unsure at all n locations
gcttagcgcacaacaaaaccaattaattctaagtgtctaagaacacattactnccttaacgcacagacgtgcttagcgagttcataagcaattgaactttcaaccaaagaagatgaacgcgcttagcgggacatggccacgcttagcgagttcatctggaaatccagatgttcaacgaanatgatgaactcgcttagcgcagcaagacgcttagcgcgctcatcgcgatntccagaaaaagcaggggcttctcatccctccacttaggcccctataaggccatttaaccctaatcaaaacaagcacattgtatccacaataaatccctgattcaagtctaacgaacaaataacctaatagaactaagtattaacagaaattcaacctaacactactaaaataactaacctaaagt

SEQ ID NO: 125011 - DNA, 379 bp, Glycine max
atgtgttttttgtgggtatggatcaatttaaaaaggttattgtgcttaccatccaccatcaaataaattttatatctctatggagatgacatttaatgagcataatttttttatgttgattctacactttaaggaggaaatgaaagtgaagtgcataatcatgatgttaatatgtttgatatctccgatataaaattatattgtgaagataaattatcgtgtgaggatcattctgcaggaagtaagccaatcctaaagatggacaattcttttttggataatacagtgtcttctgatcctaaccaattggctcaatcttctccataggttcgacttcctcttcagaggtaccttctgccctatctctgataatactaat

SEQ ID NO: 125012 - DNA, 262 bp, Glycine max
  unsure (1)..(262): unsure at all n locations
atttcctttatatggtaacctaaataatatatgtctacaaatagatactacagggtatcaccatatgggcatattacatntaatcaaaagtattgtgtcgtattgttntgtaaagttcacttagaaatccttcgccctctcataattntatctccaatggaatngngaagcataatgcacttncttcaaataagaccatnttagtcactggtgccactggcttcctcgcanaaagtctatccctttcnttctatctatctaa

SEQ ID NO: 125013 - DNA, 426 bp, Glycine max
atcctctgagtcacctgcggctgcagctagaaataagagatataaattccaaacatatggggagtatggaatgagtgaatgttatatcttgaatatattctatattgtatcttgatttcaggaattaaattgtcatcatcaaaaagggggagattgtagaagcaaagactttgatgttttgatgatgccatgtgatcatgtgcttctcaagtttaattcaagtggatcatgcgcttcttaagtttaaatctagacatgaatccaagaaattcaagatacatcatcaagaaaatctctacagatttaggaagggaattccaagttgaaacaacaagaggtctggccaatgaatttaagctaaaatgttttttacaagagactactctctggtaatcgattacaaaggatgtaatcgattaccagtgg

SEQ ID NO: 125014 - DNA, 317 bp, Glycine max
  unsure (1)..(317): unsure at all n locations
tacctcgataatcttgtagccttacctattccttctgttgaactatcaccttggaaacatattacctatctaagaantgacttgaatgttgaatatgtgggtttgttatgacactgttgtggttcttatagatttggctctgatacttgttggtaagtgactgcaatgaagtgttcaagtaaagaaaaaaaatcaaaaaattaaaaaaagaacatagtgtgataactatgccaatgaacttggcactagtaattactactttattcatttttaaagacttcctgtcttatcttgataccttcttttctctgctgcct

SEQ ID NO: 125015 - DNA, 428 bp, Glycine max
actctacctcacgcatgcacctctagcattggtttattgtcttaattttataggagtcgtcttctgtcaaaaaatacaaatgctaggatttgtactcgcaattggttgttaggttttgttaataatgataatttatttaatttaaacttagttatttattattatgataatcatctacatgtgtcattttgtaaatttaattattttctattttgattttgtgatatgtagatgatgatggtgacattggtgacatcaaagataagaaatgggagtcatcttccaatgaagtgtccaatgttttggatttggaagatgatgaagcttaatttagttgttttagtttgactttgtgaaaataccatagccattggcattaagagactattttggattgttgcttcttttcatttcatggatattggact

SEQ ID NO: 125016 - DNA, 310 bp, Glycine max
  unsure (1)..(310): unsure at all n locations
gatggcagcctaacgattntggaactcgccgcgctccttcgatcgttggggctgaatccctcaggggacgaaatccatgccttgntagccaacatggactcaaatggcaatggctttgttggagttgatgagttggtggaagcaatattgcatgacataagtgcagagaatttttgaaccaagaaatgctatttggggtgttcaagtgtnntgaccgtgatgggaacggttacataacagctgcgggagtagcangggcaatggcaaaaatgggtcaaccccttacatatagagagctcacagagatgat

SEQ ID NO: 125017 - DNA, 392 bp, Glycine max
gggaccttaagtcacctgcaggctcaactatacagccgctaatcactcatttattgtctatgttacactcctctttattattagtgctaaggattgcaacatgatattcattgctatgctttggcaaaagcatatatatataactcaagctatttggttagtagctagtaacagatactatatatgcagcttcagttgtattttgaattgcactttcttagtttctctgaaaatttcattggttttagggtccaatgccatgtagttgattgcctacactgtcggttcattgtgctgagatatcaacacctatattttttattcatttatcattgttatatgacctttataacgaactagttttgacataaatttagtatcatgttgaaaaa

SEQ ID NO: 125018 - DNA, 488 bp, Glycine max
  unsure (1)..(488): unsure at all n locations
ctaactaaattccactaatatatagagtgactactcaaaagtaagggatgtgccttgattangcccatctaatctatctaattaaaccaattacacaaaataaagcccanactcgtagcccaattattcaagtgcagaggttctgacttccaagctcaatntaaccctcanaatggcagaaatggccaaatcttatttgtgaaaaaattgaacctcttgttattagtttttgagggactactcacacgctccatntggagttctgtagtgtcctataagccctgcacaaggcagataggtcaagtaggcacaattatcaattaagctcaatgattttcctaagaccaagactangttaaagtgagaaaataaagggtgaagaggtgtcaattaagccacgaataatagaaaaaatactagactacaagtgctcaatcacaattaaaagtattttgggtattgacatcttgtnaagaaaactataacat

SEQ ID NO: 125019 - DNA, 401 bp, Glycine max
  unsure (1)..(401): unsure at all n locations
agcttgctaacccatggaagctcctaatatctcccacactntntggagtgggccattcttggatgaccttaattttctcagggtccacttggaccccatttctaccaactacaaaccctaaaaaaactatatcatctgcacaaaaggtacacttctctatatttgcatagagggtgtttttcctaaggactgaaggaacttgcctgagatgtcctaagtgatcatctaggctcctactgtacactaaaatatcatcaaaataaaaaaactaaaaatctacctatgaaatcccttaagacgtgatgcataagcctcataaaggtgcttggtgcattagtgagcccaaaagggcatctagccattcatacaaaccaactcggtcttgaaagcagttttccact

SEQ ID NO: 125020 - DNA, 523 bp, Glycine max
  unsure (1)..(523): unsure at all n locations
ctaagcttagacaactggtatcgatacgataggctataatcgattaatcagagaattntngcctcttgaagaanatnntctaacctagaaactnttcttcacactaaccatgatgatgaatgatgcaatacatatatcatatgtactaagatgcaacatataagataacaaccaatacaaatgccacttaagggagttaggcatgtaaaagtcaacacatcttcaagcttttccttgagcttcnaagctttggcatttatgtgttcaccatgttgcttatgttgctccccctatctctaataatctcccnncttttggctttggtgatgccaaacttaaatatcacattgagtgcatttggagggtctaagtcttgagaatggagacttgattcttagtncaatcctgaaaaaattattaatacttaagaagagaattatcatcatcatcgncatatatcatacatatatatattattgatattaatgcantggtcaatgcttatgcaatgcaatcaatatgc

SEQ ID NO: 125021 - DNA, 403 bp, Glycine max
agcttcaggaagaagcagctaagatcccagaacggattcggagttcttacagagaaaactcagaaaaaaagaaaggaaaaataatgctttgctaatgtttattgaattactgacgttgaatctaatgagggaattctctttccaagggtttcccctttctacaaaactacaacagagcaaatgctaggttcccaaatgctagctaatctgaaaagcttttccttctaccccttctactgtttcggccaagtccctgatattccaaccataaccaccttactaattctataacttcctaaatcttattagaagcacattaagaacaaacaagaccctaagagctgtcatagttcttcgtaagaaaccgttcactggaaccatctagaagtccttttaccagaac

SEQ ID NO: 125022 - DNA, 445 bp, Glycine max
  unsure (1)..(445): unsure at all n locations
cctttttanacgccttgcccagctgtcgtctaaaccttccanacctcctatatgagcaatcantaattttacttaaacacataatatctatgaatnttatcattgttgtggaaataagtcaatgagcacattgaaattctaaattaacctgtcggcgttgtgactcctttttttcttccgggaagaaatacccncacatcattctgtacatcgtttctgtcaaatggatcttaaggggataaatctctacctatatagagtaaagtatgttcatgttatgaaacaaaaggcacaagtattggctttcccagcaaatatctccagtaataattttacttcactcattntctatgattcccagttctccagacaatttctgagttcagttgtattactgttactggataataacaatntctgatattagaaaaacaaaattcttcac

SEQ ID NO: 125023 - DNA, 398 bp, Glycine max
  unsure (1)..(398): unsure at all n locations
agcttgtagggtgcaccccanattcttgtgtcatatgctaaactcgatcccatatctactagataatacaatggtagccataaccctaaccaagttcatcaacctgcatttcttcgagaatacgactcgaacgcaacgtgtgcttgtcacagataaaccccgcggcgttccattgatcattgtaaggctctgaactgtaaggtgcgacgtctaattgatgctggctgaaatttgaggagaatcatgtgtaaatcctgacattgacaagagatgccacacatggggcaattttgaaagctgttgttacatgtctctaatgactcaccaggattttcaactttcaccggaatgtggcgcaaaccatgggtctgattgccacgctacctgcgctcctgact

SEQ ID NO: 125024 - DNA, 451 bp, Glycine max
  unsure (1)..(451): unsure at all n locations
gcaatcgtctatgccacgtgtgtctcgcgcctgtggcttatgttcttcataagacacttcccctgatgatcttgtgcctccagctgagccttaatctgatgtggatcatactgttccagcacgtcaccctatggagactcgtgctaaaactggtatctacaaaacctcgccactttgcatatataactacttatcgaccatcttctcttttacatgcattattcaccacttctaagcctataggatctaaatatgctgccaagcatcctagctggcttgctgccatgaatgacgaactcacagccttacacttcaacaagacttgngaacttgctcctcgaccacctaacactaacatggttggcttaaatgagtattgactaagatcttttgatggtctattgacgctcacacacgatggtgccanggattactagactccgatgtgata

SEQ ID NO: 125025 - DNA, 373 bp, Glycine max
atccttgagtcacctgcggctgcagcttacatgttacttattgtgattatgctacttcaaaattatttgtgttgtgatgaagtgattgaatcgagctatctataatgtgatatcacattatattcgttagaaagtgaaatataataaatcacactagaagggggtggaatagcgttagtcaaaatataaaacttttttgaaagggaagatgtttataataaacaagtatataaaaccctctccagtgactaaaagtggattgtagtccaatgatgtataaaacatattgtttagtgaaaaccttgtttgcaaaaagcaccaatgatggactttgaaatactttaataagctaaaaaagagctatcaaaatact

SEQ ID NO: 125026 - DNA, 340 bp, Glycine max
  unsure (1)..(340): unsure at all n locations
agcttgaaaatcctaatgagtcattatagatctcttgaacaaccttcaaattgccccatgtgtggcatctcttgtcaatgtcgggattcacaagcgattctcctcaaatttcagccagcccgcatcaattagaccttgcaccttatgcttcagggtcctacaatgctcaatggaatgccccagggcccctctatgataagcacatgttgcgttcgagtcgtattctcggaaaaatggaggttgaggaaccttggctggggttatggcaaccattgaattatcgagtagatatgggagcaattcancataggacactggaattggggtgaattctacagac

SEQ ID NO: 125027 - DNA, 229 bp, Glycine max
tataaaggggaaaccctatttctgaaatacgataatgcctagcccttctgcctaatagtctcactttgtgaaatctgatttcaataatgcctaccactgtccctagccatcatctcttgtagtattgtgacaataaccggtatcctaaccgtcatgataacctagatttggtttgtgggtactgcttacctaccttattttgtttaaattaaagactacagctgtctac

SEQ ID NO: 125028 - DNA, 399 bp, Glycine max
  unsure (1)..(399): unsure at all n locations
agctttgaaagtaggcaagatatataaactaggtgaatcctaagagtgtttggatgaccacattcaaggttcccaacaaaacactcactatcctaaggaaaaattgcctaaaattattacacacaaatggaagtttggtaacctattggaggctcctaacacacttccaatgaaaggcctttttgttacaaaacttgaaagcaatgaaggtaagtaaattgcaaattacaaaattacaaaacagtcctcaattttggtggttgttctctctttggtgattcactncaattggagtgcttcttagtccaatagctcttaaggtggttggccccttgcttcaggactcaaatttctgagggatggccccaatccttctccaattccctatatggcaaccca

SEQ ID NO: 125029 - DNA, 378 bp, Glycine max
  unsure (1)..(378): unsure at all n locations
ccttagttcactctagttattagtcaattcaattaagaatgagaaatcccaaagagaanacgtccgattganttttcgctttattttactaaaaggggtattttttattattatattattattttacctcttttttgatttccaacgtggttatggcacgaccgaacggtcggaattcattntaaccaaaattaacggatgatacaattcanacgatcggtggaaatntattttatttttagattaagcgagaaatgacttaaataaatggcttaagcacgtcaaaagggggtataaaaagcaaatganaacgagaataaaaatacatganacanaatgtggaccaccacgggtacatagaatgaattgaaaagctcg

SEQ ID NO: 125030 - DNA, 475 bp, Glycine max
  unsure (1)..(475): unsure at all n locations
ctcataaacgtgccagcttcttactatggatctctcgaattggctgagctccaaccactgctatgactgccgttggatctttgagaagatgtctggagtgtgcgcgaagcttncattcccgagagcatttctcatttgagcgtttcagcctttgctntcgtgtaacttaggaaaaatgccatttcttctccttttctttcttcccaaacccatttctaacgtnccaagcactntctccatcacccacaaccaccattactccattagccaccataaaccgtcattgttctccgttgaaaccccacaccgagaggaacccttcaaccgaagtgggaatcttcaacttgccttgcggttcgatagagaatgaaaccttaatctgatctatcatcttccttcganggaaccatggttctacgcttggttcttgttagttncacgttggcttgcatcttttctgacattggaaccacca

SEQ ID NO: 125031 - DNA, 192 bp, Glycine max
tctagctgtacctcgtttatggcgatctggtgctgctattgcgtttgcctataaactttctattatagttgtgatgagagtgagacgctccgattctccaactcatattatttctctcagaaaaacttaatcactactccatggtttcataagatttactccaacttcccctcgacatgagtatagtgtact

SEQ ID NO: 125032 - DNA, 406 bp, Glycine max
  unsure (1)..(406): unsure at all n locations
tgcagctacagtttccgcctctatcttacctctcttganacactngaactttctggtgttccagctctgactattctccacacatattaggagagatgaaaaacataaagatactttatttgattgaccttcccataaaagaattgccattttcatttcaaaatcttattggactcagtgagataaacctgaataggtgtggaattgttcagttacgatctagcttagccatgatgcccgaactgtctgcattctacattgcagattgcaacaggtggcaatgggtagaatcggaagaaggtgaagaaaaagtggactcaatacaatattcaaaggcacgtcagtttcgtgccataaacgcaatctatgtgatgattttctttaacacgctccaagaggtttactc

SEQ ID NO: 125033 - DNA, 184 bp, Glycine max
tccctttcaaatcaatcataaatatatgtaagacctgcaaataggtttctattgacttttcttgataccttcgattgaatgttgtggaattcaaaaaacttgttccgcgtaaaagaactgaagtgctctccatataatgactgatcattgcttgtatatgagcatagaagatatattaactgtt

SEQ ID NO: 125034 - DNA, 411 bp, Glycine max
agcttcaagatccactgttttcctatctatctcaagaaaataacatgttatctatcagcataaacactgttttcctatacataaaatgaccattcatcccagtgcaaagtatagtatgaacatgcatcagggggaaatcccctgcccttaacacattatagtcaatgtttggaaacacaaaccaaactggccagtttaatcagttagactgtgaaccactatatactcagtttgatcatccctaaatacattcaaatggctcaaccaccaccaatttaactagttgattgaaccaatcaaatcgtgaccttgagccacagccagatcgatctctgattcaatttttaaaacaatgattctggctgcaattcaataaaagaaccacagtagcccttcacttatttcagccct

SEQ ID NO: 125035 - DNA, 436 bp, Glycine max
tctagctatacctactagaatacaggctacctaacttactatgtttgataaatgttttttttaccatgggatagatgttagatagaaattaccacaaaaaattgagaggggttggcttgttaaaccaacattccccatggcagtttagattgaactattagtactggacgacttatgactggataaatagagaaaataacaaaaggatgatgtctcctacaactgtcattcaatgtatttaaaacttgttatttctcactgctttggcattgtagaatgatagacacggagaacaccaagagatatgtttatgttagaaatttaaaatgaaccccaaactattgaaaaggtactttgttcataaaaaaggaaccaacaacaaatgtctgtacttcatcagtggaacctacttacacaattcatgtgaatatcatca

SEQ ID NO: 125036 - DNA, 402 bp, Glycine max
agcttcaccaaagcttctaatttataagaagaatcttcaacccacactggagttctctagcttggagttgtttttttactttctgattctttggctcatatgttccaagcttggagcatttaatttatatgctccagcttgagggggagcattagaatataagctagttgtatctttgtaagagtagtcttgacaggtttagaaaaggctgtttttaagtgtattctgaaaagcctaagtaggagcaggttccctagtctgaacctgtcttttcttctttcttattgcactctttcggtgtcatataaaaatatatacaatgtgtggctgagtaaagtaactcaacacttttctaacgcatgtgtatctcaaacccttcacaatgtagttcttaactttaac

SEQ ID NO: 125037 - DNA, 350 bp, Glycine max
  unsure (1)..(350): unsure at all n locations
cactgacctccatgatctttataattcaatctgaattacagtaaaaaaaaaaaagagagaacaattaccttacatattacttacacgtaggatcacttgatacatatatattcatattttggagaaataaggctattntagtggtgaaaacctaacaattaacaactaaggccacgtttaaggtcattttctattttcagttntgaaattattaanaactaaatctagttttcngtttgaagtttttagttcacattattttggttttntaattttaaaaagttgctgtaaattaaaaatagatanaatagatcatgcaatataaaaaagatattgacacaaaataagaa

SEQ ID NO: 125038 - DNA, 373 bp, Glycine max
  unsure (1)..(373): unsure at all n locations
agcttataagaacaaaattgcctattttcatttccaaatatgcatgtgaattaggaagcatcaacaagaatcaagccaaggttattgtgcaagcaatcaatggggcaaaacacaccaaaagattatgatgatggatggctcanattctcacaaaggtaaacttatcactttcaaattgagctttcaaaactatcatgacatgtacaggaaaaacaaggatttcaaatcacaaaatgtcaagagacttttattttcaaaacaattacccatttcttgaacatatcctataattcaaagaaaaatatgcaaatttgtacatgccaacagaattgacctaaaatattaaactagaaacccaccaaacttaccaaac

SEQ ID NO: 125039 - DNA, 421 bp, Glycine max
  unsure (1)..(421): unsure at all n locations
ccgttgagcttcttcagctttactctctggtatcgatactgtaggttataatcgattaaaataaaggtttaacaaatgagggaaatttctaactttagaaactntctccttactcctgcatgatgatgcataatggatatatgaaatgatagagactaagatgcaacacaccacacaacaatcaatacaaatgtcactcaagagagttaggcatgtaaaagataaaacttgttcaaggttcaaggctaagtcttcatgttactccncctatctctaacatgatgcagccgctgttgtcgccaatgacaaagccaagcaggtggctgcaatagctaacagagacgacaagggtgtcatatgtgagggagaataagtctctattgcggactntaacaatgagggagaaggagaggtcgagaat

SEQ ID NO: 125040 - DNA, 372 bp, Glycine max
  unsure (1)..(372): unsure at all n locations
agcttttgacagaagaatgcgcccgtgtaagttcagcgaaggggatcttgttctgaagaaagtgtancaggttcaaaaggatcaccgaggtaaatgggccccgaactatgaaagaccgcttgttgtgaagaaagctttctcaagaggagcgttgttgcttatggacatggatgatgaagagctgccttcgcctatgaattccgatatcgtcaagcgatattacgtgtaatacttggcaattcgaaggcttaatgatttgcatctctcgctccagtattgtgtccttttcactttntattgcctttgagcatgaacataaactctcgttcttgctcactcacacgaccagtatttcggagccattcggcacgt

SEQ ID NO: 125041 - DNA, 478 bp, Glycine max
  unsure (1)..(478): unsure at all n locations
ctctacaatggcatcacctctctatgagctggtgaagaagaatgtggcatttacctgnggtgaaaaacaagagcaagcctntgctttgctcanagaaaagcttactaaggcacctgttctagctcttcctgactnttctaaaactnttgagctagaatgtgatgcctctggagtgggagttggagctgtattgttacaaggtgggcaccctattgcttatnttagtgaaaaacttcatagtgccaccctcaactaccccacctatgataaagagctttatgccttaataagagccctccaaacttgngaacattaccttgtttcaaggaatttgcattcatagtgatcatcaatacttaagacattagagggaaagcaagtaacaagaggatgccaatgggtgagacctaagcaatntcatatgtatcaatacaaaagggaaaacaaatgggagctgatgccttcttgaacacacatg

SEQ ID NO: 125042 - DNA, 406 bp, Glycine max
agctatgcgaagagcttgtttctgtatctgacccatcaactgccctagctcttttagactggtgattcctacgctcttgaccttgacttgatagaacctctttttaagcgaaggcgtttgacttgatcccatgtttactaaagtgaaacaaaatctagtgcgaatcaaaactccgacatctatcataggtggaatggatgaattccttaaaaaatgcatatgatacagatgcaatttatgaatacgggagcccgagaaattgtctccttcttagatacaacgtcttggggtagcaaagtgcccaacgtatgtatttaagaaggtgacacggacccttcgttggtttgttaaagagaacgactcagacagaacccgtgccgatgcatatgtgaaaggcgtaacacgg

SEQ ID NO: 125043 - DNA, 403 bp, Glycine max
  unsure (1)..(403): unsure at all n locations
gtttanatcatctntagatagattcttgaaatctttntcataggtctttgtaagcttttgagagaatngatgagttagataaaatctctcatgataagttntactaagagattcagggtcgtggaaatttacctcatcttcctgataagatttagacatctcanaagttatattttccatcaagcatatgttggcttcttcatcatcttcatcagacgaggagtcatccaggtcctcccaagtactcataagaacctttttccctctattcttgaataatttcttcttatcttaactcttttctatttctaggcattcagactagaaatgtctaggctctttgcactcatagcacatcatggaactnttatncttatctttcttttctttgggcattcttcat

SEQ ID NO: 125044 - DNA, 431 bp, Glycine max
  unsure (1)..(431): unsure at all n locations
atccttaagtcacctgcggcatgcaagcttattgcattngctgctctttgcgtttggtcttctccagcatttgaatggtgggtgacccattttgccacaatggtgacaaggtgggtaattnttatttttacccttacttttactttggtcatttacagtacttccacctttatattgcttggctggtaaagcaccatcaaccacacaatcttgtctcataagccttcgctgctcctgngcttgcaaggcatgtaacactcttgccaaagtgatcttggacagatcctttgtgttctccaacgtggttattgatgcttcatatttctaaggcattgcaaccataattntttctataattctagaatcaaccaatttagtgcccctaatctaaccttattagcaacgcaagcaatctgcccaagtattcttta

SEQ ID NO: 125045 - DNA, 481 bp, Glycine max
  unsure (1)..(481): unsure at all n locations
atctagtcaaggtctgagagaccatacaagtttcctaacgatntctaattatgtgggccattaagtctatcatatgctgacaatagccgagaagcccatgaatctcttcgggggcggagtaggtgtctgccatcgccttggccttggctaacaatcggggaagttcttgactcccgttcaaggtaagagcanaccgatccatccacatggttgcctcttggtgtaaagagtcgatcacccttcctctagcctctttttccgcgtatacttgggcatattcgtccgcaatcctatgctcgtgggccgcggctagacctaactcttcttggtacttggcgatgaatagctagcatgtggtctccgtctcgcataaacgctgagacaagcttcttttggaccttgaacaggcaactaactcctctttcaaaccatgccatgtgctcgcgactgtccctttcttcccttcgcaactgagttcact

SEQ ID NO: 125046 - DNA, 377 bp, Glycine max
agcttgctcaatatttgttgtttgatgctcttaagaaggacgcgtatatattgaaccgagttccaaccaaggctgcctcaaagacaccttttgagttattcaagggttggaaaccaagtttgcgacatatacacgcttggggatgcccgtctaaagtatgaatttataatccacaatagaataaactagaccctatgactattactgggtatttcattggatatgctgaaaggtctaaagggtataggttctattgtccatcccataacactaagattgtcgaatcaaggaatgcaaagtttcttgataatgacttgaccagtgggagtgatcaattaaaaacatttcttctgaaagggctactatgaagctgaacc

SEQ ID NO: 125047 - DNA, 324 bp, Glycine max
  unsure (1)..(324): unsure at all n locations
tactcagctcggtgacactcttctcangttctatggacgagtgcttggagttaatcttgtggctatgaagtgattggcatgtccgggacagagatatatccatgatgaccaagcggagactttagaactatatatattgtagcgggtagtgtgttacaaactgttcgattctggtacataggaatgatgtgagatgatagggtgataattctcatatgtgagtttcatagataaccaaatgttgagagcctatttgactcatatcccaatgttgagtaacaggtgtatgagaggtagagagcacttgctcgatcaatttcattg

SEQ ID NO: 125048 - DNA, 363 bp, Glycine max
cgggatccttaagtccaccgcggcatgcaagcttcttgaaacaggaagttcttcgtggaagaaggaaaaagctccttgagaactagagggtgctactcacatctctccaatagctaagttcaccccgatgccaaaatacatgaaaaatacaaaaagtctcttctacaaagactactcaaaatgccctaaaatacaaggctaaaaccctattgtactagggtacccttaacttgaaaggtagggtgcccttaatttttagcataccctataaacctaaaaattgccaaaatacaaggccccaaagaaggaaaccctattctaatatttacaaagaaagtgggctcatacttagcccatgggccc

SEQ ID NO: 125049 - DNA, 490 bp, Glycine max
  unsure (1)..(490): unsure at all n locations
gagctagctcacacacctctctatagctaagctcaccctccttgagatgagaagctagagnctagctacacacccnnctatatagctaagctcacccctatgccaaaaaacatgaaaatacaaaaaaagtccttactacaaagactactcanaanaccccaaaatacaaggctaaaccctatactactagaatggccaaaatacaaggcaaaatgaaagaaaaaacttattctaatattacaaagataagcgggatcctacttagcccatgggttcaaaatctaccctaaggctcatgagaaccctanggccttcccttggatctctgacacaatctacttggagtcttctatccaatgcccttgcggngtaggatngcatcactccttccaccttggaaaaggattgacctcanatcccaaaggtcttcatactctgnngctcttcccctcgacacctgtaaaagaacaaaaacatatgtattagtagt

SEQ ID NO: 125050 - DNA, 402 bp, Glycine max
agcttcttcctcttcttccacgttgtttttcttcttccttcttctccaccattgttgtcctttgaagctccaaaattccttctcatttctactccaaattgcaagaagccattttcggagtcgtgaagcacacctctacgttgtggggcttcgaatttcaggtatgggtgaacttcttctcacatgaaattcgtgggtgttgggtttttgggagttatgagggatagttctactaggttattgccttagagtaattatttttgaaggaatttgttgaaatcatgctaaacttgacatgtttgacgtaagtaaagctacccattctgatttagggttttataatgatgctttgtgcttatgtatgcttaaaatgttgcgcgacaactggtaaagatgatgggg

SEQ ID NO: 125051 - DNA, 416 bp, Glycine max
  unsure (1)..(416): unsure at all n locations
tacatcatagtatannataatttatattataattaaagaattatgttcanaataataaanataactttatgtaaaaatttaaaccacttcacttgttttaagtaactaattccaatcttctggatatacatgntttggcctatccttttctttaagataaactntatgtaaatgataaaacttattcttgtattgagattngaattgcttcattgcatattctttcacctcatcatttacactanaaacatccttatatcacatgntttcacataaaaagtaaaaattaaatactatcaagatacatgatgaaaccaatttgaagatataactagtattcaaatattataaataaatgaatataattgatctaattatatactaacattcatatgtcaccacatttcatctacatt

SEQ ID NO: 125052 - DNA, 427 bp, Glycine max
  unsure (1)..(427): unsure at all n locations
gcccttaaactaagcctgcnagttatgtctcgtatcgggttaatagattatagccttatcgtaatcgattacatagnttttttttagacaatgattgatttatttaggagtctctgctttactcggttatcatgagatataatcgattacttctctttctataagtggtttagaagtgaacaagaacactttaatcaattactttgagtatctaatcgattacattgttcttgagttgtttccagtttttgggaataacactttaatcgattaaaaagataatctaatcgattacttcattgaattaattgattaccttatagatttaatcgattacaggcagctataactattttctctataaataaccacctcgtgttctctcctaaacactacaaaaacacaacgaaataaacttctgcttgag

SEQ ID NO: 125053 - DNA, 409 bp, Glycine max
  unsure (1)..(409): unsure at all n locations
ttttttttaaactcgtctttatcacgattgggttttattagatatatggataaacctataacgaatcctttacaattttttataattttaatttacttatattttttaaaacattaattttatatataatataatgttaagaaaatgttatagtttgatcactatcatctgtcatggacaaaatgtcattcaatattagtttacatattttttttctttattaatatactaatatgtagntttatttcctttgcaatttaagcttttttttgtgtttcttattatgtttaaaaaacaaatattttaagttattatcattgatccattacatgttgatatgtcataatgaactaaaaattcatttaatatggacttatgagtaatgcacanaattataaaaataaaaaat

SEQ ID NO: 125054 - DNA, 387 bp, Glycine max
atctttagcttaataatgtccttcaatgttgattttcagtcatggagttgcaatggaagataaaggagaaaaggtgagaagaggcgccatccactagagaataagccacgaaaggagaagcttcaccaccaagagagtgccttggataagaagcttatagaggaagcgtcaatggaggaagagaatgagagagagaggggggggggcatgggaattgaaggagattaagaagagaagttgaactatgaagtgtgtctcacaagtttctcattcatcaaagttatgacaagtgttacacatgttgttatttatagcctagcacatgggaaacttccttgagaagttaggaagtatctttcttgggaaactacaggaataaaactttat

SEQ ID NO: 125055 - DNA, 387 bp, Glycine max
aactaagctagtagccggcgcgccctctcgggagggaagccgcgttccgtattgctgtttctccagtagagcgcgccttctcttatcctggccgtgtatctaccgctgctcactatgattaaacaggacctgtgcatgatcctctcctagctgcacatatccagtctccatagaaggggcataagcaagcatgcctgaagaatgatctcttctcttctgatgcgccaactgataatcaacattcttctagagcgagattgtgcgctcaacttgtggagattgtgacaccacggatatgtgcactcggtgcatcgtctgatgtgactcagatgatgaagcccggttctgaacaggagaatttcttttcaaggacacttttggtattga

SEQ ID NO: 125056 - DNA, 455 bp, Glycine max
taagctaagctgtcatgcttagattgtgacagaaaggcaatgtctgtgtgtgtggtcggcaaaagagcataaaccacagagtttggcgacaggtgtagattttttattcatggccagctgggttaccaggttaaccaaggcatctagtttaccttcaagcttcttagtctcacctgatgaagatgaattcatggctacttcatgcattcctctaatgacaatagcatcatttctggcactgaattggtaggagtttgaagccatctactcaattaaattcctagcctcagcaggggtcatatcaccaagagctccaccactggcagggtcaatcatactcctctccatgttactaaggccctcatagaaatattgaagaagaaggtgctcagaaatctggtggtgagggcagcttgcacgcaacttcttgaatctttcccagtattcatacaagc

SEQ ID NO: 125057 - DNA, 273 bp, Glycine max
ctagccacggcccacgagcatataatcgcggatgagtatgccccaatgtatgcggaaaaagaggctagaggaagggtgatcgactctttacaccaagaggcaaccatgtggatggatcagattgctcttaccttgaacgggagtcaagaacttccccgattgttagccaaggccaaggcgatggcagacacctactcctcccccgcaaagattcatgggcttctccgctattgtcagcatatgatagacttaatggcccacataattagaaat

SEQ ID NO: 125058 - DNA, 451 bp, Glycine max
tttctctcccatgactaatatcaaatctatgacactgtttagtataattagaagctcaggatgcattgcataggattcataatccagttcgataaggaataaaagaaccccctgcagccttgttccattaccaagtcagcacttgaattttctctaacagctcaaaagatagttataaaggcaatcgaaattctaattaactaatggactaaaattttatagatcctaatgaagccaaaaattgcaatactactctcaagaatgatgtcctagactctgatatttcatgttgtccatacagttgaaccttttcaataacatagttttgacatggctagaaattgaaaaccatgcattcgtccaacttcttttgtactccctatccaactaggtatttgctgaaaagccagaagaagaagaaaaaccacttataataaacctgaaagatcaa

SEQ ID NO: 125059 - DNA, 407 bp, Glycine max
acttttatatatatgctgcgaaggatcatatcaatgtccacggaaccttgcgagtagtgccttactctgagcaaataaaacacatttattagtgtactaaagaccaataacacgcttgatgcaattagtaataagcgacaaagatgaatgattacctactatgtgctatgatatacagaactttctaatatgatgcgcacacattggaatggagtcccttaaacattcatcatgatcattatgagctacatgtacatcatcgacctcaagggctctattcatggaaggcattcattgagagaaagccagcatactgaaaacatcttgtgaataatcgtcgataaggtgactaaaaccactaggtcttcgacgactaaccactgaccatcttgagtcacaccgatctt

SEQ ID NO: 125060 - DNA, 329 bp, Glycine max
gtccacttggaccccatttctacctactacgaagcctatgaaaactatattatctactcaacaggttcacttctctatattggcataaacagtgtttttcctaagaactggaagaacctgccttaaatgtcctaagcgatcatctatgctcctactgtgcactataatatcatcaaaatcaaccaccacatatctacctatgaaatcccttgagacatgatgcctaagcctcatacaggaggctggtgcattaatgagtccaaaaggcgtctctaaccattcgttcaaaccaaacctgagcttgcaaataggtattcactcatcaccct

SEQ ID NO: 125061 - DNA, 382 bp, Glycine max
  unsure (1)..(382): unsure at all n locations
tgactccatcctcgattgccttgttgtgctcactcctgctcttatttctcctaagncaccaccaccagacacacccatgccgaccccgcttcccatggctgcttaccacctccttccatcgcagtggcagccacttagaccagcatgccggctccgcctcccatggctgcttcccacctacctcccttgccgacaaccctgtatttcctctatccgtctctctccctcttgctcctgtgatggctagaggaacagctgaggtcacggtctctctctctgtctttgtcgcgagccttcttggacctgccattctcgtcatcgcccctcgacctcttgctctatctggcattggtgtcaacattcaacggcacacccacaaaca

SEQ ID NO: 125062 - DNA, 277 bp, Glycine max
  unsure (1)..(277): unsure at all n locations
ttgctggctgancattagaactgatgaactccgtggttatctgcttgaacaataatttttgctcaatgaagtgaccatcaatctctatgtgcttggtcctctcatgaaagactggattggatgccatggggagggctgcccgattgtacaaaataacttcattcttgtaactgtacaaaacttcaattcttggagaagttgcttaatccacataagttcacatgtgaccaaagacatagatcggcactcagcctctgcgctggatcgagcaacaact

SEQ ID NO: 125063 - DNA, 402 bp, Glycine max
tgcgaacttatataacctctagcgcaaaccacaacttctgatatatatgatctttcaagcaacagatacaatccaggttggagaaatcatccaaatctgaaatgggcaagtcctcccgaacaacaacagcatgtccctcctttctagaatgctcctggtccaagcaagccatatgtttctccttccatacaacagcagcagtcataacaaagaccacaagcaactaaagctccttctcaaccttccttagaagaggtagtgaggcaaatgaccatccagaatatgcaatttcagcaagagacaagagcctccattcagagtctaacaaataagatggggcagatggctactcagttgaaccacgctcagtgcccaaattatggacaaatgccttcacaaact

SEQ ID NO: 125064 - DNA, 462 bp, Glycine max
ctatgatgatgatcctattcaaatattgataacaagaaacaaatgaaatctttgtgatatttttataataattaataaaaaaaaaagtgttctgattttcgattcaaacaggaaaatatttcacagcagataatgaaaaattataacaagcaggtgaatccatgccttgtgaaaaaccatcactttgctgcgcaatctttctttttcaccatggccttctatagcaagcaacaaggatgttgaaggaggaaaagcgaattgtgaggttaacccgaaagaataaagcgacttgtttatgaaatgcttcgcaacatccttgactgtggagagatcaaattcttcagcattagagatctcatttttaacatcagcaatcagcttcctgggacgaaactgtccagtcatggtaagccacctgtattggttataattaagctgtataagtacattgatgagttgaat

SEQ ID NO: 125065 - DNA, 479 bp, Glycine max
actaagcctgaggcaatgtgacccagaagttatacacccgagcaacatctatacttgtcaagattgctaggatttgactactccatacattatcgtagggagaactaatgtagtagcagatgccctatcaagagtcgcagaacctcctcctgcctccttcttcattttgtcaacaccccacttcttgttactagaagacttatataaggagctgcagtcacatgaagaattcatctcccttcgagagcagatacgatagtcatcattagacttccctgagcacacaacaacgtctcatttcatcttgcaccgtggacgcatatggttgcccgacaactgttccttcatcaaggacttgatgactgagttccaccagacacccacaggaggccacatgggtttcaagaagactctgaaccacttatcggaaaacttcacgtggaaaaacatggccgcggacacacggaaattcattgcgg

SEQ ID NO: 125066 - DNA, 238 bp, Glycine max
agcactgcccctcgatctatacgaagcactcatggcctctatgtaatgacgccactccatgcgataaaagtagcgtaggcatgaattcaaagcccgatctaatgcataccaatccctataaatactctaatagttaacggacagaccactccactataactaataaagcaattggtggacgatttgacatcacaatgcgcatacaacatctgatcatacactcatacagaaattttga

SEQ ID NO: 125067 - DNA, 455 bp, Glycine max
agccgcccagctcgcccaggtgagctcagctcgcccaggcgtttttgttgcttcctccagaagcaacagccttctggagggcccaagtgggcctggttgctatttacacccccatttttactaaatacacccccttctatttttttggtgattctttcttcgtaacgttacgaaactttacgaatttcgtaacgatacctattttccttctgcaaggttacgaatccttacggattatgtatttactcttttttagctttcgaagaagttacggaaactcacggattgcgcaaaaacacctcttttcgatttccaccacattacggaatttcacgaatcatgcaagcctgcttccttttgatttctgagaagtctcgggacttcatttattgcacgtcatcaagtaataatccccggacgaaattatggtatgacagttgcccctctttacttac

SEQ ID NO: 125068 - DNA, 425 bp, Glycine max
ctatcattggttcgttgggacttctatcttttctgagcaagcggaaatggggttcgttgattctgaggtatattatgcgctctctattggattgctggatagctgatgatgtcatatattgactatatcattcgcatatttcacggggatcaaaatcatgctatttgtaaatcagaccacctcaagtcttgtaaagctgatttgaaagagaaatgcacttatgttatgcataatttcaaagttggtaacaatgacggtcaatttagagtgtgcgaacatgagtacaagttatcttttattggagtgacggctgtttcataagttgatttgcatgaacctgctttaacagattctgctttgttgcatttcgcaaagaggtgatggcaatcctgcgtctggcagggtgacgggagaaaatgcccctg

SEQ ID NO: 125069 - DNA, 169 bp, Glycine max
gtttgagaaattttagaacgagaagaacgatctaatctccgtcgaatgattgacagcatctatacggcgccaaatgctttccggcaagccgtctactctttttttccttccactaatccactgtgacttaccgatagctcattaacgcctctctgctggttgctccaca

SEQ ID NO: 125070 - DNA, 426 bp, Glycine max
gatctaagctaatctcatgttgcccctgtagaacctacccttcagcgtatgtcttctctatactcacgggtatgtcttccatgggaggaaaacgagcggagtcgccaccaacgtctattcgaggaaaacgtcagcaaaaacggaaaatgcatggtctgcaaacttttagtgtgaaaggttcggaagttgtatttacgcacgaggaaggtattagcacccctacgcgtccgttacaatggacggcaacctttaatcaagtgtgcaaatatgacttcaatttgtatttatcttccactttttacgcgttttatatccttctatgccttgtgggatttttatctttttgtggtcgacaacggtgtgttccttgctgctacgtattcctcaattgtgataaggaaatcaaacctacatatttctttgaga

SEQ ID NO: 125071 - DNA, 382 bp, Glycine max
  unsure (1)..(382): unsure at all n locations
atgccccacattatttccatgacacaaatgcaaaaatgatgatttggaaattntatgcaaaactggttatgcatgcacctatgcggacactcaagtgtcaaatttttatggtcatgtgatgctcgggctcacgattcatttgctctattttaatcaacccaacgtttccaaaatatgttcttttatcaatttgtgcattcatccgagtccattttgggcgtctgggaaaatcttcacagcattcacccttcaggtgtatacacattttttcaaaaactagttatgatcagtgaatttttccaaagaaaagttggaagtcatctcttttcaaaagcatgttggtttttcagcttgacaacttatctttcttttccttgtttat

SEQ ID NO: 125072 - DNA, 423 bp, Glycine max
  unsure (1)..(423): unsure at all n locations
atgttataaaaaacttataaataattaatattatagtttatttaccatgataaatcatcacaagtgaaacagaacgtgggatgggtacggaaaaaatgagcgattaaagaaaagtgaagaaaacagaaatataaactgtgataaataatgcgatgagaaatattttttttgaaaaggatgtcaaaaaagaaaatatcaaaaaaaatcacaattacaaatactttttttttggagtaatgtaataatgttatgtaatactggatgcaattccaaggcttcctattttgtcggcaggaaaaatagacggtgccttttctttcaattatacaaaatcaaaataccattggtatttattatttactgcggngacacacgcaccgtacacattacataatgtattactactaaatactaataaaattc

SEQ ID NO: 125073 - DNA, 375 bp, Glycine max
atttactcagtcacaacaatttatttaaataaatcctaaaagacacatctagcatgctaactaactaatattgcgataaaaaaaaaaaaaacacactatctaactaaaaataaataaaattgtgaaccaaaaatcacactatggtgggtgaattcaacccttcgtttcgaattcaacactgaagtggcgctgccttctgttctgttgctatggggtttagggtttactctgttaccgtcgtcactgactcttctttcgtctcgtgaagcgaatctgttactcattcactgcattgcgaacaacatggcattgccaacgaattgagatcagactaccaaatctgactccacaaacccctgctgtgaactcgtaaaa

SEQ ID NO: 125074 - DNA, 95 bp, Glycine max
tcaccaccaatagagtgccttggataagaagcttacagaggattcttcattgaaggaagagaatgagagagatagagtgatgcaatcctaccccc

SEQ ID NO: 125075 - DNA, 175 bp, Glycine max
actaagcttgcgaaatcgccccagaaacgtctcggaagcgttacggaagtgcctctgctaggagtttattcacggaaataatttttctcactaattttaagtgattctcagataccaggagggttgaacatttttgttctgcccttcttcccctatttataggggaaaagaggga

SEQ ID NO: 125076 - DNA, 161 bp, Glycine max
accgcgtacgcaacggaagactcgaacctgatactggtggacaaaactgcaagttgatgatctgttactctatagtcaagctttagtgaatcaacctattaacgattttttcctggagtgatctcgatataacatctgcatcaaaggggaattctgggaga

SEQ ID NO: 125077 - DNA, 401 bp, Glycine max
  unsure (1)..(401): unsure at all n locations
atcctgactcaccatanaccttgacccatggtgagaatgtcaatccttaccctcggaagcaaaaaagaatagaatggaaatttccaatcaaagaaaagagaaggaaaatttccaatgaaagaggaaaaaagaaaagaaaggaaattcccaatcaaagagtgggagaaagaaaaagaaaagaaagaaaattcccaaccaaagaatgggagaaagtaaaaagggaaggaagctcctggtcaaagaaaccagagaggtctttggaccagataatatctgaacagtacagaattgtcaccaaatgaacaaaaaggaaggaaaggaaaccacgacctanaatggtcttctccctttaattaccaaccaaaatcccgtgcgctagcgacccttttttctcgccccgc

SEQ ID NO: 125078 - DNA, 472 bp, Glycine max
  unsure (1)..(472): unsure at all n locations
ccttgaaactcagctcacatagaccacttcgggtgctggaactacttcacatgtactttatggggcctatgcaagttgaaagccttggaggaaagaagtatgcctatgttgctgtggatgatttctccagatttacctgtgtcaactttatcagagagaaatcaaacacctttgaagtattcaaggagttgagtctaagaattcaaagagaaaaagactgtgtcatcaagagaatcaagagtgaccatggcagagaatttgaaaacagcaagtttactgaatactgcacatctgaaggcatcactcatgagttctctgcagccattacaccacaacaaaatggcatagttgaaaggaaaaacaggactttgtcagatactgctaaggtcatgcttcatgccaaagaacttccctattatctctcngctcgagccatgaatacagcatgctacattcaccacagagtcacact

SEQ ID NO: 125079 - DNA, 299 bp, Glycine max
  unsure (1)..(299): unsure at all n locations
cgcctttttctttcaagaaaacaaacaaacaactctaactttgtcttatttatctaaggtataacaaagattgtnttgctttataattttttccgttaaatatctaatttaaaaaatacctttcataattaaatatgttggtctggaaaataattttagaactatgtttaacccataaaagatatattgacgataaaaattagagcaggtggattcttacaaatgcgggatatacaggctagtgtggggagtggggactataattaactgttagaaagtgtctgtatttcatttgattg

SEQ ID NO: 125080 - DNA, 323 bp, Glycine max
aagcccctcaatgatattggaagcttctttcagccttcctgcgcgaccacaaagatcaaccaaacatgcatagtgatcttctctgagatgtatcgatctgtttttcagaatttcatcaaagtatgtaaacccctcctcaactaaaccagtatgactgcaagccgtcagaagtccaacaaaggtgacatcatttgcacaaacacctaattcttgcattctattaaatagattaattgccttcttgccatacccatggtgggcataggcaggcatcatgccattccaagatatcaaaatccttggctcaataaccatcatcaaca

SEQ ID NO: 125081 - DNA, 236 bp, Glycine max
cacttttcttgcttatcaccacagcaaggaaacgtcagtcattgctgttttggccgatgcatatgacacatttgacttgagatgcgaaaagagcagtgcacgaattgtctattatacgtctgctctttatgtgtggttggactcccatgttcttcatcatgaagctagacatgcttgctccctacaaggtcatcacatgtgaaccgataagggaaaagcaaattgggaggaactct

SEQ ID NO: 125082 - DNA, 427 bp, Glycine max
  unsure (1)..(427): unsure at all n locations
gacctataaaactcagcttacaaagagaatcatcttgatatgacaactttggtttcctctttcaggctaagctnttgaagctttgagattaacctcaagcttgcaagaccaagtttcttatgccataccgagtgatgctttttttactgagaataatcatgacaccttttgactagaaagatcaccaagtttaatcttataaagatttccttgtcttttagcaaagaaaagtgaagagttggccttgttttggatgatacacatatccttgttaaagatgacattatatccactatcacataattgacttatgctcagcagattgtgcttcaaccctttaacaagtagaatgttattaatgagaggatatggagaaatacagatcttatctacaccaattattagacctttctagatttgaatatta

SEQ ID NO: 125083 - DNA, 372 bp, Glycine max
agtgaaaatgagaatggggtaaatttggagcaaactctcacctcacacaagtctataaccttaatctaaacttgctcgaactggttttacgcctaaaattccaccaaatcaaaatttgactcctcaacacccaaattttaccctagaaatggctcttgccttcactttgggtcttttgtttttctctcttgcacagcccaagctttctcataagtcctaaatgacatttcaaactaggactaactcactttaacctccaatttctactgaattcagatttatcctttcaaaccctcaaagcatcacactttttccactcataacactacattctcactttctaaccctggggtaactctacccttcatccct

SEQ ID NO: 125084 - DNA, 439 bp, Glycine max
ctcagcttccataggttacctcgctcacaatagaatccaagatgcctatttattcgatctaaccatgattttttttgggccataataaagaggttgataaagatgcaccagtagaagttgacactagtactaaggatattattgaatgtaatgatgaacatgttggaaagtcagtatcaaatgacctggtagatgatagtcaacaaacctctgcccttgaagattcttgtaagaaaagtgaactaactgaacctcaaacaacaacttccaatgaggaggaccaaagtcattctactttgagtaagagacaagagctaacaactatgcttcaaattggtttggcttattctatgcaattattgtttggcactgataaatcgtttatttacttttcttaaaatatgcagggtttgaggcctcactttgtggtcatgaactt

SEQ ID NO: 125085 - DNA, 327 bp, Glycine max
  unsure (1)..(327): unsure at all n locations
ctcagctttaatttatttgtgttatgcatggtgtcttcttaactaatagttattntttcttactgcattttctagattgtgttttattttcccgcttaccaagctatcgaccaagaagcatccatcacgccagattttttccctttggctggtatgtatgtgcctttcattactattcgtctctatttgcaagggtttaattttgtttgttcttatgaatgttttttatgagaatcctgaaactgaccaaatacaggctaaatgcctaagtggagaaggacaaagccccccaccggagaatgatgaatgcccacgtggaaaaagatg

SEQ ID NO: 125086 - DNA, 237 bp, Glycine max
tgaagaaaataactttttatgaggcgccctttatcagaataattaagccgctatctcatacttttaaaggtaaatctattattgtagtaaaaaatgcccattagcataataatttcaagaatgaatgtttggatatatatgggtaagattatgtttattatataaatgacggagtcttaacattgtacttggtgattacgtagtcttatgaaatgccatttatttgaaattgtataa

SEQ ID NO: 125087 - DNA, 477 bp, Glycine max
actaagcttccattggtatttcatggtatttgacatggagtgagcttatctattataggggtgtgagtagcccccctctagcttctcaaggaagttttcttcctctagcttcccaaggaagcttcccatgtgctaggctataaatagaaacatgtgtaacacttgtcatgactttgatgagtgagaaacttgtaagccacacttcaaatttcaacttctctccttaatctccttcaattcccaccctctctctctctcattctcttcctgcattgaagcttcctctctaagcttcttatccaagacactctcttggtggtgaagcttctctttccatggcttattctctagtggatggtgcctcctctcaccccttctcctttatcttccactgcaattccatggctgaaaatatctattgaaggaccttattgaagttcaaagatccatcctccatagaagcttctcaagcaagct

SEQ ID NO: 125088 - DNA, 302 bp, Glycine max
aactaaacattcacctaacattatcaagcaagccgttcatagcaaaacctcatttcatcagacttagaacgctaactcatttcccaagaatgaattaatcttcaggaatagcaatctttgcgtcttcaacactgttgatagtcgaaaccctcacacgatcaccttctttgggagccattggccacataaagatctaaccttcgagcgagagagagagagatagagagagaattttgacgaaatgagttctcaaatgatgtataagcttcaacagatttctaagagttcacgtttttaaaaga

SEQ ID NO: 125089 - DNA, 379 bp, Glycine max
  unsure (1)..(379): unsure at all n locations
ttctganatggcgcctgaccggactcaactgcagaatatgttcaagaaagagggtgaaaccttttaagaatatgcctagcgatggagggatttggcggcacaaatagctcctcccatggtttgtagagagatgatcaccatgatggtagacactctgccaggggtctactatgagaagctagtaggttacatgccgtccaactttgcggatctagtgtttgccggggaaaaaatcgggtatgattgaaaagaggaaagtttgattacgtctcctccacaaatgcgaatgccacagaatcggtgaacnggggccaaaaaaaaggaggagatgccatgccgtctcttcacacccgcgtgggtatacgcccacaacacctat

SEQ ID NO: 125090 - DNA, 246 bp, Glycine max
  unsure (1)..(246): unsure at all n locations
aaaaaacgagcggaatggaggcgaaaggggaancaaaagataagaaaatgggccaaaaaaaaaaaaagggggaaaaaacgagaaaaaaaacagggggggaaaaacaaaaaaagaggaggggaaaaaaaggaaaaaaggaaagatggggaagggagagaaagaagcaacaaaaaagaaaagagaaacagagaggggcagacaaagagagaaagaaaaaaaaagggaaacaaacaagaaaacaaggaa

SEQ ID NO: 125091 - DNA, 376 bp, Glycine max
  unsure (1)..(376): unsure at all n locations
attcatcttccanaaaagaaaaaataataataaaataatcaaaatatctttgaataaaataatcaaaaaaatcaatcggacgttttttctttggaagtttccttgaatgaattgactaaataaccaaagtgaaactaaggctaaaatcaactcacaaatcaagctttgtccgtaaaaatcactaaaaaccgttttaaggtccaatgccttatgcggtcctctttgcttttatcaattaacatggaccgttcaaaaacataaaattaatatgtaactttacaacttttgttgacctccccaagagatcgttaatggtccaacgccttaacgtttatctcctttcaaaagaatcaaaagatcgtttaatggtccaacg

SEQ ID NO: 125092 - DNA, 451 bp, Glycine max
  unsure (1)..(451): unsure at all n locations
actctatttatttattntttttattattttatattaaggaactctattttatttcctatcaaaggaataaatcaagtatatatatatatatatttcaaagtattattttattacaactattttttctttatttatttaattataaaaaccttagcatcctctaaaactgtatttatttatttatttctactaaaaaatctttttaatttatttaaaaaaatggaatgttacaagaagcaaggtagtcacactcaagattttactcagacttggaaaggggaaacagattcgtaaacagaatatatcaactagaatttgctcaggcttgtgaacctgatgctggtatcggatcaaacgagagctctgattatcgatttgttgggaaaaactctcaaaaacacccctattataataagaaagagaataaattatagaataagacctaactatg

SEQ ID NO: 125093 - DNA, 418 bp, Glycine max
gataacaaaagatgatgacaaaggtgatgacaaaaagctcaaaggtcaatcaaagaatgagttcaagatgttcaagatagaatcaagaacacttcaagattcaagaggaaagttgatttcaagaatcaagaatcaagattcaaggatcaagctttctagaatcaagatcaagattcaagaatcaagggaaggcttaatcaagataagtatgaaaaggttttttcaaaaactaagtagcacatggatttttctcaaaacatgtttaccaaagagtttgtactctctagtaattgattaccagattattgtaatcgattaccagtagccaaatggattttgaaaaagtttcatatgaatttacaacgtctcaattgatttcaaaaagcttgtatcaattacaatggtttgggtatcgata

SEQ ID NO: 125094 - DNA, 352 bp, Glycine max
tcaagaaaaagatgggcggagcgagaaccttatttccagaaaggaagtctatcaatagagctccaatcgttaatggagagggggaccactactggaaaacccgaatgcaaatttttatcgagggaattgatctaaaaattgggaagcattggaaagggcgtataacccaccaaggaaaagagttaatagagggaggataagtgaaagaaacaagaaaactaagaagagggtgaaagaagaaagagacaaacaactaaagcaaaacataaaacactggctagaaggagaaatttagaggtcacaaggaagaggctaggaaatggggaactcttgataacacagaaggaagaag

SEQ ID NO: 125095 - DNA, 338 bp, Glycine max
gtctaaaatgccccataccttattatagctaatgccacaaattgagggaatttgatttcattcagatttacttgaatttgaaattgaatttgtggagccaaactttggagacgaaatttcactaattatgattagtgaattttagttatggttcagcccactaatccaagatcaattccaagattctccaccaagtgtgcttaggtgtcatgatgcatgctaagcatgaaggacatgcacaaagtgtgactatatgatatggcaatggggtgtagtaagcaaatgctcaccttcccctctaaaatatgattggattgggcttctaccaattcaattaa

SEQ ID NO: 125096 - DNA, 411 bp, Glycine max
  unsure (1)..(411): unsure at all n locations
aatgtcgaagaacggtcgaaaccttcgcgaaattccttacggaaacgttacggaaatgtttcggaagcgcctcggcttcgattttcttcacggaaacaatttttccaagtaaattcgaaagagagagaagggcctaaggggctgaaccctntttcacttcacttctccccctatttatagaaaattgggggagaagcttgccacccagctcgcccaggcgagcaaggttgcttcctccagaagcaacagccttctggaggaatcttctggagggcccaagtgggtctggttgctatttgcacccccatttttactaagtacacccccttgcctttttttgggtgattcttttttcgtaaagttacggaaacttacgaatttcgtaacgatactcgttttctttccgtaacg

SEQ ID NO: 125097 - DNA, 294 bp, Glycine max
actctcatgggcctatcttgactatatgctgcaacaaatggcattttgtgcaaagtggagacaacggaattcatcatggctcacaacagctaccatattacttttatttaatggaggacctcgaaggatgttgcccttcatgggctttatgcaagggaccctttatcccattggcttttacatatttggtaaagcatcaacgtttgtgaaggagcaccgtaacaaaaatatataagctcttggtgggaaaatcaaacccactatttttgaatatgctgatacacggttttgggg

SEQ ID NO: 125098 - DNA, 430 bp, Glycine max
aagtgggaagggtgagacctcctacttttattctttgactcacagagaggtacctggagatatgtcgcgggggtcaagagaccttgtggacgtcacgtggggtgctattgcccaaaaccaagcttgaccaatcccgacccaacccgggcatagtcagtcagtgagaacctgtgacgtacctaaacaggcgagctcctggcagtcaaccgataaaagaacaaagaccacacagcaaggaggcttgtgtggtggttggccagcaatggatcttgagtaatatatggaatatggcccctggtaatcgattacaaagggtgggtaatcaattacaaggcttataaatgaaggcagaaagttaagatggcctctgcgtaatcgataccaacgatgtgtaatcgattaccaggcctagaaatgggatcacgaacgt

SEQ ID NO: 125099 - DNA, 421 bp, Glycine max
  unsure (1)..(421): unsure at all n locations
tctcacagtccttagaattgggatccaattctatccttgnggccggactctcagccacttatgataagccgcgatgatcccattactgcttcccctaagctctctgtcctttgtttacgccgcatcccatgccttgcgaactccttggagtaccctcgcgttgtggtcaccgaaaccccgtgcgatgaaaggcgggatgctttcgtctgatgagactcctctcatggggtagccatgctgtcttatggcgaggacgggattataattaatacaaacccttgttcccatcaagggaacagttggacatgcttcgcatgaagatagaatcctgattctttcttccttctagcgagggaaccaattaacagacgcgccttcatgctagccaagagttggtcccaattcgtctcttctttttcga

SEQ ID NO: 125100 - DNA, 226 bp, Glycine max
  unsure (1)..(226): unsure at all n locations
ctaagcttctagccaatggacttagcttgaataattcctttgatgtctctttgatcctatgtttccctttctttgttttgaagctcattacaagccttaaatgaaaaaccatgatctcaccttaaccttaaggaattttggagctttggaattgttttgggaataagtgtgtgtgtggggggggggcntnncccttcccttgtttctacgtcattctccccttttc

SEQ ID NO: 125101 - DNA, 282 bp, Glycine max
gacgtatctttgcttattacccgatgttgttattcccccgaagttctaagtgccggacttcgacaagtataaagggacgacttgtcccaaaaaccatctcaagatgtactgtcgcaagatgggcgcgcactctaaagatgagaagcttttaatacacttctttcaagatagtttggccggagccgcagtagtttggtacactaatttggaagcttcccgtatccgtacttggaaagatctgattactgccttcctaaagcgatatcagtacaattccgatat

SEQ ID NO: 125102 - DNA, 241 bp, Glycine max
gtttttttatctgggggagacatgttaaaactgacgacgaatcaggctaacccccagtgtaccttgtcggatgcacttgcatttggagactgcctattttggacagtctagatgactaatctaattaagtctcatcttgcgatctgtaaaggaaacgttaacaaactttatttgaaaaaactgtggcttgacaccttatctcttccattttaactgctgccgaagctttgagaaagggagt

SEQ ID NO: 125103 - DNA, 366 bp, Glycine max
agatgttctagaacactctagagccttatagaaaattatggagatttctagaccggcttgcagaactctaaagtaaagtacaactctctagaagcttgtggaacaatgtggaaacctctggaatattctagagatgtgtggaaccttctaaaaccttatagaatagtacgaaagagtatggaagagagtataagagtgtagagactcctacaatgtgtggagcattctatagaattaatctccaccctatgacaagtaatctccaccattcattgtggaggtggagtagtataaatataggtaggagccttcattcctaaccatccaagtagagagcctctctgagagagaagataaatagcttgc

SEQ ID NO: 125104 - DNA, 461 bp, Glycine max
ctaagctggaagtatatctcatcaccttgctaagttgaagatttcatttttgttaaagcaaatttgtcccacatttgggggagattattgggtgaagataagaatggtaagacaaataacagccacacaaaaaattgtaaagaagcagcaaataaaagcttctaaaataaaataaaataaaaagaaagaagaagaaagttcaagaataaaggttgcgtgggttgttatttgaagcaaagtgctgtaaatattgataggcaagtaaatgaagttggaataaaaaggaaaagagttgatctaaggatgaatgctctcctagaacttaagcttttgcatcctataaaaaccatgaattgtttgcagcccagcctcattacaaaccaagaaaagtccttcagattcaatttgtgtgtctgtgactgtatggcatgagatgaaattgcaaagttgagacttattgt

SEQ ID NO: 125105 - DNA, 261 bp, Glycine max
catgttacaatgagaaaatctagacaagtcttctcttcaattccagacagagcgacgaactaatcatgttactcataagtgaacagagacttcaagactatatgttaactgagtgtaactacatcccaccgtatttttcgggaatgaaagtatataacatttatccctctaaaaaattagacttttctacttctctgctccaaaatatgttatttaacagatctgaggctagcagaaaacagtgtgttaatagcaagacct

SEQ ID NO: 125106 - DNA, 401 bp, Glycine max
  unsure (1)..(401): unsure at all n locations
taagaagtgagaccctagatagtgtgtactctttataggaatattatgaggccctatgctccagtggtcttaaaattggcataccagcctaaatctgagtggcaaaggaaaagttagagcataacccacggtctaatgtgaatatattattagaaaggattaattatgcgcacgatatctacaagaagactatatgggtctgaaaaggatacctatgataaagagtcagcctagagtcctaatagcattcactgagacattatgtgttatccctttagatgtcatgttttacaggctagcaaatggacacctcgtggagaagctngaacttggactgcttgttgaggaagactagatagttgtagtacaatgatggattcagttatgttatgatcttctat

SEQ ID NO: 125107 - DNA, 253 bp, Glycine max
tatactgaagaattgatgaaaagtcatatggatccctgcgtcaagaatggatgtactattatgcccgatgcttggactgatcggacccaaatatgcttgactagatctttgattaactctgacgctggtaccatgtttctcaagacaggcgaaggctctgattgtgggaacacaagtgaaaagcttcctgaaaagcttgatgctcttgtgtgagcacatggccaacagaatgtgtgtcaaattgctacccact

SEQ ID NO: 125108 - DNA, 362 bp, Glycine max
ctttcttctccatcattgtttctccatcaaagctccaacctttgctcaccatttctgctccaaatcgcgaaaggaagccatttttggagtcgtgaagcgcacctctacattgtgggacttcaaatttcaagtttgggtagacttcttctcacataaatttcgcgggtattgggtgtttgggagatatgatgggtagatttactaagtttatgccttatgatagttatttgtgaagaaatttgtgaaagaatgctaaacttgtcatattgggtgtgagtcaagcttacccattatgttctaagatcttttttatgattccattgaatagtgctgtggatatgggtaacaccaccgattgatat

SEQ ID NO: 125109 - DNA, 463 bp, Glycine max
  unsure (1)..(463): unsure at all n locations
actcagctngagaggacgcttccgtggagganaaganagagagttacgttatagaggggcggagcacgacattgatgaaagatacaggggagagaagtagaactctgagttgagtctcacaagactctcattcatcagagttaccacaagtgttacgcatgcttctatatatagactaagtaccgtccttgagaagctttcttgagaaaactgacttgagaaacttctttgagaatacttcctcgagaagctggagcttatctacacacaccgctcgaataactaagcacacctgcttgagaagctgccttgagacgattcctcaacaagctagagcttatctacacacacccctctaatgactacgttcacctncttgagaagcttccttaataagcttcctagagaaaccttcttgagaagattcctagagaagctagagcttagctacacgcacctctct

SEQ ID NO: 125110 - DNA, 431 bp, Glycine max
  unsure (1)..(431): unsure at all n locations
tcctaaacaaaaatctattgaggaaacttcgccaaaaatccccattgagaaacctttattcaaacctttcaaaggtagtgagaaggctaaaagaaaaattatggaacttagaaaaactaaatccttaattgaaggcgtaggtgacaaccatagtgaattactaaacaagattggtagtttacttaaagtcattccagataccccccaagcctcggaaaatacttccaaaatggtaacaagaagtacctccaaattaatcaatgttattaatgaagatagtgaccaaaactcatataacacaactgagataggatcagtgtcagaaaagaatataaatccaattaattccaaacactggaagacaccctncaaattatattatcaacgtccaactgcccctgaccttctattagaagaaagaggtgaaaaca

SEQ ID NO: 125111 - DNA, 205 bp, Glycine max
cgagatggtccgatgagcagaccttcagatcagaaaatttgggtgccgattcaagttcgagaatcaccaattctgagtactcgagtaggggattcaagaatctagaaaagactcaatcacgattggcgctaaaaggtctttcacaaccttgagcagcacatgaatttttcgcagaaccttgtaccaaagagttgttactctctgg

SEQ ID NO: 125112 - DNA, 329 bp, Glycine max
  unsure (1)..(329): unsure at all n locations
tacttacccgttgaagatcgaagaacgatgattatcgaatgaagaacgtcgaagaacgggtgaaatctttgcganattcctcacggaaaacgttacgcaaacgtttcggaagcgcctcggcttagattttcttcacggaaacaatttttccaagcaaattcgaaagagagagaagtgcctaaagggctccaccccttccttgttgccttcctcccctatntatagcaaaataggggaggtggttgtcgcccagctcgcccaggcgagctcagctcgcccaggcgagcagggttgcttcctccagaagcaaccgccttctggaggaatat

SEQ ID NO: 125113 - DNA, 314 bp, Glycine max
ctaaaacatgtgatgcgatgtcatttcctatatgatatggaagcgatggggcaaatctatggtgatatatactcccatgtgatgtagttttaaaagaaatttgtggtaaagatcacaccgattatggtgcaaacatgggggcttatgtgcataattgagatttcaattgtattataagacccttagaaagaataggcacttgtcaaatgatgcaacatgagggtattatgaaggaatttaatgtatggattgtagaattacatgttgaagatgtgccttttgtgggacgaagattcacatgctacagaccaaat

SEQ ID NO: 125114 - DNA, 437 bp, Glycine max
  unsure (1)..(437): unsure at all n locations
taaagaatacttattcgttntacatcgtctggntatatgttgtcaactaatcaacttatgaactaaatcgtatattgtcaaccaagtgctctcaataactcaagaggggtcaaattgagctcttctaaaaacataactcaacattaaatcataagagatccaattatgaagaatatatgagagaaaactcaaacccttaacccaaacaaactaatgcatcttaacattcactgcatgtcttcattttggtaaaatcgttattgagttaagagtcaaaataccttctgcaaatatctaacccctatctaggatatgtcaaccatattagagtggagagtcattgttcatacacttcgaatgttggtcagcaagagaagtattctcattcaagttattctagagttcaatcaagctaacctttcacactctaatcacaa

SEQ ID NO: 125115 - DNA, 427 bp, Glycine max
ctgccacccagctcgcccaggcgagcaagagtgcttcctccataatccactaccttctggaggaatcttctggagggcccaagtgggcctggttgctatttgcaccctcatttctactaagtacaccccctgccttttttttggagattcttttttcgtaaagttacagaaacttacgaatttcgtaacgatacttgctctctttccggaatgctacggaaccatgcggattacataatcattccctctttgacttacggaatgttacggaacctcactaattgtgcaacgatgcctacattttgatttccggtgtgtcacggaaccttacggattgtgcatcaatactttctgttgatttccagcatattccggaacttcacatactggctaatgatgggtgccaagcacctcacaatgaccaaac

SEQ ID NO: 125116 - DNA, 357 bp, Glycine max
  unsure (1)..(357): unsure at all n locations
ctccaaccaaagcaatattatgaagncgagctactcgttttttataccncgncntcagaataatagaatgccacttaaccagatggaggctgccctctagatttccactccaaagaaactaatgcccaacatatactacttatcaccaatttgtcgtggcacccatcaattgcattgtgtaagtgggaatatacaccaccacagaattgacaagggcgacttacctgcncttctaaaaattacctttcttgctggatgaacaccctaaaacttggactccactaaggaatttgtgttggggcttatcaaactaattgtattgcctaatacacgatgattagtgattacaaatttgat

SEQ ID NO: 125117 - DNA, 351 bp, Glycine max
  unsure (1)..(351): unsure at all n locations
tccgccaagagatctaggagggactccacggctattggatcatttctgctnccgagtatgatagccaccatgtcaagagcgccgagcaccagcaacgttttaaggccatcaaaagatgggcgttccaccgagagacacgcgttcagctcaaggacgatgagtacactgactttcacgaggagatatcccgccgacattggacgtcgctggtcactcctatggctaattttgacccagatatagtccgcggagttttatgctaatgcttggcccacacaatagggagtgcaggacatgcggtcatgggtgacgaggcaccggatttcctttgacgcgatgccctccaccaat

SEQ ID NO: 125118 - DNA, 258 bp, Glycine max
  unsure (1)..(258): unsure at all n locations
actcagctgagnagtttaaaaagagacctctcgcaggttattattctgtactttgaaaagtataccgtacattaacatcattgacaaaatattaactggagttgtgataccccatcttagatatatttatcaaccttgtgaagatgatgctgaaccttatttgacacgatgtctcttgaacagcaggatccttgcagatattatctaccataggggcatactcacacagtgcaacacggacgaagagccttcactcta

SEQ ID NO: 125119 - DNA, 461 bp, Glycine max
  unsure (1)..(461): unsure at all n locations
tcattcttgtataaagtntagaagcttcaagaataatggcctcttcaaacttcttatttccagaaggaaattcaatcaatagacctccaatctttaatggagagggttaccactaccggaaaacccgaatgcaaattgttattgaggcaatatacttaaatatttgggaagccatataaatagggccttatatacccaccacagtagaaagaattacaatagatggaagcacatcaagtgaaagcataacaatagaaaaacctagagataaatggtctaaagaggatagaagacgagtacaatacaatttataagccaaaaacataataacatctaccctgngaatggatgaatatttcagtcgttcacaatgtaagagtgctaaggaaatgtgggacactctactattaaaacatgaaggaactacagatgttatagatctatgataaacacttaactca

SEQ ID NO: 125120 - DNA, 417 bp, Glycine max
tcatcagatgttgcatttcaagatcgcttcctcttatggaagaacgaaatgcacttcttgcattgtatatctgtttaatggtcgtatagctattgacattgtgttccttcagagatagcagaatgtttcttggcttcaccatggactttgtcatttcagcaataagtgttttttcagctttagtcaatcgccccgcatatggatgtccaactaatgacttggtcaattcatgattatgcacttcacaaatcaacttcaccatccagccttctcttccaaccgctggcttgcaacatagcttgaagggacacccacatttcctagtcccagtgtctcttctgatacattcttttttcctacacctatactcgccactcctttcacagccaattaacacaaacgtaggccttcctctac

SEQ ID NO: 125121 - DNA, 461 bp, Glycine max
actcagccttgcgcagatgccactctactctaaattcttgaaagatatgtttctaggaagcataaatatattaatcaggagaacataatatgggaaggaaactgcagcgctgtgctccaaaagatccttccacccaagcataaagatcctgggagtgtaactattccttgtccaatcagagaggtcaatgtgggaaaatctcttattgacctgtgagccaatgatgccactctccatgtgcagaagatagggagagttggcaataatggccactcgaatgactctacaattagctgactgctccattaccagaccatatagagtaattgaagatgtgttggtcagagtaaaaccatttatcttcctggcagactttgtggtgatggatatctctgaagatactgacatccctataatattgggaaggccattcatgttgaccgcagctgcatatttgatat

SEQ ID NO: 125122 - DNA, 215 bp, Glycine max
  unsure (1)..(215): unsure at all n locations
tctaataactnagttcacctgcttgtgaagattcctaaagaagctagaacttagctacacacaccgctctaatagctaagctgacctccttgagattagaagctagagcttagctacacaccccctataatatgttagctcacccctatgcccgtcaacatgaaaatacagtaaaagtggctactgactaaactactcttaatgccctgaaatac

SEQ ID NO: 125123 - DNA, 335 bp, Glycine max
attttattttgtgaaaataatcatcatcgatcaatccctatattgtaactttgatcgtggaatcctttagtgaaagaaccaccatctcattgaagaagacccttgatacattgatatcacaccatcatgatctgtttgagttcctcttagacccatcaacattagatagctataggtggggaaaggcggaaagcaccatgctattagaatttcatatatagcaatgcacaacaacacaaaatcactatgataaggaggactagaaagggtatttgatataaggtaggaatagctaaaagtattttccatgcagattatgatgcatgttgtgagaa

SEQ ID NO: 125124 - DNA, 338 bp, Glycine max
tggcggtatttatcaaaaaacagactctggttgcatattctttaaaaagagaccatatttggtaattagtttttaaaactaaccccctttagtaaatttgccttaatttgttcatgatgaaaatttatagtaaaattttgcaaaatacgaaaatttatgtgatgattaacttcacgatgattctaaccaacaaataagttttatttgtgtgactttagattcacaatctcaagatatgcgtcccttttattcaagccaaccctttcgtgcttaaaattaagaaaattctaattatttgaatattgtgcaatcttaatgaaaagacaagtattaaaatg

SEQ ID NO: 125125 - DNA, 357 bp, Glycine max
tcaagaataatggcctcagcaaactttttatttccagaaggaaattcaatcaatagacctccaatctttaatggagagggttaccactactggaaaacccgaatgcaaatttttattgaggcaatagacttaaatatttgggaagccatagaaatagggccttatatacccaccacagtagaaagaaccacaatagatggaagcacaacaagtggaagcacaacaatagaaaaacctagagatagatggtctgaagaggatagaagacgagtacaatataatttaaaagccaaaaacataattacatctgccctgggaatggatgaatatttcagggtttcaaattgtaagagtgct

SEQ ID NO: 125126 - DNA, 318 bp, Glycine max
caacaaaaccttttgcatcgaaaagggaaaaaaatttcgggaaacaaagaaagaaagttttgaatataaaaagagggggaagatccccaatgggaaaaaaggtgtggttgtaaaaagcaagccaaattttctttcttggtgacttttatatactttccttttgcgtgcatatcataaagctacttgtgcatgcatcttgctctgaggaatgtgttattttggttgggtgttatcgcagcggtctcacacaactgtttcgaacccctggactatgcatgaaccaacaacaaactactttcatgtttcccttaaaacact

SEQ ID NO: 125127 - DNA, 340 bp, Glycine max
tgtgatttgtactgacaatatcaatcagttacttatatttaacaagttactaccaactgaattcacactctttgaatcagctttgacatatggtccagctcaaaatataacatataatcatatagcttaatcaaccccaaaactagataagccaaataaacattaaaaaaaagggagctttactcaattcactatgaaaaaaaaaattactctaaaatgctatacaatatactacccggaaccataaaacattaatttctaaccatgatcttagaaaaaaaaaagacaaacagaaaaagctcataaacaactttgagaagctctttataattcctgaaat

SEQ ID NO: 125128 - DNA, 364 bp, Glycine max
tcatgcttctactcatgtggcagggcaggccctcttcgacttcttgttccaattgcgaaccttggcttccgctcttccttccacgacacttttccttatgtccgcttgcgtgggtttatagcctaatccaaacttctcacggtttcctctggtgcttatcaggctggttctgtcgccgttgttcctacctaaacccattccgggctcataaccattccccaacatcacccgggccaccatcattgccgtatcggacaggcaaggttgtccagagaaggaatctacggaggcaatgcttactacctcaaaagattggaaggttgtttctaatgactcctccacggctttcacatatggcatagag

SEQ ID NO: 125129 - DNA, 320 bp, Glycine max
  unsure (1)..(320): unsure at all n locations
cggctgcagctaagaacaacctaggtgtgctcttaactccaccttttntggactctanatgtattattattattgatattataatagatgtgtctaattctctaataagaaaatgttatgagtctcttcgagtttctcttctggaccatttatacccacggttctatatacttatcttgggccatattaggtttgctttaanttgcgatctgcgatgatttattgtaccctattnntattatttttactcttcatttccatttttgtttgtattgctgtccacttagtgagtctttcacaagatttgatcataatcttgt

SEQ ID NO: 125130 - DNA, 314 bp, Glycine max
gtagccttctggcagtttttccttccccaattaacctaaattcgttaaaattaatctatgcacactttgtgttcgattaattgcctctgagcttaacttgcgttcatgcttaatgaacgaagggttaattggtgtatgtgttgcctaatcacgtattgacaaccctaagttgattttcgcttagtaaattaaaatagggttggattaagtggttaactgttatggacaaattcttcataacctatgacaagagaatggcttctgaataagaggaaacaacacgtttttaatactattaatttcgtattccagta

SEQ ID NO: 125131 - DNA, 122 bp, Glycine max
aaaggccccaaagctgagaatgtgactaaacacgtcacaaataaggcaaagaggcgctgaggccaaacggaaatgccacacaggacagggcacagggacccttagaacggtcaggcaaaggg

SEQ ID NO: 125132 - DNA, 356 bp, Glycine max
tgacctatgaatactcagctgcttgttatgttccttcactttgccttactatctttaatggtgaagtgagaatgtggagctagttgttgatagaaaagttttgatatgcttctccggtggaaaatatgttgatgagatactgtttgatgtagtccctatggagtctagccttctcttacttggaaggtcttggcaatatgatagggatgttgtccacaatggtgtcacttacaaattttcatttgtacataatgggcaaaaaggttacccttaaacctttgtctccacatgatgtttgtgaggatcaaattaaaataacagtgataagaggacagtagagaaaagatgaacttttt

SEQ ID NO: 125133 - DNA, 154 bp, Glycine max
ctagtatatactgttattgctactgatacccgttattaagttgccagagatgataatctttttaacacataaggggggggaagacccagaaattagagtcttttgccccacaaccattttatgctttgactagatagtatatatgaatccgagt

SEQ ID NO: 125134 - DNA, 343 bp, Glycine max
tgaaaggtttttatacctcacaaattatatgtgatgtttgtttaggtagcgaaaataccttagatatgcatgtttgtaatttaggtagcaaaaaaaatacctcaccaaaatatatatgtgtatgtttaggtagcaagataccttggatatgcatgtatatagcaaaaatacctcacaaaaatatacatatgtttaggtagcaaaatacctcatgaaaaaaaaacaaaaaaggtaaaataaaaataaaattggttaactaaaaagccaacatgcttttgaaaggaaatgaacttgccattcagaacacaaggattttgaagaaaaatgtgtatgcacctaaatg

SEQ ID NO: 125135 - DNA, 364 bp, Glycine max
  unsure (1)..(364): unsure at all n locations
ccctggtgaccctatancatacgtaagcgttcttgttagttaaaatttgctnattctcaaggttaataatgaacttttggagaagctaatatgagaaagcttctacaaattagcttatgaataagctaattttagcaacttatttcattttttcttcttattttcttctcctattagtgcttatagacaagtttacccaaacatgcccattgttgttgactttagtgggtgatgtacttctatgccaaatgatttcatgtgccatttgatagggatctcaatgaaggtagtagtaagtagattcaaaaaggcattatggtttttcacctccaattaactggattgttgaggaagaaagaaaaag

SEQ ID NO: 125136 - DNA, 342 bp, Glycine max
tcaatatctatcattcacgactacttacttaataagggagttaagtagtcatgcgtttacacatcaagaaagacacactcatccaagatatatatatggtccaaaaggtttttgcaacactaatccacgcatcaaaggagaaataagctaactatcaacatacacataggatgatagaggttcgttagcacattattaatcaatatcaagactacttgcatcacccaatggcttgccataatgtccaacgcgcacttctcaaattatatagagggtcatgtctattactcatgactcaatagtgaatttatgggatagcatacaattaagatgcaaggcaca

SEQ ID NO: 125137 - DNA, 335 bp, Glycine max
  unsure (1)..(335): unsure at all n locations
tttcttaangcaaactggatgcgtnggttatcttggtaacccagctggccttgaatcagaaatctgtacctgtcgcaagggtttgtggtttgtgctcctctgctgaccaccatacagacctttgcccttccatgcagcaacctggagcaattgagcagcctgaagcttatgttgcaaatatttacaatagacctcctcaacctcagcagcaaaatcaaccacagcagaacaattatgacctttccagcaacagatacaaccctggatggaagaatcacccttacctcagatggtccagccctcagcaacaacaacaacagcagcctgctcctttc

SEQ ID NO: 125138 - DNA, 306 bp, Glycine max
  unsure (1)..(306): unsure at all n locations
ctaagttatacaaatcattctagaaatcagagaattatgccaagatcattattcacagttagcgttcactcacagagtaaggtcacactctcaccggtttntggttcatgcttttctttcacaatcagtctgtctagtgactaaccattctattatanagttgcactcttgttctntcttcgtcaacatgcacatntgctcanatcatgagaggaacacacatctcatcttaagcatgcattcatttanaacaaggcatacaaccanntttcacaaataaatatactacttcactggcataccatc

SEQ ID NO: 125139 - DNA, 333 bp, Glycine max
tctgaggaggacttgtttctgatgtgggctttcttgaccggtcttccaatcgactgggcccatttggttcgttaccgcatgcataaggcattgcggtctggtgcacctctcccttaccctcagcttgtgactgtatttcttagacattttgaaattcctatggattctaagccttttgtgctagttaaaagctccttttctattggtgttggtgcggtaacctcctttggctaccgtaaggacgtaaatgggtagtggctgaagaaggacacgcaacctctgcaagacgagcgtactccttctcctccacctcaaccagatgattcctcagcc

SEQ ID NO: 125140 - DNA, 239 bp, Glycine max
aaccaactctagcgttacttctggttaaaagatcattgaatgggaagaaaccaaatggtgtccttatcagtctctttcagttccaaggtttaaatgcagtgtcgacttataagacaagctacacaaattaacatattataaagctagagtacatacagaattatcataacggctattaacatttcaatatatcaagcattttggacaatttgcttaaggaaatgcttgattgtggtaaa

SEQ ID NO: 125141 - DNA, 297 bp, Glycine max
atcagatcttggatctctctcaaaccctaaccattagtgtctaactccgctctttccttttatcattgaacagtaagaagctcttgcatagggtcacattggattaacccttaatggatcatctcatgtcttgacccatatttcctcaagctttttatactagctttgccctttcccattatgatgaccctactgagactttgtccaaattaacgcaacacagcactgtccatacatacctttctgacttctacgtccttgctaacccaaatcatcggtctcacaccgcaatttctc

SEQ ID NO: 125142 - DNA, 389 bp, Glycine max
ctgacacgcgctgcactggaggaattcttaattggatcgtttactgctttattcaactgatggccacccattatattttctgcaaatgggtactcgaacactcggctccaaccctgaacaactccagcatataacaatcatccaaggggaggacgttcatacaaacacaaactggatttatgaaaagacattatcgtaatcctttctatatgaatataaaagataactttgggttatataataacatcttcctgatttaatttaaaacatgttaaaaatgtaaaatgtttatactctctctaaaactttaatgagacctgacggtaacaacaatatctttagctactgacgtaagcaaaatataagctcaccatttcttctcttaggac

SEQ ID NO: 125143 - DNA, 362 bp, Glycine max
aagccccctctctagagtgatgctcacattttaacagaactgtgttatttagcctctccttgaaggcttcattgctcttccaaattttccacacacgtgggtctccttcttctagctccacagatccccaatagcgaaggttttgagctccttctaattctttatgagggtgacatctacattccactagaacaataggcatggttagattgatgtgcaacttctcatgaccgtattccttcttatgttgtgcccgtgcaatcaatgattcaaccgccaataggcctgttctttgaacttctgaatcagtaatatgctggggcaaattctccagcagcatcttcaaaatctgtgccacatcc

SEQ ID NO: 125144 - DNA, 364 bp, Glycine max
ctcatgctttagacaacttgttgtaatcaatttttatgaggctgtaattgttcaaaagagatagttatgcctttgaagaaacttttctaacttagaaacttttctcaaaacaaaccatgatgatgcatgatgcaatacagatatcaaatatactaagatgcaccaaccaagataacaaccaatacaaatgccactcaagagagttgggcatgtaaaagccaaaacttcttcagaacttcttcaagcttttgcttgagcttcaagctttaaccttagggttgttcaccatgttgctcattgatcgtgggcggcaagtgtaccggatcgcacaagttgtattaaacagtaagaactgagtatcgaa

SEQ ID NO: 125145 - DNA, 322 bp, Glycine max
  unsure (1)..(322): unsure at all n locations
cagggattttttaactttaaaccggnagggggcaattaagatgtcatactccttgctttattctacaagttaaggtggtctaactggtttggggtaccctaaagtttcttaatttcatataaaggggccgtaacctgtgacattgtcttaattaagaataatgtcctttaaaggaccttggatactttgaattatgattttatgatggccaaaagactttggacttttttttatcatttagtatgcaaatttggtgtaaattatatttccttttgctttgccttaataaacactttatttattttggcataagtaaactgct

SEQ ID NO: 125146 - DNA, 357 bp, Glycine max
  unsure (1)..(357): unsure at all n locations
tgacatatnnctactgaagctnngaattttattttttaacgacttttattgggtaagataatctggaggtggtggtcactaaggtcaggaaagaatatgatgagctgaaaagatttcaacatgaccacaactgaagcgctatagcgggaaacgaaaaaggcccgaaaggaaaagtgtagtaggaacaagttccgaggggctttgtggggtagcagttacgagctcaaacttataaaggcctgtagggacaaatcaaggatggaatgcatggtgttagaggataaattgaagagttgtcagaggttaaagagaagattgacagatcatgtgaacctaacggaagagaatatgatgcaa

SEQ ID NO: 125147 - DNA, 340 bp, Glycine max
  unsure (1)..(340): unsure at all n locations
taactaattttttgatccatttattttttcaaaatgtccaattatgtcattttttaaactttaataagatctcttaatttaaaaaaggtttcaatgtagccatttttgttcatttgagattcacgatgctagtttacaaattccaacggatgcaatttttaaccgccattgtatttattattattatttaatttaaaaatatattaaaatagatatagcttaaaaaaagaaaaaaaaaactatatgctcttatctagagaacctntttcctagtatcaaagatcaaacttagttcaccaaaagcaaaacatttgagaaaagttgttttgagtataccata

SEQ ID NO: 125148 - DNA, 362 bp, Glycine max
  unsure (1)..(362): unsure at all n locations
tgacactatancatagtcatacntaagctttttgtaattgttgaaattattcctaaaggaaacataattgaaattcaaaacacattcttaatattgcaaaattaagcagagcaacccgtgcatatgtctatgaatgtaatcaacttcttccccggtatcgatatattgaggtgtttccatttggttggaattggaaaggttaagatgggtctcatgatttatattttaggtaagtttgaacatcggggctgtgttgtgctgccttacctacatttccaccataatggacgacttccactctaagttagcaaggaagtttctggcgcgggaaaatattgttttacttgtatttgacttcatga

SEQ ID NO: 125149 - DNA, 367 bp, Glycine max
  unsure (1)..(367): unsure at all n locations
acccagcacctgagctgcagcttaacttgtatgaggttgggtttctttattcgccccccaccattgctcgtttaattcttactaattaccaatgtcaagaatttaattactgatcgcaatctactgattggtgnttggactaattagtctacttaatgggaaaagaatgattaaacctgttgatgattactgaccttatcatcgatggaaatctaatttaaaaatcttaaatctttaaaatatatgattaaggatgatttatcgaccgttcttcatttctgcctaaaaaattgtacaaaaaattcaatgaatatagaaagtcttttaataaacaaacacgacatccacgggttatcccccttttttt

SEQ ID NO: 125150 - DNA, 330 bp, Glycine max
  unsure (1)..(330): unsure at all n locations
cctacgaacgtttactngctcaagacattctatggactaagaaaaatgcacccatatacaatctaaggtagcgttcatttacctaagattatttacatgtacttccaaagtgtatttgttatttacatcacacacgcctgcttggctaaatatacatacatgcatactcaaagcatttcggggtactcaaaaattgcacatgcgctcatcttggtatttctaatacctatacatatacaaacttcatgatgaatcttgactacctacgcaataaggtgctacatttcatgctttttattttatcaagtttttgctacctaaagccacatg

SEQ ID NO: 125151 - DNA, 350 bp, Glycine max
  unsure (1)..(350): unsure at all n locations
gaagcttatngaatcttgcactaaatactttttttctttgatcccgacgatcgggaaatctttaatttttgtcacaagacaatcaattcaaaagaatatccgtaaaaataatataaacagaacctggttcatatcatctttccaaatttgcattaacgaacgcatttatctattttaaacattttttacttttacattacatcaacacaataacatcttcttattctcaaaaaaaaaaaaaaactcatgagcatcttctcaccattaaaaaaaacgcacgttctttataaaatttagactacaacaaagtatcattttaaaaagtgataaacttaggcttcttacacata

SEQ ID NO: 125152 - DNA, 279 bp, Glycine max
ttctttatgctgaccagtgcctccaaattgctcgatagaaagacacacagtctaatgtgggatgacagacgaacataaaccacatactcttgcaacaagtgcatactttggatatatggccatctaaattaatacgctgaccaaggttttaagctttgcttctagcaccttatttttagaagagggacaaaaatttgcggccacctgatggactgctctaatggaaattacacttttactagcctggactgtttggagttgaagccattttccccatca

SEQ ID NO: 125153 - DNA, 252 bp, Glycine max
tctctgcatctctttgacagttgcacctttctaatgtaataaaagatatgctcctggcttgaatctctatattgaatcatgacaggagtcgatatatgatgtatcttccgcagataaatttaagaaaaagacttgacactcggtatccagacaagttgggaggcaattgcatgccagcgatcctagtacagcggcatagcttcttgtaggctctaatggacctaaatgcgttataaggggcatgtaaatata

SEQ ID NO: 125154 - DNA, 339 bp, Glycine max
tcttgagagttctctctcattctctttcttgattttctttaaatctaaagattatagcaagttaacttatctaagcgtaaagcaaataagaaagctagctacacaaaaaagccaacccttaccaactccctcaactttcacagaagtcctgtatcatcatatcaatcgatctgctttccttcactaagagatcgaaacaatcataacagtaaaaaattcaaacaagccctgggattcatctcccattcacaataagagaattttcttcctttccctttcacattaatccatgcccaagctctaagttttgccggatcccttgcgggcacacaacacagg

SEQ ID NO: 125155 - DNA, 331 bp, Glycine max
ttttatgtgaccatggcatgaatttgatatcatctgtggaaaacatctctttcaacaatcaagaaatctatctttcaatcttctctctcaacgtcattcaactgtttctatagaatgtgctgattctttttctcttcatctgtctaaaagtgtttgtgcaaaaatttctcttctaagaaaagttctttgtgcaaaaactggggctattcatctttttcagtctcttctcccttggccaaaagaatgaaggactaaccgcctgagaattcttttatggtgcaagttgaggggacatctactgggggattgttgtactaagaacaagagaggg

SEQ ID NO: 125156 - DNA, 359 bp, Glycine max
tcatgcttgactaggcgagtcgattttgcctttttttcacattagttttttagtcaattctattaagaatgagacatcccaaagagaaaacgtccgattgatttttcgctttattttactaaaaggtatttttttcattatattattatttacctctttttttgatttccaacgtggttgcggcacgaccgatcggtctgaattcatttcaaccaaaattaacggatgacaattcaaaagatcggtggaaatctattttatttttagattaagcgagaaaatgacttaaataaatggcttaagcacgtcaaaagggggtataaaaagtaaatgaaaacgagaataaaactacatgaaac

SEQ ID NO: 125157 - DNA, 350 bp, Glycine max
ccattgtaaaacacacaaaattattcaaattaatttgtgaaatctattttatttaattagatattttaaatttaaatccttaaaaatacaattctattaaaaacttggaataaaaatttacccatataataatcttataagtaatttaatttaaaataattatatattcatagtgcttaaatataagtgattttaaaaaagtattatacatgttttaaatatttaaatctaaaattaaaaaatatttaatcaataaaaacttattaatcaaaattacatggtattttaattaattgtgtttacggggtccacaaactgacatggcaagtgacgtggcattaaaatataca

SEQ ID NO: 125158 - DNA, 123 bp, Glycine max
agaagaaggttctgaacgaagctccaagctgtactggctctggaaaatgggccaatagtaaggaagcaaggttattttacacgccgtttacgcctatttgaatctatttaactatattccccc

SEQ ID NO: 125159 - DNA, 341 bp, Glycine max
ataaatattgttgcttataataggttgtgtaccctaggtataaatagttatgttaagtcagctgcctccttttggcctcatttacgtttttccccttctcctctcaaaaccctttctttttcccgtagtccaccaaaccagtctcagacaaacgacgatctcgaacccgttcaccgttggatcgtcgtgaaattggagtataatgtttgcaacacaattccgagcattctaaccgttgggaatttcgagatcatgtctgaactgatagaaaaacccttcgcattgtagcctttttctttcccgcagaaacccagagctgtcttggtaaaactatgatcccg

SEQ ID NO: 125160 - DNA, 322 bp, Glycine max
tgggacctatcttttatagaagattctacagaggccattgccttcctctcccagaattatgaccagtcgttgaggtgcttcacctttggggactttcaactatcacccatggtggaagaatatgaaaagatcctatgatgccctctaggggggaggacaccatacctatttacagggttctatccctcatatagctagaattttcaagatagtccaaatctcggcgcaggaattataccacaggaagcaagtcaaaaatggggtgggcggaataccgagaaaatatttggaggtaataactagaatattggcagataaaggc

SEQ ID NO: 125161 - DNA, 340 bp, Glycine max
  unsure (1)..(340): unsure at all n locations
ctaaaaatatgatatataattattatttttggactaacaaggggaagtagacatgttgaataatagaatacagctacgggtaatttgactgcgatgttcaaaggtcaatatcaaacatttaaaccaagaaaaagaggtgctccatgacgccacgtaagaaagaaacgccatgcaggtggcaacaattaaaggaaggtcaagatagtcaacaaatggccaatgattcaaaacccactaccacaatagagtacatagatgaacaagtaaaaaactnnnnncaactacttaattaggacggtggatattttggatggaactctgaaatatattcacaaacttt

SEQ ID NO: 125162 - DNA, 343 bp, Glycine max
ttctttgtttatgctaaactctttcttatccgcacttgcaatgaggatgtcatccacatacaagagaagattaagaacacacactttcccctttttcaggatatatacatagctgtcatatctgtttctaatgaagccatatctgatcaagaactcatcaaatttgagataccacattcgagggctttgcttcagtccatacaaagattttttcagcaagcacaccttgttatccctttcttcaaaaccttccggatggttcatgtaaatggtttccttcagatttccatggagaaaagcttgtttaacatccagttgttcaagttccaaatcatactgattt

SEQ ID NO: 125163 - DNA, 314 bp, Glycine max
ttggatgcttttgctacgaggaagatgaatggcatctgtatggtaaaacaaagagtgagaggagacgccactttcaggacaagatgagtctataagaagctcaccaccatatgaggccatggataatagcttggatgaataaggagatgaatgaagggagaggaatagaagagctcgaaattttgtgctctaaatgagctttgaaatctgaagtttaatattcaaatgatcaaagttgaaaaaaatgcacacacatgacctttatttatagcctaagtgtcacacaaaattggagggaaaattgaatttcaatt

SEQ ID NO: 125164 - DNA, 383 bp, Glycine max
aacttatctttcaaaactattaatcgtctctacacaatataatggacaaggttcattaagcgttcatatacttggctagaacattcacaactgaataagtgtaaatgactataaagagctatatttaaaagcatatgaaaccaaatgttttacaggtcacctaactttggctactcactttcatcaatttgaaggttcataacaatcttatacatacaaatcttatgtatattgctcaacagtctcttagcatctgcattaataatctcttaaaaaacccatttcttgactagcactctgcttacacattatgtaaaaatagtctataccaaatgtaacaaactgataagaactgactacaactaatcttattgcggttcttc

SEQ ID NO: 125165 - DNA, 342 bp, Glycine max
ttatagttggtgtagaaacgtgtttttatctaggtgcaagacatggtttgattaaagaagattttgagttatggtcaaataatcaactcataaatttaagtgcatcaaaagtaatctgttgaaatacttttcgtatgcatccaagctattaactagatttgacaaagtcaaatttgaacatgtgtttcgagagcaaaataaagaagctaatgactcggctcaaattacatctagttataaattgagtaaacaaaattttgaaactttgataaatatcaaagaaaaattacaagaaatagaattttttaatatagatgtattgacaactcatgattggagaaa

SEQ ID NO: 125166 - DNA, 333 bp, Glycine max
  unsure (1)..(333): unsure at all n locations
tgaaatataccanactcaagtttgggacctaacatgtcttgacgagttatgttggtgactcctaagcgaacccacctttagaggaacangcagggaggcaacatgatggctttctgctattagttcccaatgatttattgatacaccatgggcagttattgttgaagctcatggggtagccattctcaaaatttaaaactggtggagggattatttgtgttgtgtcggcatgcattgtagcctctctgatttcacaaatatccctttattaggactaggaaatggtcggagactcacngatagtataagaaagcagatatatgatttagggat

SEQ ID NO: 125167 - DNA, 302 bp, Glycine max
caaccagacacatctgcggagtgtggtctgcaaaaagaaccaaaaacgttttaacgaaaagaaatgttttaaaaaaattactttattttaagaggttttagaatatcatttgggccctcatttgagggcccacacactactattatatttaagccataatttttctttgccagtgtccatcccaagcctaactactcttatacggtgggaaaaaaatgccacaaaagtgcggccgagacctcgagaggtaccactaaaatgcttgccacatcacactgcgtggactctcagccctccctgaa

SEQ ID NO: 125168 - DNA, 337 bp, Glycine max
ttcttgtagtgtaaaaccatgatatcattatatccttaagaatttggagctctggaattgttttgggaataagtgggggggttcttgtttcattggataacatgttttgttggtcatgcttcatgatataatttgagccatacttgatgttcattgcatattggttaaatgttggacatgctgaatatgatgctgtttctcataagctacaatgctaaaaaaaatcgaaaaataaaaagaaaagcagtaaagttgagtgaataagatcttaaatgacaaaagaatgatgaaactcttggttctactctttatggttaaatattatctttacttcttt

SEQ ID NO: 125169 - DNA, 252 bp, Glycine max
gaatgttaataatggagtgtttgagaaaaaatttaaaattggttgagtaaaaatgttgaatgtggtgaggaatgagataaaatttattatgtagtaagaaattatattaggggtgttaatgtgaaatagaaaaatgattgtgtgaatttagaaatattatttttggataagaaaaatggttattatgtaattgtgtgtgtgtgtgtgtgtgtgttattgaaaaattagggagaaggaatggtgtgatggatt

SEQ ID NO: 125170 - DNA, 361 bp, Glycine max
agcttcaacattcaatttcgagcgtctctatatatttcgggacttaatcagacttccgagtaaaaagttattgtcgtttgagtaggctcacaggttcaacattcaatatttgagcagtctcgatatattacgggactcaatcagacatcggagtaaaaagttattgtcgtctgaattggctcatagctttaacattcaatttcgagcgtctcgatatattacgggactcaatcagacatccgagtaaaaagatattgtcgtttgaattggttgagaggttcaacattcaatttcgagcgtctcgatatatttcgggactcaatcagacatccgagtaaaaatttattgtcttttgagttgg

SEQ ID NO: 125171 - DNA, 350 bp, Glycine max
ctcaagcttctatattagtgtccagatgacctttgtctcgaccaagctttcttggaagaaatgcatcaattactttttgcccctgaaatacgcacccatcttgtgacagaacattttttggtgagttttaggacaagtcttccttttgtacctatcgaagttaagtaccttgaactttggagggattacaatgtctggcaccaggcataggtcagccatgtttgcgaacggataatcggctaacccttcaacatccctcaatctttctttgatgagaacgagtttcccctttccctttgcttgtttggggtggctctaccgcggacataaacattggctatgttgggtgg

SEQ ID NO: 125172 - DNA, 358 bp, Glycine max
tgtgaaggctcaagagaccatgaattatcttgcagatttccaacgcatagaggtagtttatcaacctggtgattgggtcttacttaaactatggccccatcgacaaacaactaccaaaggacctcaagcgagctcgggcaagcttgccaagtggttttatggaccctttcaggacttagaatgcattggcaaagtggcctatcacctgcaattacctgaagaagcttggggccactctattttccactgctccttgcttaaaccattcaaaagtttcctggaatagtccgaaatgggttcattaccacaacaattcatcaattattaacccttaggtgctcctctgggtatactcaat

SEQ ID NO: 125173 - DNA, 341 bp, Glycine max
taagccaattgactttagattttttcatcagaaggtcttcttccatttgggtcaactgaataattttctcattcttctgcttcacttccttcaacagcaaattatcaaaaggattatgttgtagtaaattttggacctgaagtaactcctgcctaacttgctggatttgattttgcatattggtgaactgtctagacagaggtcttaaaacactttggagccttttaagcttgtaccaaagtttttccatagaagtccctctatattccacatgccagctactagcaaccaactgcataaaagatggatctttagtgatacagttgataaatctaaacaag

SEQ ID NO: 125174 - DNA, 342 bp, Glycine max
ttattcattctgatccctctgattttcatttctctccaaaagaacaagatatttttgttcatactatacacatattctattctaaaggtttgtttacatccctaacttttatgatagcgtttcttaagctttgcaaagccattactcgttatattctctaacaaaaacatttaacactcatcttatgccatctagatgactcataacaactctatctccgtagaaacactgtcagactcgggttgcgaagaagttgctgtggtgtcagaggtggcatcatcaacactcaaattggagaattcgccgccaatagaggaactttcatcttcaccacataccgaa

SEQ ID NO: 125175 - DNA, 341 bp, Glycine max
gtgatattctgaactgactattatttaattatcttggatctaaaacgctttcaaattgctttaacaggttattccttcttggcttggaaaagtatgggaaaggtgactggcgaattatatcaaggaactttgtggtgacaagaacgccttcactagtagcaagccatgcccaaaaatacttcattcgtctgaactcgatgaataaagacagaaggcgatccagcatacacgatatctccaatgtcaacaatggagatgtttcatcacctcaaggaccaattactggtcaaacaaacggttctgcggataattctgctggaaaatcaaccaaaccagcccca

SEQ ID NO: 125176 - DNA, 340 bp, Glycine max
tgtgcaaatctaatcactcctacatttcatctgttgcatgcatattctttctttaccccctcctcacggaaggttctttttatggaaaaacacccttactaaacgcgccgcaagggatccctatcgcaccagatccaaatctagaacgatgggtgatcaagaggagacgcatgaacaaatgaaagccgacatgtcggttctgaaagaacaaatggcctccatgatggaggccatgttaggtatgaaacagctcatggagaagaatgcggccactgccgtcgctgtcagtttggctgccgaagcaaacccaactcttttggcaagtacacaccatcctccc

SEQ ID NO: 125177 - DNA, 255 bp, Glycine max
ccttactccacacatttgataatacattgagcttcgttctgtatattcgtcatgtcagaaagatctatgtacctgtatggatctatttatgtggcatgattatgaatgaaaccatgattaacactaccttaccctatagagcctgattacaggaggacgtcccatagtgtgtcctaagaaatcaacttctcatggccgtacgagtgcacgtccttgatccttgtgaaacaggagagtttcaacatcgttcaaatt

SEQ ID NO: 125178 - DNA, 342 bp, Glycine max
tgcttgattatcatctatggaggttggaccttttatgttcaataaggtcctttaatggtgattttcagccatggagttgtagcatatgataaaggagaagaggtgatatgaggccccatccactatagaataagccatggaaggaactaagttgggggtttcgaaaacaaaaggttaaagaaactatggttgaaactagccaaaataaacactaaaagtggtgtgaaagataaggttaaaaccaataggtaaaaagtaagttatctacgcggtttgacaatggaaggtaaaggaaatttaaagcaagctagacggtttcctatgtgaaggcttggatgaccc

SEQ ID NO: 125179 - DNA, 337 bp, Glycine max
  unsure (1)..(337): unsure at all n locations
tctttagttatattaaataaatatttatctatatatatttnaatatattttcgctctaacaacaagatatatgcatgagcttgtaataacaagcgttttatcaatcaaaacattggtttgacaccaggaaacctgtcattgaatacaatacacaggttttgaaacttctgaatactataatccacctaatatttgaatgaaacactgacataagaatgttgatttatgttgtatgacatttgacgctagctagactattttatttttaggatgccacttttttaattgtacaataacatcaagcaagcattatcgtttaacgcgagcgttccagtca

SEQ ID NO: 125180 - DNA, 337 bp, Glycine max
ttcaacaagagtcttcacaaattattatcatgaagcagaaaactaacaaagctacccatcatatctcccaaaaccccatacccacgaaaatcaagggagaaagaagtccacccaaacctgaaatttcaaagtcccactcgtagacacgcacttcacgaccccgaaaatgccctcctttcgcaatttggggcagaaatgatggccaaaggttgaagctttgtttggagcttcaatggtggatgaagaagagagaaagctacgtgagagagggaaagaaaaggcttctgaatttctttcttttggctgagtgaagagagagaacagctttttggtttta

SEQ ID NO: 125181 - DNA, 373 bp, Glycine max
  unsure (1)..(373): unsure at all n locations
atagaccactcaagcttggtcatattaaaaatcaatntgctctcgtttatacatgtttttcgacgaacgacaagttaataaaatatagaaaattaacgagagaaaagttggtctaccctacatgaaaatgtaagggaatcttatcgtatcataaaattgctaaagattatgcatagtcggtgtggatttacaaaaattaattaaaaatccccttaataacttttgcttagtggataatgaaaactggacccgaaaggatttccttcaacaagaaggttcacactcaatgatgttaacccttgattataattatatgcagcccgttagctcacttttttggtagggtgaaaataaagggaaggggaggaaaaat

SEQ ID NO: 125182 - DNA, 189 bp, Glycine max
  unsure (1)..(189): unsure at all n locations
gctcaattctcatctatcatactacctatggctctctatctgatgaaaaccaaccagcttccacgaagccagtaagcatcagtgctggagggatgcaatgcaatgcgaaatngatgcctctgcagtcaatcatacttgagatagtgtcccactccccatatgttcatctaattggtgcaagtgggtcta

SEQ ID NO: 125183 - DNA, 364 bp, Glycine max
cctcaagcttaataaatcaacctatggcttgaattagcctcccgccaatggtatctgaagtttcatgatgttatcacttcatttggctttgatgagaatatcatggatcaatgtatataccaaaagattagtgcgagtaagatttgcttgcttgtgttatacgtggatgacattttgcttgcaactaatgataagggttttctatatgaggtgaaacaatttctctcaaagaactttgatacaaaggatatgagaaagacatcttatgtcattggcattaagatccataaggaaagatttcgaggcatttttggtttgtctcaagagacttatattaacaaagttttagagagatttaacatga

SEQ ID NO: 125184 - DNA, 325 bp, Glycine max
aaaagcgctttattgagttaaaaaatgcgaataatgatgaccctatggctgacaactcgacaatcccgtgggtatggcttttgaaaggggggaaaagaagtctttgaatgcaaaaaacgtcccccctttcatcattctcataatttggtgcaggggaggttcgtccaggcgagctaacctgcacatcttgattgcttctcctttgaggggaatattaaccatgtccccttccttatcatggattaacaccttgccaaactttgaactgacttaagttagaattaggtgttgattacttatttttactttttaaaccagacaaaaa

SEQ ID NO: 125185 - DNA, 288 bp, Glycine max
  unsure (1)..(288): unsure at all n locations
ccatgtgatataatcgattacttctcttatanatagtgtttcagaagtaatcaagaacactctaatcgattacgttgatgatctaaccgattacattgttcttgaaagtttctagtttttgggaaaacatacttaatcgattgaaatgataatataatcggttactttgttgcaataatcgattacattggntagttaattgattacaggcgactataattggtttctctataaatagccaccttgtgttctcacttcatagtacaagttcatgaagtgcganattat

SEQ ID NO: 125186 - DNA, 365 bp, Glycine max
tcatgcttggatactttttcctcactctaattgttagggaaggccatttattgacttcattctcattctaatcatagatagtctcacatattggaatacagtggacgagaagtttcttaaaaggtagtttccactttcatgtttcatgacagctaaaaatgagatcacttcatttttccaaaaggaaggggaaccactctatgaagcttgggaaatattcaagcaattactaaggatgtgtccaaatcatggaattgattatctgactcaaatgcaaactttttgtcaaggtttaagacctcagacaaagcttatgttgaatgcttctgcaagtggaacaatgtatactaaaatagaaaatgaag

SEQ ID NO: 125187 - DNA, 342 bp, Glycine max
tctcaaataagccacgaggaagcttctagaggaagcctcttaatgaagcttctagagaaagctacatggagctgcctcggtaaaaacgcttcccagccttcattaaccgttggatcttctcgaaatttggtctgcaacttcacaaataaattttccatgatctgaccgttgggatctttgagaagatgtctggagtgtgctagaagcctcttaatgaagcttctggaggaagcctcttaatgaagcttctagagaaaactacatgaagctgcctcggtagaaacgcttcccagccttctttaaccgttggatcttctcgaaatttggtttgcaactttacaa

SEQ ID NO: 125188 - DNA, 343 bp, Glycine max
taacaaaatgcatgcgaagtgggtggaattcctatagcaattcccttatgttatcaaacataaaaagggaaaaggtaatattatagccgatgctctttctcggcgtcatgcattactttctatgcttgaaacaaaattgattggtcttgaatgtttgaaaaacatgtatgaaaatgatgaaacttttggagaaatttttaaaaattatgaaattttttcagaaaatggtttctttagacatgaaggctttcttttcaaagaaaacaaattgtgtgtgcctaaattttctactagaaatttgcttgtttgtgaagcacatgaaggaggtttaatggggcatttt

SEQ ID NO: 125189 - DNA, 341 bp, Glycine max
tggtggtctcttctttgattctggttatctcttggacttcatcctttgtctctagttctaccctaatgttttcttcattttgttgttcttggaacaacaatctccttgtcgatggttccctaactctgacagggatcatagtgtttgtgtcatatgtgagtcgggaagaagttccattggttgtgggttagggtgaacagtgataagcccaaagtatactagggagttcctccttccacaaacccttaaacttgttgagtctagtgtgtagggctttaaggatgactctgttggttgcctccgcttgaccgatggtctatgggtgtatgatagagtataca

SEQ ID NO: 125190 - DNA, 287 bp, Glycine max
  unsure (1)..(287): unsure at all n locations
gcagcttctatccaggctcatcttggtggtgaagctccttcttctatggcnntattcctagnggatggcgcctcctctcacctcttctcctttatcttccgctgcatctccatggtagaaaatcaccattaaaggacctcattgaagctcaaagaatcagcctccatagagccccacaagcaagcttccatcaacctccatcgtttattccatagaaatcacatccttgtagtgccactcattataaaaaaactttttattgtttttacagagacttaaactcattc

SEQ ID NO: 125191 - DNA, 344 bp, Glycine max
tattactgtctctagggaccactttatctattacatcatcaagctgagacagagtataattagtgacaaatcattgtaaaacaataattttgaggatttattttttactagtgatatccaaccttaagtaggtcaggaatctcatctcttgaagtcacaagcccaataagtttgtcaccaacagtatctggcatcactgaagtaatgacctacaataaaagaagaaatacaaatgagagaaaatatgtataagtgaattaatgacaaagaaacaacagtcaattcagatccagaataatttcataaaacaacaatctcaactaaaataaatagatattagatag

SEQ ID NO: 125192 - DNA, 328 bp, Glycine max
ggtagcctaggatcttcttcattattggattctcttgcttcttggaagatgaatggctgcggtgtggttgacgaagagagagagacaacgccacttcgaagagaagatgagtttagaagaagctcatctccatcggaggccatggataatagcttggaggaagattgagatgaatgaagggagatggagagaaaatcacgaaattttgtgctctaaaagagctctaaaatctgaattttattattccaatgatcaaagttggaaaaaatgcgcacacatgacctctatttatagcctaagtgtcacactaatattggaggaacatttg

SEQ ID NO: 125193 - DNA, 297 bp, Glycine max
  unsure (1)..(297): unsure at all n locations
tagatctcagctgttgngtggaagggnaaggaacaaaggatacaagacatcagaattctaaacnggcactgtcaggttaagatatcaatctcttacatactaatgacactgttctaaatctaaattataggaagttgccagataaaagataaatgccattatgaacattgcattctacctgcatggaccattaagtctagtaagcatggtttcttcttctagaagcaccactctgacnttgacacctgaaaacangtactanatatcagaaatgatgaattcaggaatactcataac

SEQ ID NO: 125194 - DNA, 335 bp, Glycine max
ttgccaacaatgtctcaaaaggatttaaggatacatatacaagggagggcaattcacatgtgttttagataaatacttgtccttttttttatcagcaaggaataaaaatatatattaattgagtaccagaggtacctaaaaacattttacatattggtagctaagcaagtggatcccagacagactgcatcaagtgaagctagcaaccaattgcagcctacataagaggaaactagtttctaagcctagtcgccatcccagaacacatctacttgtcctttgattacttgagaaagtggaacaagcaagctctacagttactgtgtgtgtgtgac

SEQ ID NO: 125195 - DNA, 296 bp, Glycine max
aagctttattaataagataagctttttcagttaatgttgattaatgttcattctatgaatagaagaactgtcctactgatccattataagccttaccggatacttcagatgctttcttcaattgactttgattaatgctcttgcaatcattctggaaattttaggcattttaaataaataaattataggattttttttcgtgtacaaataataagtaattgtgaagatctatgaatctgatataagcttcgcaaaggttgtagcttacatctccttggataaggtggtacgttcaa

SEQ ID NO: 125196 - DNA, 341 bp, Glycine max
atcacaatttttgtgagcctactttacatggatggtcgtcatctacatacattgctcattctaaaactcgatgattttctacacagtgcttcacccccttcatgccatcaatatcactacacgctattgtcataaaccttaataatttatgtttgcacttgtattctcactataatgaagttcaaactgttcattatgctccaagacatgcatactattatctacaatgaaaagttaaccaatatcaccacaaaaaagtgtgctaaaaacataagtgtaataattataaaattaatcctaaaaaaaagaataacgaatttaaaacttctgtgataggtcat

SEQ ID NO: 125197 - DNA, 297 bp, Glycine max
tgaacatccgaacgggtttcatttactgggaatcggacacctacgggcttgtgcttaaacatagactagaaaatttatatacatttggaccgaaattttaaaaaaaaaccaagcaaattggattaaaggaaaaaataacaaaaatctcacacgtagttagaaaaattaatgccctggaaaaaaagtacaaaagtgaaaggaaggtgtgcttgttgtttaggctcagaatagtcctataataggtgcctatttaacaccagatcctagttttgaaaattcacttgaaaatatttggaa

SEQ ID NO: 125198 - DNA, 321 bp, Glycine max
ttaacatgtttcatgacatctttgttaacgtgaaactggaagttacaaggacatgaacagtgctaattgtggtaggcattatatgaagaatcgatgttactcgatccatctttggccccaatttctgcaagatggttacgttccatgctttaacttgacttgatgaaccttttcgtaaaagcatgagcttggttcatctccctaatccaaggaatggcaattatgatcgccaatacttgaacaatattttcgagggatgaaagactcgataatacgcatgctttgcatggaaaatataattttgagattgagatgcccaaa

SEQ ID NO: 125199 - DNA, 293 bp, Glycine max
aagactataggacagccttgcattttggaggggatcacttatcttcttaatcagaactttttgccttgtaaaattggcctttgatacaaatgagtttttatcaaactactaaattgaaaactaggtctctaaaagtggctagacataaaaactgttacctaagcataaaaggcatatgaggtttgaacctcttaatccttctaaataaagcttgtcttgattaaatatccttcttgtaatcagacaacttcattatgagcttattactagtctaattgctcccaatcttataa

SEQ ID NO: 125200 - DNA, 175 bp, Glycine max
ggaggagcgcccggacacttacgcaacaagccataaggaactcccgggtggctttcatacttctacagccgggccctagcttaagagtttccttttgttcaaggctataatgtgctttggtcctaaatttactatacaaagatctgtcttcatctgttcctacgtctctacccta

SEQ ID NO: 125201 - DNA, 340 bp, Glycine max
ttaggatttagttgttttcagttatttatgagagtgctattgttgcacaagcacccaaatactttttaggaagaaatggcctatgcaatgccatataatttttccactaagagacgttttattaacaaatggagttggtaaacaattgataagtaaaacaacctgcaaagcaaaataccaagaaattggtggtaacttggactgaaaaagaatggcttaaagtaacaatcaataaatgtcgatgtgttctctccactattccattttgttgtggagtttcaaccctagaagactgggggattatactagtgttatgataaaaccaattcatgataaactc

SEQ ID NO: 125202 - DNA, 337 bp, Glycine max
tctatggttgctgcgtctctaagttctcaagatgtcctttaatggagatagtcaaccatggtgatgcatcggttattaacgagaacacgtgagaggagatgtcattcactatggaatacaccatggaatgaggatcttcaccaccaatagagggccctggataaaaagtttagagagaaagcttctatggagggaaataatgaaagagggggtgggggcatgaaatcgaaggagaaaaagagggatgaaaagctgaactttaaagagtgtctcacaagactctctttcatcaaagcgaatttcatttttatttcatgtgaatctaagagaaatattc

SEQ ID NO: 125203 - DNA, 344 bp, Glycine max
tcgaagggtttaaagagagcaatttctagcacatagcatggttttaaaagaagagttagtcgtttgctcaaggtccaaaataaacttgtctcagcgtttatgtgagacatataccagcatgttagctatcatcaccaagtaccaagaggaactaagtctagccacggcccacgagcatagggtggcggacgagtatgcccaagtgtacgcggaaaaggaggctataggaagggtgatcgactcgttacaccaagaggcaaccatgtggatggaccgatttgctcttactttgaacgggagtcaagaacttccccgactgctagccaaggccaaagcaatggcgg

SEQ ID NO: 125204 - DNA, 347 bp, Glycine max
gtgaagtatgaataccatttaccttaataagtttcttccaattgtccttcgcgaagactcaataactaagattcttaaatattacattctatatgtttgcaaaagcatggacattggggcattagttatgttacccaaggatttctttcttaattggtctatgagcgttacctctccgagtggtctaacccttaaaacagattcacggcattcattcctgtatccctaattaggctttaccctctcccgagtgaccttaaagactaacagaaaataaagtttgtaatgcagaatatattataaagacaagcttatgaaagaacctggaagaataaccctctaaaaga

SEQ ID NO: 125205 - DNA, 335 bp, Glycine max
tcttgtgtggcggctggctcaccatgtatcttgggtggtatatgtaaaatggcctctggtaatcgattaccattcgtgggtaatcgattacagggcttaaaaatggagacaagatgttaaatgacctctggtaatcaattactaagggtgtgtaatcgattacacagggtgatagggcactggtaatcgattaccagctgggtgtaatcgattacacagggtgatagggcactggtaatcgattaccatttatgtgtaatcgattacgcagtgtaacttttagtttccaatgtgtaaaggctatgtaatttcgtttttgggcactggtaatcgat

SEQ ID NO: 125206 - DNA, 61 bp, Glycine max
tccccctctcctcctctctatctttgtcctctccttctctttatcttcttcctctcctcca

SEQ ID NO: 125207 - DNA, 342 bp, Glycine max
ccccaattctggtgttctatgctaacttgctccattatctactagatactgcaatggtagccataacccctgctaagtttcctcaaccttcatttttccgaggatacgacttgaacgcaatgtgtgcttatcatggaggagccccggggcattccattgagcattgtatgaccctgaagcgtaaggtgcaaagtctaattgatgcgggctggatgaaatttgaggagtatcgcgtttgagtcctgacattgacaagcgacaccacacatggggcaattttgaaagctgttgttaggtgtctctaatgactcatcaggatttctaagtttatgccattattgt

SEQ ID NO: 125208 - DNA, 336 bp, Glycine max
cgtatgtattagtttgtgtacaattttatccattggatgaattgttctatgatcaaatacctcaacaatactcacgttgttatacaatcctattcctggtacattaacagtgtttacatggcttttttgggcaagaaaggatcaatttgtcatttcgttcaaaaaattacaaaacacacgtcacaatcttatctcatatcatgtatttcatcggtataaaagatattccattaatgatcaaagaagttaaaaacgaatgtaaagctggacatataaaagaaccccccaattcaaattaatcacgtacagaaaatcaattataaaagctaaacttta

SEQ ID NO: 125209 - DNA, 336 bp, Glycine max
aaaagtgttctgctatcggctttcccaagttaccatctaaaattcccaaccaaagtgaagaagacaaaaacatccttttggtattttgactggcaaaaacatgtttcattgattaaatttaacataatggaaaaaatattggtatgataattttttcataaaatgttaacacaactattttttttcaaaaagtttaataggacaaaaacttgatgctattatgcattttgaattcacctccctactaacacaacatgaactggtttttatcgagggtatttttgataaataaaaaataaaaatggaaacttgggggttaaaattccagttgtagga

SEQ ID NO: 125210 - DNA, 336 bp, Glycine max
  unsure (1)..(336): unsure at all n locations
tgnggcattctgtgtaaaatcacttggaccaggtttaattacagaaatagaatcttgaactctctctcttttctctcttttccttcgctgttgctcttccttgaggttctatttgaatctatcatgatccaaatgaactaaacttcactgatgttgggtgattgaagtaaaattcaagtatgcgttctttgttttttgatcaattctcatagttaatgtgatcctatttcaattttattcttagatgcatgttacgactaatcaacctagcttatagattgtgtggaaacaagatcaaaatcctagatttgaatttaaattgcgaaaggatctgat

SEQ ID NO: 125211 - DNA, 343 bp, Glycine max
taacaaaatgcatgcgaagtgggttgaattcctagagcaattcccttatgttatcaaacataaaaagggaaaaggttatattgtagccgatgctctttctcggcttcatgcattactttctatgcttgaaacaaaattgattggtcttgaatgtttgaaaagcatgtatgaaaatgatgaaacttttagagaaatttttaaaaattgtgaaaaattttcagaaaatggtttctttagacatgaaggctttcttttcaaagaaaacaaattgtgtgtgcctaaatgttctactagaaattttcttgtttgtgaagcacatgaaggaggtttaatggggcatttt

SEQ ID NO: 125212 - DNA, 343 bp, Glycine max
tagaaaggaagcttcaatggatgattagaatgatagagagagagagagagagagagggaggggcactacattgaaggagaaaaaagaaggagagaagtggaaccttgaagtgtgtctcacaagactctcattcatcaaagttacaacaagtgttacacatgcttctatttatagcctaggtaacttccttgagaaacttccttgagaagctagagcttagctacacacacccctagcttctaatagctaagctcacctccttgagaggctttcttaagaaacttccttgagaagctaaagcttagctacacacacccctctaatagctaagctcgcctccttg

SEQ ID NO: 125213 - DNA, 451 bp, Glycine max
  unsure (1)..(451): unsure at all n locations
catactccaaacacacgagatattaataccaatatacgcatattatgggtgctgataatatggtanactntgtaatgcaccccgtatcaacaaacatagtaacataaatcacaatgtccaattactctttgttgtaatgatggcgcaccacacttattcttgaacatttatcttcaatcaagcatgtccaacagcctcaagacttcttcttagaatttgctacatacagaaaccatgtggactcaaatcatgcatgagatcttcatattatcttcatgaatgcaaagagatcatgcacggatgnatacanaatgggtagcagggattgttatgtatcaaagccaagtctatatgatgacgacgatgaataacatggctgttattacacacacctattgatcttctcaacatacaaacataacattgttgctgaggaatgactggtcacgaa

SEQ ID NO: 125214 - DNA, 335 bp, Glycine max
tgaggtgttggatgtgtcaaggaatacgctcggtgggcaggtgccgatggagcttgggaattgtactgagttgtctgtgctggttttgtctaatctttttagttcggttccagatgttaatggtaccgcgagggacttgggggtggagcagatggtttctatgaatattgatgagtttaattactttgaaggtccggttcctgttgagattatgaaccttcctaagctgagagtgctgtgggcgcctagggcgaatctggcaggcagttttccgagcagttggggcaagtgtgatagcttggagatgcttaatttggctcaaaatgatctcactg

SEQ ID NO: 125215 - DNA, 327 bp, Glycine max
tgtcttatccgacctggttgtctatattttatcctacttcacattaaatctttgatattcctactagtgtttacccacagacaataacatagcaatatgaaagacaaaatggccaggttttgaatatttacctttatcaaagcttggaaaaggatacgaatcttggttgctctatagtttttgtttgttgtgctctctattttacttcaactgagagaaaatcaaattcttaatatgaataggaaacgataaggatttaatttctgtttgcttaagaattgtctttgaaagttaaaaaaaaatgaaacctgatcaaaaaaaacatat

SEQ ID NO: 125216 - DNA, 320 bp, Glycine max
  unsure (1)..(320): unsure at all n locations
tttgtctcatcgattatgctanacatttaccaacatgtcagctatcatcgccaattgccaagaatagttaggtctagccacggcccacgtacctagaattgcggatgagtatgctcaagtatatgccgaaaaagaggctagaggaagggtgatctactctttacaccaagaggcaaccatgtggatggatcggtttgctcttaccctgaacgggagtcaagaactttccccattgttttccaaggccaacgcgatggcagacaccttactctgccccgaagagaataatgggcttctcggtatttgtgcacatatgatag

SEQ ID NO: 125217 - DNA, 360 bp, Glycine max
  unsure (1)..(360): unsure at all n locations
tcaagctnggaatgagaaggctttgcaatttttctatctgcttttgctttctttagaatggtgtggttccttaactagtgaaaatggtttttcacattgtttattgaagaacacatactcttgtcctttttcgtatgccagttgacatattaagttggccatgcgttcatatgattcttgtttcaagggctaagttttcataatcatttacttatttgcagggagaaaactcttggccagcatacttatttgcaacaaatgccaatgtcttctatggcaattttggggagattgccttgacatgaggtaacattattaatatctgaggtacagattgagaaaaggccttttatttagaac

SEQ ID NO: 125218 - DNA, 310 bp, Glycine max
gttctaggtataacttcttagtgataactcttgtttattgatacactatcatatcgatacacagtctttagaacttgaagattcttatttgttatcgatccaatatcatatcataccattctgtgaacctgcttgttcatagttctgcttatcataccagtatatatgatgcatgtttgaaggtccagatgacagaccttaatgataacagattatcatactgtttaagttcagttggagatctatcgtaagaaatatcatctttgatatcatctgaattatctcagcgttattttttatacactggttc

SEQ ID NO: 125219 - DNA, 359 bp, Glycine max
tcaagcttccttctcaagctgtccaaaatcctataaatgtcagagccatttcattgatgtcgggaaagcaatgtcaaggacctcaacccgtatcaccgtcctcatctgcaaatgagcctgccaaacttcactctattccagaaaaaggtgatgacaaaaatttacctaacaatttctgtgcaggtgaatcttcttccacaggtaattctgatttgcataagcagcacattccccctcttccattccctccaagagcagtttccaacaaaaaaatggaagaggcagagaaagagatcttggaaacgtttagaaaagtagaggtaaacatacctctgttggatgcaataaagcaaattcca

SEQ ID NO: 125220 - DNA, 285 bp, Glycine max
gacttttcagacatcgataaaaagtattgtcgttgaatttactacggcttcaacatacaatttcgagcgtttcgattttttacgggtctcaatctaacatccgagtaagaagttatcgccgtctgaactaggtcagaacttcaacaattcaatgtagaacccatcgattatttacaagactcagtcacacatccgagtaaaaaggtattgtcgtttgaaattgctccgagcttcaacaaacaatttctagcgttctggaatatttacgggacactaatcgacatt

SEQ ID NO: 125221 - DNA, 303 bp, Glycine max
  unsure (1)..(303): unsure at all n locations
tctatacattccagtccactcaattcatacaatntctcattcaaatcaatcacaacacttcatttcatacaaaacaaaccactgaatatcatattcaatcagttcactgctcaaacatgcttttgtacaagctactactacaacaaaatactgaaatttanagactgannattaaataattgaaacatatagcataaaataactaactaataaaataaattgttcaaatgcaaaagataagatctgtcaatctctgtggtgatctttgctgctcataaatccaacactgacaacttgggatct

SEQ ID NO: 125222 - DNA, 320 bp, Glycine max
acatttttgaagaccccaattatgtggaagaggggaatcactctgtgcttattctaaatttacactcatgaggcctgatcctcaggagatggctgctaaactttgtatcccaaggaggggattcgagcttaatgcttatgggcaacccttgaagattttaaggaagaacatgaccaccctagctcagacatggagtgttctttccttctctaacctgattcttacatcccatacttctgatgtcaccctagacagagccaaactcatttatggcatcattatgaagatggatatgaatgtggggtacctcatttcccacc

SEQ ID NO: 125223 - DNA, 346 bp, Glycine max
tctcccctatttagcattcaatgtgttgaaaaagtgaacgaacaaacgggtttattcaccttaggcacgttttctccctttctcaatttgcttgaagaacaattatttccgcagaagacaaatccaagctcgaggcgtcttgcttataacgtgtttcctgagtaattaccgcgaagattcttgatctgttcttcaaagattcaatcttcgttctttattttcttcagtcttcaacgggtaagtacctcagaccaatcttggcaattcactctatctacccgtggaggtccacatactgtttcaagtatgtgtattctcgttgtcatccacttgtgataccctcttt

SEQ ID NO: 125224 - DNA, 348 bp, Glycine max
aaactaagctctatattatagactcatcttctatgttcgcagcctcacaatgattggattatttacttaatcttctcttatgataatggatgttgggagcatttaattattgcattaaatgcatgcctcttcttcattcagagaatcttctcttatcagatatcttgttgagcacttcaacataattcacttttcacttgtcagaacaagtctgcaaagtagagcacatcttttgatgatgatgaatacttttagatcttggatttcatatagtcttcatagggttttcttatatctaaggagaatatttttgtaaagagaatatcagatataaagaattaaatgttc

SEQ ID NO: 125225 - DNA, 338 bp, Glycine max
tcttgttggggtgctgcttatccaacatctcatcaacaaaggcattatagcccttatgttccctgaccttatccttaccttcaacaacgctcttaactccattattcaaaatgattttccccacaaaaacattcactttatccaccaaactcatgcacctttttctcacaccttgcaaatccaaccaacacaaaagtgggaagtggcgactttaaataatcactctaagcaaatcatacctttcactcactaactcctcaagctcacaccatcaccccctaatcctcgtcaaacacataactcttcacacacatgttcttcatatgttattaaagacc

SEQ ID NO: 125226 - DNA, 353 bp, Glycine max
ttagtgacactattaatctcatcttgttgaaaaatgttgaaactttttcaagtcaagggctgatgactacagcgatggaatttttaaaacttttgggttctggaaaactgttcgcctgaactaacaattttaaaggatcgaattgctctttctacagaacctggtaaaaattttcttggactcaaagggatgctgattattagcaagtgacactttgcatgctacttttgcttgatgaatacttacttttttagtataacagtaatcttgtgttatgaataaacttagtatggcgtagttctattttatggtttaaactttagtgcatatttctatgctgctatgttttaaga

SEQ ID NO: 125227 - DNA, 298 bp, Glycine max
  unsure (1)..(298): unsure at all n locations
taattcctaacttatgctatgctganaacgatatgcttgaaattacacgttcttgttttgctgcttctgcgtcaggtatatatagactctgaaaaagtagtaacctgttccaacatgtataggaatcacccattgagctcgaagttcatagtttcatgacttgagtgtgttttatagaggatatgtaagtctcctctgtctccttggtcttgcactctgatatacttctctttccattaattaataactaagtggttctgtcatctgtagcctgaatattgactattgtgatatatat

SEQ ID NO: 125228 - DNA, 274 bp, Glycine max
tggtgttgttcttaaaagagtgctctaacacacttgccctcaatggtgtgtgcactttgcacatcgtagtggtcggagaggaacagttccttagccccgtggaactgtcttcgaccaccaaattgactcttctggccggtagttccacctcacacgcaccttcacgttgctcctgttgtcctgcttgaacttctccacgcgcgccacgtatggctgattcgacgtgtccgatggccgcatcataacacaatttccagtttgtaaacccaaactt

SEQ ID NO: 125229 - DNA, 329 bp, Glycine max
ttagagtaaactgaggcatgcaagcttagaatatataaactgatctttttttaaatgtctttgggcttggcgaccaccatcaacaaagtactttcggcacctactatatgttgacttgaccaacgctgttattggaatgctgcgacaatctttcaacaccttattcacacattctgataagttggctgacatgtgaccatatcgtcgtccagatgtatccgaagccatgctccatttttcctttgagattcgaacaatccatcttgctatggctggactcattgtccaaatttttcttagtattgaacaaacacatgcttgcgaggagt

SEQ ID NO: 125230 - DNA, 339 bp, Glycine max
agcttagcagtgcttatgcaattgcttctggtattgaatttatggtttatatttgtgggatatatataaaagcttgtgatttgtagttatgcttgacaatgtgcgggcttgaaatgtgccaggggctgtgctgggattatttgaagataatagatacaagtcagaagcaaagaaatcaacacttaggtccattgatattattggtcttgggatgggacctgaactggagaagaaactgaagtacgcaggagatgtttcttccggaattatctttggaagggagcttgtaaattctcctgctaatgtgctcacaccaggttcatatgacactttgaatgt

SEQ ID NO: 125231 - DNA, 429 bp, Glycine max
  unsure (1)..(429): unsure at all n locations
tcgcgagtgggcttacttgcatgtctagctctaattgcgagtatgcatctatatcttctagnagaaatntaaatttcactattttagttaattaaatatcttgtaaaaatgcccaaatttcataaaaaaaatgttttgctcttgtaaagtgacccatccaagcattgggtgtaggaaattcaattgaaagtcattcaaatatcatatttttctttcaaattctaattgcccatctaaacgtangataaagttgttctgcttaagctttaagagcctattatttcttgaggagttttcgtagtaccttgagacatanatccaacacatcgcactgattccagtgaaggttggttcactctgcttgttttcaacatctcttcacactatcttgctgccataaatcaatgaaggagcatcattaactttcta

SEQ ID NO: 125232 - DNA, 341 bp, Glycine max
agcttataagaacaaaattgccttaatcatttccaaatatgcatgtgaattaggacgcatcaacaagaatcaagccaaggctattgtgcaagcaatcaatggggcaaaacacaccaaatgattataatgatggatggctcaaattctcacaaaggtaaaatcatcactttcaaattgagctttcaaaactatcatgacatgtagagaagaatcaaggatttcaagtcacaaaatgtcaagaacttttattttcaaaacaattacccatttcttgaacatatcctataattcaaagaaaaacatgcaaagtcgtacgtgcacatgaaattgacccaaaatat

SEQ ID NO: 125233 - DNA, 287 bp, Glycine max
  unsure (1)..(287): unsure at all n locations
actaagcttctgggaaggacctctctactctggtgcanacctggagtgtcttgttctacttaaccttgcccctacatcacatacatatgatttgaatctggatacggcaaggttggtgtatggacttgtcatgaaatggatatggatgttggagatcttatatcacgacaaatatctttgatagctcagtccaactcctctcggctaggattttcagctattattactgctctatgcatggacagaggagtcacctcagactcgttgactttcgagactctcagcct

SEQ ID NO: 125234 - DNA, 338 bp, Glycine max
agctttcccggcggcattattgttggaatccacaccataacagaccccgactgtgataagtgcgaacagaaaccttctttggtaaaatgtttctaaaacatgccctctgaggtaaatctgcctaaagcagctcttactaaccatggaactggtatattatcttagctgaattaaaaatacttctattttattataactatcatgaaaaaaaactatccgaaataattattattttaatttttaatggaacattaaatattttcatttatatgtcttataatattaagataaatattaataagtattttaacaatattaattaagaaactaatattttt

SEQ ID NO: 125235 - DNA, 330 bp, Glycine max
agcttgtaatcgattacacatatactgtaatcgattaccagagcagattttcagaaaatattctcaacagtcacatctttttatgttgctcttgaatggctatcaaaggcctatatatatgtgacttgagacacgaatttgctaagagtttttttttagaacaaaaaggtcttatcctcttataaagcaaaatcattttatcctcttacaaattccttggccaaattacttgtgattcgataaggaattatttgagttctcaaattgttcaatctatcactttcaagagagatttcttcttctcttcttctttattctgaaaagggatta

SEQ ID NO: 125236 - DNA, 382 bp, Glycine max
  unsure (1)..(382): unsure at all n locations
cacatatgttttgacataatnnttgccataaatgcatggacttcgtttttgtttcttttgtctcccattgaaaatagaacataaatccattggactcatgtaatgtcggacgcaagtatcagacgctatgaccgagatagagttattggacgctagtattagacacattaatagaattattcactactacaaagatggaattaagcttacgcagttaacattggttgtataaaaccgatgttacaaaagtatggtggattttgtgaataaagtcttttgtaacatccggtgtataaaaacagatgagtgaagttgctgacacagtttataaaccaatgtgtagggtaataaatggttaataaaacaagtggatttttcgtca

SEQ ID NO: 125237 - DNA, 338 bp, Glycine max
agcttaacaacaagaggaggaataagagattgtcaccaaggagcaacggatgaagaaaaagcatgaagagtctagaccctcttgtccaatcaaatctcagaagactcatatacaaaccactccagcaagagaagtcaaatatagatctttgagcaagcctccaaggcttagaagcggagggatttaggtgaaacagaggacgagagccctatgataatcctaagaaagcacagtaaagaaagaaatacatgttgtccagaagaaatagaagcttgatcaacaatcatcccctcctcctttccaaagaaaagaaagatatgagctggacataagtacat

SEQ ID NO: 125238 - DNA, 357 bp, Glycine max
  unsure (1)..(357): unsure at all n locations
tgcgaaggcaacatttggtaagtttttntacaagtgggacactactcttaaaacaaaaatgacatacaacctcctcccataaatacaaacatcaatgtaaatntagagcaagcttatgcgcatatttccctacgaacgttcacttgcacaagacatcctattaactaagaaatatgcacccatatacaatcaaggtagcttcattacctagaaatattacatgtactcccaaggtgtatntgttatttacatcacacacgcctncttggctgaatntacacatatgcatactcaaagcattttgggtaccaaaaatggcacatgcgcacaccttggtattttaatacctatacatat

SEQ ID NO: 125239 - DNA, 329 bp, Glycine max
agcttgcgagaaggaggtgtttcataacaacatcatgaaaaccaaaaccattttatagaaagcaaatcacaccttaattttgaaacacacgattagtgaatcaaataaataaatgtcgtatgaagaacacaaggagatttttatattggggcatctccattaataaaattatgctagattttggctaatcaccaaattctactatctcttgatctcaagaaacaagtattatttcaagttaattttggcttttgaatctaggtagttacatagttgctccttcaaacaaactctccaagtattctttgagggtaaagtcacaatgctta

SEQ ID NO: 125240 - DNA, 336 bp, Glycine max
agctttcataagtgaattttttgtagccatttccctaagattccactcacgaggtggaggttgagccatgttctcaatataaaaattagtagtagaatgctcaaaatcagaatattcagaatcaacctcaacagaatgctcaaaatgcacagaatgaccaggatgcacactatccctaactaatgtatgaaaggtctatctatttcatgatcaaagggttataaatcacctggattgcccctagtcatgcactatatgcagcaaataatgtgtttctcaacaacacctaacaagggggtaaaactacaactatactcaaacgatatcaaaataagc

SEQ ID NO: 125241 - DNA, 111 bp, Glycine max
tcgagtataatgagttctaaactagtcttcttttaccaagtcggaatgcaatgattagaacatgatgcaagcaagtcaaactaaaatgcgggggacatggtttcttaactt

SEQ ID NO: 125242 - DNA, 332 bp, Glycine max
agctttaggcattgagggtgttactggaatcaactgtcttgactgcttgatagccaattcctcaagcctttgggttttgaccagcacctacaattgattaggctttattaattgaacatggatataaataaaatcattattaattgaagaataagaataaagaagctagtgacacaggcaactagctccactacctggggagcagagcgagctcgggatggagtctgtgccaatgcctcagccatattaaggccggctgttgtacttgatgctacagacccagaagatgtattaacagtttgttgaactgataaagatccagtactgctact

SEQ ID NO: 125243 - DNA, 347 bp, Glycine max
  unsure (1)..(347): unsure at all n locations
tctggctctagactacttgctaagagctcattatgtttntctactaaggtgcaaattaagcttatgcaagtgtgataagtttggatgagctgaatacagacttcaattattcttctagggataaaagaacacatataacttgcttcaatatcatatctttaaacgacctataccatgctctttaattatcaatttcatgttttgttacttttgctgaagaagtcacaaaaccaaccggtctcatataggatgatagtttgatactcaatagttagcanagggtgcattagcatttataacatttgatatatacaacttatctagaacactagatcaaaacttacaca

SEQ ID NO: 125244 - DNA, 266 bp, Glycine max
ctcagcttctccccatttgctataatagggggagttgtgtaaaatataatggttcagcctcttaggcacttctctctctctcgaaattgctgaggaaaattatctctgtgaagaaaatccaagccgatgcgcttccgtaacgttatcgtgagaaattacgcgaagattctcgaccgttcgtgaagattcatctgtcgtccttgatttcttcagtcttcaacgggtgagtaccttcaaccgatgctttcaattcattctatgtaccc

SEQ ID NO: 125245 - DNA, 337 bp, Glycine max
agcttatgcgcatatttccttacaacgttctcttgcacaagacattctattaaccgaaaaaaatgcacccatatacaatcaaggcagcttcgttacctagattatttacacgtacttccaaggtgtatttgttacttacatcacacacatctccttggctaaattcacatacatgcatactcaaagcattttgggggaccaaaaattgcacatgtgcacatcttggtatttctaatacctatacatacacaaacctcatgatgaatcttgactatctacacaataaggtgctacatttcatgctcttttcaagtttttgctacctaaggccgcatgc

SEQ ID NO: 125246 - DNA, 276 bp, Glycine max
  unsure (1)..(276): unsure at all n locations
acataaaaagggaaaaggttatattgtagccgatgctctttctcggcgtcatgcattactttctatgcttgaaacacaattgattggtcttgaatgtttgaaaagcatgtatgaaaatgatgaaacttctggagaaatttttaaaaattgtgaaaaattttcagaaaatggtttctttagacatgaaggctttctcttcaaagaaaacaaattgtgtgtgcctaaatgttctactagaaatntgcttggttgtgaagcacatgaaggagggttaat

SEQ ID NO: 125247 - DNA, 341 bp, Glycine max
cagcttgcaatatttaaaaccttttattcatggcttaaaagaccaaaacacatgatcagggttgcacaagaagcatgaactcatataatgacattgatatgaagattttttgggccaaatacatcaagctcaagagttaatttgatgtatctattactattgcatgatttaacaactataagaaactatagttagggtttagctatattgacttgtctttcttgagctttagataatagggttgactttaagcaagaaaatattggaggatgcacgttgcttctccaatcatgggtgtaggactggattacatgcatttctccatatgtggaggtatgcaa

SEQ ID NO: 125248 - DNA, 242 bp, Glycine max
  unsure (1)..(242): unsure at all n locations
acacctaagaagcagcaactgacactagcaacaataatggagacaacaaaggattttctccttgcaaacatagtggcagaatgggtcatcctnctttcaaatgttggagaagacctgatgttaagtgtgaaaagtgcaacaagttatggcatcatgtgagaatttgcaaaagcaattttcaacaaaagaatgtggctcaagttgtaggtcaacaagaagaagagccaatgtttgagcaacat

SEQ ID NO: 125249 - DNA, 342 bp, Glycine max
agctttaagaattatggcctcatcattttacttggttcctgagggaaattctataaatagacctcccatctttaatggagtgggttaccactgttgaaaaacccgcatgcaaatctttatagaggcaatagatttaaatatttgggaagccatagaacaaggaccttatgttccctctatagtggccggaagtgcaacaatagaaaaacctatagcagattggactgaggaagaaagaagattagtacaatataatttaaaggccaaaaatattattacatctgccctaggaatagatgaatactttagggtttcaaattgtaaaaatgctaaggatatgtg

SEQ ID NO: 125250 - DNA, 258 bp, Glycine max
  unsure (1)..(258): unsure at all n locations
agaaaaaaggtgatcaaataaaaacgggcactccttataactgacaaaggcccataatcagagctggaaaccccaggaccctgttggacttctccgggtccactgggtgtcttgcgggcgcgatccctgcanacaatagatgacatcagaaatcagttgagcgatgtgtataattacctatgtcacgatggcgtgaccttgttgtggggacgggcaccctgtatgactgacagaggcctataaccagagatggaaacc

SEQ ID NO: 125251 - DNA, 317 bp, Glycine max
agcttccatgataaattgttttcgtcacgataggttactttccttattcggagatccggaggaaaagatatggccctctgtatttgcgatgggcttcatttttatactaagagcatcttgatatattatgagctttaatcgggaatccgagtccaacgctatggctgtccgaatttgcatggtcagtctatttctacttcctagggcgatgatatattatgggcctcaatcagacatccgagttcaaagttttgccggtcggacatccacccgatacatccatgatcaattttggacgtcgcgataggttacttgcc

SEQ ID NO: 125252 - DNA, 212 bp, Glycine max
  unsure (1)..(212): unsure at all n locations
ttgattcggtgagaatttatgtgtgaatccagtttgaacaagtctaaatggatgttatggactggtgtgaggtgagagtttgcttcaaatttacctcattctaaatttcacttttcacaccttgaaaatccattaaattgangggttgtggacacctagattttgtgttgctggggtttgaagcttagctttggtttagacatgtttgatac

SEQ ID NO: 125253 - DNA, 286 bp, Glycine max
cacgtaaaacagaccccggctgggaaaagtttgaaaagaaaccttctttgggaaaaagatgttaaaacaagccctttgaggtaaaatttgcctaaaggcaggtcttaagaaccatggaactggtatattaatttagcgtaaataatatttcttctatcctattataactattatggaaaaaaaatatttacaaaaattattattttaatttttaatgcgacaataaatattgtcatatatatggcccataatatcaagaaaaatcttaataaggattgtgagaata

SEQ ID NO: 125254 - DNA, 101 bp, Glycine max
atggaaagaaaatgctacatgatgatgtgagcaaaattaatgagatattgtgccccacccttttctaggtttcgatgattattggctacttctcaacttga

SEQ ID NO: 125255 - DNA, 294 bp, Glycine max
  unsure (1)..(294): unsure at all n locations
agcaagcgagaacaagacctttcttaacntcctaacaagcccagaacaaaagagctggcctgcacataacgcggcgatcggcctggcggacacgcacaacaaaagactttggaccaccaacaggcgtcgaaatacaccaacgcggagaagggaaagctgcgacaagaccgaaaaaccttaaggagacatagcgagggggacgcaggcatgacgccaaaacgacgaccattcgaaaagagggccatcggccagcacgactatgagaagcgatccacccaggtcgctaaggcggga

SEQ ID NO: 125256 - DNA, 334 bp, Glycine max
agctttatctccaaggcatagtattattgcacttcttgctctatcaatcatctctgatctctcctttgagctcaaagattcagacatcctttcttctcctttaagagcttccgcaaagccatgttgaatcaagattgcttccatcttgattctccataacccgaagtcatcttcccttgaaaacttctcaatatcgtactttgttgctcccatctttcttgatcttgacctttccccacagacggcgccacttgttgggtcttatcgcataaatgctgctattcattaaacctgcacaagatcaaatacaagaaaaacacagcacgccatacac

SEQ ID NO: 125257 - DNA, 356 bp, Glycine max
gacctcagaccgacgcagcagcaacttgaaccatattctgatttaccataaaccttgacccaaggggagaatgccaaatccttaccctcggaagcaaaaaaaaagaagagaaggaaaaattccacacaaaggaaaaaggagaaagaaaatttccaatcacaggaaaggaaaagcccaatcaaagagggggagaaagcaaacagaaaagaaagaaaatccccaatcaaagaaggggagaaagaaaaaaagagatggaaaacagaagaaagctgctggtcaaagaaaccagaagaaatgtgccgagaggtccttggacaagacgagatctgaacaacacagaaatggcaccaaatgaa

SEQ ID NO: 125258 - DNA, 274 bp, Glycine max
ataactcagctacatattcagcgacgatatcggcttttttcgtcaaaaaagttgcggtgattgcctcacgtgacattcaattccagcgtcccgatatttacgagcctcagatagacatccgagtaaaaagtgattggcgattgaattggctcaaaagttcaacattcaattttgagcgtatcgagtatatcgggacttcataccacatccgactataaaatcattgatgatgaatgggttagacgctcacattcatttgagcgcccgatttcac

SEQ ID NO: 125259 - DNA, 334 bp, Glycine max
agcttgcatttggaattgcttttgccccactccatcattaggattagtacctgacatctcaaacaaacaaatcaaacgtaacaagacaattatagttgttgtttgaatacctcacccactcaagtgtatcacacaattatggcttttctctaatgaaaaaactctttccttttaccactctaattccccttgagttcttaggcaattcaagagattatggccacagaaaagaacaattcaccaatatgtgtaaggtaaggctagagagacaaggaaaaggttaaccaagaaaaaggctaacaatgtttttaggcacaattgaaggaaataaaat

SEQ ID NO: 125260 - DNA, 342 bp, Glycine max
  unsure (1)..(342): unsure at all n locations
actcaagctttcattattctatgacccgtagtggccacattgtgtttcgtgcatnttattctcngtgtgttactttntataccccctgttgacgtgcttaagtcattttacttaagtcatttctcgcttaacttaaaaataaaataaatttccaccgaacgtttgaattgtattgtccattaacttcggttaaaataaattccgaccgttcggtcgtgccgtaaccacgttggaaatcaaaaagaggtaaaaaataatataataatcaaaaagacattctttagtaaaataaagcggaaaatcaatcggacgttntctctttgggaattctcattcttaatc

SEQ ID NO: 125261 - DNA, 341 bp, Glycine max
agcttgctctaaatttacattgatgtttgtatttattggaggaggttgtatgccatttttgttttaagagtagcatcccttggtaaaactaactttccaaatgtttgccttcgcaggaaatggccccgaggaagcttgcctcaaagaggtccaggaaggacaaggtagccgaaggaactagttccgctccggagtatgacagtcaccgctttaggagcgctgtacaccagcagcacttcgaggccatcaaaggatggtcgtttctccgggagcgacgcgtccagctcagggacgacgagtatactgatttccaggaggaaatatggcgccggcggtggaca

SEQ ID NO: 125262 - DNA, 205 bp, Glycine max
aatgagaatggaaatgtttcctatgaaagcaaaaataagaaaaagatggaaaaattcccagtcaaagagtgggagaaagcataaaagaaaagaaagggaatttcccaaactaaagtaagtgggacgaaagcacaaatgaaaatgaaaagaaacaattccccattcaaagcaatggggagataagaaaaacaggagaaaaggaagg

SEQ ID NO: 125263 - DNA, 346 bp, Glycine max
  unsure (1)..(346): unsure at all n locations
tcagcttctccccaattntctatatatgggggagaagtgagtgttaagggttcactcccttangcacttctctctctttcgaatttgcttggaaaaatcgtttctgtgaagaaaattcaagccgaggcgcttccgaaacgtttccgtaacgtttccgtgagaaatttcatgaagggttcgaccgttcttcaagattcatcgntcgttctttgttttcttcagtcttcaacgggtaagtaccctaaacccaagctttcaattcattctatgtacccatggtggtccacatttcgtttcatgtatatgtattcgccttttcatttacttgttataccccctcttgacg

SEQ ID NO: 125264 - DNA, 339 bp, Glycine max
agcttatcataatttttcacacttgtctgatgggtttacttacatgtactaacacttatcacatagatttatagcttacagttagaattttaataataagaatctatttgcctaatagatataaaaatatcaactattttttatattaaaaaaaaataggaactaatttacaaaataattacagggataaaaatgtttattcactcgaaaaaaaaaatattttattaatgaaagtaacattttgtatacctcaaaaaaatattaaaaactattaaaaattatttttaaaaattatttattggaaaatccaataaatttttcacttaattgaaataaact

SEQ ID NO: 125265 - DNA, 346 bp, Glycine max
  unsure (1)..(346): unsure at all n locations
tcacccttcaacatacctaccatgttgtctaatgttcagacttgaaggtgaaatcgaaagacaagtatgatattgtgcttaaggctaagccatntgcttatgcttcaaagaagcattntgaagactgctacaagcccaagccttcaccaactccatactactacaagtcgcctcctcctccatcttcagtttacatatacaagtcgccacctgcgccatcacctacttatgttacaagtcaccacctccacctgtgaagtcacctccatattattatcaatcttcacctccaccatcaccaagacctaaacctgcatagtactatcaatcaccaccctcaccatca

SEQ ID NO: 125266 - DNA, 271 bp, Glycine max
tagcttatgaagaaatcttgatgtagctaggtggccagcacgttgagacatatgatgaacatccccataccaacggtcaggtataggtatctatcaaggttatgcttaaagtcctacgcacaaggacttgacaagcccgaaagttaggggaaggaagaaccccccaatctactttatgctgatcattgcttaccctaaacaacaaccataatacgacacagatgccctgacccctgtcgaaggtggggaaccctgaacaagaagggttgtc

SEQ ID NO: 125267 - DNA, 333 bp, Glycine max
agcttgtgtcacactttcaacttccgaagcaaaatatatagctgtaggaagttgttgtgctcaaagtctctagatgaagcaacaactagaagactttggaataaacgttgatcacattcctctgaaatatgacaacacaagtgctatcaatctaacaaaaaaccctgtcatgcattataggactaagcacatagaaataaggcatcattttcttagagatcatgtgttaaaaagtgactgttgcattgagttcattgatagtgaccatcaactagcagacattttcattgaactgcttgctagagataagttatttttcattagaaatgaact

SEQ ID NO: 125268 - DNA, 341 bp, Glycine max
  unsure (1)..(341): unsure at all n locations
gctgctgtgggctctatggggctgatctttagcttattgatgtcctttaatggtgattntccaccatggagatgcagtgtaagacacacgagaagaagtgagaggaggcgccattcactatggaataagccatggaagaaggagtttcaccaccaagatgagcctcggataagaaacttggagatgatgtctttatggatgaaaagaaagatggagagaaagagagaggggtggagcacgacattgaaggaagaaaatacggagagaagttgactttgagttgtgtctcacaagactctcattcatcatagttacaacaagtgtacacatgcttctattat

SEQ ID NO: 125269 - DNA, 333 bp, Glycine max
tcagcatgctagctttcgaagaaagtgattttgttcaagctctaaaggcagagcttgaaagagcccgggtagtcaaaaagaagatcaagtccatagccatcaaagcctgaaaagagtatgatgaactaagggacgttaatatggccacagttgaagccttggaacgagaaaccaagaaggcccttaaggaagaacacgaacctagctaagtattgaggggctttatagggcagcaatagtgagctcaagctccgaaaaggtgaaaggaactatcacgggtcaaaggcatgaacttgaaggacgagctaaaggcttgccttaagccaaaaaaaa

SEQ ID NO: 125270 - DNA, 306 bp, Glycine max
  unsure (1)..(306): unsure at all n locations
ntacaaacgaataacacttggacacttacagacttaccagctaataagaaagctattangtgtcgtcgtgtttataagattacagatcatgctaatggctgcgttgaacgatatatagctcaacatgtatccaatgtgtatactcacacgggaggattggatttccttgatactttttcttcagttgcgaagctcacaacagtctgatattgtagcattgggtgctattcatggttggcaccttcgtcaactcgattgtagcaatgcattccttcatggagaattaaatgaaagacgctatatgta

SEQ ID NO: 125271 - DNA, 337 bp, Glycine max
agcttgctgaaactgatgtattcttctgagaacttgctgcaacatctctatgactctgtgatgtttttatttatttattattattattaaaaaaagagaatagaggttattagccctaacaattggtctctgtgctatggatgttgggagaccaaaactacctcaatcagtggaagcgggtgggtttaagtttgagtaaagtggagattttttgagtttaagagattgcaaaacagatatgagccgattttaagcgaggattaatgtttttgaaacaggtttttataaaaaaacatttcaatttttgaagcattgcaactggaataaactataatta

SEQ ID NO: 125272 - DNA, 347 bp, Glycine max
ggcatgcaagcttcatacaattgaaacatttattttaaaaatgtctagcaggcatcgtcattttttaaaaccacatcacccttacagatgactgaaaaaagcttttaatggaagtcaagagcacgaaattgtgctgatactattgactggtgagcaggtcttccagcgggttgaacacttgaatattgtatttggaaagacccaaaagaaggataaaaataagacttgcatatggaagaagaggtccattttctttgatctttcgtattggtcagatctggatgttagacattgtatcgatgttatgcatatggagaaaaatgtatgtgacagtgtgattggggtgc

SEQ ID NO: 125273 - DNA, 356 bp, Glycine max
  unsure (1)..(356): unsure at all n locations
ctaactcctctttcaaactctgccatgtgctcgcgactcggccctttcttcccttcgcaacttgagttcactggtgctaccccatagagctccgcgaaatttgttccggccatactcttccttgcgagccctcttggtctcttgttcaagggctctagcggtaactgcattttcttcccgtagcccggcacactcctttcgaacgtgtgtagcggccaacttgaacttctccttggcaagatttgcctttcctaactcgcttctgagagcttggacttctatgtcttcttccggtgctncaaaattctcttcgctgacgactcgtaacttggcgagcccatctaaaccttggatat

SEQ ID NO: 125274 - DNA, 346 bp, Glycine max
  unsure (1)..(346): unsure at all n locations
catgcaagcttcctcggggccatntacttcgatggcaaacattaggaaagttagttttaccagtgggacactactcttaaaacaaaaatgacatacaacctcctcccataaatacaaacatcaatgtaaatttagagcaagcttatgcgcatatctccctacgaacgtttacttgcacaagacattctattaactaagaaaaatgcacccatatacaatcaaggcagcttcattacctagattatttacatgtacttccaaggtgtatttgttatttacatcacacacgcctgcttggctaaatttacatacatgcatactcaaagcatttcggggtaccaaaaat

SEQ ID NO: 125275 - DNA, 176 bp, Glycine max
ggaacttctcaaattggtctgaactttaaagatcttttcctgatctgaccgttaggatctcttagaagaaatctggagtgatctagaagcctcttaatgaagcttctaaagaagcctttatgaagctctatagaaactatatgatgcttgctacgttgaaacgcttaccagccttc

SEQ ID NO: 125276 - DNA, 175 bp, Glycine max
gaaaaggaagggagagaaaaaaaaaaggggaaaaaaaaaaaagagaaagagagggaaagaggatgaaaagaaggaaaagggaaggaaaaagaaggaaggaaaaaaagaaaaagagaaagggaaggaggaaaaagagaaaggaagggagaaaaaagaaggaaaggagaaaaaagaa

SEQ ID NO: 125277 - DNA, 218 bp, Glycine max
cccctcatgtgcttcactcgacgaagacagcgatcagatcccttaacaggtagacccgaatcggatacactcgatattcaaaagttccttaattatatatcctatatgcccgagcatgtaaggaatatccaagacaagtaccttcctcagatggggaagcgaaacctccttagatatctctaccattattgagcacacaacatttgcaaacaatatca

SEQ ID NO: 125278 - DNA, 304 bp, Glycine max
  unsure (1)..(304): unsure at all n locations
acttaccctcttgtcacctatatatagtttatatntcatcattaaatccaatggatatattctagagacaactttatccataaaagataatctatgttacacaatcactacacaataaccataaattgtggaactgtacaagttttggaagatgaattctatacaaaagttagtcgtataatgcgactaacagaggccgtgttaccgctagaagtagaaggcccctccttaagaatttcggcacaatctgggtaaaagagtcggaatgggcctaagcgcatctngaacaactacaccttatata

SEQ ID NO: 125279 - DNA, 343 bp, Glycine max
gaggatgcagcttaaagaagctttttttaaaaaacattgaatataagggtcacatttgcttggatgttgaaataaggtggaattccacctatttgatgttagatactactttgaagcatacgaaggcatttgaggagtttgaatttcatgacacaaaatatgcttatgagttaggaaaagggataggtctgccttcctatgaagattgggaatatgttgaggctattctaccattcttgagcattctatatatagccactatgcgcatcttaagaatctcgtatgttactagaaacattttcatgttagaagtgtttggtctgtggcaagaggctaccccccc

SEQ ID NO: 125280 - DNA, 334 bp, Glycine max
  unsure (1)..(334): unsure at all n locations
aatgcaaagaattgtgtgttgaaaaagcataacaagactntctgtgattggtntaaagatacaatctttgcagatgacaatgcttcagaaacattaagaaagctagtagatgggcctaaaagaaatgctatatacttggcaaggatatgacataaacaagtattcattttacacacaagcacaagatgacaacagtacaatgcagaacagcggggtcaccctaaaggctgaatctcaacactttgcaagtgtcaatgacgccaatccctgtgtagcttccatcccttactttgggttcattgatgagaattgggagcttaactatgtgagatta

SEQ ID NO: 125281 - DNA, 304 bp, Glycine max
actttgattcttgctaccttatttagctgcttaacaccagttgtcgggttatctaaaaggttttttgacgtttcaaaaaagaatacaaaaaattgttggaacaagtggcctcagaataattaagaagggggggttgaattaattatgaacgtgtcttgactaattaaaaatttatccttcttaatgttattagattcaattaagctttactactaagttatgagaaagtaaagatcttttacctttacttacacaaaagtaaagtcgtaataaaaagtgctcagcggaaaaagtatgagcgtac

SEQ ID NO: 125282 - DNA, 218 bp, Glycine max
tataccccatgcatggcaggttataccccatgcatggcaggttgtgtcataagttattaatagtgacttaccccaaagtctaacaacttacactcagaatgagattccttctaatgttaaagaaattaactttaattcccttaactggttcgcagtaaatgtgaatatggtagaattaacaatgaaatccactatttaattagtgttaaattattata

SEQ ID NO: 125283 - DNA, 335 bp, Glycine max
agcttgcatgattactttctttccctttctcaagcaaattcttaattcttcttgacatcatcaaaatcttcatgatttacaataagaacttttaatcctttccttgaattgacccttgataatgcaatgcataattgtccatggctaaagacgggttttggcaaataaagtccaaccatagaaagtgattggccttgagacttgttaattgtcattgcatgagatagcatgattggaaattgtcttctcaaaagtttaaaaggccatggtgattgtgaaggcaacattgacattcttgggatgtaaacattatggccaagatttttgccagaaat

SEQ ID NO: 125284 - DNA, 315 bp, Glycine max
gattggaggaacatcttcatcattttctatcttcaacttcttccctctttagcaagtggccttctaatacaaaatatgcttgctaatgactatctaaaattgggtctttagggtagccatgcaagagaattgtgaccccaacaagaaagagatgtgagtgttgagccttcaaattcttcaaaagaagctttccttgatttgatctcctctctataagctgatagctttcttcttaactttgtacaagccagattcatgattgaatcaagattgagtcatacatcaagaatgatgcatgatgatgaatcaagattg

SEQ ID NO: 125285 - DNA, 336 bp, Glycine max
agcttgtggactatactttcttctgaacacggccgtgtttctgtctaggcccggattcaaggtaggttgcagcaccggctccgcttccctaactgtactggaggcggttgcggtggctttatcctctatggttttttggagttttaacatgacctccgagatggaagccatttgatcttttaaggccgatagatcagccttcatctgttcctgcacgcgctcttcattatccatttttctggatcgagtgttataggggtgccttggtgttttcttagttatgatgaaattcctaaagaaataaacaacggtgagtatgccaccaaaacatgagta

SEQ ID NO: 125286 - DNA, 230 bp, Glycine max
  unsure (1)..(230): unsure at all n locations
tcatcctgcttggacgaatgagaaaactggtgcatatgaagagggtgaggatgaacgagaagcccgtgctgtgactgccattcctatacaacccattttgccaccaacccaacacaatgttattactcatccagtaacaataccttctccttacccaccgcccagntatccacataggccatccctaaaaacaaccacaaagcctacctaccggactttcaatgacaaac

SEQ ID NO: 125287 - DNA, 263 bp, Glycine max
agctagttccttggtattatttatttatccttgcatcattttctgactttggaaccaccattgtatgttttacgcttcctttggaaaaccctagagaaagagacctttgtcaaagctattcttttctgaaaaggggggtatttttttgaccttcattgaactccgttcgcattgacgttattggaaattcaaaatgatgcttcttttgtagaacccggaataccccctagccttttcatgtggagacatgagtatttgactca

SEQ ID NO: 125288 - DNA, 332 bp, Glycine max
  unsure (1)..(332): unsure at all n locations
ttctatgcacgcgtagtgggcacattgtgtttcttgcattttgattctcaatatgattactctttataccccctgttgacgtgcttaagccattttacttaagtcagttctcgcttagcttaagaataaaataaatttccaccgaaccgttgaattgtattatccattaactttggtcaaaatcaattccgaccgttctgtcgtgccgtaaccacgttggagatcaaaagaggtanaaataatattataatcaaaagacatcttttgtaaaataaagcgagaataatcggacgtttctctttggattctcattctaatcgaatgataatact

SEQ ID NO: 125289 - DNA, 332 bp, Glycine max
agcttttgatgccctttcagtttgacacgtgaattttatgactgaaaattgtgtctatctcttttaagtcttaatagatattaaattagtgtatcaagatttgttgggaatcgatcaaaagggaaatatatacaagtttttcacatgataaaatcacaggaaactaaaaattgaacatgaaagtattcattcttcacaagtgtataatattttgctttcgggcttaagaaagattgttggtcagttaattttggccatgttctatcttgggggcacattgtattggcaacatcactcaatagctttctttttaaatgcatttgagctatgaa

SEQ ID NO: 125290 - DNA, 333 bp, Glycine max
  unsure (1)..(333): unsure at all n locations
taatccctcttagttagaaaaattagtaatatctcccttgttcttataaatagtaaaggaattcttttcctccttatatgtagcatcttcttagacctcattatcttgttaaacaactttgtgaaccaggttataatacntttctccccaaaacacttggaaacttctatagttatagatatagatgcaaccaaaccattcatgggccttcccaaatagcttgagctttgagaataagtcagtgactcagttcataacagggaaagtttttggtccaactactttaccaatgtccatcctctntaatggtctttacccaaaactacaacttac

SEQ ID NO: 125291 - DNA, 330 bp, Glycine max
agcttgattagtgatttgttttacctttactttcactttggctattagttaattcattcaaggaaatttccaaagaaaaacgtccaatcgacttttttgattattttattcaaagatatcctgattattttattattattttgccttttttgatttaactaaagctacaacatgaacgatcgattgtattttattttaacagtgattaaacaagattacaacacaaatgatcgtgtgaaattcattttatcatttattaggcgagataacaacttaaataaaccgttcacgcatgttaaaagcggaagaaaagaaaaccgaaagtgaacg

SEQ ID NO: 125292 - DNA, 302 bp, Glycine max
  unsure (1)..(302): unsure at all n locations
caagagtcttacanataactatcatgaagcagaantctaacanagctacccatcatatcttccaaaaccccatacccacgnaaatcaagggagaaagaagtccacccaaacctgaaatntcaaagtcccactcgtagacacgcacttcacgaccccgaanatgccctcctttcgcaatttggggcagaaatgatggccaagggtgaagctntgtttggagcttcaatggtggatgaagaagagagaaagctacgtgagagagggaaagaaaaggcttctgaanttctttcttttggctgagt

SEQ ID NO: 125293 - DNA, 326 bp, Glycine max
cagctggcttctacagagcaactttcctttttcttgatgaaccttctcaaggcgtatccatccagagttgtgagctcacacttgggtttgagagcttcgagctacagtttgaatagatgactaggtcgagccttgacaaatctaatagattcagtatcagggcttgtgtcaatgatgttgtcctcagactcattgagagaaactccaatgataggctggacattgcttgctcaagagctattttttgcattaggaccaaggcatcaggaatgaaagccgtttcaacttcaggtttccttgcagccacaactgtagagaataatgca

SEQ ID NO: 125294 - DNA, 339 bp, Glycine max
agctttaattaaatccataattttgttttgttgttgggtgtgattttttttctggtatccatgacattggtgtgaagtattcatctgatgactaattttcattgaaaaatctgactaatcacttttagtggagtatctccttccaactatgctttttttcatctataatgttcgaacccaacaccttacttaagggggatgtgtgtatgatttgaaaatgactaagttgggtattatgttatgtgcaggaccctttatgtgaggagcaaaacagattaggttcaatgcctcccacttgccacaacaagtgcaaccagtgtcatccatgcatggcagtgc

SEQ ID NO: 125295 - DNA, 318 bp, Glycine max
taagctggacacgtggtgtaagccctccaaactaccatcataactggagaaataatgaggacatcacgtcctattatttcacccatttcacagatgaggtaaacgagatgaggctctgggagaagtttaaggtatggggggacgttcgtgaggtgtatattgccaaacgccgtaacaaggagggtaggagatatgggttcgtgcggcttaaaggagtatcggatgtaaagcatttggagataaagctggataatatcttcattgataagcaaaaactgttcgtcaacctccctatgttcgcacgatcagtccggtata

SEQ ID NO: 125296 - DNA, 342 bp, Glycine max
agcttcaggaaatacatatttcactgcattcatcaaggctaaattttctactgcattcatcaattctaaaaaaaagccctttgagcttctaaagtgcccaaacaaagttatccttttgttcaacctccatatacacaaaaagttgtagaaaatttcatttcaatatgagtcacaccaacaacctcaagtaatgatagtatatatctattagttttctaggtattgtccatcaagaacactatgttaaatggattaatcattttcatagcatcaagatgtgtccaaaaaatatctcacacaacttttgatgtatcattcattatatgtcaatgaatatacata

SEQ ID NO: 125297 - DNA, 275 bp, Glycine max
  unsure (1)..(275): unsure at all n locations
ccgtgtctacaacttgcaaactaagaaactcgtcatcagtcgagatgttgaagttgatgagtacgcttcttggaatngggatgaagaanaagtggagaaaaacgttcttatacccgctcaactacctcaagaagaagatgaggaagaagacctaggtgaaccaccttcaccttcaccacaacaacaagatcaagaactatcatcaccagagtctactccaagatgagtaagatcttgggtggacatatatgaaacctgtaacttggccatacttg

SEQ ID NO: 125298 - DNA, 335 bp, Glycine max
agcttgacaaacaaagctaatcttattagcaagaaataaaatcaattattggcacaaaatcaattgtgcaaaaggcatttgaaatggtaacatcttttaatattttatattcattttcttataagttaaataataataactcattttttattttgtgattttttttatatgatatacgaatgtttggtgaaatttatataaaggcatcatacattagattatattatttttatattatttaatttttcttttactatatttaattttaatagaaagaacattcaatatctggtgaatggccagatgctgtgaaagtttggaaggtcacgcacatg

SEQ ID NO: 125299 - DNA, 303 bp, Glycine max
cttctatggaggctggatctttgagcttcaatgatgtcctttaatgatgattttccaccatggagatgtagcggaagacaaaggagaagaggtgagaggaggctccatccactatggaataagccatggaagaaggagcttcaccaccaagatgagccttggataagaagctcggagaggatgcttcaatggaggaaaagaaagagggagagaaagagagaggggggagcacgatactgaaggaagaaaaagggagagaagttgaactttgagatgtgtctcacaagactctcattcatcaaa

SEQ ID NO: 125300 - DNA, 340 bp, Glycine max
agcttgtaactgagtttacaatttatattttaaatcttaattctcacaaatgagttttcaggcaaaaatatttttaaggaataactaaatatcgtagtataattctaaattgattttgccgttaaagcatacttttaaaattctcttaccgaaaatctaagcaccccctttgttagtgtggtactttttccgtttgctattgttcttttgtttgcttgatggtactttggttgcctatctaagcaacctctttttgccgacagaaaccctatgctttagtgtgctttattcccacttttcgcttgtatttttttacagtttttttttttttttgtaaata

SEQ ID NO: 125301 - DNA, 298 bp, Glycine max
  unsure (1)..(298): unsure at all n locations
acatattatatgatcagggttgataagattcanaatctaaaccacagttataattgtgacaaggatactactttgagagaaaagaaaagcatgtgctcgaaaatgtgtttcaattgcagcacagactctatatttttataaagagtgtgaaatcaaatacaaagatacattttcctattactatggttacatggttcaataaatctagactnttccttactgatatacatttgacattgttgaaatccttagaaataagtctgtgcctgcaacttctcagttacaataactattaact

SEQ ID NO: 125302 - DNA, 295 bp, Glycine max
agcttggaccacgaaatatattcttcagattacggcggttgtgggagacatgatagacatggacgatgaggtggaggagaaaccgaggttggataaagcaagggtgcttgataggacttcatggaggccaaccattcaacataccattgacgtcttcatcggtggggaaattttcaaggtgcatgttgttgaagagagtgggggtgggtatcgtgaatgcagcgggaatgcacggagtatggggggctcgtctgaggagatcgcctctgacgatagtcaccttgcatgcatatcg

SEQ ID NO: 125303 - DNA, 322 bp, Glycine max
ctgaactaccgtcgggattttagatgattactgagcttggttatagaggcgatatgactttgctctactatcctagtgatctgtataatcttatcacgcttattgttgtataagtcattgagtaccatgtatgattttactctcctaacaactaaacaggaagagacttatagattcaattgtatcctacacttactctactagacgactactcctaatattaagaatccaatggtaaatagcacctgatgatgctttctgaaggtcatgtggtgaatgatataagctttacagccaattgagttctgtgaatgtcaatgct

SEQ ID NO: 125304 - DNA, 330 bp, Glycine max
agcttggaaggtagtcacaccttacaatatatgtatgtgtgtttaggtagcgaaaataccttaaatatgcatgtatgtaatttaggtagcaaaaaatacctcacaaaatatatatgtgtgtgtttaggtagtgaaaataccttagatatgcatgtatatagcaaaaatacctcacaaaacatatatatgtatgtttaggtagcaagataccttggatacgcatgtatatagcaaaaattcctcacaaaaatatacacatgtttaggtagcaaaatacctcatgaaaaaaaaacaaaaacaaacaagaacaaaaaatatatctttcggctg

SEQ ID NO: 125305 - DNA, 331 bp, Glycine max
agcttagcacctataacccgaatgatctatcgactagcctgtcgatgctggatatagggtatgcatctttggggcatgccctgttcagttcaatgtagtcgatgcacatgcgccatttgccgttggccttttttatcatgacgacattggcgagctaggtacataacctaacctctctgatgaagtttgcgtggagtagcttgtcaactttttctttgacagctttatgccacttttctctcgtcttccttttcttctatgatacttgtttggcctggggccagatagcaagttggtggaagattatgtcaaggtggattctcgacatttc

SEQ ID NO: 125306 - DNA, 329 bp, Glycine max
agcttcaacctaaaggagactgaccattccaagtgttggagaagatcaacgacaatgcctacaagattgacttgcctagtgagtataatgtaagtgccactttcaatgtgtctgatctatctctttttgatgcagatggaggagccttggatttgaggacaaatccttttcaagaaggagggagtgatgaggacataaccaagggcaaggaccatgaagcacttgaaggtcccatgaccagaggcagacttaaacaagcccaacacgtcatacagacaaggctggtcatttgtatagctgccattgatgatgattgaaggcccataggc

SEQ ID NO: 125307 - DNA, 317 bp, Glycine max
  unsure (1)..(317): unsure at all n locations
tctcaatatattatgtccnctaatcggacatccgtgagagaacttatgaccattcgaatttctcgagagctttcgttgtcaatttcgagcgtctagatgagttatgtccacgaatcgaaaattcgtctgaaaagttatgaccattcaaatttgtcgagagcttccgttgatcaatttcgaacgtctcgatatattatgtccccgaatcgaacatccgagtgaaatgttatgaccattcgaatttcttgagagattccgttgttcaattttgagtgtctagatgagttatgttcccgaaattgacatctgtgtgaaac

SEQ ID NO: 125308 - DNA, 336 bp, Glycine max
agcttgctgaaactgatgtatttttctgataacttgctgcaacatctctatgactctgtgatgtttttatttatttattattattattaaaaaaagagaatagaggttattagccctaacaattggtctctgtgctatggatgttgggagaccaaaactacctcaatcagtggaagcgggtgggtttaagtttgagtaaagtggagattttctgagtttaagagattgctaaacagatatgagccgattttaagcgaggattaagttttttgaaacaggtatttcataaaaaaacatttcaattgttgaagtattgcaacgggaataaactataat

SEQ ID NO: 125309 - DNA, 339 bp, Glycine max
agctttgcagatttggtcttttccattgaaaggatcaatgcgggtccgaaaagaggcaaatttgatcatcctactaggacgactgagaaaactggggcaaatgaagagggtgagaaagagggagaaacccatgctgtgactgccattcctatacgaccaagtttcccaccaacccaacaatgtcattactcagccaataacaaacctcctccttacccaccacccagttatccacaaaggccatccctaaatcaaccacaaagcctgtctaccacactttcaatggcgaagaccacctttagcacaaaccaaaaacaccaaccaagaaatgaattttgc

SEQ ID NO: 125310 - DNA, 263 bp, Glycine max
ttttcaaggaagcttctcaagaaagcttctcaatgaagcttcttaacgaagtctctcaaggaagctacctaggctataaataaaagtatgttacacttgtggtaactctgatgaatgaaagtcttgtgagacacaactcagaggtcaacttctctccctcgtttactccttcaatatcgtgctccccgctctctctttctctctctctttctttatcttcattgaagcatcctctccaagcttcttatccaaagcacattctt

SEQ ID NO: 125311 - DNA, 336 bp, Glycine max
agcttggacatcctgagcttagggaacctgtccttcctcaggggtacccaaacccaatcacctggttcaagcacgaacttgtctctgctattgaaggctagccctgcttacattgcattttacttatcaatttgaacctacacttgggcaagctgcttcttcacgacactctgctttaacctgtgcagccttatgcataaacttaccaatgttaagcatactcaaccaatcaataggacccttaagataagctccatacactatctccaatggggaacatagacgagggctgtggacagcctcgatgtaagcgaacttgacttgaggcacacaggc

SEQ ID NO: 125312 - DNA, 281 bp, Glycine max
  unsure (1)..(281): unsure at all n locations
atataacacanaagcatgattgatcagagaaacatctttatatacatcagctggtttgttagaaagacccaacacctttacctactactgccaatcttacttacttgcattnttactggttttagcctagacttagtttaattttgttctaaatcatcaattatcaatgtttctttcaacaatgccttatttctgaatttaaccctatctaatactagttccctgagttcgatactcaaattcatcagttttaattttaaatacttgacaatccggtgagc

SEQ ID NO: 125313 - DNA, 339 bp, Glycine max
  unsure (1)..(339): unsure at all n locations
ancttggttgcgccatatcatatttttgttatcctncatttgcttatttgaattattgttaaatgtaagcggttccaaaaagtttaattgaccttgatttatgttaattgggtatcatatttctttattatgtcatgacatcatatatgtttgtggattgtgtttctcttggccactatcatttggggttccagtccttccatgcttccacaaacgcttaaattcaattttacatcaagaggatacaaaaataggttgaacaacctaattaaatcggttaaagtcagatcaacctcaggaccaaacgtatgaatatttcacttttacttttaggactat

SEQ ID NO: 125314 - DNA, 335 bp, Glycine max
tagcttgccaacccatttttttcctaatatctcccacactttttggggtgggtcattcttggatggccttgattttctcagggtccacttggaccccatttgtaccaactacaaaccctaagaaaactatattatctacacaaaaagtacacttctctatatttgcatagagggtgtttttcctaaggactgaaagaacttgcctgagatgtcctaaatgatcatctaggctcctactgtccactaaaatatcatcaaaataaactactacaaatgtacctatgaaatccctctttacatgatgcataaacctcataaaggtgcttggtgcatta

SEQ ID NO: 125315 - DNA, 293 bp, Glycine max
  unsure (1)..(293): unsure at all n locations
ctcagcttacacaagcaagtgtntcatcttaattccaaatcattatatgtcacaaatcaatnttgcacgtcatttcccatcaaatcaaggataatatgcataatcatcatggatcaataagactntctaaggtcggactttgtatgaaatttggtcttcgttgtgtagaagcaagcttcatgatgatgaatcaagttgattcaagtagttttgattataacacagatgatgacaaaaagcccaagagaatgatttcaagattgagtcaacaagaatcaagaatcaagagaagc

SEQ ID NO: 125316 - DNA, 334 bp, Glycine max
tgcttgaataatgtgcgcatatcttatatcatttacattcttatatattatgttaaccttttattctcattttgtcatttgcctatattcataagttaaccttaggactttttatacacttgaatacatgaatgtttactttatatttacacgtgtatgaaattaaaattgaaatccacgtgcttctccttttcaatgcaaggaagtacacacacccataagacataattcaacggtgttatttctgcataactaaaaggagaaatggagcctttcaagagaaatcacatatttttgcttttcttaaatggacaaaccccatacttgattttgc

SEQ ID NO: 125317 - DNA, 243 bp, Glycine max
  unsure (1)..(243): unsure at all n locations
tagtaaagcccacataccttgaatactacgtttgagggcaggttcataagagggaaaatatgaagatctgcaccaaatcctgcttgtggcattatgctccctcatgggcaattttgcacaatgaaattcggtactagaatattcctatgatagaattgtacacaatctgctatagaaatttctatataaggctatgtaaataatcaagtaggcatcacaaaataagagntccctttccttaca

SEQ ID NO: 125318 - DNA, 333 bp, Glycine max
  unsure (1)..(333): unsure at all n locations
agcttgccatagctntttaatgaattatacaggttatttttatttagtggcattgtttataacttgtccaagagattttcctctttaattacctgttttatattcttttgattctatattttcaagcatggaattaaattttatatacaggatcaatttgacactaggcgtaaaactttaacacttgcatcacttaataatttacacgaaattaactaattccaccattgattaagtttaaacaattccatacaaaacaaaaactaattgatacttaatcaatatgctttattttgatagataatatattatgtcttttatgtgaaataagta

SEQ ID NO: 125319 - DNA, 325 bp, Glycine max
gcttctagtctacctgagaaataattatggctacttcatgcattcctctaatgacaatagcatcatttctggcactgaattggtaggagtttgaagccatctactcaattaaattcctagcctcagcaggggtcatatcaccaagagctccaccactggcagtgtcaatcatactcctctccatgttactaagtccctcatagaaatattgaagaagaagttgctcagaaatctggtggtgagggcagcttgcacgcaacttcttgaatctttcccaatattcatacaaagcttctccactaagatgcctgatgccctgaaattc

SEQ ID NO: 125320 - DNA, 321 bp, Glycine max
agcttctacctacgtggtagtgtttgtcttccttcactttcttgtctaaaccgacagctatgactaccactctaccttcccgcgatgcttctctttatatcttcctgagtgggcttatagcctaatccatacttcccacgattccctttggcattaatcacgctactaaagccgccgcagtctttgcctaaacccattccgggttcgtaaccgatccccaacataactcgggccatcattactgctgcatcgaacaggcaaggctgcccagagaaggagtccacggaggaaatgcttaccacctcagaagactggaaggcg

SEQ ID NO: 125321 - DNA, 274 bp, Glycine max
ggcatagagagctaacccagctctgcgaccgacagattctgattcaggccagctgggttaccaagttaaccaaggcctctagtttaccttcaagcttcttactgtcaactgatgaagacgaacttgtggctacttcatgcactcctctaatgacaataacatcatttctggcactaacatgctgggagctggtagccgtcgtctcaatttaattcctggcttgagcacgggtcatgtctacaacggctgcaccactggcagcatctatcatact

SEQ ID NO: 125322 - DNA, 337 bp, Glycine max
agcttataatttctttgtttatcacaataaggcacaatggacaacttagttgattctctaaataatgcatatgaagacccaaaagttaatgttgtaaggttattctacacaagttgtttgtgactttaaacaattgtttagcttttacattccttctctgctacttaataatctgtcatgctacattatatgattttcataacaaattaattgatactatctgtgacaattattgatggtgtaaagttttggtacaaattttggatagttggtgtgacgctttagcaattaagtttgtatcatacctttcactcatgtttttatatttatgggggga

SEQ ID NO: 125323 - DNA, 241 bp, Glycine max
  unsure (1)..(241): unsure at all n locations
cagccttctggaggaatcttttggagggcccaagtgggcctggttgctatttgcacccccatcttttctaagtacaccccctgccttttctgatgattctttttcgtaaaggtaccgaaacttatgaatntcgtaacgatacttggtttctttccgtaatgttacagaaccttgcggattacataataatcccctttttgacttacggaatgttatggaacctcactaattgtgcaacgat

SEQ ID NO: 125324 - DNA, 334 bp, Glycine max
agctttttggtcaaaaggcttgtgtatgtacaatcatgttctcgttaatacatttcatactaaaattcagagattcatgcaaggattattactcacagctagtcgttcactcgcagtttaagttcacactctcactggttttggttcaagcttttctttctcaatcaatctgtctactgactaacaattctaattgcaagttcaaattcttgttctttctttgtctaacatacacacttgctcaaactcatgaaaagaaatacaaactccatcacaatcatgcgttcaattcaaaataaagacatacacccatttttcacaaaaagacaaaagt

SEQ ID NO: 125325 - DNA, 337 bp, Glycine max
  unsure (1)..(337): unsure at all n locations
tacatgcctcatgacacctaagtacacttagtggagaatcttggacttgatcttggattagtgggctgaaccatagctaanattcactaatcataattagtgaaattntggccccaaaatttggctccacaaattcaatttcaaactcaagtgaaatttgaatagaaattcaaatttccctccaatttttgtgtgacacgtaggctataaatagagtccatgtgtgtgcattttttggaactttgatcatttgagaattacacttaanagttcagaacctcattgaagcacacaaatttttggctcttttcttcctttccttcactcttcttcttct

SEQ ID NO: 125326 - DNA, 335 bp, Glycine max
agcttgtaggattatggggtattcatcacatgtggtactagggggcggtcgggcgatggtgcacaacaagttttccacatccacaatgcgcgcataaacccaccatcccctgttgcccacctccaactgagctcacgtactcccacgtagcccatatcctcatttctctcaataccgggtccccatcaatcctcccaagcttccacaacatccaagcaaaacaacattcaaacagcacaagctatcacagccaagcaaaacagagcaaaggcagaaaactctgctcaacacatcaaccaaaatcacagcttttctcacttaaagaccacagtaac

SEQ ID NO: 125327 - DNA, 268 bp, Glycine max
  unsure (1)..(268): unsure at all n locations
acagagtggtacttggagatatgtncgcggggtcatgagaaccttgggacgtcaggtggngtgctattgcccaaaaccaagcttgaccaatcctgacccaacccgggcatagtcggtcagtgagaacctgtgatgtacctaagcaggcgagctcctggcagtcaacagataaaaggaacaaagaccacaaagcaaggaggcttgtggtggctggccagctgtgaaacttgatngatatgtgagatatggtctctggtaatcgattacc

SEQ ID NO: 125328 - DNA, 340 bp, Glycine max
agcttgtggtgtaaccaattctgtttcttttaaaaacaaattttctggcttttaaaaaacaaaaaaatataaatgattttaaaaacccactatgatagaaagaagtgtgttaagaagaaaacattttccactcaaaatcttgggagtaatgcttatgactaacggatcaaatttttgtctacattgtacagaatgacaaagtcgtgtcatacacccactatgtacagcatatttagtctcttggacacaccataatcttcaatctactagatcatgcataatacaaataaaagtaacaaaaaatgactactttgtcataaaatcaaactttctaatatta

SEQ ID NO: 125329 - DNA, 300 bp, Glycine max
  unsure (1)..(300): unsure at all n locations
tcacactatgttgaatagctattgaagaagtnntaattatttgatgtgaaacctgtttctactccttatgactcatccatcaagctaaagaaaaaattgagtaaaggaatttcttcacataaatattctcaaattatcggttctttgttgcatttggcaaacttctctaggcctgacattgcatatgcagttggtagattaggaaggtatactaataatcctgatcattctcattggattgcattagaaagagttttagatacttaagaggaaccaacaattatggcattcattatacat

SEQ ID NO: 125330 - DNA, 341 bp, Glycine max
agctttgagccaaaatcctgactctctattaaccttgacccagggtgagaatgtcaatccttaccctcgggagcaaaaaagaaaagaaggaaaatttccaatcaaagaggaagcaaaaaaaaaaatggagagaaggaaaatttccaatcaaaggaaaggaaattccctatcaaagaatgggagaaagaaaaaaagagaagtgaaaaagaagagagctcaaggatcgaaagaaaacagaagaaatgtgcaggaaggtcgttggaccagacaatatctgaacaatacagaattgtcaccaaatgaacaaaagaaagaaaaggaaaccacgacctaaaatggtc

SEQ ID NO: 125331 - DNA, 73 bp, Glycine max
tctcagctctaaacttatacaagaatgaagctctgataccacttgttgtacatgtggcctcagatatcttaag

SEQ ID NO: 125332 - DNA, 340 bp, Glycine max
agcgtgggcagtcctcatctaactagtcttttttatgggttgaattaagtcctaatccaaaattctaagaatactaatcataatccgaactaattaaggaaaaaatcatgatgataagacaaggaaatatgataaccaattgtaagagataataaagaatcaaggaaactaatcctagaagataatctaagatataaaatacttttggatatttccatataatattctaacagggagctataatatcaacttgaaaaaattgtcatcttaattaaaggaaaaaagtaataagatctttgagaaaaccacaccacaaaaactaatcattgtagtgggagag

SEQ ID NO: 125333 - DNA, 354 bp, Glycine max
  unsure (1)..(354): unsure at all n locations
cactaagcctgtcaggcacagatatgngacactgctggtaagaaaggttctcattttctattatgcattcagtttcttcaaaatgaattgctttntattattatgtgtattatgtgccacaatgtcactatgcttgtgttgagctataattatcacttttctattgatcatgattgagaatgcaaccaagatctgagaagtagtggttaagatctgaatagatattctcagaatcgagataaaatacagcagcatggttttttactataattaagccaaaagttgcatgtgggtgaattatggatttatggtccttcacgtagattataatcatcaaatagtttatcatttgat

SEQ ID NO: 125334 - DNA, 305 bp, Glycine max
agcttcatgatgatgaatcattttttttctagaagttttgatagtgacaaagatgttgagaaaaagcccaaagaatgatttcaagattaaatcaagaacaaattcaagaatcaagagaagttcgatttcaagattcacgaaaagatgaattcaagtttcaagagaagaaatccagaagacttcacaagggaagtattgaaaagatttttttaaaaaaacaacatagcacagttttgtttttcaaaacagtttttctcaaaattttctaaggtaccagagtttttactctctggtaatcgagtacc

SEQ ID NO: 125335 - DNA, 150 bp, Glycine max
  unsure (1)..(150): unsure at all n locations
gtggacctggagatatgtcgcgggggtcaagagacctttgggacgtcacgtggggtgctatntgccganaccaagcttgacccatcccgacccaacccgggcatagtcggccagtgagaacctgtgatgacctaaaccggcgagcttctg

SEQ ID NO: 125336 - DNA, 339 bp, Glycine max
agcttagactctagttttgttaaacatttcgcgcctatatatcaaagtctaacctaacatattctcatccctagctatgttagaattacgtgggggcttaaagaaaagagataaacataaaatttcaattaacttttttacttaaaaaaaaaaaaagctattcacaaaagaaaaagctaagaatacaacagaattgttatgaataatcttttgtggatgtcattatcttcatttatcttcatttggatttatcttttataactcttttgttatctttggatctataaatatgttactcctcttggaaagaatacataccattatcattctctcttaact

SEQ ID NO: 125337 - DNA, 315 bp, Glycine max
agcttctcattcatgcttccttttccatcgagtccggagccccacgaatcgattgcctaacactgttcatctatactgcaccctcaaatcttattcggagccccatgaattgcttgtcattcatgcatcctccgccttccattctggagccccactagatgattgcccatcgctgtgtgtatatcctccaccctcatgatatatccggagccccttgataagcttatcatatcatgactttatccccatcgagtctggacctccacttatttaatgtgtagcgctgatgttcttacgacaccctaatgtcttatc

SEQ ID NO: 125338 - DNA, 324 bp, Glycine max
  unsure (1)..(324): unsure at all n locations
ctcagctntatgagaagacttccttgagaagctgcttgtgttactttcttgtaagctcgagtttatctaagcacacccatctagaaactaagaccaccttctcgagaagctatcttgagaagctctagcttagcatcacatacgtctctaataactatgctcacctccctcagaacagaggctagagcttagctacacactcctataatatctgatcgcaccccatcttgcataatacctgaaaatacaaaataagagttccttctacagagactactcataatgctcctgaatacaagggctaaaccctttactacttgtaac

SEQ ID NO: 125339 - DNA, 333 bp, Glycine max
agcttattttcacacatcttttcgttgggatttgtagaatagtgtttatggtgagagaaatgttcctcgcacaaagacaatgaaatggaggctccaatctcttctccttctctctaatgcttggaaaccctagcagagcagaggaaaagcttgaggaatcttatgaagccactagagatgtcattatcactactggacaatatatgcgagcctacttagatgtaagggataagtttatcacaattggagttagaatgaacatttctcttgttaggcttatgctctgcacaatgatcgattagtttttcttaaggattggatgtaatctttata

SEQ ID NO: 125340 - DNA, 284 bp, Glycine max
  unsure (1)..(284): unsure at all n locations
atcttatctctcaattttggtggatcaagtggtctcagaataattaagaagggggggttgaattaattattaatgtgtctggactaattaaaaattatccttcttaatattactagattcaattaggcttttactactaggttaagaaagtaaagaacagaaacagaaacttaaccaaaagtaaaatcggcaaataaaagtacatagtggaaattaaagagtgtagggaagaagaagacaaacacgagaattatactggtntggcacaacccgtgcctacatct

SEQ ID NO: 125341 - DNA, 337 bp, Glycine max
agctttaaagtaataatctaatttgactaacctaaggcttaaaaaaaaaaaataaaaaatataaacaaggttaaaggaagcttacttggtgttgaccctcttccacatttcctttttccaaaatttgtaattactctttttatgcggaagcggtttaccggaaagtgcctcggatcgccaagtaaataattaaaacggaatgatccgagtgtcaaacacagggaacttattcctttggcaaagctttgttcaacaatcatgcattttgttgacagaaaataataattgtgaattgaagtaaaagtatgatatatcctaattgaaaagcagtaaacgt

SEQ ID NO: 125342 - DNA, 341 bp, Glycine max
  unsure (1)..(341): unsure at all n locations
aactagatgccttagttaacctggtaacctaactggccatgaatcananatctgcacctgtcgctagactctatggtttatgctcctctgccgaccaccacacagacctttgcccttttgtgcaacaatctgaagcaattgaacagcctgaagcttatgctgcaaacatctacaatagaccccctcaacctcagcagcaaaatcagccacaaaagaacaactatgacctctctagaaataggtacaatcccgggtggaggaatcatcccaaccttagatggtcaaatcattcacaacagcaacagcaacaacaacaacagcaacaaccccagaaacaacaa

SEQ ID NO: 125343 - DNA, 336 bp, Glycine max
agcttgacgatttaacctttttgctatggtgccaacaggttgaacctgttatcaaatctcatcgtgtccagtgttttgtggtatatccataaattccaccatgatttctcactgaagcagattgcgcagctggaatcgaaaatcctacatatgaagcttgggaaaagcaggatcaagttctcctcacatggcttctattgacgctttcaatgttgattttatctcgtgttctgggatgcattcattccaatgaagtatgggaaaggattcacgattattttcacaagctaacccgagccacaaatcgtcaattgcgcataaaattaagagttatga

SEQ ID NO: 125344 - DNA, 429 bp, Glycine max
  unsure (1)..(429): unsure at all n locations
tactcagctatcctaactaaactagtatgcatggttaataattatctttggagaagtaatatcagaaaacttctactcattaccttatggagaagctgtntctttttaattttcttctcctattagtgcttatagaaaagctaggcattgttggtgtttggaggagtaggagcagttcttggaaaaactccggtgacaaggtcttgtcgtaaggttctggttggaggttgcatggctatggccataacatntggcctcaccaaatagattggctctgctgatctttgaatgtcattgtttactagtcatttaagtacaatcccatattagtagtaatggttttttttggggtcgtgctgtgagtaatcacggtagctagtattactctttgatagatcaaacaacagaattctaatatttcttaagcat

SEQ ID NO: 125345 - DNA, 331 bp, Glycine max
agcttgtaatcgattacacacatactgtaatcgattaccagagaatattttcaaaaaatattctcaacagtcacatcttttcattttgttcttgatggccatcaaaggcttacatatatgtgatatgagacacgaatttgctaagagttttcggaacaaaaaggtcttatcctcttaacaagcaaaattgttttatcctcttacaaattccttggccaaaacacttgtgattcaataaggaattatttgagtgctcaaattgttcaatctatctctttcaagagagaaatcttcttctcttcttctttattctgaaaagggattaagagac

SEQ ID NO: 125346 - DNA, 307 bp, Glycine max
  unsure (1)..(307): unsure at all n locations
tatgctcctctgtcgaccaccacacagacctttggccttctgtgcaacaattggaagcaatcgaacagcctgaagcttatgctgcaaacatctacaatagacctccttaacctcagcagccaaatcaggcacaacaaaacaattatgacctctctacaacagggacaatcccgggtggaggaataatcccaaccttagatggtcaaatccttcacaacagcagcaacaacaacaacagccttattttcaaaatgtngttggcccaagcagaccatatgtttctccaccaatccagcagcaacagccc

SEQ ID NO: 125347 - DNA, 257 bp, Glycine max
ggttttttagggaaaaacaccataactaaacgcgccgcaagggatccctatcgcaccagatcccaatctataacgatgggtgatcaagaggagacgcatgaacagatgaaagccgacatgtcggctctgaaagaacaaatggcctccatgatggaggccatgttaagtatgaagcagctcatacagaagaacgcggccaccgccgccgctgacagttcgggtgccgaagcacacccgactcccttggcaactacgca

SEQ ID NO: 125348 - DNA, 341 bp, Glycine max
  unsure (1)..(341): unsure at all n locations
actaagcttaaggatntcaaattccgcctggcanacaataaattatgtttgaaagtaataacanatttaggctactaaagaanatcaaagaagaaatttaaaatacctgaatatcctcccatatcaaatccttctaagcagcagggacttccttccaggtctcatatgtcacgtcgaccttatcacgagcgacaatccccanatatgttcttaatttcttcttgtggggaccgtcggccttgccagtagcaggattgacattgaccacaggtctttctgccccaggtggtctagtggccaacaatcatagccgngtcgccttgcgtgtccgcttcaacgta

SEQ ID NO: 125349 - DNA, 336 bp, Glycine max
agcttctaaactttttactttaataaagctctggtaccgcttgttaaacaagtggcctcaattatcttaagaaagggggttgaattaaaatacaaaaactatccccttaattaaaaatttaacttttttatattaaaaatgcaacccttattatgagttactctaagaacaattcaaaacaaacttctttaaagcgaaatataaacaataataaataaaagaagtttaagggaagagagaatacaaactcaatttttatactggttcagtcacgccctatgcctacgtccagtccccaagcaacatgcttgagatttccactatcttgtataaagc

SEQ ID NO: 125350 - DNA, 387 bp, Glycine max
  unsure (1)..(387): unsure at all n locations
ctcagcttgacgagagctacatgccgagcaaagntatcattcgtgccggtgatggttttacaacatgaagggtaatgtttatcttattggtaagggtttgattgggatgatcatgctcaatttcttggtggtgacattgggaagccgtctttgagatttagactgtggtactcgtgatgtcaacagggtggaattatctatcctcgtctagagctgatgctaagtatataccaatgctctctttgtatccattgtctgatggtataggtggatccacatattttgatgtgagcgtgatttttttttaacaaacctttgtgcatgtttgttattattgctaagcgaaataatagttactttttattttatccacccaaccaccaaact

SEQ ID NO: 125351 - DNA, 335 bp, Glycine max
agcttggcgagacgttcatgatggtttctgcctacaatactattgtaaactcgacaaatttagaaagataaaatttcacatccatttacgaaaggatccttccgactaaaacattctcgatatatcgggtccaggcttcctctgattgaaatctcctattatcattctgaccctggggcctacaatcactactcttatgttacttagaagccatctccatatcaaggaaccaaacagattatcaggacgcagcttttcaaattcttaaaactgaagaagacactggccgattaccaagacatggaccgcttaactggcctttgtacaaaaaaaaa

SEQ ID NO: 125352 - DNA, 270 bp, Glycine max
tactcaagcttcagccagatcgctcagtgaaagcgtatgcgtggcaaatcatgatccattgtcttctagcgcaactacttctatcataatagaggtccatgacgctaagcaccagacatggcagctatgcgagatttactgtgacaatatgagcgctaagcgaatccctcgtaactaatcacatgctcctctgtactaaaaatacaacatttaaacttatctggccagaacctgatttagaaagagatgtatctttgtaaacgactgacc

SEQ ID NO: 125353 - DNA, 336 bp, Glycine max
agcttagcaaaacatgcatggagcttttattaaccttggcatccaaccacaaccatccagtcaatagcaacaaccactaagtattatacctacaccaacttaagctaaacctacactaccaccaccaccaactcaagagtgacaatgatgtccaaaaatcatgtctttctttgaacccagcatatttttgttaatggcaaaaggggataaggttgaagaattttttattgtaaagaagcactcttcttaataatacaagtggtttgatgctcatttgtgtgttatgtgcatatgttatccactggcacacacacacacacacgcacatatatgatt

SEQ ID NO: 125354 - DNA, 265 bp, Glycine max
acctcgtgatccttgtgttagcaatttgaggttgaattcactctaataaggaggggatgatgaggatcatactaataacatggacattgaggcactacacggacattggtgcaccatatgacaaacggctagtgctaagcataggaatccttactccaaatggaagtaacttcgattgaagtataaccatatctatattaattgaaaccataatttggtaactcgttaattcaacttgacgaataaatatgggggacttgattcg

SEQ ID NO: 125355 - DNA, 340 bp, Glycine max
agctttgagccaaaatcctgactcatcataaaccttgacccagggtgagaatgtcaatccttaccctcggaagcaaaaaaagaagagaaggaaaatttccaatcaaaggaaaaaggagaaggaaaatttccaatcaaagaggaagcaaaaaaggagagaaggaaaatttccaatcaaaggaaaaaagagaggaaaggaaattcccaatcaaagagtgggagaaagcaaaaagaaaagaaagaaaattcctaatcaaagaatgggagaaagaaaaaaagagatggagaagaaggaaagaaagctcctgatcaaggatcgaaagaaaatagaagaaatgtgc

SEQ ID NO: 125356 - DNA, 349 bp, Glycine max
caagctcaagacttagacttcatgttgctcccctatctataacaacagtatccacttaaattatacattcccattcatggccgatctgatccgctattgtagatgtattgacatccctacttatatattggtctggtttgcggattgagtcaattctcccccaaatgttctcacacacatggaggtataaggaatgatatgggggtgaatgaactggtgaaactaatacagaaagaggcgtctgtaacgggacttgaaatcatcaatcagttgtgtgagatgatggtgacatgaaatcctaaatgaatgtgatcggaaacatcatctctatatttttattagtttcagc

SEQ ID NO: 125357 - DNA, 339 bp, Glycine max
agctttgtgtaatcaactacactgatttttgtatcgattaccagtgatggtttctgaacaaaatcaaaagatgtaactcttccaatagatataacttttccaaatggtttttaagtttttctaacggttataactcttctaatggttctcttgaccatacatgaagactctataaaagcaaggctttgatttgcttttcaaatcatcttttcaattcattctttagacaaacaaactttcgccaattaatttctaagtctctttgaaactcttctttttcttccttttgccaaaagatttggaaagttttctggtattcaaaaccttgaaaacttgtgc

SEQ ID NO: 125358 - DNA, 333 bp, Glycine max
agcttaaaggtaaactatatgtcttggttaacctggtaacccaactgggcatgaataaaaaatctgcacctgtcaccaaactttgtggtttatgctcctctgtcgaccaccacacagacctttgcccttctgtgcaacaatctgaagcaattgaacaacctgaagcttatgctgctaacatctacaatagacctcctcaacctcagcagcaaaatctgccacaacagaacaattatgacctccccagcaacaggtacaatcccgggtggaggaatcatcccaaccctagatggtcgaatccttcacaacaacaacaacaacaacaacaacctt

SEQ ID NO: 125359 - DNA, 333 bp, Glycine max
cctctctaatagctaagctcacctccttgagatgagaagctagagcttatctacacaccccctataatagctaactcatccccatgacaaaatacatgagaataaaaaagattctctactacaaagactactcaaaatgtctcgtaatacaaggctaaaaccttatactactagaatgaccaaaatacaaggcccaaacgaagcaaatacctattctaatatttacaaagataagcgggctcatacttagcccatgcgctcgaaatctatcataaggctcatgagaacactacggccgttcctcggatctctgggccaatctacttggattct

SEQ ID NO: 125360 - DNA, 331 bp, Glycine max
agcttggcataaccttatatttcacagacaagaaaagcacataaaataatatccctagggatttgtttgagaagcacagatgggatccctcgcaagaagttgaacctccaaagagtgaatttcaaaagaaggtgcatttgcggatgcctatcacaaaactattgccagtgcatgcaactgatcataatctaacccaagaaaaatgcttatctcttggcaaccttcatgctcagatgtatgcaagagatcagcctactacttaccctccttgtctgcacatctcaagggccactaatgtcaggatagttgttgacaaggtgtgtccatgtct

SEQ ID NO: 125361 - DNA, 250 bp, Glycine max
gagcacgacattgaaggaataaaagaatgagagaagtggaactctgaagtatgtctcacaagactctcattcatcaaagttacaacaagctgtacacatgcttctatttatatattaggtagcttccttgagagaacttccttgagaatcttctttgagaaaacttccttgataagctagagcttagctacacacaccacgtctgataactaagctcaccttcttgagaagcttccttaagaagattcct

SEQ ID NO: 125362 - DNA, 331 bp, Glycine max
agcttattgcgcatcctcttttttctaccttgaacattgaattcaattcaaactattgcttaaaaagctacgaatggcttttgggataaaaatacttgggtttcgtttaatcccaggggatattaatgatgtgttacgagtggccttaacaatactgtgtatccctaagcgaaagagtaaaatgcttgtttgtaatacatacttttgtattaatggaacccttcggggattagaacgcgaactggttgtacctcatgagtttaaccgaacctgtgtgaagtctcgtgtttttattctagcttcaactatgacttggttttctcttaaggcg

SEQ ID NO: 125363 - DNA, 74 bp, Glycine max
  unsure (1)..(74): unsure at all n locations
taagagtaatagcccactggtaaaactaactatccgaatgnttgccttggcaggaatggccccgatgaagcttg

SEQ ID NO: 125364 - DNA, 337 bp, Glycine max
agcttgtaaagctagttctttttttattgctacaacctttttctccccctttggcaacatcaaagggccaaagatctccgaaatcaacacaattataacaatggagtaccaggatataagatttagagaattaaagacaatatgccaacctcataatgaagaaattatcaggctcgaattcaaataacatacaatgttcacaaccacaaaatatgcaagactgaaatttaaaaacacaagattaataagcaaagtacttagcataatagtgttaattctaaggaactgaaagctaacatgcacggcttgtaaaagataaattatcagaatctaccag

SEQ ID NO: 125365 - DNA, 313 bp, Glycine max
tcagctatgaacgtgtatatttctacaactgtgtatttatcttcgatgtatttccttatacaaacatacccctcgcaactttagtaccgagtggttggtacttgtgaagatcgctaaccttagctcgtgggagcacaatgaactttgtgtgtggacaagaagagagattctattacgggactgaccacccgccgcgctgacgagatgacgtcgggattattttgggagagatgtgttgtgttaatcatcttctccatcactggttccctaattctgtttgttgatctcgagatgctagtcacaaatctattat

SEQ ID NO: 125366 - DNA, 338 bp, Glycine max
agcttaacagaggaccccatgtctttagaggtattggccatggaaacgagagcaccaaaatgatatgggaatcgctagttactggtttcgagggaccagctcctccgagaagaagaagaagattgaagaaagatgagtatttttatattcatgatttgcagcttattacatatgcatatttatattgagaattccctaatagaattgtgattctgtgctaggaaaatattacaatagcaaaagcaaaaacagaataggttattgttgtcccctggtgatcgacaacaatattctgcagatccttccttgccagctcagccacacgatcatcacacatt

SEQ ID NO: 125367 - DNA, 310 bp, Glycine max
  unsure (1)..(310): unsure at all n locations
aaccaacttgcaaagcatncgacacataaccaccccttcccctttgttgagaaagtgagcgggtgccgcccaaaggctctttgatgaatatccctgagtgcacgcccatttactaagtgcacccctcctttctgactttatgtgaaacatacgacaacggctcggacttgattttgctcttacttctctttgcttacaccaatactaagagaaatatgcttacccacaatttgcataaatattactgtatcattatggagctctgaatgtctctgtgccattattaacataatggtggggttgccgctat

SEQ ID NO: 125368 - DNA, 336 bp, Glycine max
agcttcgtaaccattttttcttttaattcttacattattacggggccatcataattattattcattgctttatcttttaccataggatatgagatgaggaaatcgtagtttgaagcaaatttgctcgcagtgcgatcaaagtttccacaagcagcagattggttggaccaaattcccaagagtaaatggactcattgctacatgaaaaggtatatgtgtgatccttctatgacaacagacattaagaaggctagccactactcttatacataatgagattaacaaaccaatttccactttacctaataaatgcttcattgagtgaactaactgacc

SEQ ID NO: 125369 - DNA, 248 bp, Glycine max
gagagttagagtcctcttattacagctgtctataatagaaaggttctagtatgtatatgggcttgcgccaagtgctagtatatgcttaacctactattatatatatgacggtcgttacacattgtagagcacacaatcataggttacttctatgctctatctatttatctcttccttatctatttctacaataatgaatgaaatattgtacttgcgcttatgttaacagaatactattttcacctatt

SEQ ID NO: 125370 - DNA, 330 bp, Glycine max
agcttccttcaaatgaatctatgaatgctcatgttactcttgcttgcattaacacaattccttgtatcatgtgaaggcttcaaagcaagaactgtttataactatgtatgattatactttatgctattggatgttattttggttgggaattgagcattaatgtgacataaagtagttaattccttgatacattaggggaccgtttgtttatatttatttttattttgaaaacaaggttgggtctgcacattggggtcccctaacatgcatcaagcctaacttggatgattggttgtatgctctaaagctttatcagactctgttttcaaa

SEQ ID NO: 125371 - DNA, 275 bp, Glycine max
  unsure (1)..(275): unsure at all n locations
tatgctgaaatttagcaagtcaatggctgtttactacagcgatggagtatntaaaacttttgggttctgaagaactgtcgcctgaactaacaattntaaaggatcngaatgctctttctacagaacctgataaaaactatcttggactcaaagggatgctgattattagcaagtgacactttgcatgctactttagcttgatgaatacttacttatctagtgaaacagtaatcttgtgttaggaataaacttaatatggcgtatgtctagtttat

SEQ ID NO: 125372 - DNA, 327 bp, Glycine max
  unsure (1)..(327): unsure at all n locations
agcttgtagactctttatagatgaagtcttgnattatttccttgtttctgtttttgctttcttccgggttttggggtatggtattctggaaaattgtaaaaggtaattaaattcctatactttatgcttatgctgtagaatgattagttttgaaaatataagaggtttttgcttttgctgtcttctgggttcagggtatatatagtattctgaaaaaagttagtagacatgttgccaagatgtatatgattcaccattgagcccaagttcatagtttcatgacttgagtttcttttattgtggaaaggtagttctcctcttgatcct

SEQ ID NO: 125373 - DNA, 272 bp, Glycine max
gtgtgcactacgcacatcgtagtgggtgcgacaataaagtgcacgagtctttcatagagtatgctcaaatgtggatggatttggcatcgccaggaacacccttcatgatggggagggagatgatatacatgatagttgacacgcttcccttgttctacatttagaatatgggacgttatatgccctttagctttgcgaatttggagttaccggtgacagaattgaagtgcgcttaataagatggaagttcgattatgctgctttagctagta

SEQ ID NO: 125374 - DNA, 232 bp, Glycine max
ttgatattatatattatcagatttggatatttatatatttgacttcttggttaccctgtacacgtaacatcgcgtgatttatttaccggataacaaatacaacccaatgaccctgaattctttattttatttgtggaaacgactaataatggtaagctgctaaaggacgacacaatgaatgaataaagtccgaacagtgggacactagtccttatgatgaagatcattcgac

SEQ ID NO: 125375 - DNA, 344 bp, Glycine max
  unsure (1)..(344): unsure at all n locations
gttttcatgtggcgtccctaaataatgactggttaatagtnataattaaataacanaaaccatggtaattttttttctcttcgtttcttttcatttcttctctttcaccatactaggttagaaggaaatctcacttaagcctgatggcatcacacttactgagcattcttctacctctatttctaatatttctgttcaagagattccaccatcttagtcgactaaataagatagtcatcggaattttcataagtctatctttttaatacaacatctatctctattactgcaattggattcaaattatgctcaacaagtgcttgtgtaccctgtcattaatcttc

SEQ ID NO: 125376 - DNA, 270 bp, Glycine max
  unsure (1)..(270): unsure at all n locations
gaagtagacacggagatggacaatataatccgcagtattgtgagtagcattcttgaaagatgcttctgtttctgaagctgatgaagatgtctcaacatcgtccaacccgaatgtttctgtgcctgatgtcaagaaagatgttccaacatccttcgctccacatgctgaagcnctcccttcacccagtgaagaggaatcaacagatgaagaggatcaagcctcataggagactcctgaccacgggcaccagaacctgctccaggtaacctc

SEQ ID NO: 125377 - DNA, 350 bp, Glycine max
ttatctacttccccccccccattctaacccttgaatgcggatctcttttattttaaaaaaatctttaacatcttgaaacgctaaagcatatctaatgtttactaaatctctaaagtcttcagatgttactatatcctaaaagcttttttaacgtttatgacttcggaagctatgaactttcagtgctcacacgtatatatgcattgcttaccatggaagcttttcattggccagtggggctcttctgagctaagttgtggggctcatgaataaactggctagctcttatagctggctttgttaaatgacctgtctgtcaactatgcctgtcatagccttagaactgcatc

SEQ ID NO: 125378 - DNA, 373 bp, Glycine max
  unsure (1)..(373): unsure at all n locations
ctgcagctatatagcaaatgcctaatcatctcaaaatgatgtgaatacgacgcatcacaagaatcaagccaaggctattgtgcaagcaatctatggggcaaaacacaccaaatgaatataatgatggatggctcaanatctcactaaggtaaaatcatcactttcaaagtgagctgtcaaaactatcatgacatgtagagaagaatcaatgatntcaagtcacacaatgtcaagaacttttattttcanaacaatgacccatttcttgaacatatcctataattcacagaaaacatgcagagtcctacgtgcacatgatagtgacccacaatattaaactgaagattcgacgaaactaacaacattaacaaat

SEQ ID NO: 125379 - DNA, 386 bp, Glycine max
  unsure (1)..(386): unsure at all n locations
tgagtgcttgtctacttaactcttgccctcatcacatacatatgaattgaatctggatagggcaagggtggtgtatggacttgtcatgaaatggatatggatgttggagatcttatttctagacaaatatctgtgatagctcagtccaactcctctcggctaggatatccagctattatcactgctctatgcatggacagaggagtcacctcagactcggtgactttctagactctcacgctatccaataatttggcgtacatcaagaagaattgctggaacctggatgatccttcggtcagcttcccacggacctgcanggaccgggccagaggatctganggtccatcttcatctgctccccangactctactgatgcaatcct

SEQ ID NO: 125380 - DNA, 313 bp, Glycine max
tctaaaaagcctaacatcacacgtagtttttacctcttcaaaaaacagagacattaggccatgctatgtttttctttaaaaacaagatgttatggcaccctaatactttatcataaaatattgaaaaagtaagcactacaacgtgtccagacatgagctattctaccttgagaacgagacagaacccttcgcccaaaataaattaaagcaaaactaaactaagactaacaagagctgtccctatatgtgcgctggagactgggtaactccgcgatcacccacttattagcgaacatcttcatttacttctata

SEQ ID NO: 125381 - DNA, 413 bp, Glycine max
  unsure (1)..(413): unsure at all n locations
tcttaaccttacctctactnnttttataccaaactcggaacccacaggtttgctnttaatgactctaaaaactaatacttttccatgaccttcacataatcttaggggggatcttgtccttaaactatgatgtactggactcatgcaaaacgggccacacattaattccctcacaaatgaacaattaagtgaaccatgatgtncaaaaatgaaggaagaaaatacatctccaactgacacaagataataatagcctcattntccaactcatctaacttgacaggatcaatgactctgctacatatgacattgaagaaaaaacacacacgagttatggcatgcctcacttttgtaggcaaaatgtctcgtatctccatgactaacaggtggtgcataaagacgtgacaatcatg

SEQ ID NO: 125382 - DNA, 59 bp, Glycine max
catagtcagtcagtgagaacctgtgatgtacctaaacaggcgagctcctgacagtcaac

SEQ ID NO: 125383 - DNA, 229 bp, Glycine max
  unsure (1)..(229): unsure at all n locations
atcctgactcaccatanaccttgacccagagtgagaatgtatatccttacnctcggaagcaaaaaagaatagaggggaaatntccaatcaaagaaaaagagaaagaaaattccaatgaaagccaaaaaagaanagaaggaaaattccncaatcaaagagtgcgagaaagcaaaaaaagaaaagaaggaaaattccccaatcaaagagtgggagaaagcaaaaagaaaag

SEQ ID NO: 125384 - DNA, 199 bp, Glycine max
atatctaagaaacacagttagaaagaatacatgttgtcagaagaatagagcttgacacaatatccctctctttcaagaaaaagattgactggctaatctgactcagaccctagatcctctcgtgacttctacaacatgatactcacttactacagcttattacatatgcgcagatttttcatacctcagtcatctgttc

SEQ ID NO: 125385 - DNA, 447 bp, Glycine max
  unsure (1)..(447): unsure at all n locations
acctcttaacaaatactcactctcatatcaactaatgaattaacaactatgccatattctacaacgtactngccaaacatctattactaaaatatgcccctatacaatcaggagctcattcctaatatnacatgtctccaacgtgtattgtattacatcacacacgcctcttgctgaattacacatatgcatactcaaagcattntnggtaccaaaaattgcacatgcgcacaccttggtatttctaatacctatacatatacaaacttcacgatgaatcttgactacctattctacacctacacattcatgacgagcaaaattcctaatcatctangcgtanggaaaatattgtagtgtggcccatagcttgatgctggccaaaaaaggtaactttacccaatatgcactttcttttgtggtctctttgcataaaattttaatttc

SEQ ID NO: 125386 - DNA, 421 bp, Glycine max
  unsure (1)..(421): unsure at all n locations
gcttatgcaagtgtgataagtttggatgagctgaatacagacttcaattatttttctagggataaaagaacacatataacttgcttcaatatcattnntttaaacgacctanaccatgctctntaattatcaatntcatgttnntgtactattgtngaanaagtcacaaaaccaaccgcgctcatatanngatgatagttgatactcaatagttagcanagggtacattanccattataacattgaataattacaacttatctagaacactaaatcaaaacttacacattagctaaaagttcttctctactgcaaaaagganatcttagaatgtccaggtcactattgtatgaaaacaacgatcattattgacanaaacatccctacatcataatggtgtcgtaagttgtattcatctgag

SEQ ID NO: 125387 - DNA, 372 bp, Glycine max
  unsure (1)..(372): unsure at all n locations
tattctatccctcacgaaactgatcacatgttcannaaatagaaaacatgcgcaacccanattgtccaatagggtttttccctataaaatcatgcgcaaatgccattgaggcacttcaccgaacacttggtgggcgcgcgtttangcataaatagcgagagaacggngacaatgtgacatgcctcattgctgcaaaatgcattatagacctatggccatctcatacaaaccctcaattcaacccaatcaagcaagaagacagaccagaagtgccccacatatatgagcacattcccacaatntagagcaccaaaagaagatcanaatacaccaatggagagctagaaagcttaaggatggatactactttgt

SEQ ID NO: 125388 - DNA, 525 bp, Glycine max
  unsure (1)..(525): unsure at all n locations
ttttcacactcctatgtctcaacaatagaatntcatatctaccatcatcatccaccctctnttcttagaaaaaacaacaaccttattgattganaacacatttattgagactcttattangcatgtaatcatcaaccaacaaaagctcgttcctttttctacaatactnatggatttggaccaagtttttttgttgtaacctctccatgatcgatatctncacccatgaattgtgtaacacttgcttctaatcgtggttcgcacatttcacagtaanttgagtggtattcagtaatgtgcttctacactctcacaaacccttcagaacctgacaacatctctttcctaaattcccttgtcacttaacttaaatccaagttggaaaacttngtgcttgcgttccattgtgcanaatttcagaattgggtggttntgttaanttggtgaatgtgacggtgaacccttcaagaattcggtnggatttgtcgaatatggtgatgttgatggcanaccccttcaacatat

SEQ ID NO: 125389 - DNA, 430 bp, Glycine max
  unsure (1)..(430): unsure at all n locations
tcagtcacctgcggctgcaagctgcaccagctcgccaggcagcagggtgcttcctcataagcaacagccttctggaggaatcttctgaagggcccaagtgggcctggntgctatntgcacccncatntntactaagtacacccnctggccttttttggtgattcttttttcgtaaagntacggaaacttacgaatnttgtaacgatacttngtttctttccgtaatgttacggaaccttgcggattacataatcatccncttntttgacttacggaagtgtacggaacctcactaattgtgcaacgatgcttncattttgatttcggtgtgtcacggaaccttacggattgtgcataatattttctttttgtnntcggcatatccccggaattcacaaattgnctaatgatgggtgccaagcacctcaca

SEQ ID NO: 125390 - DNA, 399 bp, Glycine max
cataacaatgctacagcaatgctggattgcctttccaattctagtttgcaacacagggcaaccacgagatagagagaggctaatctccaaataaacatacttaatgactcaacatataatgaagaaatcaagttcagtccaaatgcagactttatttaaacaatcccattctgactatctatatcaaaaaactgcaagcaacgacacctatttccctatataacaatatcacaaatacacatacaataaccactacaaaactaccacaactgcaaacaaagactcccaccatactacacacatgctatgagtaataaaatacacactaactccaaatcgcaggataagcacagaatgaaaaaaaactctacatggagaagtaggagagaatctcccccc

SEQ ID NO: 125391 - DNA, 409 bp, Glycine max
  unsure (1)..(409): unsure at all n locations
tcactctctatnntctggagaagtaatctagttatctaattcaacctgaattagatttcactatgcagtgtgagttttacaagtaatcacatcaattcaaatctacctaaaaatgaaactaggcagccaaccctgggtcctntgtgaatctaagcctaagagaaacctactattagcttcaaactagaaacacttattctagcatgaagtaaaactcatgcacatgcagtaacaatgtgtaaaaaccatatgaaacagagtcaaggagagatacaacctttacattcaaatgcaagaacaaaagacttgactgaatgaacctctcttgatctcaagtatatttacaactcacttttcctttgaaaggtccaagaaaaaaaaattgaaagttatgaaagtataaaggtca

SEQ ID NO: 125392 - DNA, 352 bp, Glycine max
  unsure (1)..(352): unsure at all n locations
ctgcagctactaaggcacctattctagctcttgctgacttatcttaatactttgagctagaatgggatgcctctagagtgggagttggagctatattggtacaacgtgggcaccctattgcttattntagtgaaaaacttcatagtgccactctcaactaccccacttatgataaagaagcttatgccttaataagaagccctcagactggggaacattaccttgttccatggaatttgtcattcatagtgatcatcaatcacttaagtacattagaggacanagcanngtaaataagaggcatgaagaatgggtagagtacctagagcaatttccatatngtatcaaatac

SEQ ID NO: 125393 - DNA, 458 bp, Glycine max
  unsure (1)..(458): unsure at all n locations
agttatgaaacanagtanttaatatttgcttaataccatatcaaagagaagaagtaatatgtgcccaagtgaaatgatgattgtttgcaactctagctcacnaacgtaaagcccattgcacatctgtagaaactagctcccaatcaagttgccttggtgatatccaagaccaatgantaaacctgaattgactatattttgatgtgaaatttcatgtcatatccatgccatattgatatatttattttggcagaactcatggttgggtattaatntgtgaaagacatgtgcttaagacgctaaatgtggaaaagaactaanaatcatgaactctttcacctaattagaagatcatagtcaagggtgatttgtcaatcgcggtattcttatgttgtggtantattgtgtcgcgggatgttgacatgtgtgtaatatagatgtctatgggctgctatgtc

SEQ ID NO: 125394 - DNA, 156 bp, Glycine max
taccttcaccaccaatcctactacttcaacatgcaccacctcttcaactgagacctccactactactacatcttcttatacgtcatcagcaattggcggctcaccgattgttgctatgtttgatgatactaggatctcatacttgacgcttatgat

SEQ ID NO: 125395 - DNA, 255 bp, Glycine max
  unsure (1)..(255): unsure at all n locations
atgttccatatgttcttaaaactggactgactcatttgcttccacagtntcatggcctngcatgtgaagacccgcacaaacatttgaaagaatatcacattgtctactccaccatgaaacctccagatgtgcaagaggatcacatatttgtgaatgctcttcctcattcattagagggagtggcataggactgtgtgtattaccttgctccaaggtccatcacgagctgtgatgaccttaagagagtattcttag

SEQ ID NO: 125396 - DNA, 215 bp, Glycine max
  unsure (1)..(215): unsure at all n locations
gaggacgagggagatacccatgctgtgactgccattcctatacggccaagtgtcccaccaacccaacaatatctntactcagccaataacaaactntctccgtacccaccacccagttatccacataggccatccgctaatcaaccacaaagcctgtctaccgcacttncaatgacgaagaccacctctatcacataccataaatacaccaacca

SEQ ID NO: 125397 - DNA, 254 bp, Glycine max
  unsure (1)..(254): unsure at all n locations
tatgcatcactgattgaatctattaagaagtctgatcaagcttcatcaccctctcttattctgcattatgagaacgagaaactactcttccttttaggtattgcttcacagctcagatgcctttctgtactgcttagagactatatatatagcctgatntggcgtctataaaaatgaaggagagaanagtatctatgcaacactaattaatcctcttctttggtaggaaacacaacttcaaagtgtctcactca

SEQ ID NO: 125398 - DNA, 209 bp, Glycine max
agcctgaaaattatcccttaacaggcagacataacagcttacatatgagatctttgatataatgtatactgcccattatggtctctaactgtattgacttgacatgtatgactatccgtgatacagactctgactctttatattaaaaatatttgtgacaaaaaaaaaaaaaaccacatgctctgatgaatgaatgcctgctgggatat

SEQ ID NO: 125399 - DNA, 507 bp, Glycine max
  unsure (1)..(507): unsure at all n locations
atctaactatgatcatacctattgtatcatacattggtgttctgaaaataaagatgaactcttcaaaaagtntgactnttcanatgggtttaagttntctaanagttataactttctgaatggttntcttgaccaggcatggagagtctataaaagcaaggctntgtttacatttcgatatcttgaacacttatttcagacaatcctntacaagccttgaatctctttgaacttcttcttcttctttgtaccaaaagctntctgaaggtttctgggtttcgaaaccttganaactngtgctattcatatattcagtctcttctccctttgccaaaaagaattcgccaaggactaaccgcctgaattctntttgtgtctctcttttcccttttccaaaagaacanaggactaaccaccttgaattctttgtgccttccttcttctttgtcaaaagaattcaaacgacacagtttgagaattctnttgattcttcccttcccctataca

SEQ ID NO: 125400 - DNA, 328 bp, Glycine max
  unsure (1)..(328): unsure at all n locations
tattatgattatgtgaaggaatgaagagaattgacaattactaacagcatacatattaactgctactgatacctanatcacgatcaatgatctacccctttaccaaaggtttgtacttggattgtttttaaccaccaatttatagcctagaattagtagatactattactcaatgcataattaatggctcacttaaactattttcataacacatattactttactagtattcctatttacgttctacattacactactcagctattaaactaatgtgtactacttcactgagtactgttacatttcataaagacaactcatccttttc

SEQ ID NO: 125401 - DNA, 519 bp, Glycine max
  unsure (1)..(519): unsure at all n locations
cagatgatgcacatgggtntgtagctacctcatgcactcctctaatgactatggcatcanttntggcgctaaactgctgggagttggaggccatcttctcaattaaatntctggcttcagcatgggtcatgtctcccaaggctccaccactggcagcatctatcatacttctctccatattactgagtccttcataanaatattggagaagaagctgttctgaaatctgatggtgggggcaactggcacatagtttcttaaatctgtccagtactcatacaagctcttctcactgagttgctaatacctgagtatccttctgatggtgtggcctgaagccggaaaattttctaaaatctctcttagtctccactcggatgacctgacaagtaacaccagtcttgcactccttataatgagaaacctcagaattgtacctctggacattgggttatgggacaacattgaatcttaatgtgtcggcttactcatgcataacttgaacaatatatcatttaa

SEQ ID NO: 125402 - DNA, 490 bp, Glycine max
  unsure (1)..(490): unsure at all n locations
gcaaagatctcttataccttgacccgtggccatggctttgtcaaacacagaagttgctgctctacaacaatcagaagttggattgggatggatattccccatattaagcccacaaaaggtgagtaatgattcatcctcattgcatgaacgatggatttgagacacagtgaatgttgttgctgtcaaaccatatgccataacatacatgactagagccannaaatgtctttgtcccatctnttcttgaatatgtataccaacttttgtttcagtatttatggagtttgatgaacaactcgtagcataatattacttatttatagactngatattaagtttaagaatattctaaatcctttgaatatcttcggtttcttttgtacatatactttcagttccttctttgttggtaatataaatntgaaatatgatattgatatttctctgatcaaatcttaatactctatctaagtgatcgtcaacatgtatc

SEQ ID NO: 125403 - DNA, 269 bp, Glycine max
  unsure (1)..(269): unsure at all n locations
tcatgatgaactatgtatggtagaacttcattactnattattagtatatacaaatgagcttgtttcaattcttctagacttagagttataacatatagtcctcttgaactctntctttccactcntttgtcttgccaagactccagaatcccaacaagttnttccttttcgatgtactctgaacaaaacccaatagcttcttccgcaatatacctttaacaatagatgctcaagacgatgtaaatctttgatatctatgcattnctact

SEQ ID NO: 125404 - DNA, 226 bp, Glycine max
  unsure (1)..(226): unsure at all n locations
catgaattgagtattattaattccacacanatatattctttagttcatcatatgatggctgggaaccctaactgtgggactatgcatccaccagtcttgatcccctcccagtatgagtctggatcttcttcaattcctttgaaatcttctacaccaaatctcaaaacccccgtggtctttgagccaactctctttgtaagcactctctcgctctctctcttctatg

SEQ ID NO: 125405 - DNA, 377 bp, Glycine max
  unsure (1)..(377): unsure at all n locations
tgtatggagagctagagcctctntgnnngggagcaactactganactcnnattgttatactcttactatcnatttaagggtatttttctggtgttctttgcttctatctatgcttatttgacatgcttgaggcttgataacccatttgtatgcatagntaggctttttagtattggaaaatatttaataccttagaacttgattgagcagctagaaatctgtatgtctagaataaggcaggactatctactacctggtctatgcacttgtaacgattgtgggatacaatagctaaagtgctatctgaaactggtaattctatgaacttaatctaataaaacttttcaagataagatcccttactttgctttctactg

SEQ ID NO: 125406 - DNA, 409 bp, Glycine max
  unsure (1)..(409): unsure at all n locations
tcagcttgaccaatctactaccataacctgcccaggtgagaatgtctatccttaccctcggaagcaaagaanaaaggagagaaggaaaatttccaatcaaaggaaaaaaggagaggaaaggaaattcccaatcaaagagtgngagaaagcanaaagaaaagaaagaanattcccaatcaaagaatgggagaaagaaaaagagaaggagaagaaggaaggaaagctcctgatcaangatctgaagaaaacagaagaaatgtgcagaggggatctctggaccagacaatatctaaacaaatacagaattgtcccaaatgaacaaaagaagaaaaggagaccatacctaaagtggcttctcctttgataccaccaaatcctggcgtggtacttgtcgctccgtaacaaaaca

SEQ ID NO: 125407 - DNA, 436 bp, Glycine max
  unsure (1)..(436): unsure at all n locations
cacccgctagttatgtgatgcaatgtcaacatgtgataccttcanaaacaattctaaatcccttaaataatttatttatgtaccttanaatgaactctacagaaccaaaatagtaatatcagcttttagaaggtntanaaccaaagaaaaaacatttataggcttatactactagaaaaagatatttaacatanatactntaacnnattatttatataaaatcgatgttattaaaagggcagtgacataattataaataanatgagttcaataacatctggtgtccaaagactgatgtaacatcaccatgttaacatcngtttttgganaaccaatgtaacgtggagatgtaacataagnnttttcaaaactgatgcttntatgtaatgtcngtttataaaaactgatgtgtttcggtatatatatatatattccc

SEQ ID NO: 125408 - DNA, 416 bp, Glycine max
  unsure (1)..(416): unsure at all n locations
actgatctntctagccaactntaataaaatctcaggaacaaactcgtcttcttggggtgcaatggcatcgtttgcaagagcatcactatcattggaatgcataatggcaactgcaagatcaaataggtcatctttaccacctcggagcggatcctgtgcagcatggttgagaattagaacttcaatggcaaaacaaaagattcacatagtgactctgacagaatctgtaatagaaatatgagaaagcaagctaacatattcataacactccagacctctatttgtccgcatttttttcttatctctttctctggttttacttctcgaatgaagcataaaatgtatctatcaaaatgactgttatgcaaataatccattatatgaacaatgtactctctaacatattcctcttaact

SEQ ID NO: 125409 - DNA, 398 bp, Glycine max
  unsure (1)..(398): unsure at all n locations
gctgaactcactcattatatcctataaagacattttgatattaaaagataatctgtatatataatgatattattaatagtgaataatanggatatacttcatcatcacaattgaagacatatatgtcaaatattatcacctgatattattcactacatcatatatgtaccaaatcgatgtactacacctcaatcccaatctttgcctcaacataaatgacaggctttataatatacaaagcctctatcagccacgcatggacatctgctcacataaatgacttgttacggcaccacatgtggagaagtgtcatctatatgtaataaataaattactgtgttgtactattacgctatcatgatggtatcagtcacaaaaacatactcaggatcacttac

SEQ ID NO: 125410 - DNA, 170 bp, Glycine max
acaacagtcggcagttgagccggcactggaaccagtgtctgactttgttgaacttgaggaagttgtggaagatgaagatgaccaataggagagagagacacaaataaaagatagtcaacaagaaataaagatgaaggaagaacaagaacaagaataagaatatagaaaag

SEQ ID NO: 125411 - DNA, 390 bp, Glycine max
  unsure (1)..(390): unsure at all n locations
gtgtggaagggtgagacttccttcttttattgttgaccttatagtggtacctggagatatgtcgcggcggtcaggagacctttgggacgtcaggtggggtgctattgcccaaaaccaagcttgaccaatcccgacccaacccgggcatagtcactcagtgagaacctgtgatgtacctaaacaggcgagctcctggcagtctacagattaagaacaaagacccnagcagggggcttgttgtggctgcactggatctggtattatggattgcttgtatcatccaggggatcatcaggtaaggaacgactaatgcttgatatcagggatgtcagtaacagcgattaacttgatatcagggactcactgatagatgtggttgtatcctgtctc

SEQ ID NO: 125412 - DNA, 486 bp, Glycine max
  unsure (1)..(486): unsure at all n locations
ctctgagtcacctgccgctgcagctgangatatgggaccacaatgggacttgggggcggcagggccacaagttcaatcacatgcgccataacccccatccctgtgcccacctcactgacttactactccacgaaaccaatctcgttctctaacaccgggtccccatcaatactgccaagctttcactacatccaagcaagacaacattcacacagcacaagctgtcacaggcatgcaaacaaagcttatgaggaaactctgcgaaacaccaacccaaatacagcttttccactaaagacccagtactattcctcgatccaattgttaacgttgatcgactcaaaattactgaagctatgtactaacctactttgccgtggactactacaacatcgactatttacttctcttctcaccacaatcatgatttttgactggcaatctgtgccattacgatattgacagagtatcgaaccactcctatca

SEQ ID NO: 125413 - DNA, 160 bp, Glycine max
tactactacttttcttagaagactcttacttatgtgcctaggagttgatttttattttactaaacctgtctaagataagtatttgggattatctcttacataactctcttttatgtcaacaaagacacatggagcgatcactatgtgaggagtactaccg

SEQ ID NO: 125414 - DNA, 217 bp, Glycine max
  unsure (1)..(217): unsure at all n locations
ttcgtaacgttacgaaactttacgaattcataacgatgcttgtttctttctgtaatgtacgaaaccttaccggatacgtaatcatcccttntntgcctttcggaacgttaccaaactatatggattgcgcactaacacttcctttaatntctggcatgtcatggaacttcacggattgtgctaccatgctttctttttgacttcggcatgtcaccga

SEQ ID NO: 125415 - DNA, 301 bp, Glycine max
  unsure (1)..(301): unsure at all n locations
cgtgtctctatacggatagtatttgttactagagctcacatttgaagtntgggattgtctgagcatttaatgctcgcttaaatgcaaagtctacttcatgctggaanaaccactctagttggcttttcgtgttgagcactacaacagaanatttacttctatgagtcagagcaagttcgtcacagttgagcacgttctttgatgatgtttggccacttgctaaactagaacttcatttattcttcatgggattcaagagatcctataagaatgtgtcggagatgattctacaaatgaattc

SEQ ID NO: 125416 - DNA, 360 bp, Glycine max
  unsure (1)..(360): unsure at all n locations
tcttaagaagattcctaaagaagctagagcttagctacacatacctctctaatagctaagctcacctccttgagatgagaagctagagcttagctacacacccnctataatagctaagctcacccncatgacataaaacatgaatataaaaaaagtccttattacaaagacaactcacaatgccccgaaatacaaggctaanaccctatactactagaatggccanatacaaggctagacgatganaacctattctaatattacaaagatagcggctatacttagctatggctcaaatctacctanggctatgaacnctagggccttcttggatcttaccaatctactgagctttaccat

SEQ ID NO: 125417 - DNA, 301 bp, Glycine max
  unsure (1)..(301): unsure at all n locations
gtgacactatcatctcaagctctatccaaggctcatcttggtggtgaagctccttctntcattggctattctctagtggatggcgccgtctcttacctcttctctttgtctccgctgcatctcatggggaaataccataaagacctatgaactanaatcacctcataaactccagcagttctccacctataataggagattactactctacaagatccctggatactctcagactcttcatgaaaataaatttttcagagggtccttactctctactcttcaaaatgttctgtctgtatta

SEQ ID NO: 125418 - DNA, 455 bp, Glycine max
  unsure (1)..(455): unsure at all n locations
ctgcagctatttacgtcactgataaattaagggtggtctgaaatctggccttttggactgtgtaggtccattccactatatataagtgtcggtanatatttatcttaatccgtgaaaatgtaagatgataatanattaatccttatatgatgaaagattaaattaattttttgatgcgtaaaaatatatatatggtatgcagtaattgtgagaaatttatcattagtgtatattaacgattgtttttgtgatatagataatatacaccataatagatagtttttctttaactattattctattagcttaccagattatctaacattggcaagacaaagtatatacttgataccttactggtatgacattgaataattattttgacattgaatagttaactatatcatgctatgtggaatattcaattttgtttaaaaataatttatttatatatg

SEQ ID NO: 125419 - DNA, 307 bp, Glycine max
  unsure (1)..(307): unsure at all n locations
tgacctgccaaatgagcacgttatttgctatatttatatacattggaanaaagcatatgaattgacatataatctcacatccaagagtgagagtctggngtaatatactactcactgagatgcacaagacatgccttctgaatngattgttatataaatctatcagtaaatggattctgcttganaactgcatatggaannaaaaattcttgaataaaacagcatggacattaaaatttccttctgtaactaactattccttngacanactataaactatatgagatatatccaacacanattcttc

SEQ ID NO: 125420 - DNA, 154 bp, Glycine max
tactgtatgactaacagcagctctgcagcacagattaagacaagacacagcaggagctggtgtgctgcagtgtgatttggtattatggtatggcttgtatcatacaaggtggtatcatacagctaaaataaacagagctaatggcttatatcat

SEQ ID NO: 125421 - DNA, 248 bp, Glycine max
  unsure (1)..(248): unsure at all n locations
aataatatacctgtnaataacatgcaagaatcaatgaaaaagttttgaattccttactcaattctacttctttcntatttctgtggtgctggccctcgaagctacttcatctttgaaactaacaaatggcacatgtgtagggagcgcgaacatcaaaagttggacaagtaaataaaggtggttgggagaacacaaaccangtgttgcatgaacaatatctacctcgttgaaaaaacaggcccagaaaa

SEQ ID NO: 125422 - DNA, 508 bp, Glycine max
  unsure (1)..(508): unsure at all n locations
ctggatntcattntagtagggaatctntccttcctaagatggagccaaactcatgtcccctcattaagaactagctcctttcttcctctatggcccttagttgaatacancctttgttggttctctatttgggtcttaaccctctcatgcaacttctttacaaactctgacctagattccccgtctttatgtataaaagaagtgtcaagtgggaggggaatgaggtctaagggtgttaagggatngaacccatagacaacctcaaaaggggattgcttggtgggtctatgaacccccctattgtaggcaatctacatgaggaagaactcatccaagagtatggtgcctttagaaagccttaaagagggataagactattcactaccttgttgccatagttgtgatgacagggagaaaagaagctagtctacttaccatatgtttcaaagtgtaagactacatttattgacatgtctagcaactgagtacactcctaaaaagtgaaatg

SEQ ID NO: 125423 - DNA, 239 bp, Glycine max
  unsure (1)..(239): unsure at all n locations
cggtgaaaaacagatttctctggagacgtgagctcagtgaggtggcaacatgngatggtggatntatgcgccgattgtggatgtggaaaacttggtgtgcaccatcgcccgaccgccacctagtaccacatgtgatgggtaccccataatcctacaagcttgagatgaggaagtgtagaagggtgaaacttcctgctnttattcgttgaccatagagtggtacctggagatatgtcacg

SEQ ID NO: 125424 - DNA, 391 bp, Glycine max
  unsure (1)..(391): unsure at all n locations
gtcttcacgtcttattgtcttatcgtcttagcttaacgggaagacctcnaccaagctnttaattattctatgaccagtggtggtcacatnntggttcatgtattttattctncgtttcaattaacttttatacccncttttgacgtgcttaagccattttattaagtcatttctcgcttaacctanaaataaaataaatttccaccgatcngttgaatttgtatcatccgtaacttttggtgaaatgaattccgaccgatcggtcatgccgcaaccacgttggaaataaaacaagaggtnaattataatataataataaaaaaatacctttttagtaaataaagcgaaaaatcaatggacattttctctttgggaattctcatatctaaat

SEQ ID NO: 125425 - DNA, 224 bp, Glycine max
  unsure (1)..(224): unsure at all n locations
aaatgcaacaanntaaaaacctagagaagagtggactgaagatgaaagaagaatagtgcagtacaatntaaaggctaaaaacatcattacttctacccaaggaatggatgaatattntanggtttcaaatngtaagntgctaaggatatgtgagacactctacaangtacacatgangggcactactgatgtaacgatctangataatacttaactcatgagat

SEQ ID NO: 125426 - DNA, 343 bp, Glycine max
ctgcagctgatatatgtcatagataaactaaagatatttatcttcgagctactttttttagctgtcatgctcggattgttcatctgttaaacacaatatcaaagctatcaggctctcatcatctatcaggatgacgacatattaaatatatgtatatgactgctatcaataataatgcaaagtatgtaagtctatatggtaggcttaaaaagggatccttgaactaaaaatcaagacctctgctcacttttaaactagtatatattaaaggggacaggacaacgaccttatctagtaaaaattaattagattgaaagaatggctgctcttattttttgttttt

SEQ ID NO: 125427 - DNA, 355 bp, Glycine max
  unsure (1)..(355): unsure at all n locations
gaacattctcaaccgagnactgattcatctgcttctcttctagtctcttttaagctcttccactgtatgttccaaatcagctaccttcttatctttcgactcaatgccttcatganactctcctgccatntcttcaatcttcttctctgcaacttcaagttgaccatgcattccttaacaaactatcgatttgttatactcttcttcaacttcgaatgaatttctcctcttcaggactctagaccatatctgctgaatgcatcttcatcttcctcaagttggctgctcctatttccggactcattttgtttangaacgtttgcattattatagattcctactctttttgactctg

SEQ ID NO: 125428 - DNA, 336 bp, Glycine max
  unsure (1)..(336): unsure at all n locations
agacatgactatacgaagatcttccttaggtatagaagtatctctaatggctaccgtgtctacaacttgctaactaagagactcgtcatcagtcgagagtgtgaacttgatgagtacgcttctcggaattgtgatgacaatcaagtggagaanaacgctcttatacccgctcaactacctccagatgaagatgaggaagaagacctaggtgaaccaccttcaccttcaccacaacagctagatcaagaactatcatcgccagagtctactccatgatgagtaagatcttgggtggacatatatgagacctgttacttggcatacttgaacctggaa

SEQ ID NO: 125429 - DNA, 295 bp, Glycine max
tgatcccgccactccttgaaggtactgactaaccaacaccctcagcgtagatgaaacacactgcgcgcatggaacagaaggtactcctgaaaaccaatgcacaaataaacctccacctgcggactctgccgatggcaatacgcgacagacctatacctatgggctatatactaatcagccatccacaaaaactaatcaacaccttcccataatatattaaaaataaaaaaagagacattctacgttattccatcgccttataacggatcctaacctactgctctgcaattgtgaa

SEQ ID NO: 125430 - DNA, 396 bp, Glycine max
  unsure (1)..(396): unsure at all n locations
catgtcggcgagatctcttgattctgcaatttcagttaccttcggntgtcattccctgcttaaaaggtactctgntaatgaaactctccttagataatatctnttctaacgatgcaagatgattaactatatgtgtaaatctctttgcatatctagatggtctcgtttgattaatcaaaaagtcattcatggttaggtgttacttaatccttaataatgtcttaggatatggatgatcccatttttgcatctaaataacttaaaatcatctctatcaagaaaatttgctaaaatagccttcttctcacatgtcgatttattgatcaatatgagagagaataagctcaagtatcaaccttaatctcgttattaaccactaatgaactagatctagaa

SEQ ID NO: 125431 - DNA, 392 bp, Glycine max
  unsure (1)..(392): unsure at all n locations
ttaattagtcctaaggactatattgcatttatgattctggntgactgttcgaagtcttgtattaatatagttaactgctggtgacctattcagggcaaccttcacctcatcatttgcgatagatgtgtttgttcattgtgagggagagacaatgtttacaagactatgtctgcctttctctatcacactcttcgtccaatgtactacatgtagacgtatatatgatcatttagatgattctctatgctgcgtctcggtacttcacagttaatcttactcgngctctattccagtggattgtcaaagttatcaatgtgtatattctagttgatctactaatgcatatctgctctgagtttgatctctttactgaagatgacaaaagttctata

SEQ ID NO: 125432 - DNA, 452 bp, Glycine max
  unsure (1)..(452): unsure at all n locations
ttcttcatgatttcagatcatggntagaacacgaggtttaggtcgtgcgttangagctggtataggtagaggcattagtgaggatacgcatgaagctgatgttcctctgcgtcgcagacctactgcttcagcacgtatgcaacgggttcgtctgcgtgaggacgtgacagagagacctgaggatgtgcctcagttgcatgaggatgttcctcatgtgtctgatgccaacccagagatgacaggcaccgccgatgctgttacacagaaggagtggtactgatgggactnggatccttgtgcaatgaggttcccgaggacaccacccatcatttgacatttgtgactgccacacagatctgagtgacggttgtagttatgtactatacttaatatttagtgattttttattccgtttgaatgtatcattcgacacccactgattgtcttccgta

SEQ ID NO: 125433 - DNA, 302 bp, Glycine max
  unsure (1)..(302): unsure at all n locations
gatctctgagtcacctgcggctgcaagcttgaagggtgaaaagacataatattcgacagaatatgaagagtntcagtataacttgctctcgttataaatgttggacgaatattgaatgattcgagatcttgaaagtgtgttatgactaaccgaacataacaaaagaaaaagaaaaaagaagtcatcgaatcttcatgtggtgattctaagttgntgaatgcattggaaagtgaatgtaactcatttttcattttacaaaatatcaatgtatatatggccaaatggaagaatttgatcacatg

SEQ ID NO: 125434 - DNA, 534 bp, Glycine max
  unsure (1)..(534): unsure at all n locations
ctctcgagggagaggttatgatggacctaacctcaatgaatnggatcttgatgcagagtnntctagtttggctctngatattattgngatcggtgtgttcaactatgactntggttctgtcacanaagaatctccagttattaaggtttgacttaaaggttatgcatctcaagtgtatattgatgtatngattcgtaatgaaagtagacgtggcaattttctctcttatatttggcctccttacaagtgtctaactacctattcagtgtactcctttattaatatggactccacaagctcaatctcttgatttacacgctgaatatacattctatcttctactacaattgnggctgtaaaatgacttatatcctcatatattacatactcacttatttattctcataattatgccatcttggatatgattcacaccctactttaattagtctgctactatgtacgacaccatattctctgtttaattgtataacgctaggctctttatctcactgatcctctcatcacttgaat

SEQ ID NO: 125435 - DNA, 82 bp, Glycine max
tcggtcagtgagaacctgtgatgtacctaagcaagcgagctcctggcagtcaacagataaaaggataacaagaccacaaagc

SEQ ID NO: 125436 - DNA, 376 bp, Glycine max
  unsure (1)..(376): unsure at all n locations
agactaacttatactgagtttcgtccgcatatccctcttgtaagactagactctgctcaagcagcttacgaaaggttagcctaatttagcctaagcttcgtctacagatccctcttgtaagactagaccttgactaaacaacattattttaacaacataattaannaccaaacttaatccgcagatccctcttgtaagaataagtttcgatcttgctgcaatcaagttctaaggcaacagtacattttccaatgctaaagtcacctaactatgcacacaaagggattatcagaccataagcatacatggangggagcattaaacacgaaaaacataattaattagatataagtatttacatcagtttgtgattata

SEQ ID NO: 125437 - DNA, 278 bp, Glycine max
  unsure (1)..(278): unsure at all n locations
tccctattctctcccctttggatcaacaaaaagccaaagtgcgtaacaagtatgaaacatacatatactactaatcattcacaagacantcatgaaagaatataaaccaatcatgaagcaagaaacatgactagatcaaatatatataataaccacatagtcatataacacaattcataattggtcaatcataccatgcaaataaagaaatactaaattgttcatatgtcataataatatagccaaatacacggctgggaaacanagtactagtaata

SEQ ID NO: 125438 - DNA, 164 bp, Glycine max
ttcctctccgcccttttaacacttaaataatactattattataatttttttgtcaaagatactttatttcaggaacctttggggtaagtttctcaagccagatttaaaaaactgctttagggtaaaggccatgaatgaatctgacatttgttatacacagccat

SEQ ID NO: 125439 - DNA, 270 bp, Glycine max
  unsure (1)..(270): unsure at all n locations
aacatcttactttctctgtatgtttatgaaaatnttgctgtagaatattcttgcagaccctgattggtgtgaaaataaacgtgtgtcaccactgacacatgttacatttatttgcataataacctgtgtgagacactagactatatatacttaccatgatgagttttaatcatcaatatgcatacacatgtaatgaataatctaaatatagtcacaccaacaatgattcctagtatgctattcttcatgtntccatggccaacatgatct

SEQ ID NO: 125440 - DNA, 166 bp, Glycine max
tacactttgctggtacattttattttttgaggtgctctatagacacgtagtaactgttgcgtattgaaaacttaagttgtggatcagtatgtgacgatactctaggatgtcatgtttgggtagtaagcatttgaagttaacattatatgtttcctataatttaatt

SEQ ID NO: 125441 - DNA, 345 bp, Glycine max
  unsure (1)..(345): unsure at all n locations
ctacatatatataatgagtcttacgcctagcatgtntnnnntgtgcaaagtttaaagtgtctgtntcttgtctgctaccagaccattgagccaaacaatctcatggacttacctgaatacttgccagcatcaactaataatgggttgaaaaaaggttctaactttccattttaagatatctatattatgttgatatttcaacttcttcgtcgtgatcaaaacatggcaaccaacctttatgtctatcatatgtgtaccgaatatttatacttaacccatactgtcttacctctccgcatatccttatttattgtgctatcaaattttatattctttttcaatttg

SEQ ID NO: 125442 - DNA, 113 bp, Glycine max
ggtcctctttttgctgactctggacttttaaactctgaactttgaactctgaactaactagtccccccttaactactcctctgcagatcatgaaatcaaaaagtctctcaaac

SEQ ID NO: 125443 - DNA, 190 bp, Glycine max
  unsure (1)..(190): unsure at all n locations
cataacaaccgcaacatcctcacataaaggctaaatagcccatacatcaacaagcactctctccaattcagtggtatagcttgagagataacattggaggggccgcatatattaatntataatatatatattagagtntggctgtcatacactaatgacattaaagagttacactctatcattcagttac

SEQ ID NO: 125444 - DNA, 299 bp, Glycine max
  unsure (1)..(299): unsure at all n locations
aaaaaataacaatcaagaaatctatctttcaatcttctctctcaacatcattcaactctttcaacagattntttctgattcatcttctcttcatctttcataaaagtttggtcanaactttntctttcaagaaaaagtctttgatnaaaaacttggtctattaatctttttcattctcttctccctttgcaaaagaacaaaggactaacccgccttgaatctttgtgctctcttctctctntccaagagaatcanagggacctcgcctgagaatctttgattcttcccttcccctaaac

SEQ ID NO: 125445 - DNA, 482 bp, Glycine max
  unsure (1)..(482): unsure at all n locations
ttgtagctacctcatgcactcctctaatgactatggcatcatttctggcgctaaactactgngagttggaggccatcttctcaattaaatntctggcttcagcaagagtcatgtctncaagggctccaccactggcagcatctatcatacttctttccatattactgagtccttcataanaatattggagaagaagctgttctgaaatctgatggtggnggcaactggcacatagtttcttaaatctctccagtactcatacaggctctcntcactgagtngtctaatacctgagatatccttcctgatggctgtggtcctggaagcanggaaagtttttctaagaatactctcttaaggtcatcccaactcgtgatggaccttggagcaaggtaatacagccagtcctttgccactccctctaatgaatgaagaanagccttcagaaatatgtgatcctctnggacatctgntgggttcat

SEQ ID NO: 125446 - DNA, 232 bp, Glycine max
gaagttatgtctcatgtttcttacctaaaatagtggctttgatacaaaaagccacaatataataatttttttttactcagtctaccaacacgacaattcatattgatgaactatacggaaggaatttcactaatgttccttcaggaaaagggattctctcatgattcttcttagatacgttcttagttgtcacatctgttagtacattagaagaagttaatttgctacttaa

SEQ ID NO: 125447 - DNA, 288 bp, Glycine max
  unsure (1)..(288): unsure at all n locations
atgatatattcatcatttgcttaacaacaattcattcgtgtattatgtcacgacgacattaatagatatattccggctgtnanattatattatattgtggatgatagatttttcctcattattgtaccgtgacccaagacaaagaatagttaaatcagagaatttttttaagataccatagaaagatatagctatgtcaacgcttcattcaatgatcagggagaaattaacaccgcgtgtcatataagttcaacacaaaaaaatataaaaactgtatgtagattcctc

SEQ ID NO: 125448 - DNA, 325 bp, Glycine max
  unsure (1)..(325): unsure at all n locations
gcattggatacgtttttataatgccacgtatcttaagaaatatttacttacaactttacaaattcattgataatacaccacactcgggttccaaagaatgatagcatatgcatctacccttcctatctgcttcacaaactaggtaaaactacnaggagcagacaacctcttattttcactacacactgaagtgataaatagtagaatgctccttacttcacaacgaacagggatcataatatgcaaccagagcattactatgccattaatggtaattggaagtntatatcgaccgtttcattatgggaacctatgtatatttgat

SEQ ID NO: 125449 - DNA, 216 bp, Glycine max
tgccaagcagacacaacaacaggaggagggccagtagtagccagccataggtgcaccgtcgtcgcctctactagagacaccatccttagagtccatatccgctcacctgaagaggatggagctttagatgcacacttacatgcagcatgtgactagccagcaggcggctatatcacagggtcaggtgcagctgaacgagagcttctaccggtacac

SEQ ID NO: 125450 - DNA, 303 bp, Glycine max
  unsure (1)..(303): unsure at all n locations
ccatcctatcctacgtcgcgaatcatgtcttctatacgacaaccnctatctacctcgactgactcagtgtgagagactgatgcattgtctggcaattcaccataccatatccactntgtgtangttggaatgatcccgtgacatattagatgtgaccttatttcatntagcgactgatgtctaccattggcacatttcacacaatgatagaaatatctcccgcgcaagctggtggcatgcatttcaataaattggaggaattgatccaccccattcncatagtcatcactaatgtgtgatgct

SEQ ID NO: 125451 - DNA, 387 bp, Glycine max
  unsure (1)..(387): unsure at all n locations
nnnagcttatgctttcanacggatataatacaatacaactactagcaacactgaanataagtaacaacagtgccacggaaagctgacagtattacactaactatgtttgaccagaaacaagatatntaaggaaaatggtatgaatatatgatatttgatcaagttgagcatcattctattgttctgcannagtattgacagtagatagacccaaatcanatttcaaatganaaacttgaggaactgcanaataactgacaataacaacataaacttgaggaacttcattcacaatatttcttcagcagaacaatacttataatatcagaagatgctactacataatttttctaatatatattcctcctacaactaacattataatta

SEQ ID NO: 125452 - DNA, 500 bp, Glycine max
  unsure (1)..(500): unsure at all n locations
ttgcttcgganacctctcatntctcatgtgaacccanactcaatctccgggttggaannacaaccttttgcgttgcttgtttgcttggttagcataactctcattcctcttttcaatttgngccttgactatttcgtggagctntttcacatagtccgctttggcttgtccttccttatgcttaanaacttaaatattaggcgttggcaacaaatcaagaggagttagtggattgaaaccataaacaacctcaaaaggagaacaactagtggttgtatgcacagtcctatataaagcaaatcatgtagataacaaacttccaattttaagatctnttaaaatggccttacaaggacccaagcctatcatgactcattatcattgttgagggacagcagaaaatagactagaccacttccttaggcctcaaatggtagaactgagctatatacatgtctggatcatgagtatctctgagacaacgcctatactataattct

SEQ ID NO: 125453 - DNA, 376 bp, Glycine max
  unsure (1)..(376): unsure at all n locations
aggatcgatgtgtgtctgaaaagaggcannattattcatcctgctgnacgaatgagaaactgggcaaatgaagagggtgaggatgaaggagaagcccatgctgtgactgtcattcctatacaacccaagtttcccaccaacccaacaatgtcgttacttcgccaataacatacctttgtcttacccaccgcccagttattcacaaaggcaattcctaaatcaaccacaaaatctgtctaccgcactttcaatgacgaacaccacctttagcacaaactcataaataccaaccaagatatgaatttgcagcgagaaagcctgttaaattcacccaattcagtgtctatgctgcttgtccatattacttatattcatg

SEQ ID NO: 125454 - DNA, 222 bp, Glycine max
  unsure (1)..(222): unsure at all n locations
gctcactaagccgattatgcagaagcataattntctactatatctgctaagcggcccccatgtcgctaagcggtagtgtttattttgtgaaggtgcgctaagcggaccatgtcccgctaagccgccagttnntttttctttctctcagtcttatttttctggtttttcaattgaataacttgtggtctaactaactnnttgggttcctttgtgttgcagatg

SEQ ID NO: 125455 - DNA, 334 bp, Glycine max
  unsure (1)..(334): unsure at all n locations
tgtgtgctggtcctactagatgttacctttctcataccttcatctgatatgaatgccctctcttattcaggctggtatgggtagcttggggcagggggaggatgactaaaagcaacccggttctttgatgaataacagaaacttcattttctgtgtggcattgcagcttttcgtaacttgtccccttgacatgagtgacgaatgaaccgtgtcgngggcttctattaagttcttctttctcctttgtgtaccacacttaattattacccaaatcaatgtctagatacacatattactgcgacttaagattaatctctaaagaaaacttatatta

SEQ ID NO: 125456 - DNA, 265 bp, Glycine max
cttatctcagctgtgagagtgaggactctgttttgtacctaggactgaatgccgggagaacctggaccggggttgcaacactgcactacaccgctacgataactgatgactacagactctgcgtaaataagacagacccacagagtgggggtgccctggaactgatgttggaaatgctctgtatcattccaaggggtaatcatacaagcttaaatgaacagagctaatgctctgtatcatcccggtgtatcatacacctgaaaca

SEQ ID NO: 125457 - DNA, 426 bp, Glycine max
  unsure (1)..(426): unsure at all n locations
gctggcgcctatctacagtaatttatggttgaattatgtcctaatcttattctaagaatactaatcataatcccgactaattnaaggacaaatcatgatataagacagggaattgataccaatgaagagatataagaatcaggaacttatctagaaataattaagatataatactttggatatttcattatattctacaggactatatataacttgaaaaatgtcatttaataaaggataaagaatagatcttggataccccccaaactatatgttggaagcaagcaataactaccaaatcatctcatgggatagttatcttcaacctacaaagcgtaactcagaataatttcactgaacgaaagaacataactacctctcctctgacgtggatcagacgtagaattattttagatactccttttg

SEQ ID NO: 125458 - DNA, 457 bp, Glycine max
  unsure (1)..(457): unsure at all n locations
actatacatactcagctgtcaaggcacagattgngacactgctggtcaagaaaggtccaacattntctactatgcattcagtttcttcaaaacgaattgcntttttattattatgtgtcttatgtgccacaatgtcactatgcttgtgttgagctataattatcatttttctattgatcatgnatgagaatgcaaccaagatctgagaagtagtggttaagatctgaatagatattttcagaatcgagataaatacagcagcatgtttttactataattaaccaaagttcatgtggtaatatgtttatggccttagtaatatatctcaaatttatcttgagctctagtgctggtgtcattgctgacaataggaatgggaagttaccactttaaacgcatactgtagtcactcactcaggtcggttccatgcatggtctactaatgtcatttctttta

SEQ ID NO: 125459 - DNA, 233 bp, Glycine max
  unsure (1)..(233): unsure at all n locations
cctggcttcactctntgacattntatggatcaatctttntaaaaagctgatntcttggcacgcatcatgtatacgatatggatgaaattngaataacttgcagggccacccaccctggatatgggccaagtccnctttccttatctactgtgtttatgttccaaggttattgtaagaaagtgttgtgcttatctctcttcattaacacttgggaattattacagggagtctga

SEQ ID NO: 125460 - DNA, 384 bp, Glycine max
  unsure (1)..(384): unsure at all n locations
taacagctggataccctgaaganagaagtcgcanaatctatatttgatttcatatttcattataataaaagcacatcagtgacagaaagagcttctggctctgcattatgctatgtttttttaggagggagggaagaacacttttaaaagtaaaatatgtatggaaattttaataatccttagcatatactgagtaacttaacatcacattaatataaactaaagtgaattatagcttcttactattgaataactcatttataaatgatccacaccacaagatataaacaagagtgcgcgcttaaacggaagggcacttaaggaagctacagaaggagagagaatctgaagctacgacatgcagatgaagggtgtaaacgctcc

SEQ ID NO: 125461 - DNA, 412 bp, Glycine max
  unsure (1)..(412): unsure at all n locations
cctagatgctgttgtgacagactanacctacacatgatgatctcatacttaaaccaaacttaattacagatcctcttgtagataagttcaatatgcttattcagttctaagcaaaatacatttctaatgtaaatacctaatgtgccacaatggtgatcaacaagacatacaaattaacattgtaacacttgacacagaacaaatcattcatatgaaaaatacatcactgtcatttaatcctacagggtgcagcattcaatataacaccaaactggttcttgaatgtgtctttgtgctctactctttcaaaagcctatgggcttgaattggcctggctgtaagatacttatctccagatagttaatagttgatcacaattgtagccacctccctacacagaatgatgactatg

SEQ ID NO: 125462 - DNA, 457 bp, Glycine max
  unsure (1)..(457): unsure at all n locations
acgagcatagaatcgcggatgagtatgcccaagtatatgcggaataagacgctagaggaacggtgatcgactctttacaccaagaggcaaccatgtggatggatcggttngctcttaccttgaacgggagtcaagaacttcctcgattgttagccaaggccaacgcgatggcagacacctacgtccggccccgaagagaatcatgggcttctcggctattgtcagcatatgatagacttaatggcccacataattagaaatcgttaggaaacttgtatgggctctcagaccttgactagatatgatttcttgttttgagacataatgagttggtcccatgtatgtactccaaaaagcttgcgcacatcatagtacgtctacgtctcatctctagcatgcattttctntctttacccactcctcacgtttggtttttagggaaaacaccataactaaa

SEQ ID NO: 125463 - DNA, 207 bp, Glycine max
  unsure (1)..(207): unsure at all n locations
cactggtatgtgtcttctatatngtatcacttctntctccgacattgagggaaccacttgngctgccanatccctccacctttgagcatattctttgaaagatctatgacccctcttgcatatgctctgtagntgcatcctatccgaagccattatactgacactgcctaacgaaggcaaccattatgtccttccaagaatggactc

SEQ ID NO: 125464 - DNA, 434 bp, Glycine max
  unsure (1)..(434): unsure at all n locations
cactcacgagaattttctttctttntgatgaatataaccatatgagaatagcagtactggtggtntgttggaactcaaccaataatcaaggaacattntccgacaataggtcaacttgtaacaacttacgttatntaggaagcatttgttaggcaatagtcatgatttcagtcaatgaatntgtcctctttcagntnnataaagtattatgaaaccacaagtttacgtggttaattagtaaccgtttgcangaccatcacgcctcggtgtttcagtcaacgtatganaggatccagagaattaatagaataagtgctacgncataagccaaaatatgacactaccgataataatgatccactatagattggtctactgagcatatgacctggaatgacctacagggattgtctaaatatattatatgcatatta

SEQ ID NO: 125465 - DNA, 120 bp, Glycine max
  unsure (1)..(120): unsure at all n locations
gcgctacatctatagttatgctgcttgcgaccgcaacacacatgctctntgggcgcttctgaccgtagaacccctgtagctccgctgagcctatacttctacctcttttcgtctattcat

SEQ ID NO: 125466 - DNA, 211 bp, Glycine max
  unsure (1)..(211): unsure at all n locations
ttataatacctgaatatcctcccatatcanatccttctaagcagcagggacttncttccaggtctcatatgtcacgtcgaccttatcacgagcgacaatccncanatatgttcttaatttcttcttgtggggaccgtctgccttgccagtagcatgatggacattgaccacaggtctttctgcctcangtggtctagtggccaacaatcat

SEQ ID NO: 125467 - DNA, 283 bp, Glycine max
  unsure (1)..(283): unsure at all n locations
atattaaaaatgcaacccttgttatgagttactctaagaacaattcagaacagacttgtttaacgcgaaatatatacaataataaatataagaagttaagggaagagagaatacnaactcaattnttatactggttcagtcacgcactatgcctacgtncagtccccaagcaacatgctggaaaattccactatcttgataaagcctcttacaagttgaacacacagtacacccttcctgtgtcaatacctacactaagagacctggctgtaacagattttga

SEQ ID NO: 125468 - DNA, 167 bp, Glycine max
  unsure (1)..(167): unsure at all n locations
tatgcttaattatatggtgttgactgtgtgaacagttntacgagattaagactgtggaactcgtgaagccaactgggtggatgtatctatccttgtctggagctgatcctaggtaaggactatgttctttntgtatccagtatttaggtggttataagtacgtatcc

SEQ ID NO: 125469 - DNA, 330 bp, Glycine max
  unsure (1)..(330): unsure at all n locations
tgacgttaaaagagtgctttctgngangcaacccaatgctgatntctntcattctatttttcatgcattgcataattnggaatctgcttgataactattgaaacaaaggatatcagcttataacgagtcatagatattggtggctattttaaatgttttgaggaagtggactgaaaatcacttaataaacattttcatgataatagtccacttgctaagcgcataccacctcgctgtgcgcatcttcttcatgcgctaagcgctcaaacacctgcatctcaagctgatttggtcactaagctgtcatgtgtgactaacccattcaatcaa

SEQ ID NO: 125470 - DNA, 306 bp, Glycine max
tactgtgcccacttcaactatactgatgagctgctgtactgctgagaatatctatcaagactgtgaatctacttgtgactactagtggtcacaggcgctatttacatcggtgctacgtgactcgcattggagacatttgataggattcatgagatctgagcctgcgcacacccaaattgtcataagctacctcattagagatcctaaaaatgctagaaataatttagctgcctaccttcttaacgaggccctttggataagagtatcctacacaactccttataactatctccccctcacaacact

SEQ ID NO: 125471 - DNA, 406 bp, Glycine max
  unsure (1)..(406): unsure at all n locations
agctntgatgatatggtcttcaccgatgagaggatcanagtgagtctaanaagaggcannattgatcatcatactttgatanatgccaaanaaactacggcaagtgaagaggatgagaagganggagaaacctatgctgtgactgccattcctatacagccaagtntnccaccaacccaacaatgtcattacttagccaataacaaaccttcttcttacccaccacacagttatccacaaaggccatccctaanatcaaccacanagcctacctaccgcacttccaatgacanacaccacctttagcgtanaccanaacaccaaccaagaaatgaattntgcaacaagaaagcctgtagaattcacccaattccagtgtcctatgctgacttgctcccatatctac

SEQ ID NO: 125472 - DNA, 307 bp, Glycine max
ttactacttatatcatgccgggtcatggtctcttatctgttgacttatccctgacactagcttataagcatttctactaaaaaataattcccgcgttgaatgtatcgtaactcgtaaaaaatccgacgtctgcggccgaacacttggaatataaagagtaaaaatatttataataaaagactttttattaaataaacgaaatcaatcggacgtcttctctctgcgatttctcattcttaatcgaattgattaataattaaagtgaatctaacggctaaaatcaattccgctagtcaagctcgtccat

SEQ ID NO: 125473 - DNA, 339 bp, Glycine max
  unsure (1)..(339): unsure at all n locations
aagaaagaggcagcgagttatgttgtgacannatatccgcaataatgaatataattcttnnctcaaactaatctttttgtatggctaagaatactggtntcagacacgatgagagataaataaacaatgaagaaagatacaagtaaacattgaaggcgatntcagctcacatagcaatgactacggattaaacatcactcatggagaggtgagttgactcctatagccagtccttccgaatatcanaagtgtagttgatctcccaatacaacttggtgtcatcgtcaacatactggaaaaacgtgacacagatatacgaggtcaagtaatgcattaatc

SEQ ID NO: 125474 - DNA, 443 bp, Glycine max
taggccttgatctagctcactgctcactgccagactctaatattgaagagatgcctgcgtaccttccctgatgaagacactggcagaacctatcttcttttttggaccagttgacagctgtggcagttaatttcttaccatcggaccatggatgccgctgtgatcgtatacccatctcagctagatcgtgatgtggctctataccaatcctcatctcgcctgaatgtcatgagcatccaatacactgtacatacattctctcgactgcatacatcaatcatgtctgatgttaacataccgttcaagataaagaaatgacctcttttcattgcaagctacttcttctatttggttttcgatcagattactatgaccgtgtgtacgtacaccacgttgctcaatggctctctcctaaaatcttatcttgccgtatgtgtaaacgc

SEQ ID NO: 125475 - DNA, 190 bp, Glycine max
  unsure (1)..(190): unsure at all n locations
acgcgagcnttgaccactgttcttncttcccacgatgcttcttttcattgtcggctgagtgggcttatagcctaaaccatacttcccacgaattccttgtgtatttatanggctggtatgccgtcgttgtctttgcctaaacccatcccgggttcataaccgttccccaacataactcgggccatcatta

SEQ ID NO: 125476 - DNA, 347 bp, Glycine max
  unsure (1)..(347): unsure at all n locations
tcagcttttatgctctcacaaccagactagtatctgcccctgtgattacaacaccttattgttgggcaagagaantgaattgatgtgtgatgctagtgactatgccgtaagtgctgtactcggcagagaaaggcagacgtctccatgccatctattatgccagccaagacttgaatgatgcacaaatcaattatgctactgatgtgccatcattttcttctatttttaaaccctttttgcccatttaatactgagtagcttaatgcaaatatatcgcacgttataattggctattactaattgagtttaataattcagataataacatggctatcgattggtgggct

SEQ ID NO: 125477 - DNA, 268 bp, Glycine max
ttatctaagcgaaatctattgcttctcctatttatgtgacttacgctctagattctacactcatccatgaagaatttttagagctcttgcttcttgatagttgtgatcttacgttcccacaaccttgggaaagatggtccgcactcctaagtttatctaagcccttgagtacatctgtccaagcgcctgtaaagtatttagaagaacttgaagtcttacaacatgttgtgcacagactcttcaatcttcatgatgaaacgtttgtaat

SEQ ID NO: 125478 - DNA, 318 bp, Glycine max
  unsure (1)..(318): unsure at all n locations
ctgctggccacttgaccccccttcctaaccctctaacaatatgagataatgttcatggggtccttttcttgcttcccaatctggcagccttcttgatgtctctatcttccatgtcaantattatttgctgcaatttattcctctgaacgttccctcctgtaacccctaattcttttggcatctcccataatttctctgcctcttgcatcttgttgttgaccagaagtgcttcctcaagtgctgattgttgtgatgagaggtaatggtccttttgttcacggaccctttgtggcctatgttcactcccctgcatattgg

SEQ ID NO: 125479 - DNA, 292 bp, Glycine max
  unsure (1)..(292): unsure at all n locations
cacatgtgcgactatgtggcggtcgggcgagggttctctaacaagtttcacatccacaatgcgcgcataaacccaccatcccctgttgcccacctccaactgagctcacgtactcccacgtagtccatatcctcgtttctctcaacaccgtgtagatgcaattggctctgatgttntgatgatgatcatgatgatgtgttgcaattgatgcaaatgggcttttcaagattaaaattcaagacaatacttcaagattacaaggcacaacatcaagatgatcactagaatatta

SEQ ID NO: 125480 - DNA, 377 bp, Glycine max
  unsure (1)..(377): unsure at all n locations
tatagcaatatctctaagggctaccgngtctacaacttgcaaactaagaaactcatcatcagtcgagatgttgaaagtaatgagtatgcttcttggaattgggatgaaaaaaaagtggagaagaacgttcttatacccgctcaactacctcaagcagaagctgaggaagaagacccaggtgaactaccttcacctccaccacaataacaagatcaagaactatcatcaccagagtctactccaagacgagtaagatctctggtggacatatatgaaacctgtaacttggccatacttgaacctagaagctttgaagaagcgtcaaagcacgaagtatgggtcaaggcaatggaagaagagatacaaatgatcgagaa

SEQ ID NO: 125481 - DNA, 401 bp, Glycine max
  unsure (1)..(401): unsure at all n locations
gacatattcatttgctacatgtctctatanatntctcccttcttttgagtgttgttgtccaacaactaacgatttctctaaccttttcaatggcataaagagattatggacaaaccatctttgacaattaacttcagtataaaagcacaacaatgcatgagaaatagttgcccacccaaaaataagagacatagggtagaatttttgtataatgcattcaatcatagtatcatttgtactacgtacaattatcaacagtcaaagtataaaacttcttgtcaagattccaatccattaaacattgaaccaaaactttagcaagagctatgctagtatgaagatgaggcacacaaatgaacttaaatntaaaatannaatttcaatcatataatcatcaacaa

SEQ ID NO: 125482 - DNA, 474 bp, Glycine max
  unsure (1)..(474): unsure at all n locations
ctgcagctagcatgcnaataaagaatgaaatatgttaaatctaacattctttatggatgttgngcattcataataataagaatgaaagagtaactaccttactgcattaatcctattctgcacttcattttctgtgtcaaagatatacaattgtgcaaattgaggttctttcccaggcattggtaacatgcttcctattctatgacatggttgaccttgaattcttattgtaggaggtcctcttgaatgattaattgatttgtcgaacttaatactagtagaagtaaaggtaaacataatgttatatgtccttatgttttgttggtaatttttactatcagatgtatcatgatcatacaaaagttggtggagatatttatgtggatcttgtaacaatggaagttcaactttgtcaccttcacacataagttgaatgttgggtttgtgaacttacacagtttgagattcttcatc

SEQ ID NO: 125483 - DNA, 435 bp, Glycine max
  unsure (1)..(435): unsure at all n locations
agaagtgacattgaactatacttataacttgtgagaagttataaacttggggtttgcaagaattaacgtaatctcagtggtagaggcgaaccaatataaaaattattgtgttttatctttcttgctttcctttatgctttatctaacaaagggtgcgaatttgttttagatcctaattgatatcttgtgttttctaaaaatgtttttatagcgtttgataggaatttttgaaaaanaacctgttatttgttctttacaaagttntatcagataaaaagtttttttttaggtgcaaaaggttntaaaatttctaaaatcaccaattaatcccctttcttatgatatttgcctttatagtttggtatcggagcacaacctctaanggttgagcacctaacaatgtctataggaaatgatccagatggcagataacaa

SEQ ID NO: 125484 - DNA, 430 bp, Glycine max
  unsure (1)..(430): unsure at all n locations
agctngccacccagctcgcccaggcgagcatggttgcttcctccagaagcaacaaccttctggaggaatcttctggaaggcccaagtgggcctggttgctatttgcacctcatttttactaagcacaccccncctgcctttttttttggtgattcttttttcgtaaaggtacggaaacttatgaatttcgtaacgatacttgttttctttccgtaatggtacggaaccttgcggattacataatcatcccctttttgacttacggaatgttacggaacctcactaattgtgcaacgatgcttccatttgatttccggtgtgtcacggaaccttacagattgtgcatcaatattttcttttgtnttccggcatgtcccagaatttcacanaatgcctaatgatgggtgccaagcacctcacaaagaccaaa

SEQ ID NO: 125485 - DNA, 429 bp, Glycine max
  unsure (1)..(429): unsure at all n locations
ttatggtatttgagtgatttttaaaataaatcttattttatggttaacttatctctgaacatttcattggattaatgatgaaatttgtgcattttcaggtgaaaaagaggctaattntttaattgcaaaatgtagcaattgggctaagctcatatccaccgctcagcacatacttagcacgcttagcacanaggagaatctggcagagcatcagcatcaaagtcgcgcgctaagcgcgagatcagtgcgctaattgtagcaggtgccttcaaccaggctaagcttgagactggcgctaagcccaatttcacttacttgcgctaagcgcaatgtcgcgatttaagagcctatntaaagtctatcttctgtagaattagggtaccagctttacatctattacaacaccttntatgataacttctacagaac

SEQ ID NO: 125486 - DNA, 192 bp, Glycine max
ggtctgataagcaaaacatgagtggttgatgatatggcccaaacaccagaaagacatgtgttattagtccgtgttgaaactgacaattggggatagggttaatgttgtgcgtcaatggaactttaatgcgtgcatgttttgttcgtatgacttttataggaattaccgtcaggtaaggtacttctgcccttt

SEQ ID NO: 125487 - DNA, 220 bp, Glycine max
caatttcattgaacatctcaatgcacttcttcacgagaatctttctgatcaccttcaagatctttgtttgttgcagcatcttacgagagatgttgagcggcaagtcatcggagtcaacaacacctttcacaaatccaaggtactcaggaatgagcttctcacaattgtccatttataaacaccctctgacatagagcttgatggtgttcatcttcttcct

SEQ ID NO: 125488 - DNA, 383 bp, Glycine max
  unsure (1)..(383): unsure at all n locations
gctatatgcatggcattttttaanacgcacgcagcatgttcttcttgtgcccctattttacggacctaaatgggaggaactaataggcttttagtgataattcccaaggtggtcatatctctcttgatggtttctagaggtatcatcctcttcaaaaaacatattgtggcaatagggactaccagcaacaatatgttatcaaaaagaaaaactctagatgagggctcactattatcaagcaagtcggagacctagcatgaccacagaattaccttcactccttatgttcctatggacccgagtataaggccccttttcaactcaccatgtgttgcaataggtgctggtgttatgtgcatcaaatgaataccatattatctcat

SEQ ID NO: 125489 - DNA, 160 bp, Glycine max
agtcaacaccgcttttaacatttctgatttaatttcttttgcacgtggagttgatactgaggaggaggaaccaacagatttgaggtcaaatcctcttcaagggggaggggatgatgcaatccttcctatgaagggaccagtcaccaaagacatgagcaag

SEQ ID NO: 125490 - DNA, 436 bp, Glycine max
agcttgaaaggatgtctttatggaggaaaatttagacggagagaaagagagaggtgggagcacgaaattgaaggaataaaagagggagagaagtggaactttgaagtgtgtctcacaagactctcattcatcaaagttacaacaagtgttacacatgcttctatttatagactaggaagcttccttgagaagctatcctgagaatacttccttgagagggtctttgagaaaacttccttgagaagctagagcttagctacacacacccctctcataactaagctcacctccttgagaagctttcttaagaagatcctacagaagctagagcttagctacacatacctctctaatagctaagctcacctccttgagatgagaagctagaacatatctatacacgccctataatagctaagctcaccctcatgacaaa

SEQ ID NO: 125491 - DNA, 429 bp, Glycine max
  unsure (1)..(429): unsure at all n locations
actcaagctgtgactatccttcgaccaacacggatgtgtttctgtctcatcccggatnntagtgggttgcagcaccggctccgctttcctaactatactggagacggttgtcgtggctntatcctctatagttttctggaattntaacatgacctccgagatggaagccacttgatctctgtaagccgatagatcggccttcatctgttcctgcacgccctcttcattatccatttttctggatcgagtgttataggggtgccttggtgttttcttagttatgatgaaattcctaaagaaataaacaacggtgagtatgccaccaaaacatgaatatgcaaatggatgatcggagcccttggatccaccccaagggttttagataacatgatgagttcagaacttctcattntataaaaagaacaaagc

SEQ ID NO: 125492 - DNA, 452 bp, Glycine max
agcttgtgaaagaatgagggaaacgacgagggttagtggttgccggtgagagcatgtgggtcccacaacccaatggccaatgtctatatccaactgaaaaatttcagttaatggagaagccctgaaccccacatttaggacattatgcgtgtgtcttaacaaatatttctaacttaatataatagtattactctatactttaataatatttctatatattttttataattgcgcgtctaaaattaagtgattattatcaacatatgtaaaaaaaatgacttttactaaatcaatttatttgcttttaatcaaactgaattctacaatattaaactatccaaaattaaggttggacaaaaatgttaatttgtggtaacttcagtaacttgtttcgtaggttgaggcattgtcctttacctttcctaccaagtcaagggaaaagatgaaaaaca

SEQ ID NO: 125493 - DNA, 355 bp, Glycine max
  unsure (1)..(355): unsure at all n locations
ngtcagcactatcatntccctcacgatatataagagagactacaaagttcatagattcctgagatcaatacacctcttncaacgattccaaatccgccaagggacactgacaacagaagagaagggagcaacctcgctagtggaatcacattctaaccatatactctgccatcccttatcaaatgccatctcaatagcaatcatggccgtaagcagctcatcattaagagaaaacgaaaccctaaagacttggcaaaaaaccaataatcaaacccaaagagtttctaaaaatacctccacaagccgcaagccccgaagaacccctgcaagctccatccgtgttacacttgatcca

SEQ ID NO: 125494 - DNA, 367 bp, Glycine max
  unsure (1)..(367): unsure at all n locations
agctntacttcactgcttcaagtagtgcactattctgcttcagaggaaaacacgttgtctantaagtactatcatgccaagaaaatactgtgtctgatgggtatggagtatcagaagattcatgcttgccccaatgattgcatattgacaggcatgaattcgaagaaatatccaaatgccttatgtgtggggcatcacggtaccaagtgaacgatgatgaggattgcaattctgatgaaaactctagaagggccctccaacgaaggtgttgtggtaacttcccatattccaaggtttaaacgactttttgctaatggagacgatgcaaaagaccttaccttgcatgcaaatgggacaaactctgatg

SEQ ID NO: 125495 - DNA, 364 bp, Glycine max
  unsure (1)..(364): unsure at all n locations
ngaccaatcccgacaccaacccggcatattctgtcagtgagatacctgtgatgtactagcacgcgagctctgcagtcaacagatataggaaaacaagaccacaaagcaaggaggcttgtggtggctggccagctgtgaaatttgtgtaatatgtggatagtggcctttggtcatcgattaccaaggcggggtaatcgattacaatgcttaaaaatgaagacagggggctaagatggtctctggtaatcgattaccaggcttgaaaacgaggtcaggaagctaaggaagcctctggtaatcgattaccaangagtgtaatcgattaccaggcttaaaaagggaactgggagttgatggaagcctc

SEQ ID NO: 125496 - DNA, 192 bp, Glycine max
  unsure (1)..(192): unsure at all n locations
atggcttattccctagaggatggggtctcccctcttctcttctnctttgccttccactgcatctccatggtggaaaatcaccattgaaggacctcattgtagctcaaagatccaacctccatagaagctccacangcaagcttacatcatctggtcctctagcttatcaactacaggaagtaaggggtcaat

SEQ ID NO: 125497 - DNA, 391 bp, Glycine max
  unsure (1)..(391): unsure at all n locations
actcagctctcaggaagctcctagctataatagaacatgtgatacttgttgtaacttgatgaatgagagtcttgtgagacacaacacaaagttcaacttctcttcctttttcttccttcaatttcgtgctccnccctctctctttctctccctctttcttttcctccattgaagcatcctctccaagcttcttatccaaggctcatcttggtggtgaagctccttcttccaggcttattccctagtggatggcgcctcctctctcctcttctcctttgtcttccgctgcatctccatggtggaaaatcaccattaaaggacctcaatgaagctncaagaatccagcctcatagaagccccacaagcaagcttncatcactcaacatccaca

SEQ ID NO: 125498 - DNA, 453 bp, Glycine max
  unsure (1)..(453): unsure at all n locations
tgcttgtgagagctaagcaagaattgtttgaatatttgagtacaatgaagntgtgagaaatatggctgggattgagcaatatttatagtagcatatttgtgggaagacatnnagtcgggtgggagaacttggactcaacacaagtcaaatcacatgcgtagggtcttaaaattntagtacaatttttttgtttacgttacagtaattcacgcggcagaaaccgtgtcatctttacctaccctagggagttccttcacggaaagtgaaccaatgaaatcttataaaaagtgtaatcattgaaggctttcgttatctctttttaataacatagataagggtctggtttggaaatgattatttgctttgggctgtggacatttagtgaattgatctttattatgtaaatagagtgcacgttgttaatgaataacagatgtcggttatgtaatttgg

SEQ ID NO: 125499 - DNA, 278 bp, Glycine max
gtttcaaccttgaatcaaagtttgcttatcttcatctctcctcttgcaaataattgccagactacccgctgaaaccttctgatctctttctcctttccaaagacaaagactaccactgattttttgtgctccttctccttttcaaaaattcaaaatgcatagtatgagatttcttttgttccccttcacaaagtttcaaaggactaaccgcctgagaacttttgtctaacacataggagggtacatcctttgtggtacaagtagagggtacatctact

SEQ ID NO: 125500 - DNA, 379 bp, Glycine max
  unsure (1)..(379): unsure at all n locations
agtgacatgtaaatctaaccctttagtcaatcgtaattccgtgttctatggaactgaaaaacggggttatctgctaggattgcannaggtcattaatatatttacacccctctgtgtgttatatttgtaatggtcaatttgtcttgcttacagatggtttaaaatgcttaaattntgtgtcaaatgtgcangaagagatgtttaagggggacagganagcaaaaaatacatactgcaatgtagatggagcagggatgctttcaaatgaaattatggttggnttttgatatctaaattgtccttttggaatatgattatatgatttccttttgagctcattcccctccttccaagcatgtatatgatgttgctntactat

SEQ ID NO: 125501 - DNA, 481 bp, Glycine max
  unsure (1)..(481): unsure at all n locations
gctctatcttctggctggcggatactatagaaatgctgattattcattgagtanggatctcgtcgacaggtgctcgcggtatgtatccatctatctaaggaatctcaatcgtgatatttcatcacatttataatttcttatacacgtaacatgtccatcaagtatcgaccaatgagtttctaatcgattactaagattgcttactttatcctttactcgggacttactttagaggagacaaatcctaattatacagcataatgantttgctttttcttnttgtggagaaaaaatatcacaaccttgtgttttctgctattgaggtggtatgtttggatctgaaggagaaggagggtgtgcttgtgttgtgtgagactctctagcataatgcccgaactatatttgtaatatgctgagtttcaatgtgtagctagttgccatcatgtgttggaatagaatctgacttctgtatgcattctct

SEQ ID NO: 125502 - DNA, 353 bp, Glycine max
  unsure (1)..(353): unsure at all n locations
actctttgtgctaccattgattcctttgaatgatagtagacctgctacatcctgtattgattagtcactaagattaatcttataaagaatacctttcctataagaggaaaagtgggtctattttgggttggacgacacatccatctttgctanaggaaacatcaagtcgattgcacataattgattatactaagtagatagggtgtgagccctttaacaaataatacattatcaatgggaggataaggataaatacttatttttccacccctattatcttccccttctgatttgaatgtacacttatcacttatcacacaaaaaaacatgttaaaagaataatttaataagac

SEQ ID NO: 125503 - DNA, 317 bp, Glycine max
  unsure (1)..(317): unsure at all n locations
cacccccctttttactaaatgcaccttcttctattttttttgggaattcttttttcgtaacgttacgaaactttacgaatttcgtaccgatacttantttccttccgccaggttacgaatacttacgggattatgtatatactctttttagctttcgaagaagttacgaaaacttacggatggcgcaaaacacctcttttcgatttccgtcacattacggaatntcacggattgcgcaagcctgctttcttttgatttctgacacgtctcgggacttcattcattgtgcaaccaaggatgccaagtgtcccgaagcg

SEQ ID NO: 125504 - DNA, 383 bp, Glycine max
  unsure (1)..(383): unsure at all n locations
ccccttangcacttctctctctttcgaatttgcttggaaaaattgtctccatgaagaaaattcaagccgagccgcttccgaaacgtttccgtaacgtttccgtgaggaatttcgcgaaggtttcgaccgttcttcaagattcatcgttcgctcttcgttttcttcagtcttcaacgggttagtacctcaaaccaagcttttcaattcattctatgtacccatggnggtccacatttcgattcatgtatttttattctcgttttcatttactatttatactcccttttgacgtgcttaagccatttatttaagtcatttctcgcttaatggtaaaataaaatataattccaccgattcgttgatttgtatcattcggtaatttt

SEQ ID NO: 125505 - DNA, 416 bp, Glycine max
  unsure (1)..(416): unsure at all n locations
tgactcaccataaaccttgacccagggtgagaatgtcaatccttaccctcggaagcaaacagaatagaggggaaatttccaatcaaagaanaagagaatggaaaattttcaatgaaagcaaaaaaagaaaagaaggaaaattccccaatcaaagagtgggataaagcataaaaagaaaagaaaggaaattcccaatcaaagaatgggagataagcaaaagaaaagaaagaaaattcccaatcaaagaatgggagaaagaaaataagagataagaaggaaagaaagcttctgatcaatgatcgaaagaaaacagaagaaatgtgcagagaggtctttggaccggacgatatctgaacaatacagaattgtcaccaaatgaacaaaanaggaatgagaggaaaccacgacctaaaatg

SEQ ID NO: 125506 - DNA, 303 bp, Glycine max
  unsure (1)..(303): unsure at all n locations
accacatataaaggtcaagatgaaggccatatgaaaatagaccgagatctgtagatgaggacaatgtcacaggacataagctaaagaggaaattggcttgagttacatgtggaaggtgtggcctaaccaatcataacattaggacgctttatanaatatcggagtttctgttatgccaacaaaatatgttgcaccatcaacttccatgaggatgaccacctattatctcaagatgaacaagcttataatgaggctgaagaagctgctgctcatgttcacaagattctgtggagataatttatc

SEQ ID NO: 125507 - DNA, 196 bp, Glycine max
gattaaaggttgcctctgtagtgttttgacacttataaatagaacggcattattatattcatttattatcttttgaaagcgaaatcccagtccaatagatttgtaatgtattaatgtataaagtgagtttgtaaaatattggaatgcgcaccaccatcaacatcttttgacttcttgcccggcgggatcttgagga

SEQ ID NO: 125508 - DNA, 328 bp, Glycine max
  unsure (1)..(328): unsure at all n locations
attgatatcattagtcaacttaattttcaatattaccaaaaggtacctttagagtcctatactttgacaaatattggtcaatntcgtccttaataatggtattactagttaatttaaatcttgaatattatatatatatatatatatatatatatatatatatattccttaacttctaacaatggctacccaattcaaggtaggaattataatacttttaaaaagtaaagacaaattatgatagtgctattaaatgatttactcgcattaaagaccaatactgtgattaatttaagataaatatatttattctaattattatttaacc

SEQ ID NO: 125509 - DNA, 305 bp, Glycine max
  unsure (1)..(305): unsure at all n locations
tgcagcttgagcaattcaacgacattacttttactcgatgtcgaatgaatccgtatatatcgagatgtcaaattgaaactgaagctctgagcaattcaaacgacaattactttttactcggatgtgcgaatgaatcccgtaatatatcgagatgctcgaaatcgaaaacagaagctcatagcaattgctaaccacaataacttttaactccgatgtccgattgagtcccgtaatatatcgagactctcgaaattgcaaacatatgctctgagaaaattcaaacgacaattactttntactcggat

SEQ ID NO: 125510 - DNA, 415 bp, Glycine max
  unsure (1)..(415): unsure at all n locations
ttgatctcgctggcaatcaacacatactttactcgatgtcttatgaaccatatttcgagatgctgaattgaaacagaagctcgtagcatatgcaaacctcaataacttttactccgatatccgattgagtcccgtaatatatcgagaagcttganattgaaaacagaagctctgagcaaattcaaacgacaaaaaattttaactcggatgtccgaatgtgtcccgtagtatatcgagaggcatcgaattgaaaacgatatatcgtatcaaattcaaacaacaataacattttacacggatgtctgattgagtcccataatatatcgagacgctcgtatgtggaaacagaagctttgtggaatattcaaaccgcaataacttttactcggatgtctgattgagcctgaataaatcg

SEQ ID NO: 125511 - DNA, 447 bp, Glycine max
  unsure (1)..(447): unsure at all n locations
agcttcatactgagcatgattgattggaattgttgagtgcatgttggactaatggacatttgagtatgattatgatatttgttaatgttttcttactattcatgatcatttgattttcgtgttgattccttttataataaactcacctctacaatttttgtaccgtgtggttggtacctgtgataattgcgaaccttcgttcgtgggaccagatggacaacagtagattacatggagtgagattcttttgttggagccgccaagtcgacgtgatggcgttgggattattttgggagacaagtgngttttgttaatcaactccttcgtagctggttctctaatggctttgaattgaggatgtaaatcacatatttaattatatgtatgaactaatttacttttcgtcatgtgaatgatgtgtattgaagtaatatatctatatatata

SEQ ID NO: 125512 - DNA, 467 bp, Glycine max
  unsure (1)..(467): unsure at all n locations
actcagctgcttctcaatctcccnncttttgatgatgacaaccctaatatctagaaacacaacacattctttttcctagtcgatcactcacttaattctccatattctccccctntgtttttgagtttaagcttcacttgaaattaagttatttaattatatgagttcttgatttaatccctattttctctccccctttggcatcaacaaaaagccaaagtgtgtaagaaatataaaacatacataaatgattataaagcataataccaaatgtaagcacatatcactagacatatgtcatcaaaataattaagtttaaaactcataacaattaagagtaagtaaatataatcatgttaagttatactaatcaaatattaaaagaaatactaagtattcaaatgtcataaaaatataaatcatttggtaagtcactagcatctagcagtcctaattctcttctaatg

SEQ ID NO: 125513 - DNA, 406 bp, Glycine max
  unsure (1)..(406): unsure at all n locations
agctnggtgcatatgatctatatgctccagcttgaggnggagtgttgaatatctnttgggtttctgaattagatttgtatgcatcattactaaatattnnttccttggtttagaagtcaacagacatagactaggctaggctatcctttccccctttctctctcttatgctttgtactctataaatcgtaagctgaaacatgaataccatatgtcctgtgagtgaaatttcctcacacatttaaatntaagtttacaaaagcctactgttaggttgctggaccactgattaaagtgccctacaaaatctttctccattgatctaagccatgtccagactaggaataatgcatcatccatcaactngcttccattgaatgtttcattggagaaaatgatcctattcc

SEQ ID NO: 125514 - DNA, 466 bp, Glycine max
  unsure (1)..(466): unsure at all n locations
ntccctctntgaacaaatacccctcagccaaatagaatccatcttgtggcctttccacaactctcataaatgggagagaaatgttcatctaaagcatacaagtccctaatattatcaaatcctaaaatntgagctcctagggagcaaaacaatgtgtgtctcctagagagggcatcagctaccacatttgtttttccctttttgtatttgataacatatggaaatngctctaggtactctacccattttgcatgcctctttgttaacttgctttgccctctaatgtacttaagtgattgatgatcactatgaatgacaaattccttggaaacaaggtaatgttcccaagtntggagggctcttattaaggcataaagctctntatcatangtggngtagttgagggtggcactatgaaagttttactaaaatatgcaatagggtgcccaccttgtaacaatacagc

SEQ ID NO: 125515 - DNA, 254 bp, Glycine max
  unsure (1)..(254): unsure at all n locations
agctntgttggatatagttgttcggtgaatgttaaaattggtgatttctatcgtagttgctcttcttattcccttggaggtacgtatnttatangtttttttggtttttnnttttttttgtgttcatatgttaacaaaaaagcagtaaaatgccgagcaaggttattcattaaaaaattcttcctgaagttgatgctacttatttcgaaagagcttttctgtaataaggtgtgtcaacttccggaataagtttc

SEQ ID NO: 125516 - DNA, 445 bp, Glycine max
  unsure (1)..(445): unsure at all n locations
tctcatatntatagtcatcttcactatgtatcntgtgnctctaaatgatcttctnttgtattttagctggcatttgaagagggtgtccattggtgatatcacaaaactaaccgttgcagaaaaagcaaagattaatgaatatttgagttgcagagagacantttgtgcagcagcaacaacaaatgggtgttntgtcacgcatgtggaacttggcgctaatgtttttcatttcttgctgctccagcaatcaataattggataataacgtgaaagaggattcaagttcagcggtttcaacatggatatatgagaacacggtaacctaatttaattgtctntatgcttactggtttatattggctagtcaagtttggtttagaatattaattggttcaatgccatagtgagcattgaaatctttgacattctctgaccagtgttactg

SEQ ID NO: 125517 - DNA, 386 bp, Glycine max
  unsure (1)..(386): unsure at all n locations
ctaagctctcaggaagtttcttaaaatgctctaaggagcttctttctataatagagcatgtgaacacttattgaactttgatgaatgagagtctggtgagacatacttcaaagntccacttctcttcctctttattccttcaatttcgtgctcccccctctctctttctctccctctttcttttcctccattgaagcatccttccaagcttcttatccaaggctcatcttggtggtgaagctccttcttccatggcttattccctagtggatggcgcctnctctcacctcttctcctttgtttccgctggcatctcatggtggaaaattaccattaaaggacctcattggagctcaaaagatacagactcatagaaaagcccacag

SEQ ID NO: 125518 - DNA, 365 bp, Glycine max
  unsure (1)..(365): unsure at all n locations
agcttatgctgcanatatttacaatagacctcctcaacctcagcagcaaaatcaaccacagcagaacaattatgacctttccagcaacagatacaaccctggatggaggaatcaccctaacctcagatggtctagccctcagcaacaacagcagcctgctccttccttccaaaatgttgctggcccaagcagaccatacattcctccaccaatccaacaacagcaacaaccccagaaacaaccaacagttaaggcccctccacaacgttccctcgaagaacttgtgaggcaaatgactatgcagaacatgcagtttcagcaagagaccagagcctncattcagagcttaaccaatcagatgggac

SEQ ID NO: 125519 - DNA, 453 bp, Glycine max
  unsure (1)..(453): unsure at all n locations
tagcaccccacctgacgtncccaagtcttcttgaccccgcgacatatctncaggtaccactctgtggtcaacgaataaaagcaggaagtttcacccttctacactttctcaactcaagcttgtaggaatatggggtacccatcacatgtggtactaggtggcggtcgggcgatggtgcacaacaagttttccacatncacaaagcgcacataaacccaccatccnctgttgcccacctncatctgagctcacgtactcccacgtagcccatatcctcgtttctctcaacaccgggtccccatcaatcctcccaagcttccacaacatccaagcaaaacaacattcaaacagcacaagctatcacagccaagtaaaacagggcaaaggcagaaaactctgcccaaaacaccaaccaaatcacagcttttctcacttaaagaccccagtaacaat

SEQ ID NO: 125520 - DNA, 425 bp, Glycine max
  unsure (1)..(425): unsure at all n locations
acatacattttttttctccttatttaatatgtagggaaaaatnttgtgcaaaataattatattgatgtggaataaagtttcctttatggtacttcatattctgtcccaaaatgattattaataatttttgtgaattgttgtatgtcttgataggaagatttcagggcaatccttntaatggctcaataccatcatcattttcanatttgagttctttaacagaattgtgagtatcaccattagtttatttggttatcgttgacttatgaaagctaacatatcatgtatgaaataaatgtngagaatcagggctatctaatgggagttctcattggaattttaggaattganattttgacatcttgcaggcctcactttgcaatgatcatggtacactatctgttattgaatattccttgtttatc

SEQ ID NO: 125521 - DNA, 424 bp, Glycine max
  unsure (1)..(424): unsure at all n locations
atgatcctatgcataccgacgtgagaaagagtgccttagaaaggaggggaagaagcatatgtcggccgcaagtgttgcaagtgaaaggggttcccttgtgtcacatcacatcaacaaaagctttgtcagcgcgggttagatgtgcaaagggtgggtcgccatgatacatgaagagaaccctcaagagcaaccaaattgggtgtggccgtaccctcctgagtttgaatnggggaactggcgaattgtcaaacaacccagatattttgtggcagcacaatgtaattcgttagtcctaaccctattgctaggcctanngcttagggttctctccctggttgggcttgtcttttgtaccacaaataataaatatcaatctttcttcatttgttgactntatccattctattcttctcatgttattttg

SEQ ID NO: 125522 - DNA, 465 bp, Glycine max
  unsure (1)..(465): unsure at all n locations
ctggcatgctcctcgcttaatcgagatatcttctgtaagatttcatcttctctntncttgagcgggctagagcagcctatacctcacttgagtgaatctaccttgtaaaattgacctatttctctataaaaactcacaaaatcatattaaaaacttcttaaatcataattcctatctaaaatatattaaaaactgaaaacataatgaatntcattcaaaacaaggcctaaagtatactaaagtatggaataaacatttcaaattgcatatganaatactatataattgatgtttatcaatggccaatccctcaatgcttttctctagacacccatgatcatgcatagtgatgagtagttcacccgttatgtgcagtttctaaggtctgcaccacagcctataatgctngtagagaaacttcgtcttacttggggtcaattcgtcaagaatgcacagggcattgac

SEQ ID NO: 125523 - DNA, 434 bp, Glycine max
gaaagttgaatttacattaaaagaataatctgagtcaaaacgagcaaagtgttggaacgctgtcaatttaattggacaaaagaatcttgagcaaattgagtgaatcttagcttttctaagttagcaagtttcattgtggttgagcttattgtgtaaacactctttgagtgattagaatacatttcctattaaacatttattggttgtgaaagccaggaatggcgtagagaaaataaaatacttgagttctaatcttggagggattaggggcagtgtcaagagtggcctaaagaatatttgttgtagccagaagcggcatatagaatacttggttgtaataagagatattattaatggaacacttccacttttattaatggcgtttaatctcaggggggagataaaggtagtgtcattagtgacctatagagtac

SEQ ID NO: 125524 - DNA, 423 bp, Glycine max
  unsure (1)..(423): unsure at all n locations
aagcatctacaagaatcaaccttcgctattgtgcaagcaatcaatgggggcaaaacacaccaaattattatgatgatggatggctcaaattctcacaaagggtaactcatcactttcaatatgagctttcaaaactatcatgacatgtagaggaaaatcaaggatttcaaatcacaaaatgtcaagaaacttttattttcaaaacaattacccatttcttgaacatatcctataattcacagaanaacatgcaaagtcatacacgcacacagaattgtacccaaatattaaactagaaacccaacgaaactaacaacattaacaaattaacataactaacaaattaacaaaaccgacaaaactagcataaccaaagaacactctccccatacttaaacaacacattgtcctcaatgtagcaca

SEQ ID NO: 125525 - DNA, 446 bp, Glycine max
  unsure (1)..(446): unsure at all n locations
agcttatccacacaactcatgtgcatngatagttcatgagtgtgcagcggtctccattntgcctgaaaatacgaatagaagagcttacgcataaataagaaagtgggcactacgagaaatagatgcagagtcacagacttacggttgagtatttttccaagttaggagtaacattctgtttcaatattgctctttctcccgggttccaaaagctgttcaatctctgcaataatgaaaatatcttcttatagtagcagattgttgtccaggatcaaaaaaattcttcaatctactcgtgaaacttctttcagcacatttctattggttggacatatattccacaataaggagattgttcaaccttaanaccatttgaaagtacaactgcgacactcaagatggaaaaatgaaagcaatgtttataactgattgatcattaactggta

SEQ ID NO: 125526 - DNA, 346 bp, Glycine max
  unsure (1)..(346): unsure at all n locations
tgtgccagtatgccgccatgaacaacactcatggtgtntacatttatntatgcgaaagaaggaaaaaggcggcgaatctacaagaaggagatagagggaggaggggggatgttctgccttataacaacatagggatgggtacctcaaaaaataagcatgatgagttgagacatgatagtcgtgatggcgaacataaatggtgcatggagaaaggacttgtaccccttatacaaattttctaataaaaaaaaatacctatcatgctatcaacagatattcacatgaatcacatgtggtttctgggtggcaataatttatgatttgaccttcagacacttttaaaatt

SEQ ID NO: 125527 - DNA, 360 bp, Glycine max
  unsure (1)..(360): unsure at all n locations
gcaaacatattcttttcatgtaagcttgttgtgaatctttgctaacattaagctctaaaactcttgtataccttgagagaaaagagtaaagtgccgagtgatttatccgtctataagacgatcataacttagtttgtgttaaaacttccaacanatcttgttgatttgttacagctagcaatgacttggtagaacaaagaatattgggtttaagtcaagcttgaggtaaagcttgcatgtgtaagagctagaagtgagagtgaaaaatacttgtaactttgataagttagtgaaaacttgttgggttgcctagaactggacatagtctcgagnttgagatgaaccaatataatactatgt

SEQ ID NO: 125528 - DNA, 291 bp, Glycine max
aatatcttcagactgatcaacacatgcacagtggccaaggatgcatgggagatcctgaaaacctctcatgaaggaacctccaaagtgaagatgttcagaatgcagctggtggctacaaaattcgaaaatctgaagatgaaggaggaagaatgtattcatgacttccacatgaacattcttgaaattgccaatgcctgcactgccttgggagataggatgacagacgataagctggtgagaaagatcctcagatccttgcctaagagatttgacatgaagggcacttgcata

SEQ ID NO: 125529 - DNA, 458 bp, Glycine max
  unsure (1)..(458): unsure at all n locations
tactcagctnggatatttgtaatggtttcttactaattggggtattttgatttggtattaattcttttataataaactcaccctcacaatttttgtaccgtgtggttggtacctgtgatgatcgcgaaccttggttcgtgggagaataatgacaactgttgagtatgagaagcgatattcttttgtggagctgccaagccgacatgatgacgttgggattattttggtagagagttgtgntttgttaatcaactcctccatagctggttccatgtttctttttggtgaattaaagacgtaaatcacaaatntaattatatgtatgnaacatattactttcccgtatgtgaatggtgtgtatngagtactatccctatatatatgtgtattcacttaagtaatggtgtattggttggtgaatgcatattanaaaaaanattacattcatttttcataag

SEQ ID NO: 125530 - DNA, 396 bp, Glycine max
agcgtcatccgcttatccctctgtaagactattcctatactaaacaacattattgtaacaacataattaaaaccaaaacttaatccgcagatccctcttataagactaaagttcaatcctgcttcaatcaagttgtaagggcatagtacatttcccaatgctaaagtcacctaactatgcacacaaatggatgatcagaccaaaagcatacaaacattaagcattgaaggaagcattgaacacaaacaacataatcaattagatattaggtaattacatcaactgttcattagaaatcctcaactagggttgttagccagccattacaagagaaaccctaacaataataagcttacaaaacctatgtatctctgcaaagctgctcatcttgatgcc

SEQ ID NO: 125531 - DNA, 471 bp, Glycine max
  unsure (1)..(471): unsure at all n locations
gcttgctgagcttcatggagaatgattattaagaanatggtctcgtgagggagcagagagctgtctgcaaaagtgtgggggctgagtgaagagagagaaaagctntttggttntaaataaaagggttttctctctttctattattttattcaagctctgccacatgtccctatttgagtggagcaaaagggcccactttccctttntactgtgacccacactcagccacaaaagtgagaaaaatctgacctttgaaacgctaaaatcctgcctcggtttgcgtgccatttctctggttccagtttctcgcgtttctctgcgtccgtcggggccagttttacaaagcaagcaatatatatatcacaacgctcagaatataaccccgagcgtggttcagaggttggcttcgttaaattctaagtcgcacgcanaacgatgattnttaaactaattacttaagaattacccata

SEQ ID NO: 125532 - DNA, 401 bp, Glycine max
  unsure (1)..(401): unsure at all n locations
agcttgttganaggatcctgaattaaacttcttgatacaagtttatgactggtacaaggttttccaacgacnttttttctagttacttgttgattttgacagaaaaaattaacataaaaatcttagctatagtagttatcattgactaagctcttaaggtagtcatgtttgaaagcaagttcatcattnttcctttgaaaattttacgtacggtcaacctatgtggtctaaatgcccatttcttttaaagtttcatcaacaaatctaacataacaggtatgttgcaagcaatgactatgaaaatcatttgaaaaaattaattatgcatacattaaagggaagcagtgaacgacagggtacacagaaaataaagaaactcataccttcaactgggattcttc

SEQ ID NO: 125533 - DNA, 478 bp, Glycine max
  unsure (1)..(478): unsure at all n locations
tcttttggaccttgagcaggcaactaactcctctttaaaaccatgctatgtgccgcgactggtccctntccttccttcgcaactggagttcattattgctaccccatagggctccgcgaaatttgttccggccatactcttccttgcgagccctcttggtctctcgttcaagggctcttgcggtaattgcattctcttcccgtaacccggcacactccttccgaacgtgtgtagcggccaacttgaacttctccttggcaagntttgcctttcctaactctcttttgagagtttggacttcttcgtcctcttccggtgcttcaaaactctcttcgctgacgacttttaacttggcgagccaatctaaacctcgtatatgaactttcatccattcgtggtacccaccaatgatgccattacgaatgcctctaagctcttgatctttccttaacggnggttnccatgccttatggattct

SEQ ID NO: 125534 - DNA, 236 bp, Glycine max
  unsure (1)..(236): unsure at all n locations
atgcagctngagtggtcttatcaattcaacctagttgtgtatatacccaaattctaaaatgatatcaaattctattctagatgtattattacgccacctgcattgtcatgctccatacccgtaaccctaggcatgataaagtgtgctataaagtgattgagacattggcttttttaagcttgagaccctacantgtctaaagacatatgattatgtcattccttataaagttttgg

SEQ ID NO: 125535 - DNA, 251 bp, Glycine max
atcaatctaagctgatcttgagaatggtattcgggaaaacgaatacctcgacaaacagctacacgacaatttaccttatttcaacaagtcattgggtaccaccatttctaacagtcaattaccactcctcaagtttttgcgttgcaaagctcctataggaacacatatctatcttgttcttattggtaaatgattgaagggagatttatcctcgtttgtccatcgctgatatacttgtgctccactttatt

SEQ ID NO: 125536 - DNA, 438 bp, Glycine max
  unsure (1)..(438): unsure at all n locations
agcttattatagtaagtatacaaaataaacatttagtggtttaatgattcatgaataattttcacaaataaattntggaagtgtgcattattttcaacaaccatgcaacccaccataatttggattgtttcttgtctttccttgatgctttcatccatgatatttgagtccaagtggtatttttttccaatcaaagcaaagcacaaccaagtaccaatgaccaatgttgccatatactagaatgtaatctacaatacatgcaaagcaaaaaaagtatgtgtcattcaataaccttacattcaaatattgatgtcaaaaacataaaagaatggatgcacatgaattaatattgtgtatagccaatttaatttttcatgtaaacgcaataaatcacggtcgtacaacanagttgattgtcatgttcaacttataatcggc

SEQ ID NO: 125537 - DNA, 325 bp, Glycine max
  unsure (1)..(325): unsure at all n locations
ntgaatgagactgaagaagctgctgctcatgttcaacagatccggtggagattaatntatctcagcctcatttgtcacaagatagtgacatggagttgatggtaaatatttgtcacaacaaagtagttttatctcaacctaatttgttgcagcactccattnttagatattacaattattcatgtntggcatttacatgtaggtccctgcaactatggttccaccaatagcaaggaataagctaaccataacaagagccaaacaaaggaagggtgctgataaagatgatgcagaaaactgaagaagcatnntttgttgcattttg

SEQ ID NO: 125538 - DNA, 429 bp, Glycine max
taagctcgtatagattgctcgcagatgtgtgatgttatagtcgagggagtcgctgtatactaagatatcgtcgaataatacggtggcgaattgactcaggaaggggccaaggaggttgttcatggcggactggaaggttgatggggcgttgcacagcccgaagggcatcacgaggtactcgtagtgcccgtggtgtgtttggaacgctgtcttctcgacatcggcttcgtgcatcggaatctggtgaaagccttgcctgaggtccagtttggagaaccatgaggcgtggcctaactcatccagcaactcatctattgtcaggatagggaacctgtcgcggatggtaaccgaatttaatgcgcgatggtctgcacagagtctccatgttccatctttcttcttgaccagaagaacgggagacgagtatgg

SEQ ID NO: 125539 - DNA, 398 bp, Glycine max
  unsure (1)..(398): unsure at all n locations
gatgtactctcatcttttagagaaactatatgaagagaggtctacaaattagtaatggagaactcattttaacttatggagaaactcatctaattatnnttcttcttggttttttctcttagaagtgcttctaaagatgcttacccanacaggcccagaatcagcattagtatgaaagcaggtgcctatttttaggtagaactataattgatctgaaatgatagttgcaacctgcactcaatgtgcaactcacataattcactctaaggatngctcatgactgacattgttgaatgaaagagagagaaatatagagagagaanaatggacaatggtcacttgatgtatgtgagttangtgaactttttcatgtgtaaataaaactgttgatgattaaa

SEQ ID NO: 125540 - DNA, 155 bp, Glycine max
aatttgaccagagcttccgttggtcaatttcgaatatcactatatgtgattgccctaaattggacattcgagtgaaagttatgaccatctgaatttcttcagagctttcgttggtccaatctgagcgtcttgatatgtgattcgcctgaatcgga

SEQ ID NO: 125541 - DNA, 368 bp, Glycine max
  unsure (1)..(368): unsure at all n locations
tcatcccttgagaggatgttgttgtcttggcgatctttatagacattcctcgattatanggcagaaccaagctcatgcttatataagaaggtgcatcacgtgaagtagaaatatggcagttaccgtcttgcaaaactggggcagaagatgaattgactcacatcactgcttcgcctactgacaaacatatctaggagagatgatgtacttgtttacttcagttacaccttgacgaagatgtcatggaccattgtgaaaatataaattgattcaaccccatatccttgcgaaaagatcgcactcttcaactgtacatcaatcgcatacatccatgcttttcattggttgcattgctcattgccattctt

SEQ ID NO: 125542 - DNA, 391 bp, Glycine max
catgatgcagatgggtttgtttctacctcatgcactcctctaatgactatggcatcatttctggccgctaactgctgagagttggaggccatcttctcaattaaatttctggcttcaacaagagtcatgtctccaagggctccaccactagcaacatctatcatacttctctccatattactgagtccttcataaaaatattggagaagaaagctgtctgaaatctgatggtgagggcaactggcacatagtttcttaaatcgctcccagtactcatacaggctctttccactgagctgtctaatacctgagatatcttttctgatggttgtggtcctggaagcacggaaattttttctagaatactctcttatagtcatccagctcgtga

SEQ ID NO: 125543 - DNA, 450 bp, Glycine max
  unsure (1)..(450): unsure at all n locations
cgtaggttagtgtaccagatgactgctgcccagccaactatttgaagaatgcataatacttcgtcctgaatataaccattttcacagtacattttaggtgattcttaagacaagtcatccctttgtacctatcgaagtcaggtaccttgaacttcggagggatgacaacgtccggcaccaggcacaggtcggtcatgtctgcgaacgaataatcgtcgaatccttcaacaacccttagtctctcttcaatgagatcgagcttcctctttccttccgctgtcgggggcagccctcccacggacagaaacaactgctgcgttggggtggttcgaggctctcccctgatgttgggtngaggtagtcagttgggcgccgaccctttatcggaaacggngagtatgagtcgacgtctccctgagcgtgctctcgaggattcttatggaccccgtc

SEQ ID NO: 125544 - DNA, 347 bp, Glycine max
  unsure (1)..(347): unsure at all n locations
ctatcgaccaccatacagatctctggccttctgtgcaacaacctggagcaattgagcagcctgaagcttatgttgcaaatatttacaataaacctctcacctcagcagcaaatcagccacaacagaacaattatgacctctccgacaacaggtacaatcccgggtggaggaatcatcccaaccttagatggtggagtccttcacaacagcagcaacaacaaccttattntcagaatgctgttggcccaagcagaacatatcgttcttcataaatccgcagcaacaaccacaacagtatcagcagcatcaacaacaggagcagctacaacaggcccataaactacaaa

SEQ ID NO: 125545 - DNA, 325 bp, Glycine max
  unsure (1)..(325): unsure at all n locations
cacctagaacgggaaattatcaacannaccagtaagtacacttctcaatcaacatatatatacctaaccatttaaaattatcaaacacagaaaatgtagatcttgcaattctactacttattccaacttgcaaagtaattagaaatttatgagaaatctccttggactgtagactgtgtagtatgccaacaaaatattcaaaaacatcacctatacaatangatgcacttccttgctatataggttcctctaggcacctaatngaagtacccaattgaactttatataccttctgcaggatgatgtaagggtattatcaatactg

SEQ ID NO: 125546 - DNA, 292 bp, Glycine max
  unsure (1)..(292): unsure at all n locations
agtattcacttgggtaatccctcattaaaacattaatgggtttgaatcacatcaaagagcgtattttgaaatgccaatcacaccattgtgatcggtgttcaacgaatgttacaanaatgaagttgtcataccctaatttcgttcaagggccattgtttggtggcatgcaacctttgcttgaccactttgaggtacttaacacccatcggtaggcaatccgtgaagttccgcgacatgtcgggagtcgaaaggaagcattgttgcgcaatcccgtaagttctataacattcta

SEQ ID NO: 125547 - DNA, 494 bp, Glycine max
  unsure (1)..(494): unsure at all n locations
tactcagctgagtcngaatctgatctgattcttgaactngaatcttgatacttgattctngattcttgaattcactctcctcttaatcctngaagtgtacttgattcaatcttgaactcattctttgattcttgatatcatcatctttgttatcatgaagtgttcttgactnttgagctntttttcaccatctntgttatcatcaaaactctttgaatcaatcttgattcatcatgaagcttgcttctacaatctccccccttttgataatgacaacttctgaaatcaagaaacacacacacacattntttcatagtcgatcactcacataaatttccattctccccctttgtttttgaaattatgcttcacttaaaattaagttaattactcatgtgagttcttgatttaatccctatttctctccccctttggcatcaacaaaaagtcaaagtgcgtaacaagtatgaaacatacaaatacaactaatcatt

SEQ ID NO: 125548 - DNA, 335 bp, Glycine max
  unsure (1)..(335): unsure at all n locations
atcttggaatttgctttaatgcatccagcagaggtatatttacctctacttcctaaatgttccaagatctctttctctaccacttccatttatttgttgggaactactcttggaggaaatgggagagggatatgctgcttctgaaaatcaaaattacctgttgaagaatcacctgcacagaaattgttaggtaacttactctttaaatttttgtcatcatcttnttctggagtagagtgaagttgggcaggtgcatttgcggatgaagaaggtgctacttggtgaggtccttgacactactttcctaacctcaatgaaatggcactcacattttt

SEQ ID NO: 125549 - DNA, 397 bp, Glycine max
  unsure (1)..(397): unsure at all n locations
ntgcagcagatgccactctactcaaagttttngaaagatatgttgacaaggaagacacatatattcaccaggagaatatcgttgtggaaggcagctgcagtgctgtgatacaaaagatccttccaccaaaacacaaggaccctggaagtgtgactcttccttgttcaataggtgaagtcacagtgggaaaggctctcattgacttgggagccagtatcaacttagtgccactcttcatgtgtagaagggtgggagagttggaaatcatgcccaccagaatgactntacaacttgctgatcgatccatcacaaggccttacggggtaattgaagacattctgataagagttaagcagatggtctttctagctgacttcgtggtcatggatgtggagga

SEQ ID NO: 125550 - DNA, 305 bp, Glycine max
  unsure (1)..(305): unsure at all n locations
aaactgggggcaaataaagatggtgacgatgagggagaaacccatgctgtgactgccattcctgtaccggcagtttcccaccaccttctcttactacgccattatccacaaggccatccctaaatcaaccacaaagtctgtctaccgcactttccataacgaacaccacctttagcataaaccanaaacaccaaccaagaaatgaattttgtagcgaaaaagcctgtagaattcaccccaattccagtgtcctatgctgactngctcccatgtctacttgataattcaatggtagccataaccct

SEQ ID NO: 125551 - DNA, 418 bp, Glycine max
  unsure (1)..(418): unsure at all n locations
ntgagaaaacatgtgatccttggcatcatcaanacattcatcttgatcctttgtcataatctccctctttttgatgatgacaatccctgaaatcaagacaagctatatacaagatgatagcacgttcacacaacccttactccccctatcttttggcatgtatgcctaactntaaggaatngatttaatgatagatttctaacccaagttctctccccctttggcaacatcaaaaagaactaatcaaaacaatcaatatctaaacagagccaaacattaaaccaaaataagtccatacattgtcataaccaaccaaacaaagtcgagaaatataatagaagtacaagattatgataactagagcaacananagcgaaatacacggcgataaaacaaagtactaataatacttaatcat

SEQ ID NO: 125552 - DNA, 393 bp, Glycine max
  unsure (1)..(393): unsure at all n locations
cacgtaccttgcattgatgtcggactccaaccaaggatgctccacctcgcagcagtcatgaaccccatcgacagtcgtgaaccctatcaatggcgatggtgaggaagagatggcggtgatatgtcgcagacggcggtcacaggtagcaaacaaagatgatatgtcttgcgggtgaaagggagaagaggaaggctttgtttgtgatactaagcgtgcgaagggaaaaagggtttcggattttaatttatgtataacacaacatcggttttctagaaaaccgatgttaacctcaattggttaacattggttntatacanaaccagtgttaacaatatcatgttaacattgatttattaaaaccgatgtaaccaattcgttacatctatttgaaaa

SEQ ID NO: 125553 - DNA, 460 bp, Glycine max
  unsure (1)..(460): unsure at all n locations
tatctcatgtgagacacgctaatatcattatttgcaaacaattcacagttacttgcgccaacctaaagtggaattaaacaacgaattacttaaagtgcataaaanagttaaataatgctcaaaataggcaatcctagcttaaatcttaccctttccttgatgtcacccaaagtcggctagtacaacttatagaattcctctctgaatgcaaccacaaacctaaataaagtttagaaaccaacaagaataagacaattagaatctgtgtgatttggtataaattaagggacaacaagatacatgtactatattataagtatttcactcttaaaggactaaagacgaattattgaccataattgatatattagcatttgtatatcactaactcgctcttacttagtatgtctctcaacttgcaatacaaattcatgcaactaacatttgataggtttaaata

SEQ ID NO: 125554 - DNA, 376 bp, Glycine max
tgagatggaaatagaaaataagaacacccactaatctactagtataactacttataaaagcagtcaagtcaaattttatcaaacaagcttcaccaaagaataacaagaatgacatatagttcctctttgagaagtccaccacccccacccccaagaaacacatacacaaataaagaccactttcctatcttaacaagtgttttagcttaaaattgcacttcatgtgattaccaaagtggaggtagtgatgcctaaatgcattcaacacttaagagtatgacaaaagaaaagaagcaactggcaattggggagggaaaaagtagcagcacataagatcgcagccctttctcatatatgaaaatcatcatgcactatc

SEQ ID NO: 125555 - DNA, 429 bp, Glycine max
  unsure (1)..(429): unsure at all n locations
ctcagctgaccagccaatagggtgatttcttctttctntggctttgttcatctaatacaataatattacgaatccataatcaattccattcaatcatatagtgtactaaataaaaactaacccgaaaaaagcataaagcgcgactntcagtcaatgaaatttgcgttagaccaatgaaatttgagtgaatgaaatgggtgattgaatntgcgtcactcatttgtagatcatggttaggactagaggaataggtcgtgccttatgtcaggtcacaggcagaggtgtgggcagaggagatcgtgatgattccgatgatgctccgtagcgtcgacggcctactgcatccgcatggaggcagcgagtcactgtgactgcggatcacgtcgatgagccagtcatccctgcgccagatgttcacgatgacccgat

SEQ ID NO: 125556 - DNA, 390 bp, Glycine max
  unsure (1)..(390): unsure at all n locations
agcttgataaagcttatagagccctgtgctatactattggaatggctgctatgagttctgttgttcgccttgatggaactggtacattctttttattctgtgtgataaaatctgatccttcttcatggttggttatttgaatntagattaacttacatactaagtacctacaactacgaggcctaatgttacttgattgctcctatgttggattcattaccaatctacaattgagaaaagttactcatcaactgtggggctgcagcactgtattctgacagaatagctctttgtctttcttcttgatagactatgatagttctttgttattactcctgacatgtacatatagggaagaattgctcccgatatgatgtttttgtggctaaa

SEQ ID NO: 125557 - DNA, 359 bp, Glycine max
tactgcccttaactcgctgcgtcactgggaaaatctatatcttttttgacaagtctcactgctcgtgtgcttgatttaagtccattccaaagttgtcctacaattataatagtacctatgttcttacacatgagtattgtatatactacactgtgactaaatattaattctacttacatgatatattgacacatcatcagctcctaatcgcatgatgatcattaaattagcaataattctactatactctaagctatattatgcggtctaggcgtgcaatttttatagtcattagtaattattttagataatgatatctcttagtagtcttaaaaggagcggtattgaaaatcatgcta

SEQ ID NO: 125558 - DNA, 297 bp, Glycine max
  unsure (1)..(297): unsure at all n locations
agagtgatgcctttgttaaagtacatcttgtaaactacttccaatgtttccttccaagaatggcccgangaagcttgcctcaaaaggtccatgaaggataatggcggccgaagggactanttccgctcctgagtatgacagtcaccgctttaggagcgctgtacactatcagcgcttcgaggccatcaagggatggtcgtttcttccggagcgacgcgtccagctcanggacgacgagtatactgatttctatgaggagatatggcgccggcggtggacattactggntacccccat

SEQ ID NO: 125559 - DNA, 411 bp, Glycine max
  unsure (1)..(411): unsure at all n locations
gctagcgcaacataacaacatgtgctggtctagcgaacacagcacatcgagcgcatagcataatcagacaacaaacaacaacaaacattggcactntaatcaactaacacaaatattcatagagtcatgagcataaccaanatcaacctaacatcaacacacaaaccaactaacacaattattaaacaagttacagaaaagaggagaaagacacaaaccaactaacacaattattaaacaagttacaaaaaagaggagaaaaagggtagaaatcctgggttgtctcccactaagcggttctttaatgtcattagcttaacgggtcanatgacttcaagacggcatgaaggtcacatagaacacatattccttacattttcacttcttagctagagactccatgaaaatcat

SEQ ID NO: 125560 - DNA, 417 bp, Glycine max
  unsure (1)..(417): unsure at all n locations
aagtaaactatactgactttttactaattagaagataaagtaacttaattagctagaaaaaatcacacacaatgcaactaatattctttttttagtgaaggatgtttggaatgggcatgaggacaaaattntgatacaatgaaataattattgccggtgttattctacaattgaaattaatattttacttcactaattgctctcaatttaagttaccgcaagaaaacatgtcaatttcaattggaaaacaactcaactagactattctatgtaaattttctagtattaattaatatatcagttcccactttcaaagacatgctaggaatntggacttaatcgtacgtgtacatgatttgtgatgaatatatactacgtttgcaaaacaatatatgctcgttataatagaaccatcgc

SEQ ID NO: 125561 - DNA, 434 bp, Glycine max
  unsure (1)..(434): unsure at all n locations
attgcacatctgcacaaactccatatctgtgtccacgtatttgcgccaaagattnttgtactggttcaaagcaatatcaagccagggtttcatgtctccattgtaatgaatgactgcagcattgctgatctcatccatgctaatgctgggattgtatcctagcccaagcacgtgccaggaattgtccagtgacttggttgtggagtagaaggtgatcaaaccaggtgatagggtccctgctttccacaaagtttggtcttcattctgataacagaataacccatttagcaatagtacaaaggaatagcttgagcattattcaagacactntntctaacaanaataatagtttagagaaagcaattacataggtcatgttgggataagcttctcaatantcaattataggagaagaagataagaatgtaaaatga

SEQ ID NO: 125562 - DNA, 255 bp, Glycine max
accatacaagtagtcaatgagacttcctagctagtattctctctgaaagtaaagaacaaaatcctacaatgaagtcaattaaatcaaatatgtatttctctccttacaatttctattccactcactagagggatacatacccatatcaacaaaaaaccatatttgaaaaccaaattcattgctgaactaagaatttggcgatcaaactcactcaagagtgacagcggctggaaatatgaatgctacacagacagc

SEQ ID NO: 125563 - DNA, 379 bp, Glycine max
  unsure (1)..(379): unsure at all n locations
atatctaaaaaataaaaaggttaaaatgaaggaatagtgtatatcaaaatgatgaatgtagtaaactatacgtcatgtatcatttaaggctttgctttagtctcgngcattattntctttntctttttctaaatatgaatccataataatngttggaatttattggtatctctttacctttatcattntcaagatctgaacatttcttttagtttgggaatngatttatccagcagaattccatttctatctactcattgtgagttatggatgattggattctgtgctattgttaattagataattcagctcttgtatcttttgtttcctgagcatggaagttcattaggaaatttggtatagattgtgggaatatatc

SEQ ID NO: 125564 - DNA, 501 bp, Glycine max
  unsure (1)..(501): unsure at all n locations
tccttaagaatattcctaaagaagctagagcttagctacacatacctctctaatagctaagctcacctcctgagatgagaagctagagcttagctatacaccccctataatagctaagctcacccncatgacaaaatacatgaaaatacaaaaaaagaatccctactacaaagactactcagaatgccttgaaatacaaggctaaaaccctatactactagaatggccaaaatacaaggcccaaacgaaggaaaaacctattctaatatttacaaagataagcgggctcatacttagcccatgggctcgaaatctaccctaaggctcatgagaaccctagggccttcccttggatctctggcccaatctacttggagtcttctatccaatgcccttatggggcaggattgcatcaccttacctacattatggagccctaaatacaaggcccaaaaataatgaaaccttaatctaatatgtacaaagataagtgggctcata

SEQ ID NO: 125565 - DNA, 461 bp, Glycine max
agcttatcattctcctgagaatctgcacttaaagatctaaaagatcaatttttatcttttaggtgttatcttccaagctctaaatccctgaaccgaactattcaagttggtaattcaaactttaattatcttttaattcggtcctaaagatagagcgcctaatctgttgctgactgcacattaatcttgttaagatataacagatttatgtgtccagtattttcgggcaggatgtcctggacattgtatccgacatcgtggatcctgcagcttcaattcttcatttgacattttatcttgccttgtgcattgtgcagcccgatctgattccttgacataatgttagacatcatgtgcagcaactccagctttcttcattgctaaggcttatgtttaacaaatttatccaattttataactcagtaagctaagcctaacaatctccctttggcaattttgtt

SEQ ID NO: 125566 - DNA, 413 bp, Glycine max
  unsure (1)..(413): unsure at all n locations
tgacatactcggaagaatcatgttangtgattgtttctgaatattacctaaatagattgattctaattccataaacttatttactgtacaattatcattgaaatacagcacacgttattcagtccaatcaatggagtgatttttggtttttctagttcatagtcatagcagacccatgcattagcgccccctaacccacatatactaaagggataaattgatttgggccatcttgttcttttattaagtgaatggttagtgctaggtgggttaaaaacaaggctaggtagggttaacccttangccaaaacccacatcgattactctacataaaaggagacaatagatntgagaaataagaacacacaagcaaatgtatcagctaagcaacacacaagtggtggatccatata

SEQ ID NO: 125567 - DNA, 362 bp, Glycine max
  unsure (1)..(362): unsure at all n locations
gctttgcggatttggtcttcgctggcgaaatgatcgaagtgggtctaattatatgaanatctgatcatcatgcattgataaatgcaaaaaaactggggcaactgaagagggtgagaatgagggagaaacccatgatgtgattgccattcctatacaaccaagtttcccaccaacccaacaatgtcattactcagccaataacaaacctttttcttacccccacccagttatccacaacagccatccctaaatcaacccccaaagcctgtctaccgcacttncaatgacgaacaccanctttagcacaaaccaaaacacctaccaagaaatgaattttgcagcgaanaagcctgtaaaattca

SEQ ID NO: 125568 - DNA, 486 bp, Glycine max
  unsure (1)..(486): unsure at all n locations
tatgagttgactttagccttagttgcactttggttattattcaattgatccaagcaaacttccaacaaaaatgtccgattgatttttnttttattattttattcaaagatattttgattattttattattattttgctttttttggtttaaccgaggttacagcgtaaacattgtctttttcacggaaaccaatttttttcacccaaaacagctgaaatgcatagcaaggggtatcagagacccttagaacaaccccattntgccattttatatgaaaaaaggtgaggaggttgccacccagctcgccctgngttgcttcatccagaagcaatccagcttcgaaaaacagtctggaaggcccaaatcagaaaatcgctatttgcatccccccattttgataagttcacccccttctttctgtatttatggaaaagttacggaagcctataggacttngatttcttctttttttcacttcctactca

SEQ ID NO: 125569 - DNA, 371 bp, Glycine max
  unsure (1)..(371): unsure at all n locations
ctttatgagcttgcatgaggatcacatctatgattcagcagggngttttttgctacttccaaacattagtgtgtataatttcgcctgtgtcagatttattgcgtgcctgttttaatataacttgttgttaaaacttaatatataaagaactaaagttacgctctttttccgaagcaatactggtttctcttctgatgccatcatctaaagactcaagactcaactacctaagtcaattctgcgaagaggccacggtgcataagtttgttcacaaagagttgagaggactacaaataataaccttataataataacaaanataggtataatactatacagatcaaagttcttactagatgaanattgaccga

SEQ ID NO: 125570 - DNA, 476 bp, Glycine max
  unsure (1)..(476): unsure at all n locations
gctcgctctnggatgacaacgagtggggatacaggtaatccacctttaaccttttctttgttgtgatagtcgttagtgcgccaataaagtggtaattagttcaaaaatctaatcacgcgaattntagatgctatattatgtattcagcttgatctaatactaataccctatgtgtgcctggntctgccgctcacgtgtcattgacctgcttgtattcgttgcaagaagtctttntagggtgtactgaaaaaaaagtagcttgtctagacattatgtgctggtgtctagctgcgaattagtgtcttcttgctcgggcagaaatgagaagtatgaataaatcggnttcngggaaccggtgttgtacccctgtaggagcattaagctnntttttgtgtctcttctgtgaggggatggagttttggattatatatacttgtgatgactcngcttttgtgatctgatgcagacatttgcct

SEQ ID NO: 125571 - DNA, 356 bp, Glycine max
  unsure (1)..(356): unsure at all n locations
tgatgataaccaagatgatgaccaaaagcttcatagtcaagaacacttatgatatcanagatgatgatctcaagaatcaaagactgagttcaagattgaatcatgtacactttaaggatcaagacgaaagttgaattcaagaatcaagaatcaagattcaagattcaagaatcaagagaagactcaattcagataagtattaaaaagatttttcaaaaaacaaaggactaaccgcctgaattcttttgtgtctcccttctcccttggcaaaagaatcaataagacataagctgagaattctttgattcttcctttccctatccanagatttcaaggactaacacctgaaaatcttt

SEQ ID NO: 125572 - DNA, 364 bp, Glycine max
  unsure (1)..(364): unsure at all n locations
cattacggacctatgaatctcagctgctgtgggctctatgagctggtctntgactcaatatgtccttaaggtgattctcaccatggagatgcatcggaagacaaatgagaagatgtgagaggaggcgccatccactatggaataagccatggaagaaggagcttcaccaccaagatgagctctggatcagaagctnggaaggatggctcaatggatgaaaagaaagacggagagaaagagagaggggggagcacgaaattgaaggaattaaagagggagagaagtggtactttgaagtctgtgtcacaagactctcattcatcaaagttacaacaagtattacacatgcttctatttatagact

SEQ ID NO: 125573 - DNA, 447 bp, Glycine max
  unsure (1)..(447): unsure at all n locations
ngctnctatataagctgaaccttttatcaattaacacaagttgaagtttattcagaaaattagaagttatctcctttatcttaatgagagtgattctcctaaatttcttgagtgattcaagaacaccttggctgtatcaaaggactttcacaacctttgtgtgttgccctcgctggaaagaagtgattcttcctttctttcatcatcacccttgttctttcaaaccacaattccagaaaatccacctctgcccaaaattatctcgtggccataactcccattttacgcactcaaattaagtgattcttgagcctaaattgaatttcanaacgagacctttcacctcgttttggaatcacctcattggaccatgtagcttcagttattgccatttctatatntctgtccagccaccacttaacctacgtcttaccatcccattcattc

SEQ ID NO: 125574 - DNA, 350 bp, Glycine max
acttgatctcgctaacttactcagcgctgtttgcagttaataactcatcaagtatgcgttgaattgtagactcacattaatttgagcgctcgtatatacgggactaatcagacatcgagtaaaagtattgcgttggatggtcgagattacattatttcagcgttcgattatacggactaatcagacatcatgtaaagtattgcgttgaatggtagagttcacatcatttgacgttcgttatacagataatcaactcgataaaagtttgcgttgattgccaagctcacttatttcgcgcttgtttacagactttaactccgtaagtatgcgtgaatccaacgtaattattt

SEQ ID NO: 125575 - DNA, 471 bp, Glycine max
  unsure (1)..(471): unsure at all n locations
ntagctctaanatactataacatgtcataccaaatatttatttatttttgtaatgtctcatgtagtataatggtttatataccttgtatcacaaggattattaaatggnggaagtaaaagacgcaagatgcccttaatggagattagctatcctttaccatcagatgtatttcggagaaaggtatatctgcaaagtggcctgggtcaaaaggaaaaagaatacactcgaggctggagtgtcacagatgagccactctgtaagctntgtcaaaagcagtgcctgtaagtcctataccaatatatattgctntttttttactagtggttaataattaataactctactttcaggggtaacaatgccaagacacttgaatgttttgaagatcttttttgtaacctttgttgctatgaggagtatcgaatgagaactagcaacatattcctncatgaggtcagaacattgatcat

SEQ ID NO: 125576 - DNA, 359 bp, Glycine max
  unsure (1)..(359): unsure at all n locations
tgcaagctngactaggctagttgatntagccttattttcactctagttattaatcaatttcattaagaatgagaaatcccaaagagaacacgttcgattgattctccgctttattctgctaanagatgttttttttattatcatattattttttacctcttttttttttattccaacgtggttacggcacgaccgaacggtcggaattntatttatccgacgttatcggataatacaattcaaacgttcggcggaaattgattttattcttaagttaaacgagaaatgacttaagtaaaatggcttacgcacgtcaacagggggtattaaaagttaacaaaacgagaataaaatgcacg

SEQ ID NO: 125577 - DNA, 468 bp, Glycine max
  unsure (1)..(468): unsure at all n locations
ctcataagtgaagtcaggtgcaaccatctcccgaagagtcctctcacaaggtggcattatccatgttctcagtatgaaaaatagcagccgaatgctcaaaatgtacagaatgatcaggatccacactatgcctaactaatctatgaaaggttctatctatttcacgatcaaacggttgttaatcacctcgattgcccctagtcatgcactatatgcagcaaatcatgaatttctcaaacaagcactaaggagggggtaaaactacaactatactcaaacgatatccaaatgaagctgaaaattgtgagcaacaccctaaaatcatgaaaagatagcacanaaattttcagactaaaattcatagtctaactatgaaaactgcctaagcanagtttagaaaaataggacaataatacttgaaaaaaaacttagtaacaactgattttcaagtttggaaaccgaactagc

SEQ ID NO: 125578 - DNA, 264 bp, Glycine max
  unsure (1)..(264): unsure at all n locations
agcttatcctactntaaagatagcatgaagtttatcattcacagantgctacacataacacgggatgatattggttttaccaagcttcctgaaatgctcattacaccacttctaccaatagtaccaaaagtagggcgcaacgctgtcactccacatcgagctgcaagaaaagttatggatccatctgtttctgtaccgaatgcaaatggaaccatacctggtatacaataaataaaatcactgaaacaggagactaaaatttta

SEQ ID NO: 125579 - DNA, 343 bp, Glycine max
  unsure (1)..(343): unsure at all n locations
atgggttcatctgaacggtgaaaatgtcctatccaacaatagtatacaaaatggagatgtgggagagaaaagagatattgagatagaaccatccgcgcaaactgatccattgggcacaaggttagattttatcatgtgtgcttgttctgcttaccaatatatatctacaaaacaccttattctattnggaggttattattaagttcaccaaaaaaaatatggtggttattacatttcactttattttctcttaaaattaattcgttgtggacaagcgttaaattctgctcaaaaagacactaagaagtaattcaagctgaagaccaacgaaatggaaagatat

SEQ ID NO: 125580 - DNA, 341 bp, Glycine max
  unsure (1)..(341): unsure at all n locations
agcttataaatgaaggcagcatgttntggaggcctctggtaatcaattaccaggctgtgtaatcgattacacagagggacatgccactggtaatcgattaccagttatgtgtnatcgattacacagtgcatttttgcaggtttcatgtnctaaggctgtgtaattcgagtttagcctctggtaatcgattaccaaggttgtgtaatcgattaccagagatgaaaagcctaaagaatacccctttacttgcatgtagtggttatgagacgcatngtgttgcggcgcagttaaattttcgtgaaagagtctacccctttcttttctttcttgtagatcgtgat

SEQ ID NO: 125581 - DNA, 461 bp, Glycine max
  unsure (1)..(461): unsure at all n locations
tcagcttgagaggggagtgtgagaataaaaaatntaatgattatgatctgataggatacgatacattatgtagagaatntgatttagaggaaactgaatatcctctaattatgtgtaatcaatactacctgtctatataaacaagctgatgcatggacnccttgacttgcaaaaccctcaaatatccctctatattcctctcattttacattgtgaaacaaccattagttgaacaacactatacatctttgttcagttgcaagatgtgtgattaccctatttcaatttctttctattcaaatggtaagacgaaaataactgaaatgaagattataaaataaaaacatcaacacaatagtaaaagaaagaaaaaatggtgtgatgtgtaacaatgttnttcaataatgttgtgtattggatgaccacactntatntataatgagcaaataagatctacatta

SEQ ID NO: 125582 - DNA, 400 bp, Glycine max
  unsure (1)..(400): unsure at all n locations
atacaaagtagtgggacagaaatctgttataacagaatatgttatgggtagcgatagtggattatgcaatagggatatgcctgctgatagttctacccacttgagtgaatgaagtgggctggtctctcgaagcacctcttgggtctgctattgctatcatagtctgtatctatgatggtggtttgacatatcatacaataatcacatttgacatttatgagtgcagatggtggacaatgtctngatacatgaggtagctgagacagatgagcacacctttataagtgcatgtcagtatcctgtggagaggcttcangatgtggagagaggtgaatgggaagataaaagtctgaatcctgttcctatcccctggcagatatcatatgtaacacaaacctgc

SEQ ID NO: 125583 - DNA, 333 bp, Glycine max
  unsure (1)..(333): unsure at all n locations
acttatgatagcgcggcgttgatcccattactggttccccttagctttctgtcctttcttcacgccggattccatgccttgcgaactccttggagtaccctcgcgttgtggtcactgaaacctcgtgcgatgaaaggaatgatgctttcgtctgatggcactcctctcatgggacatccttcgcatgaaaataaattctgattcttctttcttctagcgagggaaccatctaacagacgccccttcatgctagccaagagttggtgcacaacanacaattcttgcgccgctcttttcacatccccggtcgaacgtgtcatacatggccaaaat

SEQ ID NO: 125584 - DNA, 494 bp, Glycine max
  unsure (1)..(494): unsure at all n locations
gctggtccaacgctntgttcaggctctcccaaaatctggatgttaacctatgatctctatcagacactatctcgatggcacaccatgtaatctgacaatctcactaatatacagggaggtcaacttctccaaggaaaatctaatattaatgggaatgaagtgagcagacttggtcagcctgtcaacacataacccagatagaatcaaaaccttcgggggttctaggtagtcctacaacaaaatccatagaaatactgtcacacttccactggggtatctccaagggttgtaactatcctgaaggtctctagtattctatcttagccttttgacagactaaacatgcacacacaaactcactaacctctctcttcatgttgggccaccaaaacatcatcttctaatcctgatacatcttggtagcaccaagatgtatgctcaacgtactcctatgtnctctctttaggatcatattcctaagttcaggcacattg

SEQ ID NO: 125585 - DNA, 345 bp, Glycine max
  unsure (1)..(345): unsure at all n locations
cttactcacctttaggagatagtaatttttagttattgtgagatatctaagggggaggaggcatccccactcctttgtaagcaagcaatttctcttgattcctcttcttcagagtaaaaggagctttcttgccatgaaaggctaaaaccctcagttggggattcttattgagtagttgatgtaaacatcttttcatatctaaataaggggtgtttatgtgttcactgcttctatctatgcttatnngatgcatgcttgtggctagatcacccattagtgtgtgctgttatggactctaacattggaaaatgtactgtttccttataactattatgctgtgagtat

SEQ ID NO: 125586 - DNA, 407 bp, Glycine max
  unsure (1)..(407): unsure at all n locations
gatgtgatcaccatggggaagctgttcanaaagtgcacagggaattggaccangtgcggatacgggtttgggttctagtacgactcaacctagtccggataaacgctggaagaccgggaggccccacatggggagtgagccgtggatacangattgaagaaccncgcagagaaaggggggaggcgcaatgagttaagtgaaaggtgaaattagactttaaataagcatcatgatgttgagtttaaaaattggttaaaattattatatgatggatataaaaaatggttaaatatttcattgatagaatttttaaacatcttcattaagattttttaaaatattgatatntatgaaactctattattaaaaaaaaatttatttaatatttgcttttataatcataaaaa

SEQ ID NO: 125587 - DNA, 416 bp, Glycine max
  unsure (1)..(416): unsure at all n locations
agtcacgcggctgcagctntggtgaaggatgtgactcttacatttgaatgtgaattcaacgttcaaaggcacttggtaatcgattaccaaaacattgtaatcgattacagctttttaaaaataattggaacggtgtaaattccatttgaaaactttntcaaaacaaattcgctactggtaatcgattaccagaagagtaaaactctttggtaaaaggttttgtcacactctcatgtgctattcaaagttttaaaaaactctttaatacatatcttgattgagtcttctcttcattcttgaatcttgagtcttgaatcttgatcttgaatcttgagatcttgaaccttgaatactaattcttatctctaggctttcttcttgagtcttgaattcttctagattcttatcttgaactc

SEQ ID NO: 125588 - DNA, 405 bp, Glycine max
  unsure (1)..(405): unsure at all n locations
tcctgactcaccataaaccttgacccagggtgttaatgccaatccttaccctcggaagccaccacaaggagaagagaaggaaaatttccaatcaaaggaaaaaggagaaggaaaatctccaatcaaagaggaagcataaaaaggagagaaggaaaatttccaatctaagagaaagaaaagaagaggaaaggacattcccaatcaaagagtgggagaaagaaaaaagaaaagaaagaaaactcccaatcaaagaatgggagaaagaataaaagaagaaagctcctggtcaaagaaaccagaagatatgtgccgagaggtccttggaccagacgatatctgaacaatacagaattgtcaccaaatgaacaaaagaaagaaagganaccatgacctaaaagtggtctt

SEQ ID NO: 125589 - DNA, 340 bp, Glycine max
  unsure (1)..(340): unsure at all n locations
gtaccaccttgtatagaaatntacagctgatttttacaacattccagagcacaccacggtgcctatttctggaaaagagctctggaggcagcaagaggagcaacttttgcagagatacctaggtctagtaatccattattaatattaggggttcttctataatggatggctaaacacccttgttgggaatttctaatgaacaactaatgtaattattttaatatctaattgattgtggttcttgtgttcaatgcttctttcagcgcttaaattctatatgctattggtctgatcaaccatttgtgtgcctagctaggtgatcttaacattgtgaaatgta

SEQ ID NO: 125590 - DNA, 412 bp, Glycine max
  unsure (1)..(412): unsure at all n locations
aagatagcattcaacatactncaatatgaagtgtatagtggatggttggattaatgttttctaaaattagctccgggtaaactgagttggaaaagtaaccaaagtttgtttttacataattgagtctttagaatgtgcaaacatattgcttatacagaactgagttattatgcatacttccagtctgcatatgtatttttgggagtaaccaaacatgtgagaactgatattactctgcaaaagtacattcaacacttaaaaatactttttgaacgtttaaccatttggtattccattttcatgttatcgcgtcagattccttcatctaagtaatagatactcactgatcaaaagaggaaaagctacctataatttctcatattcacttataggtttaaatgcagaatcaaat

SEQ ID NO: 125591 - DNA, 390 bp, Glycine max
  unsure (1)..(390): unsure at all n locations
cctccgtcacccttggttgccaaanttctttgatctctaagtacatcagccaatacacgttccatttccaattccatggtaaccaaactcttgtttcctcattatnttttcctaaaactatttcttttgtccgtcattttttcaatagatgacttcattgaagttaatgtcacttattcaacctgcacatgacataacaaatagtagatatgacctactntattcatttgactagtccactgcacaatcatagacaatatntcaagcaaagtttntatgcaatagcaaagacataacagtctatcttcaatagaaaagtacaatagttacaaagcacaccaagtatgtcagcatagccaatacatttaaaaagactatccctagaaaagt

SEQ ID NO: 125592 - DNA, 380 bp, Glycine max
  unsure (1)..(380): unsure at all n locations
atgtgtaagtgctcaattattaaccttgttgagtacctaaacacttttgtaggaatgtcatcttaagtatgaccaggagttgtaagtacttatgtattcggcctaatcaagcacctgattacttttgcaggaagaacatcttaagcttgccaaaaggttatgagtactcagatatctgatctaaccaagtacctgagtaactttgtagaaaagcctcttatacatgcaaaaaagtntaagtactcaagtattgagtctagccgagtacctaagtacatttgtcggatggacatcttaaacatgccacaaaggtgtgagtattcatgtattgaacttatttgagtacctgatactttacagaaaaaggtatacttaatctc

SEQ ID NO: 125593 - DNA, 419 bp, Glycine max
gatagcgtaggtatcttctaaaagcttaggaggaataaagaatattcactggtagcatttctgtaagcaggtaggcagttacgtaataacaaaatgtattaaatgcaagaaaaatgctcgtgaataatatcagaaaacgcattctctagttccttcctctatctctctatctctctacccttctccttccacgggggttgcttgggcctcgaaagccaaacctaacatatcaccaaacctcaataaaaacaaccctttataattaatcaaaaaagtatcttatacaataaaatatatcttgcatttatgaaattaatctaattttttattatgttttttcacagtaactatagactacatttcagatgttaataatttatttcaacatgcccaagtatattgcatgagcttgttttgac

SEQ ID NO: 125594 - DNA, 365 bp, Glycine max
  unsure (1)..(365): unsure at all n locations
accacttatagatttacctcaacactgaatcacatncactggnaaaataagagttaattncatatctcaactattcagaacaacctgtgttgattatttgtttgtcacttctttctttcttccttcccctccgcactggataaaagaattataatattacaacagtttttcctacttgaaaatcaaataagatggataaaaattgagtgtgtaagttaactataaaaaaagtattgtaacaattcgtgttttcgaatcacatcttataagaatgcacttcccaantttggttaacatttcatangaaaaaaatgttacctttgtatcttgtgggtagaatccaataagtgacagttaatctgaaa

SEQ ID NO: 125595 - DNA, 328 bp, Glycine max
  unsure (1)..(328): unsure at all n locations
accatgaactctttcactaaaataagcaatagggtgcccaccatgcaacaatacaanctccacactcactcaagaggcatcacatttgataactgctaaataattgtactatcgatgatataaaataaagcacatttgtctttaaaaataattatttagcagttatttgtgcctaattgataagaattgatgttttttaaacatcctgttgcagatataaaaaaatggagggactaanagcaaaaagctgtagaaatgacgaagaaaaagagaactcatcatcaagcccatcccatatgctcgcttagcacgcatcacgcactgagcg

SEQ ID NO: 125596 - DNA, 423 bp, Glycine max
  unsure (1)..(423): unsure at all n locations
aacgaagacttgcctataggggtcttgaaggtagnncgtcagcctatagtgcatcatccaacttgcttgaccaatccatccgagttgaagccacaattttctccaagatcttcttaagttccctggtggaaacttcagcttgtccatctttatgccggtgatttggagagccctacttgtgtgtgacatgataatggcctagcatcttttgtagttggctgttgcaagagtgagagcccgtatcattgattatgaccctaggcaccccaaagcgagcaaaaatatttntcttcaagaacttcactacaantttggcatcattctttggggcaaccactgcttcaacccatttgcagatgtaatccanagccataaggatatattcattgtcaaaagatggaggaagaggacctactaagtcaa

SEQ ID NO: 125597 - DNA, 394 bp, Glycine max
  unsure (1)..(394): unsure at all n locations
ctgtgatattattaccaattgcttacgtgacagacaanttatcttgtcttttgtggcttctagcttaattcatcttgaattgtcaaaggtttgataagtagctgacttgtcgatntaggtttacgacaatgttattcgtaatataaacttttataaaagttaagacatgtgaatctgaaatttaaaacttacttataaataaccatataaatttatttattaatcgaaatcaatatctatccacttcattgtacatacaatatcttatttgtaaacaccagagtctaaacaagttggaaataaatattgaatatctaactaatagtaaaatttgttgttgaaattttcttccacataataagttccacttgtgaataaacctgaataaataaat

SEQ ID NO: 125598 - DNA, 414 bp, Glycine max
  unsure (1)..(414): unsure at all n locations
cgcaataaccttatatataagggtgagatagagttcttgagtgtgaatccccttgcccgagaacacctgtcatatgtgcaattaaatcacatactccttttatttctgtgaagactaacagttgtggtggtggagaaatccaatggtgtagctagtctagtagaggctaggttngaagtagtgagaaactgactggttgttgagatctagtggtttgctggtccaactaagaattgattgtgttagtgaaatctcatctttaaaggtgaggactagacgtaccccaaggttggagtgaactaatataacaatcctctgtgcagnttatccttttcctttcctttgctttgctctgcataaatctgaaaactatttgtggctgaatcattaaanttgtcatcttaccaaacttaa

SEQ ID NO: 125599 - DNA, 128 bp, Glycine max
agcttacctcatgcttgattgactaatcccttgtacacagatggagcggagagtactattgtatgtctggacgctgagcctgtacagccgaatctcttctaccttggcttaggcagtaagacaacatc

SEQ ID NO: 125600 - DNA, 357 bp, Glycine max
tgaactaccatcattatgtggaagtcatacattaaattaaaaagaacggtcatagtaacggagttggattgctacaaaaatgctactttataaattatcaagctagtgattctctggaatactgtctacagatggctttcaagaagaattcagtccctgtcatcatcaattcaccacctctgaaatttttctccttcaacttacaggatgaataatagctcaatgaatgtgtcatcttgccctcatatactttcaactctcttgagtcataccctctatcctacacttctgaataccctacttctctttaccttataagatataatatttgatttgaacctacttctatgcttgtga

SEQ ID NO: 125601 - DNA, 397 bp, Glycine max
  unsure (1)..(397): unsure at all n locations
tggtggaccaactgctataggagaaatgtcattccatgaacatcacttgagacttgaaaacgcaaggctaagagaagaggttacatcaattaattaagtagcaacattctatgtgtatgacactctgtgtgttttaattgctctatagctactactcgttggtccaaagtaaggaccttaattaatataaatattaaaagagcatgcattgctcttttttattgagtacacacatgtcgactcattatattatattatgcatgacctaacagtagcacaccccaaacactatgatattnttttatttgtatgactcatattagtgtaatttttttataataatatgattctattaactatatgagtaatttcttgtattggtacgaattgatatctt

SEQ ID NO: 125602 - DNA, 421 bp, Glycine max
  unsure (1)..(421): unsure at all n locations
gcaagctttcttctcaatcaatctgtctactgtctaacaattctaattgcanaatcacattcttggtctttctttggctaacatacacactttcttcaactcatgaaaagaacacaaattccatcacaatcatgcattcaatttcaaatcaatacatacacccatttttcacanaaagataaatgtgttttactgccatgtcatcaaaaactaagttaaactgttcanaatgctttaggaagagcaaaccaattattcataaatgaaactagtagtgtatataaacataaaagaaatgctatattaaaaccatanttaaaataataataaaccaaaaagtgtcatcaggaatcaaaattcttgtgactggtcctggatatcctgtgtctgaacatcctctttatctgtcagatgcaatact

SEQ ID NO: 125603 - DNA, 295 bp, Glycine max
  unsure (1)..(295): unsure at all n locations
taccagtgtgtttgaacgttgaaattcaaattaatggtgaagagtcatatcctttcacaaaaagctttgtgtaattgatacatngacttggtaatcgattaccagtgatagtttctgaacaaaatcaaaagatgtaactcttccaatagttttcaactttttcaaatgggtnttttaagtttttctaaaggttataactcttctaatggttctcttgaccagacatgaagagtctatataagccaggctgtgatttgctnttcaatgtatcttttcaattcattctttagacaac

SEQ ID NO: 125604 - DNA, 344 bp, Glycine max
  unsure (1)..(344): unsure at all n locations
acaagagacccctcattacaatgaaaaaggtgaaagtgagttgcatcccatacccggaaaccaattatcttctgccgtgtccgattatggtctgagattcttgtcaaactcaacaagagtcttggcttccactanagggttgattctttggtatcacgccacgagccacacaccaattgaactcttcatttgtacccataaacaaaaacttggttacccattcccaccccaaaggaagttcaaaaaagatatgatgctgctgacccacaatggtgttgtagaatcttctacgaggctgtgagatgattacatggattcaccttgacttgaagcacaacagatgg

SEQ ID NO: 125605 - DNA, 222 bp, Glycine max
  unsure (1)..(222): unsure at all n locations
tactgatctgcattgtcacacacaaaaactcttaaaggagatgaaagtctcattgctttctcactaggaactattacttaattatcaagacagctccaatntacttttagctccccaaaaccttgtctaccgatcataagacatacatccttttaaatggtttacttggttttacaacaattgtctcgctgcttctcgttatgagttcataaaaatggatcc

SEQ ID NO: 125606 - DNA, 442 bp, Glycine max
  unsure (1)..(442): unsure at all n locations
gacactatgatactcagctctattctggctcaaactcatttattcttagagttgagactcagatctgactcactcacccaccatttcggtacttcatcaagaaagggggtctgcccacttcttgaaccctaaccttgttgtctttggaagctaatcttcattgaatgtcattttgatgttaaaatattcgagctactgccttggcttaactatacatgtatatgtttttgaaatttaaagctaaacatgaatctgctgggtgttaaacatanggtaaccttataattcacttaaatcgatgttttttttagcacaagtcatgaataaatcaaggtaaggactttcgtgtccactctgaattcctctcatttattcttacatggtaattgactgtatgactgaaacatacattgcatgtgcattattatagctgtggattaat

SEQ ID NO: 125607 - DNA, 307 bp, Glycine max
ttttatcgaggcggaactttctttcgacttaagtaaaaggaccacccgcagcataaagagtgccggtcctacgcacagtcccacccggaccccaggcagttaataatatagccccctggcgcgacctataaatatgcacagcacccaaaagaacacttccctcctttccgaggatactcgagctatggcttattatggagaatatttggtggtggccatacctgggaaggttctccagccaccctaccccaagtgctttgactcgggtgccaagtgtgtgtaccatattggatgtcccggacacaat

SEQ ID NO: 125608 - DNA, 482 bp, Glycine max
  unsure (1)..(482): unsure at all n locations
cctgaaattgagagaaaatgagtattaaacatacataatggaagtactaagtatntatcgctatacttaacagagaatacttattacactattaaataaccataacttggaagagtttgatacaatttacacaagttttatacacaaaagttagttcatttcaccgactaacaactcccccaaaattcaattttgcttgtcctcaagcaaaaagagaacagctcacttgtccacaagtgacaatgacatgcaatgactatgtacaaaggtgtatgcaacaaaagttactgattgaatgataagagaatggagtaaaatgccctcatcacttgtctttcacacggtatgcatttatccagagagaagaataaaatgtaaccctgacaattagatggagttaggcatacgacagatatcaaggaaagtagcttataccacagnttcacggctactggttcactcaagcacaagtggttaagtta

SEQ ID NO: 125609 - DNA, 314 bp, Glycine max
ttgggagttatctcagcaggaagaatgatctctgggtgcacattttcgctcaagatatatgtgtgcgtactctaccattcctaacatgagatttgaatatgacaggttttaacttgtggagtggggtatgtaacacttagcctcaagtgcataatcaattagattggaatatacgagatggagcttcggttaatttctggaatactcgtggtacctggagtacgagactactgatgtgacttacgactggccttattgagccatctcctccatgtataaagggagacatcttgttgaaggaatgctatggacat

SEQ ID NO: 125610 - DNA, 295 bp, Glycine max
ttcatgaaaacctgtgttttacacaagaaaacgacaacctgtttagaaaaaatcgctttgacaacgagtcttaatgatgggttttccaaaaacaattcgtaatggcacctggtaactacaaaacgactatggtcttagaaaaattgtccttgaccacgagtctaatgatgatttttcaaaactgtcgttacaacgtccgtaattacaaaatgcacctcattttttaaacctttttattaccattgagataaacagacatttttatagaggagtaaacatttgcttatttgaaata

SEQ ID NO: 125611 - DNA, 400 bp, Glycine max
  unsure (1)..(400): unsure at all n locations
ccatgtnagcttncgtgcagctcccttgcgtgtatnttttagagggatgtcccctagtaactcgtcgcataacttatcccaatgtaagaagctatgtccagtcacaacacaatcatagactctaatgcctagatgcaatgcaacatctttgagtgtgatggtgcactcaccccatgacaggtaaaaggtgttgtgttcaagcctncatcattcaaccaatacaagataaattctacactgtntgattagggcaatatgttggaacccgatagacaataataatggtataatttgtggttatggttcaggtattgtatggtaacatgaagtgattaagtcgctattcgtggtacgtgaatggtgaatgtgttgatgacgccatataggtttatgagtcatg

SEQ ID NO: 125612 - DNA, 311 bp, Glycine max
  unsure (1)..(311): unsure at all n locations
atgacgtgatattaatatgaagaagaaagaagttgccactcacctatatttgatgattannatttttgatggggttgttcttgtacctcctcacctaattctatgcaatgtgtcgaatatagaacacatgcatagaattctgtgtcatccacccactatcacatctngaatatgcacttttgattgactcatgccttgtctaaatcaaacacataccatgttgtgggataacatgccttttagattntggaggaagaancaccatgctcctgttgattcactcttgaaaacagcaaaggctattggaagga

SEQ ID NO: 125613 - DNA, 442 bp, Glycine max
  unsure (1)..(442): unsure at all n locations
gagaagcttctttgagaaaactttcttgagaagctaagcttagctacacacacccttctgatactaagctcaccttctttggataagaagcttggagaggatgcttcaatggaggaaaagaaagagagatgggggagcacatattcaaggaataaaagagggagagaaatggaactttgaagtgtgtctcataagactttcattcatcacagttacaacaagtgttacacatgcttctatttatagattangtagcttcattgagaagctttcttgagaaaacttccttgagaagcttctttgagaaaacttccttgagaagctagagcttagctacacacaccctctcataactatgctcacctnctcgagaagcttccttgagaagaatcctanagaagctaaagcttatctacacacacatctctaatagctaagctca

SEQ ID NO: 125614 - DNA, 398 bp, Glycine max
  unsure (1)..(398): unsure at all n locations
agcttgangagctacttggtaaaaccgccatatataacacacagaatacaatgaacgggatgaagaataaaatgatgtgagatgaagaagaggaagagggggatcaacaaaaaggagagaaaaaaggtaaagtggagaaacataacgagacacacatgataaggaagacagaagaagcagcataggatctgatgaaatgcttggataggaaaaaggtcaagatatatagaaaggtcatataaacaaatatagggatattaattagtcgtacaagtttattattaattaataccctaaaaggtgcatagaaaatcaatgggaggtttccatatgaaaaacgtatatcaccctaaaaggtgcatatgaaatcaaagggaggtgttcataaggaaaacgta

SEQ ID NO: 125615 - DNA, 479 bp, Glycine max
  unsure (1)..(479): unsure at all n locations
tgagcagtcctcgccttacaagttaattgtgtggttgtggactaaacactacactggcgctggcaacctccaaagaggccacaactaatgcaggttagggttgaccgcaattaaagcagggctttataacactccccctcacacccaggactaatgaatctaggataagctttgagaccatcttatgatttggatttagggcctaattcaatcccacanaagcagattgtaagatgaggactggccaatctttataaactctatntaagccatatctctagtcgatgtcgggactaaacaccaccctagaggctacaattaattcagcccccanagagactgcaactaaggcaggcttaggggtgaccgcaattaagggcggcttccaacacctatgctgaacatggaatatatggtgcctcaatattatacacatagttgacttggtgatngcttntgcagtaattgtatacactaat

SEQ ID NO: 125616 - DNA, 357 bp, Glycine max
  unsure (1)..(357): unsure at all n locations
taagaggggggggggngaattaaagatattccaaactatctcccctaataaaaatctattcacttttactcaagtatgagttccttaatgacaatcttctttaatattaattcaaacgaaacaatgtgaatatgaatataaagcaataataaataaacgagattaggggagagaatatgcacacatcattttatactggttcgggcacacccttgtgcctacgtccagtccccaagcaacccgcttgagaggtccactatcttgtaattccttttacaagttctaaacacacaaggacaatctcttctttgtgtttagagatccctttacacaagagactcacagtctcttaattcc

SEQ ID NO: 125617 - DNA, 467 bp, Glycine max
  unsure (1)..(467): unsure at all n locations
tgtaagattatggtgtacccaacacatgtggtactangcgtcggtcggcgatggtccacaacaagttttcacatccacaaatcgtgcataaacccaccattctctgtagcccacctcctactgagctcacgtactcccacgtagcccatattctcgtttctcttaacaccgtgtccccatcaatcctgccaagcttccacaacatccaggtaatttaacatccaaatcatcacaaactaacaaaccatgcaaaacagggcagaggcagaaaactctgcccaaaactcataccaagatcacaacttgttctcacttaaagaccccagtaacatgttcttcgttctgattcgttaaccgttggatcgactccaaactattactggaagtctctagtgcataagcctacattntgaccagttggatctactagcagacatgcagaactattctgcactactctattcaca

SEQ ID NO: 125618 - DNA, 229 bp, Glycine max
tacaaaattggctagatatcaagacattctctgccttgtacaacaagaactcacaataaacatgccaagtaaatacaccaccagtaactcatttgtgaattctcatattgggcctctaaagaaattacccaaaagctgaattattatcaaaataataaaataaagtcactcacaaaagtgcttctggatgcacataaactcttcctgtgttactgtttgagtccaaaac

SEQ ID NO: 125619 - DNA, 362 bp, Glycine max
tctctttaaaattttctttgtaacaaataattgttaaattaacatcattgtgttttgtgcaaaaatattaaaagtgatggattaatgaaacttaatgaggtaaataaagcccataaaatgcatgaataaccaacgaacgcatgctaattgaggaaagagaaactaattaatggacagaagactaattaaagaaagcaagttagttaattgatgaaagaaagactaattaaaaaaataagattaattgagaaaaaaatgactaattaagagcacaagtctaattgagaaaaacagactaattgagataagccataaagtagaataattaaagaaagaatgactagtcaaactaatttagaagt

SEQ ID NO: 125620 - DNA, 355 bp, Glycine max
  unsure (1)..(355): unsure at all n locations
taagactagacttagctcaagcaacttacgaaaagttagcctaatttagcctaagcttcgtctgcanatccctcttgtaagactaggtctagactaaacaacattattgtaacagcataattaaaaccaaaacttaatccgtagatccctcttggtagaattaagttcgatcctgcttcaatcaaatttaaggcaacagtagatccctattgtaagactaagntacctaactatgcacacaaatggatgatcaaaccaaaagcatacaaacattatgcattgaaggaagtattgaacacataaaacataatcaattagatattaggtatttacatcagttgttcattagaaatcc

SEQ ID NO: 125621 - DNA, 403 bp, Glycine max
  unsure (1)..(403): unsure at all n locations
attcctcgtttggttacttattataccccctcttgacgtgcctaagccattttactttagtcatttctcgcttaacttaaaaataaaataatttccaccggacgtttgaattgtattatcccgtaacttcgggtaaaataaattccgaccggtcggtcgtgccgtaaccacattggaaataaaaaataggtaaaaaataatataataactaaaaaacatctnttagttaaataaagcggaaaatcaatcggacgtcttctctttgggagttctcattcttaatcgaatcgactaataactaaagtgaaactaagggctaaatcaactcggctagtcaagctcgtccataaaaaaggcttntgaagtttgcatttaatttctgctaagaaaatggacattttta

SEQ ID NO: 125622 - DNA, 469 bp, Glycine max
  unsure (1)..(469): unsure at all n locations
cacttccctcanaatctacacagcagcaattataagcacattgagagcttatattgtgtggctaatnggtggggttttaatgccaaacaagacgggaaatcgagttcatttgatgtacctcactttcttggctgatctcgatcgagttaggaggtatagttggggctttgcttgtctggcaacactgtacagagaaatgtgtagggtcactaaccttgatgccaaaaccatgggcggctgtgcgtcattgttgcaatattgggcatggtatcgcatgcctttcattgcagcaagagttaatcggacaccatcgtatccgttggttacgaggtgatatgaatctcaaattcattgttatatgattagcatagcttcaattaaattaataattcttcatttattagatggagtggcggtggattaagctntactggtacaccacatggagatgtcanttggtatagaatga

SEQ ID NO: 125623 - DNA, 222 bp, Glycine max
ccttcggccgaactaagaagctaacacatctttatcacgaaaagcgggccgtggcctataacatatgtcattccctcattctgtgtcgcagtatgcggtataaagacacacaataacccacgaagtgtgcccattctttttatgagttctgaagagggtaaacaattgtctctcacatcgatggcgccggatcacgcgaatcccggcactatagtgagacta

SEQ ID NO: 125624 - DNA, 400 bp, Glycine max
  unsure (1)..(400): unsure at all n locations
tacaacacacgcacctggtacttgtttagctgctgcaagactgtggatcaaaaagtgatcttccttcaatcgtcatgctcatgattagtacctatcatgctacttatttgcagctgtacctgagtgcgccgctgctggatctttgggacttgatacagtntataccttacttctctcctatgttgctgctttgccatctgatttattgaatagctgctttcttatgcctcaagatgtcattgtatactgtgttatatctgatggaaaagagacgtgtctcgcaagactgtttcatgtgctatcgcttcctatacctgattgactccttngcttgagtgatgcgttcaggacagatccacaaatacattgtctgagtactctaacgatgatcttccgtgct

SEQ ID NO: 125625 - DNA, 443 bp, Glycine max
cttctaatcaacctgtctattgactaacaattctaatggcttgttcacattcttgttgtttctttgtctaacatacatacttgctcaaacttatgaaaagaaacacaaactccatcacaatcatgcattcaatccaaaatcaattcataacaccaactttcacaaaaagataaaaatggttcattgcgtaatcatccaagtcaagttaaattggtccatatgcttcaaaacatgcacacttactatccatagaagaaaaagtatataattatgaacggaaaccacaaatattcaaaacaatgtactgaaaccaatatagttataattattatccaaaaagcaaaatcatcaggaatttataatccctgagacacgtcttgggcatcctgatattgagcctcctcctcatctatcagatggaaaaacaagggaatcagagagag

SEQ ID NO: 125626 - DNA, 471 bp, Glycine max
  unsure (1)..(471): unsure at all n locations
ggatagtttacttatagtcatcctcgagactccncaaccttctgaaggaacatcgttattggtgacaagagtccctccaacataattaatgttattaatgaaaatagtgaccaaaactctaaaaacgctgtagaagcaaagcttcatgatgaatcaagaatgattcacagatgtcttgatgataacaaaggtgatgacaaaaagctcanaggtcaatcaaagaatgagttcaagaaagatagaatcaagaaagaatgagttcaagatgttcaagatagaatcaagaacacttcangattcaaggatcaagcattcaagaatcaagatcaagattcaagactcaagattcaagaatcaagaatcaagagaagacttaatcaagataagtatgaaaaggttttttcaaaaactgagtagcacatggattttcttaaaacatgttaccaaagagtntactctctggtatcgata

SEQ ID NO: 125627 - DNA, 468 bp, Glycine max
  unsure (1)..(468): unsure at all n locations
tctcactatgttcaagaggaagatagactacaaagagatatgactaagagtcttactcgactctagcctatcaaaataagaanaaggaagaagattaaggatgttgtggaagggtcttctcagcataggaaacaaaagagggttggggaatntacctgctacttttgcaagaagtcgaagcacatgaagaaagggtgtccagtatgctagttggcatgtaaagaaagataaatttcttactttagtttgtctcgaagttaattcggcttttgtacctaaggatatctggtggatggattctggtgctactactcacataagtatgtctttacagggttgcctataaagtcgaccgccaagtgatgatgaaagattcatctttgtgggagataaaanaaagttgagtagaggctatcggactttcagatgttgtgaagactaaatttattggattatttgagactttgt

SEQ ID NO: 125628 - DNA, 404 bp, Glycine max
  unsure (1)..(404): unsure at all n locations
gcagcctgatccttacactagagcgctaacactagtgatttgtgtttgcatgaaggtcttgtgtgttgagcttgatatgggcatgcttaacttgggaccactggaacaagataaggctaatttggttaacttatattgtttaaaaaacacttatttgtaatatanaataagcaattanattttttcttttcttattgtntgagaacacaacatccctacctggcttatttatatnaagtaccttttttaagaaagcacttatnntaaaatttaatcaaatcgacccatagtgtgtttagcgcatttccattcacataaccaatgcttttactttttatgtatcacatgattgcttgaggatatatatgcacaaatacatgaatgttaaaatggtccccattgga

SEQ ID NO: 125629 - DNA, 476 bp, Glycine max
  unsure (1)..(476): unsure at all n locations
cttgttctgatggtgctagtgtatatgcagagggaactggaatagctagcaaccttctcagagcagtagcctatgccggggtgaatatctctccaatttactatattatttctggcgaatatcaagaaaatcacacaatatcccatctctctctaggcaatgtctcccttgctgaataagttcatttgtatattcaattatgtagaaaattattttcaaaatattcatcaaccccctaaagtagtcaatggaaccttttctgctggttatttttggctctctatgatgaataccttaagtataaaatttcttaatatttttttggtacatgttcctttttctttcatacatantaaaattcttaatatgacatntaactcttggaagtggcatttnttttttcttttggtttacatggttggtgtaatatgccttccagtaacatctataaccaataaatataaaaaaattgatct

SEQ ID NO: 125630 - DNA, 367 bp, Glycine max
atgaccaatctatgctgctgaataatcaaaagatttaactcttcaaaagggttttgactttttcaaaatggtgttaagtttttctaagttattactcttctaaatggtcttcttggccagacatgaagagtctatgaaagcaaggcgttcatttgcttttcaatacacttttacacttattcaatcaatcctttataaaccttgaatctctttgaacttcttcttcttctttgtaccaaaagttttctgaagttttctgtgtttctaaaccttgaaaacttgtgttattcatcttctcattactcttctcgctttgccaaaaagaattcgtaaggacttaccgcctgaattctttttggtctctctt

SEQ ID NO: 125631 - DNA, 370 bp, Glycine max
  unsure (1)..(370): unsure at all n locations
atccttaagtcacctgcggcatgcaagctngcctcanagaggtccaggaaggacaattcagcagaaggaactagttccgctccggagtatgatagtcaccgctttaggagcgcggtacaccagcagcgcttcgaagccatcaaggggtggtcgtttctccgggagcgacgcgtccagctcanggacgacgagtatactgatttccaggaggaaatanggcgccggcggtgggcaccactggttactcccatggccaagtttgatccagaaatagtccttgattttatgccaatgcttggccaacagaggagggcgtgcgtgacatgagatcctgtgttaggggtcagtggatcccgttcgatgccgacgc

SEQ ID NO: 125632 - DNA, 373 bp, Glycine max
  unsure (1)..(373): unsure at all n locations
taggagctcttagttataatgaacatgtgaacacttgttgaactttgatgaatgagagtcttgtgagacatacttcaaagttccacttctctacctcttttattccttcaatttcgtgctcccccctctctctntctctccctctntcttttcctccattgaagcatcctctccaagcttcttatccaaggctcatcttggtggtgaagctccttcttccatggcttattccctagtggatggtgcctcctctcacctcttcttctttgtcttccgctgcatctccatggtggaaaatcaccattaaaggacctcattgaagctcanagatccagcctncatagaagccccacaagcaagcttccatcataca

SEQ ID NO: 125633 - DNA, 354 bp, Glycine max
ttctgaggaatcttctggagggcccaagtgggcctggttgccatttgcacccgcatttttacttagtacacccacctgcctttctttggtgattctttcttcgtaaagttacgaaaacttacgaatttcgtaacgatacttgtgttctttccataatgttacagaaccttgcggatacataaccatcctcttttttgacttacggaatgctacaaaaccttactaattgtgcaacgatgcttccatttgatttccggtgtgtcacggaaccttacagattgtgcatcaataatttcttgtggtatctggcatgtcccggaatttcacaaatatcctaatgatgggtgccaagca

SEQ ID NO: 125634 - DNA, 359 bp, Glycine max
  unsure (1)..(359): unsure at all n locations
agccctgttagtgaaggaatatacagtaaagtatgtatacagagatcttcatgcacttgctttcgttatgattccgagatggtatgccaatgctaaggacataaagcgactctgcattctctgaagctcatcttccacccatcattacaacaactccattgctccaattctattcttatgtatgttataaattagacaatgattccatgattccattgacaaactagtttcggtatatataaaagcttaacttctattacaagaatctatttagaatacattcttagtattcctactgttctctcatttagatantaaattaactattagaatattttcctggtatcagtagtatctta

SEQ ID NO: 125635 - DNA, 406 bp, Glycine max
  unsure (1)..(406): unsure at all n locations
gggaaggtagtcatacctcacaaaaaatatatatatgttgtctaggtagaaagatacctnggatatgcatgtatgtagcaaaaatacttcacaaaatatatatatgtatgtttaggtagaaagataccttggatatgcatgtatatagcancaatatctcacaaaacatatatatgcatgtttaggtagcaagataccttggatatgcatgtatatagcaaaaatattatacgtatgtttaggtagcaaaatacctcatgaaaaaaaaagagcaaagagagcagcangaanagaataagaagaaaaaaaatagaaaataaaaaagtaataataaaaagttgtctagctaaaaaacaacatgcttgtgaaaagagataatgtccaacttttcgttgaaagaatttac

SEQ ID NO: 125636 - DNA, 424 bp, Glycine max
  unsure (1)..(424): unsure at all n locations
gacctatgaaactcagcttgtaagggtcatggagaacacaacacttttgacttcctccatagtaacaaattttagaagaagttgataaaaatcattctcaatttgaggagtattattgagaatcaaggaactagaagagcaatggctaggagcttaaaataaagtcttgaaaaaataaaaggcctcattttttattttttctgctatgaattgagcatgccttgtgtgaaccaaaaaggcatgggaaaggtgccatangcatggggcctcacatcattgtaggtgaagcacttcaaccaacacaattatgtttacggtttaaaccacctcaccaagttagatatgcgctatggcatgtttggtatgtcaaactcttctgttatggtaagtaattntttttacaactaaatgccataaaaatact

SEQ ID NO: 125637 - DNA, 361 bp, Glycine max
  unsure (1)..(361): unsure at all n locations
attaatacccttggnggtattcaataaaagtgaggtggtgaatttgaacatttaatattttcattggttcgttaattcctctcatggtcgcgcttacctttaacattgggataagagctctttcttgtgagatctctggtgtgcactcgctttccttttcgattttttgcaactctcttcattcgtcataagtgaaacaacacttagcaacacagaaagcttttgtatctgcatccgagcgagaatctagccattgctctcgtctctacaattttggattcaaccaactatcattcatggagcatatacatgatcaccgcgtttagtgcccagaacaatgtagaatttgaagatggaagca

SEQ ID NO: 125638 - DNA, 398 bp, Glycine max
cggaagctcctaatatctcccacactatatggggtgggccattcttggatggccttgattttctcagggtccacttggatcccatttctaccaactacaaaccctaagaaaactatattatctacacaaaaagtacacttctctatatttgcatagagggtgtttttcctaaggactgaaagaacttgcctgagatgtcctaagtgatcatctaggctcctactgtacactaaaatatcatcaaaataaacaactacaaatctacctatgaaatcccttaagacatgatgcataagcctcataaaggtgattggtgcattagtgagcccaaaaggcatcactagccactcatcaccctttttcatcctgatttggtgataaccacttttaagatcaat

SEQ ID NO: 125639 - DNA, 392 bp, Glycine max
  unsure (1)..(392): unsure at all n locations
agcttgtagaacttcaagctaccaatcttgctcggttttgtccaactcatgcagntgcagtcctaaaataataataactgcgcagaaaagaaaagaaaagaaaagaaacacttttgcctcaatgtatgttcatccccgacaccacacactcttttcttttcttttgcggaatcgcgatgagattaaaatttcgttggggatatttcgcaagcgccttatctgtaatgtggaaagaagcgtgcagccttagcctgaaatttcgtcgtgtgtgcttcggcggagtgcgcaactagtgttgtttgcgtggccattttttttctctactacttgtgttttgtgaaaccattacgtaagagaatttttgtgcagccacgtggcagtgtcgttttatc

SEQ ID NO: 125640 - DNA, 404 bp, Glycine max
  unsure (1)..(404): unsure at all n locations
ntgttgagatatacaaaatattcatgctcttaatttaatcttatctatctatttgcttatacatttggaataaatagctgttatgataaatagtataatctcataataataaattggtagacgtgtatagtaatattgtttgtgcttcaagctttaagacttgactttggatgaagattgaagaggatatagtacatataaaatacttaagtataagtatcatttaaatcttgagaaaatattaaatttgttaaatannatgaagtatataaatttatcaaagtttaatttttcaccatttaattttaattaattattttttacttgttttattagtatgtggcaataatttatgtgattaagtttttattcgaatatttttcatcttattagctgttgttttt

SEQ ID NO: 125641 - DNA, 336 bp, Glycine max
ctgcagcttgcaccagtatcctagattctggattttgctcataacagggccttctgatgataactcttgaggccatactggggggcctggctgcttgccgctcatagctgctacatgcaacattcgcgcttgcttgaagcaacaccttgccctcagggagaggaacctactgaagacttgaccagacttgccaccactctgcgacgagatgaaacccctgccattgcactaacaccacctgctttgacccacggacagtcaaaagacttttgtggccgagcatagacactggcatggggactggtggatgatcaactgcccctgggggcgggcact

SEQ ID NO: 125642 - DNA, 397 bp, Glycine max
tgccgcatatcgtcagcaaccgaggtatgagacttttttcatcaactcttcttttaccgagggataccttgcaggccccatcaacatcggagaactgagactaatggatactcctacaccatgacatcctgaatttataggtggataccttgcacatagagctaatgaccctatgaaacttcgcatcaaggcatgaggactataccttaggttccttctcctatgctgatcccttagtattatccctaatggacggagtgaagccttgcggaaacactccatgtgcgcatataagcggcctcaatgaaataccatatgcttctgaagaaaacgattacaccaccattacattattatgaatgtgagattggatctacacaatacaaaagatcatatg

SEQ ID NO: 125643 - DNA, 297 bp, Glycine max
agcttctggtatttataagttatcttcatcaaatgttttctatatctaaacggatggatttcttcactttagcttttgtctagagaatgtgctcgttggatcatttaatgcaatcaaatgtgtgtgcttcttcatactaaaaaacccatctttttagctatcacgttgaacacttcaacaagaaacttccttttgcatcgaagtagatttgcatagtagagtgcatctgttgatgaagattgataacttacaaatcttgaatttcatttattcttcataggattcgataagacccca

SEQ ID NO: 125644 - DNA, 413 bp, Glycine max
taatactaagctttggaggagacatctagcttgaagtgtataattagtgtgaaaccagaattctgcccatggaagacaagaggcccatttcttaagctatgttccacttaagcaccataaatgaactgccaagcattagttgacaacttgtgtatgtgcgccagctgggggatgatatgctgaactgaacttaagctgtatacctgctgctttaaagagggcttttccagaagttgcttaaaaacaaagggtcacgatctgaaacaatggaagatgcagatccatgcaatcttacaatttcctgtataaaaactgccgctacttctgtagcggtgaacggatgtcgtaatggtatgaagtgagcatatatagtgagtctgtcgaccaccaacacgattgtatgcttccccttg

SEQ ID NO: 125645 - DNA, 361 bp, Glycine max
ttgccaagattcaatagataaaaaacctgaagttctaactcaagatggtttctttggtgcatgggcataatgccatcactctatgtctagcaatgattttatttaagatgtccctacctttgagttctactaaaaattatcctctctcaagcgactaatccctaaaactgatgcatataaaaccttcaatgtatttctaccaaggattaccctctttcaagcgcccaacccctaaagatgatgcaaggatgaagcatataatacatttgttggcattctaggcctgcccagccctaactaaaggggtttaacctttcattgtcatgagagacttttacactttagggggttgatatggatg

SEQ ID NO: 125646 - DNA, 370 bp, Glycine max
  unsure (1)..(370): unsure at all n locations
nttacatgcatgttcacactatatttactatacttctatcaactgatgcaatctatttgattgaaaagataatttatattactcttctaatgtagtcgacaacaaaaaaaaaatatatcaaaaaatattgttgttcttttaaagggaagtcaaatggcagatgcacaaaaaataataaatttaaatgtcttttatttaataattatttattttatagaaaaattatttcaaatcaaatatataatgtatggaattttaatacttagttggccttcagccaacagtgcctaattctaagagtcatttcaagcacaagttacaggtctttgctttcataagaacatggggatcaatgctctcaacaaaaaca

SEQ ID NO: 125647 - DNA, 356 bp, Glycine max
cacataatttatatatggatgcctaggtagaaagataccttggatatgcatgtatggtaccaaaatacttcacaaaatatatatatatgtatgtttaagcagcaagataccttaaatatgcatgtatatagcaaaaatatctcacaaaacgtatatatgtatgtttaggtagcaagataccttggacacacatgtatatagcaaaatacctcacaaaaatatacgtatgtttaggtagcaaaatacctcatgaaaaaatgagagcgagcccgaaaagaataagacggaagaaacaaaaatagaagaaaatattaaaaaataattaaaagttgtctagctaaaaaacaacatgcttg

SEQ ID NO: 125648 - DNA, 421 bp, Glycine max
ctatcatggacctataaaactcagctttaacaaatgtcttcacaaataatcatcacacagtagagacctatcacgactacccatcatatctccccaaaccccatacccacgaaaattaaaggagaaagaagtccacccaacctgaaatttcgaagtcccactcgtagccacgcacttcacgaccccgaaaatgccctccttttgcgatttggggcagaaatgatggccaaaggttggagctttgttggggtttcaatggagaatggagaagaagagaatggcaacgtgagagagagagagggctgtctgaaattttgtggggctgagtgaagagagagagagagttgctttttggttttaaatgaaaggggtttctctttttctattatattggttaagcaatgccacatgtctccatttg

SEQ ID NO: 125649 - DNA, 193 bp, Glycine max
cctcgcgtggctcacatgcgaccattggtagaatgtgtagatcccttgagaagctttctagagactactatcttgagaggatcttctagaatacttccgtgagatggtatagcttcactacggacgccgatagtataactaatctcacctacttgagaggctttgtttataatattccggaggatgctatagc

SEQ ID NO: 125650 - DNA, 388 bp, Glycine max
tgcagagtatacgtagcatctaactctgaagagtatctgacccgacggaggattatggtgggatgctacaccagctggcgttacctgactgtacgggaaagggacgacgaggctatgtccgatatagttatgaggaatttccacatgaccacctatattgagtccattagatcatagtgagcctatcaatcggccaatgtctgtgcctgcacacccgcttcaacatccatatgactggacacatgttatatgggagcctagatatgtgcttaattatgatcgaagttgctacagatacaaacaacggtgagcttgccgccgaaacatgactatgcgcttggctgatcggaccactttgatacaccccatagcttgtaaatgacattat

SEQ ID NO: 125651 - DNA, 380 bp, Glycine max
agcttgtgaaagaagtaggaaacgactagggaaagtggttgccggtgagagcatgtgggtcccacaacccaatggccaatgtctatatccaactgaaaaatttcagttaatggagaagccctgaaccccacatttaggacattatgcgtgtgtcttaacaaatatttctaacttaatataatagtattactttatactttaataatatttctatatattttttataattgcgcgtctaaaattaagtgattattatcaacatatgtaaaaaaaatgacttttactaaatcaatttatttgcttttaatcaaactgaattctacaatattaaactatccaaaattaaggttggacaaaaatgttaatttgtggtaacttca

SEQ ID NO: 125652 - DNA, 391 bp, Glycine max
tgtcagcactatcatttctctcacgaaaaataagttatactacaaagttcatagatttcctgagatcaatacacctcttccaacgattccaaatccgccaagggacactgacaacagaagagaagggagcaacctcgctagtggaatcacattctaaccatatcctttgccatcctttatcaaatgccatctcaatagcaatcatggccgtaagcagctcatcattaagagaaaacgaaaccctaaagacttggcaaaaaaccaataatcaaacccaaagagtttctaaaaatacctccacaagccgcaagccccgaagaacccctgcaagctccatccgtgttacacttgatccatccttgcaagggaggctaccaagtaacctgaataa

SEQ ID NO: 125653 - DNA, 258 bp, Glycine max
agctttacttgactggttcagactcttcacgatcggcttcgagaggaaacgtccagagtcactagttaccttactgccatatatatgctgcgactgcaccgtattgaatttcataggatccatgctagctccaatgatagcatattgtactcgcctgtgttactggaaatctactactgcattatgtgtggcgcatatcagacataaagaatgtgatgactgatagaattctgagaaaaactcttgaagagccctcgc

SEQ ID NO: 125654 - DNA, 306 bp, Glycine max
tgaagcaacacgatccatttgaggaatagtcagatattgagagcctgttacgtgcctaactcgcgagactggcgtatgtaacagatgaacagttgactgtagcataaaacaacgatgcttattgatgctggacagctcaggatcatatcgagatgaagaaaatggcttaggtaaaggattacccctggaggcgaaacgatttctagggttcgatgttagcacagggggctacgatgacatcctgtcctccgcaaccaagatagacagctacgatatgagactcacgaagactttggaaatctttaa

SEQ ID NO: 125655 - DNA, 364 bp, Glycine max
acattctttgtggggaagctccctcttccatggcttattccctagtggatggtgtctcccctctcctcttctcctttgccttccactgcatctccatggtggaaaatcaccattgaaggacctcattgtagctcaaagatccagcctccatagaagctccacaagcaagcttacatcatctggtcctctagcttatcaactacaggagtaaaggggtcagttgcatgttgtggtgaagagaggtctaccactagagcaaggggctctgaagtgccctcaaaaagacctctcaagagtggtggcaagctctggtctaaccctgctttcacctgcatcatgttaaaaaagaaatggctctggaatg

SEQ ID NO: 125656 - DNA, 380 bp, Glycine max
tctcaaggaagctacctagtctataaatagaagtatgtgtaacacttgttgtaactttgatgaatgagagtcttgtgagacacaacacaaagttcaacttctctccctttttcttccttcaatttcgtgctcccccctctctctttctctccctctttcttttcctccattgaagcatcctctccaagcttcttatccaaggctcatcttggtggtgaagctccttcttccaaggcttattccctagtggatggcgcctcctctctcctcttctcctttgtcttccgctgcatctccatggtggaaaatcaccattaaaggacctcaatgaagctccaagatccagccctcatagaagccccacaagcaagctttcatca

SEQ ID NO: 125657 - DNA, 315 bp, Glycine max
agcacgagactaacaggcacattaacaacttgttgacgaatctatgctcgatttgggtaacgatctatacaagagcttagagagcttccctttgtgtagcaaagttattgcattttattcgagcttaatttgtatatgccctcttggaaagaattgagtcttggacttcattaaaatcgtagttggaatgaccctcgtgacttagtgatgaacaatacttgaacgctctttaatttcatggggagattaaaagcctgtcattacctaagaggcccaaggaatacctgttgtagctatcagtgatctgacatgata

SEQ ID NO: 125658 - DNA, 330 bp, Glycine max
tttttttttttatggggccaaggaatgggtaattttaacggatgaaccctttaaaatttgacggctattacttcagctttggtacttaatctaattcctcagggaatatgtgacctcaggtaaaaggttaatcacccaagtttaggcttgatgcatgctattaacaagctaataattcttgacaattctcttggattgtgcacgcccttggggactgactctctcttatgctttctccttgacaggatctcaaatattttggactcgactggattgccacttataaactacattatctctgttgaaagaatcaagcaattcattcaccta

SEQ ID NO: 125659 - DNA, 337 bp, Glycine max
gccaatcttccaacctttggtcataaaggcttcatcctacctttaacctcaaaggaataaaacttcattaccttcccaaatcttcgtcctgatgaactaattttactcattaatttggtccatggataaaactagaacatgtcatgcatcgtcatttcagtaatatagaaaaaggaaatcaaaattatttgaatataacaaaaatctgacaattgtacaatcaaaaaccttgggcttagactctgatatcgtggaaggaaaagtgcaacattaagcctttaaataaaaaagatatatattgccgcatatggatgattatattattttgctatgaaaa

SEQ ID NO: 125660 - DNA, 409 bp, Glycine max
gctgagctctggtacatcaactgcgaaactgccccattctttaagcagcaaatcaacattctgcaaggtttcttagttaatgaagttatgccttttaatcatcaaagaaaactaaaagaggtgaaaaagattcaaaacgcaaaccttgagattcatatgaccttctagcatatcatgacattgagcactacaagattccacttgacttaatagattctgaagcatgtctatctccgggagttgaacttgaagatccacaaactattgtaaacatgaatttcatattataaatttataatctgcaggtaaatcatgttctgcacaatgtgtgtgttgtgtctgtgtacaatgtatactactcacataaatgcaaaacacatgaaataatttaacaatgcatgagtagtcc

SEQ ID NO: 125661 - DNA, 387 bp, Glycine max
gctggagggggacattccaatggtggaatgcatggactagttgcaccaaaactatgagaggtgaaggaagagaaaccagtgtttcgaaaagtcactaacgaaacacttcaagtaggcaaccaaagtttgcttaacctcttctgtttgcctatctatttgggtgtgggacacagtgtaaactggaagggtttatgaagacttcataattcatagtatttttttgttgatgatgagttgtaaaatttataaacattagttgattaggatggttgttattgctttaatacattgtgtatgatatcatacatacatccatcctacactaggagatgtaattgctttgattcatgggtgttagccttgaagagctgaaactcttgtcactta

SEQ ID NO: 125662 - DNA, 403 bp, Glycine max
  unsure (1)..(403): unsure at all n locations
nttatcccataatggataccttcactgaaacctattaaatgagcaaaaaagcacgacacttagtatgagactaagaagcccattaacaaagtgttgttgaaactatgctggatttgtttaatgatctatacaagtgcttagagagctaccctttgttttgcaaagttattgtattttattcgagcttaatttgtatatcctctcttggagagatttgaatatttgtattcattaaaattgttgtttggaatgtcaagcgtgacttagtgatgaagaatacttgagtgttctttaatttcatggggagattaaaggcatgtcataattaagtggccaaaagaatacttgttgtagctatgagtgataggaaaaaatacttgttgtaatcaattattgattagtg

SEQ ID NO: 125663 - DNA, 349 bp, Glycine max
tataaagcactaataaataaaggagattaaaggaagagaaaatgcaaactcagttttatactggttcggccacacccttgtgcctacgtccagtccccaagcaacccgcttgagagttccactaacttgtaaattccttttacaagttctaaacacacaaggacaacccttcctttgtgtttagagatcttttacaacaagagactcacagtctcttaatcccttagaaaatgagaagaagaagaggaacaaatctctctagaaagagatggattttacagattgagcactcaattaattccttaatgaattgcaattgaattggccaaggaattcttaagaggataaa

SEQ ID NO: 125664 - DNA, 395 bp, Glycine max
tggtgaactaatggaccaaaatgtatttctccaactgtctgacaaaagatacttggtcatgcaagactaaggttaatcttaaagttgcgaaaacataacctcgtaagaggactaccaagtatgtcgtataaggattattttctttgtgagtcatgtcaaaaacggaaacaagtaaatatttctttttctagtaaaaccattgtttccaccttgtcataccctaatttcgtccggggacctttgcttgatgacatgcgacctttctttggtccttgtgaggtgcttggcacccatcattaggcaatttgtgaaattccaggacatgccggaaaaccaaaaaatattgatgcacaatccgtaagtttccgtgacacaccggaaatcaaatggaagca

SEQ ID NO: 125665 - DNA, 392 bp, Glycine max
agcttccatcatagagtctcttcctgtttcgtggttcggtcatagagacttggcatctgctgttgtggccttgtaaatgaaccaccctggtctctgttgaattggttaccagggtgattttgccactgtctctgctgttgatagtgttgattgttctgaaatcctggaaatacacttgtattgaaattgcctttgggctgattccccatatataattaacttcatgtaaaattttctcttcatttgggatacaacatccagattcatgagctctaccacaaattgtacatcctgcaacctggaaaatagaagaatgtaaaagttatgcacaatgaagctgagttggcaacttactgagagtttttgttaatgcctctagttgcttacatagc

SEQ ID NO: 125666 - DNA, 413 bp, Glycine max
  unsure (1)..(413): unsure at all n locations
ntgagccaaaatcctgactcactataaaccttgacccagggtgagaatgtcaatccttaccctcgggagcaaaaaagaaaagaaggaaaatttccaatcaaagaggaagcaaaaaaaaagggagagaaggaaaatttccaatcaaaggaacgaaaattccctatcaaagagtgggagaaagcaaaaagaaaagaaagaaaattcccaatcaaagaatgggagaaagaaaaaaaagagaagtaaaaaagaagaaggctcaagggtcaaagaaaccagaagaaatgtgcagagaggtctttagaccggacaatatctgaacaatacagaattgtcaccaaatgaacaaaaaaaaggaaaggaaaccatgacctaaaatggtcttctccctttaattgccaaccagaatcagtgcg

SEQ ID NO: 125667 - DNA, 356 bp, Glycine max
  unsure (1)..(356): unsure at all n locations
aagcacctgcggcatgcaagctntangaccttatgtttatttttttggcttctaaatcttttgacttgtaaacaaaaagtttctttgtaatatttcaatgcttaagtgaagtgttcagattatgatgtttacaattacttcaacaagtccttcgataataaattgttctttctttntgcataagcataatcatgcatcattctgcattcatagtttccgcatcaagtctcacactgtgttcaccacttcaaaaggataatcagccgccgtccgaagaaagtggcccgacgaattctccgcaaaccaactcgcattttcagaaatggatctaattgagcaagaaaatcagagtctca

SEQ ID NO: 125668 - DNA, 389 bp, Glycine max
  unsure (1)..(389): unsure at all n locations
tgttggccgcgatagacatatggtgcagaagacgacgtttgtctccgcatgctatcatgcgctgagtcttagagatagcaaaagaatgtttatacggataaccacttaggtaattccgcctgccccctaacttcacgagttagtctcgacagaggttgtctgcgtggaagacgacgtaaatctccgcgtgtgaacaagcttgttggccgcgattgacaaagggtgcagaagacgacgtttgtctccgcatgctatcatgcgttgagtcttagagatagcaaaagaatgtttatacggataaccacttaggtatttccgcctgccccctaacttcacgagttagtctcgacagaggttgtctgcgcggaagacgacgtanatctccgcgt

SEQ ID NO: 125669 - DNA, 371 bp, Glycine max
  unsure (1)..(371): unsure at all n locations
agctttgctaaaatatattgcttttaaaacgctcatgcatatgcatacacatgcatattggttatcttgtgacagtgacaagatcgttttttgagcaattgtcaaataccgagccaaatccaagacagagacgaatcgaggcaatcggtaacgcggccacgatttgctgcgcaatgtcatttcctgctttcaggtacttggggacgggcacgagtggaggctangcccatgatccacagatcgccatcccacgtccagctccagacaagcgagaagcgctactgggaggcagcctagtatcctttaaattcctatttattattattggaatttttttaaggtgatggtcagatgcctaatttaccctaagg

SEQ ID NO: 125670 - DNA, 398 bp, Glycine max
ttgagccaaaatcctgactcaccataaaccttgacccagggtgagaatgtcaatccttaccctcgaaagcaaaaaagaaaagaaggaaaatttccaatcaaagagaaagcaaaaagaaaagaaggaaaatttccaatcaaagagaaagcaaaaagaaaagaaagaaaattcccaatcaaagaatgggagaaagtaaaaaaaggaagaagaagaaggaaagaaagctcctgatcaaggatcgaaagaaaatagaagaaatgtgcagaaaggtctttggaccggacaatatctgaacattacagaattgtcaccaaatgaacgaaaagaaggaaaggaaaccatgacctaaagtggttttctccctttaattgccaatcaagatattgtgtgctagcgac

SEQ ID NO: 125671 - DNA, 380 bp, Glycine max
ctgcagcttatgcaaaatattctatgattaatcttaatacaatgtagtaccatgtcagtgaaaaaccttgacgagtacctacgagtacatgacaagatagaccacacattggtaagttaggtcactctcaccaggtaaaattatagggagaccatttagggtcacgcttctttgcgagaatgctccaactatgtgggatcagcatatgcttaaaggagcactctaaccgggtgtatttaccctcaatgcatagactccgaagagtctatcaaggcctctccctcctgatgtaggtccaaccctgaaaacattttagcacatagactctattatgaactatacaaaactcatgactctctaattgttctcacaataatttt

SEQ ID NO: 125672 - DNA, 388 bp, Glycine max
tgccacccagctcgcccaatcgagcaagggtgcttcctccagaagcaacagccttctggaggaatcttctggagggcccaagtgggcctggttgctatttgcatccccacttttactaaatacacccccctgccttttttttgtgattctttatccgtaatgttatgaaactttacgaatttcgtaacgatacttatttttcttccgcaaggttatgaatccttacggattatgtatttactcttttttagctttcgaagaagatacggaaacttacggattgcgcaaaaacacctcttttcgacttccgccacattacagaatttcagggatcgcgcaagcctgcttcctttagatttctgagacgtctcaggacttcatttattgt

SEQ ID NO: 125673 - DNA, 381 bp, Glycine max
  unsure (1)..(381): unsure at all n locations
agcttgcatccattataagagaatgttcatgtgattggaagtatgactgaatatgttagtcagtttgtcagattgattgtgaaggaatgcattgagcgtatcccagtgacagcgtgatatttaaattttgagagaaacgactgtcatttagtactgatttttgcatgaatctctgaagtatggactgaatgcatgaaattgattgtgatagccacttagccaaaaagttgaccacgtgctataatgatttatcccatgcacccagcttgagctgaatgaattattaattgattgaaccctgagcctatatagtgttatctcctgctaccttgacttangttgtaggagagcatcatccataggaagcgtggttcaaagcaa

SEQ ID NO: 125674 - DNA, 387 bp, Glycine max
  unsure (1)..(387): unsure at all n locations
ntataagtgcgggtctgggagacgaaggtcaagtggtcgcgatatgtgaagatgatgttccaagaactctggatttggtccgaccatgccctcctgatttccagctgggaaattggcgggtggaggaacgtcccggcatttacacaacaagcataatgtaaacctttacggttttaaaagctctatagttgggcctaggctttagagttttcattttgttaaggctttgtgtcttttgtctttgaatttataatacaaagatctttcttcatctgttcctgggctctacccattctcattcatttgcatgtttacttctttttctaaaacggcagatccgatgacgagtcccccgaaggtactaatacctgcgacccgtctatcaat

SEQ ID NO: 125675 - DNA, 307 bp, Glycine max
agcttgatcgttttgataccaaaatctactatagttaaactatctggcttgacataactaacgcctctacatttgggtgtgatggaaaagaaggtgcacaccacagaagatccattcaagcgttgcatccagtcaagatgtatcactttgatgaacgaaaaagatgatgggttcatcataagactcatggcactccccattatctttaacaacactatgtttcattttgactacattgaggaaagggactaccctgatcatatgatgcaagtatatgaaaccctctaactaaaaaggaagaaatgga

SEQ ID NO: 125676 - DNA, 382 bp, Glycine max
tcatcttgggtagagatatttttgtccttcatggttataacaaccaattggtcttcttctcaagccttctgctctttttgagcatcaccgagttgagtccttcatggcaacgacaactttctttttaactcactcttaagtggttccactgtggaagcaatgccttccaaggttatattgatgatgccaaagaatcaagagtcaagcaaaatccaaagattcaagaatcaagtttaaagaatcaagattcaagattcaagaatcaagtttcaagaatcaatattcaagagaaatcatgatcaagattcaagactcaagattcaagaatcaagagaagactcaatcaagataagtactaaagaagtctctcaatacattgagt

SEQ ID NO: 125677 - DNA, 298 bp, Glycine max
ttattggtgaccacagagtggtacctggaaatatgtcccgggggtcaagagaccttggggacgtcaagtggggtgctattgcccaaaaccaagcttgaccaatcccgacccaacccgggcatagtcggtcagtgagaacctgtgatgtacctaagcaggcgagctcctggcagtcaacagataaaaggaaaacaagaccacaaagcaaggaggcttgtggtggctggccagctgtgaattttgtgtaatatgtggatggtggcctcttgtaatcgattaccaagggggggtaatcgat

SEQ ID NO: 125678 - DNA, 378 bp, Glycine max
tagacttttttaaaagcctattaaattaaatagattatgcttaggcttattaaaaagccttataagcctgataggccgacctatatatatgtatatatatttatattattttttggtaccaatttatacttatattattttttgggtacaattaattttttttttgaaaccagcagactttgattacacattactgctccataacttccattcctataatcaagtgagactttaattacaatttaagtgtgagtcatgtacccctttatattatccatgatttttattggcttttctattatggttaacatttccttttccattaactttcctattacgttcctactccaaagcaaacaaatataaaaagggctttta

SEQ ID NO: 125679 - DNA, 382 bp, Glycine max
agcttatgctgcaaatatttacaatttacctcctcaacctcagcagcaaaatcaaccacagcagaacaattatgacctttccagcaacagatacaaccctggatggaggaatcaccctaacctcagatggtctagccctcagcaacaacagcagcctgctccttccttccaaaatgttgctggcccaagcagaccatacattcctccaccaatccaacaacagcaacaaccccagaaacaaccaacagttaaggcccctccacaacgttccctcgaagaacttgtgaggcaaatgactatgcagaacatgcagtttcagcaagagaccagagcctccattcagagcttaaccaatcagatgggacaattggctacccaattg

SEQ ID NO: 125680 - DNA, 380 bp, Glycine max
tggttttgggcaatagcaccccacctgacgtcctttatgtctcctgacccccgcgacatatctccaggtaccactctgtggtcaacgaataaaagcaggaagtttcacccttctacacttcctcaactcaagcttgtaggattatggggtacccatcacatgtggtactaggtggcggtcgggcgatggtgcacaacaagttttccacatccacaaagcgcacataaacccaccatcccctgttgcccacctccatctgagctcacgtactcccacgtagcccatatcctcgtttctctcaacaccgggtccccatcaatcctcccaagcttccacaacatccaagcaaaacaacattcaaacagcacaagctatcacag

SEQ ID NO: 125681 - DNA, 345 bp, Glycine max
ggaaatttttgcttcatttattatgccggattcttactttctatgtgggcggatgaacctactccgctgaccgttgttatatattacgtcacaagaaagatactgtctctggtctcgtatataagcgaaagtaatgacttgccatagatgggaaagctagttgaggatctatacctttactaatctcaagtataaagtctggatcttcttagaatgtcctcccttcaaacctgatgccttgtgtagacatgactccatcaacattgcattactgataaatgaagattggatacgagtgacatcataagtgtgagcctcgatgaactttttgctgatatatgaata

SEQ ID NO: 125682 - DNA, 121 bp, Glycine max
tgcaccacggcaatagcatcgggacgtcattggttattaaactaagctatgtttacttttttgagcatggctcccacagccaggttaggaccaaatgattaaacgatcactctgatgacaa

SEQ ID NO: 125683 - DNA, 287 bp, Glycine max
tcttataacttatccaatttactccggattgataaaaataaaatggcgcattgatcttgtaagccccgctgatttttttcatccgaatttgacaattattttcaaacgttggcgatatatttttttacgttagagatgcttctttgttggtgttgtcgaaaactttacaatgacgtcagctagtttttcgttcactcaaacaagtgtggtcaccgacaccggcatgtttcatttgtcgaaacaaacgtacccacctcgaaaaaactgatcccgatctaatcgaaaaa

SEQ ID NO: 125684 - DNA, 322 bp, Glycine max
aggatgcccgaatagtgcgtcgtaaatattgggacactcgatatttattctcagaggccctcctgagatccgaatggtcctaccttatcacacaggcgcccgattcgggcaccttaaatgaaaagactctccatattgaacaacggaggctctcgcaaaatacatatgtgccaaaccttttaatttggcgaccgaatcaagcgcacgatgagatatagatgcacgcaattgaacaatagtagctccctcgatatataaatggacgaatctttatacttaaaggtccgaatcaggcgctttgtgtataaagatgtctctatat

SEQ ID NO: 125685 - DNA, 392 bp, Glycine max
agcttaacggtattgattctgtgatattcctcttgcaccaaaaagataagaattctgttagcagaggatagtataaataagtatgtaaataaaatcagaatcataaatgagaatatatttccttgccttattccttctccccttccttctatggaggccctggtcctcgaaaccagctaattagatctcccccctaacattggtgctctcgttccttcaccatgaccgaaccacctccttcttccgccgacaaattggaagagcttctcgtccgcctcacccaccaacaattatccctcaccagcaaaattgacgatctcatacatcacgtttcccctttgataccacccgccccgtccttctcctcacctttacctcgtcaattccccgtt

SEQ ID NO: 125686 - DNA, 405 bp, Glycine max
  unsure (1)..(405): unsure at all n locations
tagcgagacaccagctactacacctgtccaattttcttctttntacctgaaaatgaagtgaaatttatattaattccatgcggagagcctctactgagcaaagataaaactaaacaagaaaatatttacaatcctacaaaaagaaccataaattggagaaaatatatacattttggaaaatgtttctatacaaaagttaatcgtagatgatgactaacaagtagtaaacaagaacagtatgtaatactgactagtgaagtacataagtatgttgaaattcataccagtttgtctccaaaaccagtttttaaacttacaggcgctcaaaaatggctccacatcagctcgtcccattgacatttgtaaatttgacgcaacatttagaagttaaaattgccaagattg

SEQ ID NO: 125687 - DNA, 301 bp, Glycine max
agcttgtgaaggtttgatgataccattggacaatgatgaaataagtgttgaagaacaggagggtgggttgaatggttttccttattcgattagagcatcactatgttgtgaatataaacccgggctattatctgatataaaacaagcactagatgcccttcatcttatgataacaagggcagatattgcaacattggaaggcaggatgaagaatgtctttgtgataattagtagtaaagaacaaaactttgaagatgctgcataccggcagtttctcgctggttcttgtcacccagctctc

SEQ ID NO: 125688 - DNA, 406 bp, Glycine max
  unsure (1)..(406): unsure at all n locations
ntgtccgcanatccctcttgtaagactatgcttaacttaaatagcattatcgtaatagcatattcaaaaaaccaaaaccccataatccatcccttgcaatgtagttattcagtcttgcttccatcaagttctaaggcaacagtacatttcccaatgctaaagtcacctaactatacacacaaatgggtgatcagaccaagagcatgcaaaaattaagtattgaaagaagcattgaacacataaaacacaattaattggatattaaagtaattacatcagttgtttcttagaaatccccaacaagggtgtttagtcagccattacagaaaaaccctaacacacatgagatagagtacaaaataattattccttacacaagaagagggatccctcctcctcttctcag

SEQ ID NO: 125689 - DNA, 373 bp, Glycine max
tgagacgtaaatttgaaccttaaattagttacatttcaaactaagatagaaatttgaatagcttcaaggttccaccaaagagggaaaaatcctaattatagtaatttttaaaaaaatgcatagtaatgactgaacactacagtttataactacaaaaataatactaacttctttagtattgaccattaagccaaactcaggttcacatttgttttccaagttaaatgacttagtacttgcctcgtttaatttatttaaaaataattactgttcactagttattatcaattattgcggaaaaaaacaaagaatattttgttagtttgcatttcccaaatatgaaacatgtgcttaaattaattaaataagaaaa

SEQ ID NO: 125690 - DNA, 308 bp, Glycine max
  unsure (1)..(308): unsure at all n locations
tttccatccttggtgtttttgctttccattgatgcgttttcttcatcttctggcgccttaatttgtgagaatatgcttataattgtgaggcagctttggtttgctttggtgcttgttttcttgaattgaggattttgaatgaaaaggccttaagcctaggatgttttctgaagcaatggggcatgccacattgtttccattctcttgcaatttatgtccaaacatgctcccaccaagtgctccgtgaaatgcctcaatgacatatgagcatggtttttntggctttaagattgtgggactgttttatt

SEQ ID NO: 125691 - DNA, 383 bp, Glycine max
  unsure (1)..(383): unsure at all n locations
tatataggatttaagttatcgtaataaataaaacttcattggaagggtagntataatagatgtggagatctttcttcgctctggtcatataaaggaataatactcttctattaatatccttatctcagtatctctctggtcctttttgctcaactcaaataaataaaactatttaaatgtgtaatttgcttcatccaaaacaaagaaattgcgaaaggactttgatagaattgaaaaactccacgccagattatgtaaagcttattaatagaataacatcaacttagttcataatcattcaactggtttagtaatggtttccaaaaaagggatagtgacaagtccatttactagttcgtgtaagatgttaatctctgcccgtc

SEQ ID NO: 125692 - DNA, 386 bp, Glycine max
agcttgtaagattattgtgtacccatcacatgtggaactaggtggcggtcgggcgatggtgcaaaaaaatttctccacatccacaaaatacatataaacccaccatcccctgttgcccaccttcaactgggctcacgtactcccacgtagcccttatcctcgtttctctcaacaccaggtccccatcaatcctcccatgcttcaacaacatccaagtaattcaacattaaatcatcacaaactaacacagccaagaaaacagggcaaaggcagaaaactctgcccaaaacacaaaccaatatcacagctgttcacattcaaataccccagtaacattctcttcgttccagttctttaaccgttggatcgactcgaaaattttattg

SEQ ID NO: 125693 - DNA, 350 bp, Glycine max
taacagccaactcctgatgtgcatgcctcacgagtgcaaatctggaatatgtacacaagttcttcccctcctccaacactacaggggtcttcagaaatatattaagagtatctccatcaaatttcactaaatgacctctcaccctcacttgcttaggtgatttatcctccgggtcataaaggttggcgttaaactccttcacaatagcgatgtctatgctactgttaaaaaaatcagccagcttctcatcccaatggtttctctttagttccctccttgaactcatcaaactctatgtaataaactaccacattccactcttgtagtagctttcgaggcaccacaatgtc

SEQ ID NO: 125694 - DNA, 347 bp, Glycine max
  unsure (1)..(347): unsure at all n locations
ttacatgcccgactcactagaagggcattggtatngatcatcgtaatgtgtgttgcctcttagattaataatatcatatgtgcatcatgcctcatcatgtaagattaagaaggaacgtttctaaagttggaaaattgctttagtacttcaaactctttgttttaatcaattacaggctgatcataatcgattacaggttcatagcaatcgattacacaattctttttgagacaatgatcgattctttcatgagtctttacttgaatagattactaagtgatataatcgataacttatttcttaaaaagggtttcataagtgatcaggtacactttaatctattacat

SEQ ID NO: 125695 - DNA, 367 bp, Glycine max
tgaatctgacgctgaacacacgcagctgacttcccaagaaaatatgataaggacgaagctgcagcacgatttttggtcatcagcccaagctcacgagtctttaatgaggcagaacgcgagatcgcgttggattaacgacggggtcatatatatccatattttcacctggtgattaactcccatcgaagattgtagctttttccaacagagatttccagaaactatgagcagcataccagttctgaatggcacctcttttcaagaaactatgctctttggggaggctactatgaaaaatgtcaagacaatcaaattgattttgagggcttctgaattgtcatcaggacttaaaataaattatcggaag

SEQ ID NO: 125696 - DNA, 392 bp, Glycine max
  unsure (1)..(392): unsure at all n locations
ttgatgtgagcgaactaatagttaatcttgatgtctttttagagaaaaagaatagcctgaataacatttgcagntaagttaacttcaagaactcattagaaactggcaaccccaacttccagaagcttagatgttatcaatctaagctgatcttgagattggtatatgggaaaatgaatacctcgacaaacagttacaggacatgtgacattatttcaacaagtcattgggtaccaccatttctaacagtcaattaccattcttcatgtttttgtgttgcaaagttccatataggaacacattatttatttgtttcttattgcttaaatgattgaggggagtattcatacttgtcttgtccatcgtttgatagtacttgggctccactttta

SEQ ID NO: 125697 - DNA, 359 bp, Glycine max
tcgcaggttacacgacctacccccaaactggctatcaaaaccttcaaccaggagcaagtcaaacatacttctgacaaacatcaggggaaaagctccacaaagcaaaaggaagccctaccaaatgggtgacaagacctttaaccaggttgaaatcaaacctgagatgatatcttgtcatctactttttgcaagaccaccacagtcctacctctacattgccaaggtcttgcttcttgttgttagtcgtcatttagggctaacttttgtattgaaaagtttaataaaatttatatcttttccccaatttatggttcttttttgaaggatgtacatatttttatgtctagtttaatttactg

SEQ ID NO: 125698 - DNA, 380 bp, Glycine max
agcttattatagtaagtatacaaaattaacatttagtggtttaatgattcatgaataattttcacaaataaattttggaagtgtgcattattttcaacaaccatgcaacccaccataatttggattgtttcttgtctttccttgatgctttcatccatgatatttgagtccaagtggtatttttttccaatcaaagcaaagcacaaccaagtaccaatgaccaatgttgccatatactagaatgtaatctacaatacatgcaaagcaaaaaaagtatgtgtcattcaataaccttacattcaaatattgatgtcaaaaacataaaagaatggatgcacatgattaatatttgtgtatagccaatttaatttttcatgtaa

SEQ ID NO: 125699 - DNA, 377 bp, Glycine max
cagcttgaatgagactgaagaagctgctgctcatgttttacaagatccggtggagattaatttatctcagcctcatttgtcacaagatagtgacatggagttgatggtaaatatttgtcacaacaaagtagttttatctcaacctaatttgttgcagcactccatttttagatattacaattattcatgtttggcatttacatgtaggtccctgcaactatggttccaccaatagcaaggaataagctaaccataacaagagccaaacaaaggaaggttgctgataaagatgatgcagaaaactgaagaagcattttttgttgcattttgaaggttgctgaaggttgctgaagacccattttttgttgcgcattttg

SEQ ID NO: 125700 - DNA, 403 bp, Glycine max
  unsure (1)..(403): unsure at all n locations
gcttangacaaaatcaataatacacaaataataataataataataataataataataataataataataataataaatatttataaaaaatataatagaaaagttctaataagagttctttttatggtatgttactagtattcaaaatattggggtgctacatacaaagtattcaaaaaacacgcatagtcctagctaactatagtaacaatatcgtgtcatctatttcaaattcacattatctattagttacaacaatcccttatcatgtcatgtatttcaaattcacattatctactagttacaacaatgttatcatatcatgtattttaaattttcatgatctactagttacaacaaccttatcatgtaatgtattttgaatttacattatcaactggtt

SEQ ID NO: 125701 - DNA, 392 bp, Glycine max
  unsure (1)..(392): unsure at all n locations
cctttgaatactcaagctntgtgtggagcttcaatggagaatgaagaagaagttaatggctacgtgagtgtgatagagatggctgtctgaaatttctgttttgctgagtgaggagagagaaaagctttttggtcttaaataaaaggttttcctctttttctattattttattcaagctctgccacatgtccctatctgattggagctaaaaagtcccactttctctttttgactgtgacccattctcattcacaaaagtgagaacaatctgacctttgaaacgcttaaatcctgcctcggtttgcgtgccgattctctgattccactttctttcgtttcttctttttccgccggggccaatcttctaaagctatcattttttctttattaac

SEQ ID NO: 125702 - DNA, 261 bp, Glycine max
ctcaactgaatcaaactgcggaatatatgagaatttcaacacatatgttatacattacaacaactaagatcgggcacaacaactttaccgcaatattaatccctctcataaattcaaaacacaagggcattaagctgtcattagtatgaaaatgttggcatgaaattttatgccttactaccaaaatgttgtgggaagatattgcattacttactaattctccttaccttgaaattaccatggtttatgtagtaacataaa

SEQ ID NO: 125703 - DNA, 402 bp, Glycine max
tgctaaagtgaaagctcatgtttcagaagtcaaatgtgttatgatggatattattgagaaggtaaagcaattatcatcttgtctcccctcttgccaggacactacgcagatatttatcctttttgctgtgggtgggttgaaagtgttttctgaagctaaaatttcccattagtgtttattttttgggtaggcatatatggagaggtttgaatttaaacttgcataatctggtaagtttttgactgatatgttgctgtgacatttatatcctatttggcaggttcttgaccgtggggagaaaattgagcttttggtggataaaacagagaaccttcgctctcaggtccattgtttgctactattgcatgttaagatcttttaatgattctgtaaatgcaaagt

SEQ ID NO: 125704 - DNA, 391 bp, Glycine max
  unsure (1)..(391): unsure at all n locations
agcttgttntagctaaggatgcagtttatataaatggaatttctcangagtacatagaggagtgccaacatccataagttntggaccctaatatagggttgggaagtatcattatctgcaccttctcaacgggcttcaataatggaacctcaactcttaatgctattattggcacctcgaaggctctagggttggagggctttatcttagttgcaaacccaaactatggtgattatattgcagagccaatcccttttgctgtttctggtattatgatccctcgtgtagatgatgccaaggtacaaacgaaggacttagtcagtattattactatcatttatttaactgaaactttactatcagataagtaaaaaggcttcttgaaagtgta

SEQ ID NO: 125705 - DNA, 402 bp, Glycine max
  unsure (1)..(402): unsure at all n locations
ntatatgacaagtatcatcagaccctagggcaaacaagtatgtaaatgattctacaagataattcaccaactagtattaagggttgggggtgggaggaggcttacagttttccatccatctggatctaaaaacgaagtggtttttgtattaaagccaggaattggccctggttgccgagtaatcttccctccaacctcttttatgacttggttaactacctcagcactcttatatacatcatcagtaccaatggcaatctgttacacagggagcatgaattttatcattaaggagtacagaaactgataaaactcataaaagtgaagaaagccagtttatgcttaaagaaggtcaggtaatacaacctattaactaacctgtgcataagcatttcccttaga

SEQ ID NO: 125706 - DNA, 411 bp, Glycine max
  unsure (1)..(411): unsure at all n locations
cgacctgcagcatgcaagcttgccccaaataagaaagataggttcnggtcttttccaacttaaacaatggatcattccaactacaagagatggatggcaaaccaataccacaaacatggaatgccatccacctaaagttctactttaccttacctaccactttaaaacccaatgggtgtcactcttttccctacttaagtcttatatcccaaaaatacaaaatttaaggttctggctcggaggcgattttaacgacgcacatctggggtaacgaacggaatttgccgctaattacataaatcgaataaaattgtacatcccttccttttcacatcctctctatcattaccactttagtgtgcgccagccatggcaaaggacacatatgcaacaccgtatacccacctaccc

SEQ ID NO: 125707 - DNA, 402 bp, Glycine max
tagaatactcgagcttccatcaccattggtgttctagttgccagcttcattattgcatatttgattttgttttcttcaatgggaaaatacaagcttgagaatgataattttttaacacattgtttgttagtgtgcagttagtctcaattgtcactattataaaatacatcttctacatcggttatttaggactttctacatcggtttttaaccaatgttgaaagtattattgtttacatcaggtttccaagaccgatgttgacatagaattgacaacgtcggttatctaaataaccgatgttagattctaagaattacaccacaaaaagtgtttgaatgttgatagttgacatttgtttttccacaaaaccaatgtgaacttatacaataacatcatttttg

SEQ ID NO: 125708 - DNA, 354 bp, Glycine max
  unsure (1)..(354): unsure at all n locations
agcttnctcggggccattcctgcgaatgcaaacattnggaaagttagttntaccaagaaatgctacccttaaaacaaaaatggcatacaacctcctccaataaatacaaacatcaatgtaaatttagagcaagcttatgcgcatatttccttacgaacattcactcgcacaagatattcttctaactaaaaaaaatgcacccatgcacaatcaaggcactttcgntacctacattatttgtatgtacttccaaagtgtactacctacaccacatgcatttccttggctaaatttacatacatgcattgctcaaagcctcttggctaccaaaagttgcacacatgcaaaccttat

SEQ ID NO: 125709 - DNA, 407 bp, Glycine max
taacaaacttagaaatcaagtgatcatgtattccgtaatatagggggagaaaacggatgcacattttatctatatacaattgtttgttgcttgcttgaatcttgatttcaggtattgtattgtcatcatcaaaaagggggagattgtagatgcaattggctttgatgttttgatgatgatcatgatgatgtgttgcaattgatgcaaatgggcttttcaagattaaaattcaagacaatacttcaagattacaagtcacaacatcaagatgatcactagaatattaggaagggaattcctaattgaattagcaaaggtttggccaagtgatttaaaataaaaagtgtttttcaaagcttttactctctggtaatcgattaccagaggatgtaatcgattaccagtgg

SEQ ID NO: 125710 - DNA, 392 bp, Glycine max
  unsure (1)..(392): unsure at all n locations
nttgatgctatngtagtcgtttagatctgagtgattatcatangctgagtttctttttggggggcttaaacaagaagtctagatgcttgttcgaatgtttcaaccaaattctgtccgatgtgccttcacattatcaaaaatgcatgaggcaacaactgtgcatggttctgttacaaaatcttggactaagcagtttaaacctgaggcttcttctaagccaccattgttgcctacacctcctaagattatttccaagacacaggataccctcaaaacaaaacaacaagcctctaaaactttaacccatgtgtatatgagtgatagaacggcaaagggttatgttatttctatgatgaaccctttacgcctaagcatggattgagtcatgaaac

SEQ ID NO: 125711 - DNA, 388 bp, Glycine max
ttggtgaaggtgtgtcctatagcgtcaagtccatttaaaagtacttgaagtcttcccaacatatcatccacctattctttttctttcatggggaaacttttctagtgcctcatcagagtgacaacttttctgagttgaatatcttttgtcccttcatagttgatgttcaataaatccaagatctatttggttgtcttatgtctaaaaatcttgttatacttatttctaaactgggcacatgtcaaagtatataaaagtgttgagctctattatagaaaggttagtgtcgcaatatgcccttcggcgggagggcgaaaaggccaaaacagatgggccaaagcgtttgtctccaatggggaaaacgagtggagtcgccaccaacgtttat

SEQ ID NO: 125712 - DNA, 364 bp, Glycine max
  unsure (1)..(364): unsure at all n locations
agctngcaggctgtgattggatgcttgtttcanttcatcaggcaatgaacgcagtttgtggttgtttacccaatggcctgaagtaggatagtcatttgaagcacttccacgcttacataagttttaaactcagtgagaatgtgttgaggctcatagaataagacttaccttagaggagaatacctctagtgttatatagcgggctgacagtaaagaaggtgtcgttaagtgagagttggccaccaacttgttataagagacatgggtgattacagtgccaatgtcattatatntggggtgtgtgagatactccttatgaattgggccctttgttgagtttgatactaatccataccacgttgta

SEQ ID NO: 125713 - DNA, 388 bp, Glycine max
  unsure (1)..(388): unsure at all n locations
ntatgagcttataatggatggtcattgttcgtatttaccatcagttggggattgcctgcttcttttgaaaagcatctctgctagtgatatgccggatttggacttagtttttagttttcaagatttctacgaaatagtcaacagggcattctctgcaaggcaatatatgatggaatccacaagtttttgacaggtgccgggaaacttgatgaagctgagaatgttgttaatcatatgagaaatgctggctatgagcctgataacacctacatacaatcaagtggtatttggattttgtaagatgaggaggcttgaagaagcatgtaaagtgctggaggagatggaatcttgtggatgcatccctgatattaagatttggaccatcttg

SEQ ID NO: 125714 - DNA, 379 bp, Glycine max
agcttccatcaagtggtaatcagagcacatgagcttcaagtaggtgctccttaaacctcattaatttttttctttaccttctcttccatttttgtttcttcatttttctccatgtatctcctcacatgtcttgttctaaatgttgctaacatgattctttagagtttccaccgattaaacttgctatagaagttagatttgattttctatggttcaaatttcttgttcttgttcttgaaccatgaattgtgttgagtttacgttcctttgagttttgtcttgttattttttgtggctgaaacctaaaccataaaattcttacaaaaatattaaagtagaagaaaacctccaaaatctagagtgacttgctcacctattg

SEQ ID NO: 125715 - DNA, 388 bp, Glycine max
  unsure (1)..(388): unsure at all n locations
ntggaaaaggctgttttcaccttctcgctaagccaatctgctggcttagcgagcatccgctaagcgcgacattcctgggctaagcacaaggaagaatccagaagaagatgagctgtacaggttcgctaagcgcaccacttcatctctctaagcgcaccgcttcagttcatctgctaagcgagaaaggtgcgctaagccaaaaatcactaacgtgcgctaagcggacgagcatgaacaaggcctgaaatcagattttgagaggggagtttggactaggattcagagctttgcatgtctagggtttctagagagtgaaaggtccaagttccagagagttttgagagattttgttgtgtgaagatttgcagagactaaagctagaagcacg

SEQ ID NO: 125716 - DNA, 300 bp, Glycine max
  unsure (1)..(300): unsure at all n locations
agcttgtaggtttaaagtctcacgattgtcacgtgctcatgcaacaatggttagcccatggctatacaaagaacatctttgcccaaaacaaagtccaggtttagccgataacctcgcctgtgcttntttcttccatgctatatgtagccaagtcattgatgctgtcaagtttgatgagttggaaaatgacgccgcaattatactgtagaagcaagcttcatgatgaatcaagattgattcaaagaagtttgatgataccaaagtgatgaccaaagcttaaacgtaagatacttcatgata

SEQ ID NO: 125717 - DNA, 374 bp, Glycine max
gtgctattataagaataataacattttagatcataccatttttcagctatcatgtgttctaatgtttcgagatagaatatatatatatagaaactattgcaattccttaaagtacttatcaattgcaatacaataagatacactgctccaatcacctcgatatactaaggctaatacacagcctgggacctttgtacctggggggtggatacagccgggggatccacataatatggcattgagagactcaccaccccatctaagaccatccgatgctatggctgaaacacctttactttatacgtctttaattataggttgtgcacgtacagaaccgttgtcctattaatataacaagtaagtatcagataatg

SEQ ID NO: 125718 - DNA, 326 bp, Glycine max
aatggctggaggtctaattctaaaaggttggtttgatgcggggacataatgtaatcactctatgtataacaatgattttattaagataccccttcctttgagttctattagaaatttttctctttcgagcaactaatccctaaaactgatgcatataagaccttccttatatttttactaaggattaccctctttcgagcacttagcccctaaagatgatgcaatgatgaatgatacatgaaattaaaataagaaaggataacaggaaagaaaatatttgtttgtattaatagatatgaagcatacaatacatcttttgatttttt

SEQ ID NO: 125719 - DNA, 316 bp, Glycine max
tgctaggtagtcatacctcacagaaatatatatatgtatgtttaggtactgaaaataccttagatatgaatgtatatagcaaatatacctcacaaaatatatatatgtatgttcgggtagcaagatacctaggatatgcatgtatataacaaaaatacctcacaaaaatatacacatgtttaggtagcaaaaaacctatatatatatatatatatatgtgtgtgtgtgtgtgtgtgccattgagaatgagaacttaaggtacaggatcatttatacctactctgacctggcttgaaacttctgaagaaaaaatatt

SEQ ID NO: 125720 - DNA, 286 bp, Glycine max
ttgctctgtcttgccaaatcctcaaagaaagtcccatgaaagtgcaagcccgggtggcttgggccgtgtcggaattagctgcgaaataccctacatgccaagatcttttcgctcagcataacatcgttcggttgcttgtaagtcatcttgcgtttgaaaccgttcaggagcatagtaaatacgccattgttagcaacaaacctacatcaattcatgctgttgtgatggctagtaataatagtggtaataattctaatggcaatagtagtgtgaagaacgatagtga

SEQ ID NO: 125721 - DNA, 400 bp, Glycine max
taagcgtgatcaagcttaagcgtgagcaagcttatgtgtggattgaactatgtgtatgcttgagtaagctcaagcataagttaagctagacttaagcaagattaagcttaagcattggttgaatcgtgcttaagcgccagtatgaaaatatacaaaatgtgttatgcatgattttcgaatgactttcaattggaattcccttattgtataagccttatgaatttttttgctaagaaaattttaatgttatgttaagaaaatttacttttacttaattctgatggacaatgaataaagacttaacaagattgtgaacctgatgaatcattggacttactaaaccttagatacctttgcacattggagtaccttctcaagagttggacttagaataagcctt

SEQ ID NO: 125722 - DNA, 370 bp, Glycine max
agcttggattgcgcaccgagcaagttttctaattcttcaaactttgtcttcaagaatttttctctaatttttcatctaaagcatttgacatcttctctttctgcattttggtaataaaaaattacacaaatgttaaattttttgattattttattaaaaataatatgtaagtaaaaaagtttccattattattaaccaaaattgactgtcaaattaactcagattttaccgttatcaatgactaaaaaaaatattcatatttaaagtactaaaaacatatatttaggcctaataaaataactcttgggttgtaatctaagtattctatattaataactaactcataatgtatatcttggcgtcttagctc

SEQ ID NO: 125723 - DNA, 416 bp, Glycine max
  unsure (1)..(416): unsure at all n locations
gaccttaaaactcagcttgattgcacctttacactcgttctctntcatctattcatttntttcctctntaaaattcagagcaaataactaactaaatcgtattggtaggagtggaaatgaggttaaaatttccaatgtgatgttgttggtaatttttggacacacctcgtgttccaattttgcctgaaatgaaattttgatagcttttaaaaaaatatctcctggatagacgcaaattttagatattttattattaattattatttaagaatattatcatctgagaatcataatgcttgatccattcctctcacctgcttccatgagttaaattctccttcttcaccagacaaactgggtagcacaaaatgatgttccatgagtaggtagagcacacaataacgtgtctgcgtggg

SEQ ID NO: 125724 - DNA, 422 bp, Glycine max
acacttagaatactcagagcttgatccgcctctatattttcaacaatcccatccttcctccagataatgagtttctggtgaagggtagatggcacagccccaactccatggatccattcccttcctaatagcaagttaaaattagccttggactgtatcaccaggaatagagttggtcgaactatactgcctacaacaacatctacttgaatggctcccaaagaatagccagttttaccctcataattcgaaagcacaatgttgtgggcagatagatcagtgtcatgtttcccgatcttgtagagcatagatcgaggcattaagttgacagccgctcctccatcaatgagcactttgttgattccaacattctcaacttttgccctgatgaaaagaggtttgagatgacttttcatctgaaa

SEQ ID NO: 125725 - DNA, 398 bp, Glycine max
agcttaatactgatgacaatttcattggaaacccttttcattataggtttggtggtttgcttaagaaataacctaatggttactgggttctcgattacttaggttcgtgtgggtatactataaacatcattccacaataaagattaaaaattaattaatgattctaaagttagttttataaaattattatttttttgtgtaaaataacttacaacagtaattataatgaaacaaagagcgtaaaaaatatttaacggaagaattagttaaaaatattttaagaagatttagaattattcttttcatttataagaattatagtatttcccactaaaatattcaaatcattcatcatgggtttggttgcttagaagttggaacagagaactcgaattacg

SEQ ID NO: 125726 - DNA, 405 bp, Glycine max
taacaaaatttatgtgatattataagaataataatgttaagataataaattatttaagcaatcatgtcttctaatgtttgtggtttgaataattatagattgaaactatttcatttccttaaattattaataattaataataaaataaaatacaggcaccaatcacgttgttatgttatggctaattcacggtcttggacctttttccctggtgggttttagtgtaggggggatgcacagaaaataagaatgagagactcaccaccccaacaaaaaccaactgatgcaatagctgaaacacctttactttttaagtctttaattatgggttttgcagtttcagaacctttgtcctattaatataacaggtaagtatcagagaatgttaccatcttgtaaatctga

SEQ ID NO: 125727 - DNA, 392 bp, Glycine max
agcttcaatcaagataattagtgattattttccaattgttcatgtgttgttcattaacagttatgttaatatttaattgtgaatctactacatgaaaatcataaaaattgtgtgattttgaaggggtagcacagagacaatttgagaagggacaacagaaaagtcaagttctactaagacagaaggctactatgaggggacatatggtagtagagaaggttagttttttttttttgaaaaaaaaaagatagtaaaaaagaaaatgatactaattgcaaaatattttttggtaccattttatgatgtagacattgggaagaaagggaatataataactaaagaggtctagaagatggtatttttttttttggtacatggaggaaataacattt

SEQ ID NO: 125728 - DNA, 383 bp, Glycine max
tgaaggaggctatgtgagcttgaagaattcaccagtttcaggtcttgccaatgaagagtgcagaactttgttgaacctgttgcagaaaaccaacattcagagatccactgttgctgatccgcagagtgttcaagtcaaccaagcatgtgttggcagccccattccatggctcaatgaaggtactgattgtgcattttcttgtagtattgttaaaggtaatcaactatggataatggattcggaggttacaggtcatatttgcacatccatggactggtttgagagctaccgcaagataaatcatattcctgaaagcttgcccaatggtagtgtagtgatggcacaattagctggagatgtgaaattttcagacactcttattc

SEQ ID NO: 125729 - DNA, 370 bp, Glycine max
agcttcctttctaagcttcttatccaaggcttattccctagtggatgatgcctcctctcatctcttctcctatatcttccgctgcatatccatggttgaaaatcaccattgaagaacttcattgaagctcaaagatctagcctccatagaatcttctcaagtaatcttccatcatgtgatttgctagatgtggatgttgagttatgtggagttttataacctaagttgaaattatgagatttcaaattttacctaaacctgttttgataaaactacaaacccagattcgttaaccgttggattgccttcaaatttggattgtagtttcctaatccaactcctcatggtctgaccattggtcctttgtaaa

SEQ ID NO: 125730 - DNA, 393 bp, Glycine max
tcctcggggccattcctgcgaaggcaaacatttggaaagttagttttaccagtgggacgctactcttaaaacaaaaatggcatacaacctcctcccataaatacaaacatcaatgtaaatttagagcaagcttatgcgcatatttccttacgaacgttcacttgcacaagacattctattaactaagaaaaatgcacccatatacaatcaaggcagcttcgttacctagattatttacatgtacttccaaggtgtatttgttacctacatcacacacatttcctttgctaaattcacatacatgcatactctaagcactttggctatcgaaaattgcatacgtgcacatcctggtatttctaatacctatacatacacaaactttatgataaa

SEQ ID NO: 125731 - DNA, 380 bp, Glycine max
  unsure (1)..(380): unsure at all n locations
agcttgtanaatggctanacatgattcatgtcagggtttggtttggttcaaggataaaagggatgccccacattacttccatgacacaaatgcaaaaatgatgatttggaaactttatgcaaaactggtcatgcatgcacctatgtggacactcaagtgtcaaatttttatggtcatgtgatgctaaggctcaggattcatttcctctattttaaatcaacccaatgtttccaaaatatgttcttttaacaatttgtgcattcacccgagtccatttcgggcgtccgggaaaattttcacagcgttcacccttcaggtgtacacattttttcaaaaactagttatgatcaatgaattttttgtctcaaagaaaagttgga

SEQ ID NO: 125732 - DNA, 388 bp, Glycine max
  unsure (1)..(388): unsure at all n locations
ntgacttgagtcatcaagatattataaatatgtgaccatggcatgaanttgaaggatgatctatcatctatctttcaatcttctctcaacatcattcaatatctttcaactctttctacagaattttttgatctttttctcttcatctttataaaagttttttgttcaagcactttctcttccaagaaaaagtttttgttcaaaaactcgtgctattcatctttttcattctcttctccctttgccaaaagaacgaaggactaaccgcctgaattcttttgagtctctcttctctcnttccaaagattcaaaggactatccgcctgagaattcttttgattcttcccttccccttaagcaaaagatttcaaaggactaaccgcatgat

SEQ ID NO: 125733 - DNA, 376 bp, Glycine max
  unsure (1)..(376): unsure at all n locations
agcttgactaggcgagnttgattttttcttagtttcactttagttattaatcaattcgattaaaaatgagaaatcccaaagagaaaacgtccgattgatttctcgctttattttgctaaaagatgtttttttttattatcatattattttttacctctttttttttatttccaacgtggttacggcacgaccgaacggtcggaatttattttaaccgaagttatcggataatacaattcaaacgttcggtggaaattgattttatttctaagttaaacgagaaatgacttaagtaaaatggcttaagcacgtcaacagggggtataaaaagtaaacaaaacgagaataaaaatgcccgaaacacaatgtggaccac

SEQ ID NO: 125734 - DNA, 409 bp, Glycine max
tcatggacctatgaaactcagctttataagtgaagtcaggtgcaaccatctcccgattagtcctctcacaaggtggagatttatccatgttctcagtatgaaaattagcagccgaatgctcaaaatgtacagaatgatcaggatccacactatgcctaactaatctatgaaaggttctatctatttcaggatcaaagggttgtaaatcacctggattgcccctagtcatgcactatatgcagcaaatcatgaatttctcaaacaagcactaaggagggggtaaaactacaactatactcaaacgatatccaaatgagctgaaaatttgtgagcaacaccctaaaatcatgaaaagatagcacaaaaattttcagactaaaattcatagtctaactatgaaaactgccta

SEQ ID NO: 125735 - DNA, 416 bp, Glycine max
gcttcaggaccttgaaactcagctttacaaaacttcctattttaatcgattacgccatgatttaatcgattactgcttttcatgtttgtgatgttttgttgaaaacttgtagttttaatccattaccccatgttgtaatcgattaccattttcgtgtttggggtgtttctgtttaaaagtttcttttttaatcgattacatatctatttaatcaattacgtgtctatatgtttgaatgtactatggatttcattctgatttaatcgattacaacaacctcagtgggagtttatctggcatatttaatcgattatggttgtgttttaatcggttacttatagcaacttttggttttaagtgaaaacgacggtcaatttaatcgattactatgtaattttaatcgattacttgtgtgt

SEQ ID NO: 125736 - DNA, 377 bp, Glycine max
  unsure (1)..(377): unsure at all n locations
ctctaaagttttttggttgtccaaaccttganaattaaagcgnggtattcatctttttcattcccttctctctttgccaaaaagaattctccaaggactaatctcctgaattctttttttgtctctcttctcccttttccaaaagaacgacagactaactgcctgaattcttttgtgtctcccttctcccttgtcaaagaattcgaaatgacacaatctaagaattcttttgattcttccctttccctaaaacaaaagatttcaaaggactaaccgcctgagaattcttttgtttccccttcacaaagttttaaaggattaaccgcctgagaactttgtcttatcacattagagggtacatcctttctggacaagta

SEQ ID NO: 125737 - DNA, 366 bp, Glycine max
tgccttgcaccaatcccaaggcagctatttaaaaagagtcactcaaagtcactgggccctattacaatactctggcccaaaacaaaataaacactgaacaacataaaataaaattgcgaaatttcctaattagaaattaactaaggtaagcgctgctttatttgccctcttcaagtctgtcgcaacctacccttcggcgggagggcgacgcgagactcacgggatgcgtgttccatgaaaagaatacgcgcggagtcgccaccaacgtttatttgaggaaaacgtcggaaaaaccggaaaagacgcgatctacgaacttttaagtgaaaggttcgggagttgtatttacgcacggggaaggtatta

SEQ ID NO: 125738 - DNA, 391 bp, Glycine max
tgagatgaggaagtgttgaagggtgaaacttcctgtttttattgttgaccacagagtgtgtacctggagatatgtcgcgggggtcatgagaccttggggacgtcaggtggggtgctattgcccaaaaccaagcttgaccaatcccgacccaacccgggcataatcggttagtgaaaacctgtgatgtacctaagcatgcgaactcctggcagtcaacagataaaaggaacaaagaccactaagcaaggaggcttgtggtggctggctcactgtgaaacacgatagatattggatatatggtctcttgtaatcgatttccaacggtgggtaatcgattacaatgctcaaaaatgaagacttgatgcttatatcgttttacgtatctctttcc

SEQ ID NO: 125739 - DNA, 276 bp, Glycine max
  unsure (1)..(276): unsure at all n locations
agacaatatgggttttccggtactgtagggggttctgtgggttcgagcgaggacaatgtgggtttttcgacagtgtanggggttgtgtgggttccagcgaggacaatgtgggtgtcgagggagcggtttctggaagtttcaggtgggaggagaaagagaagagcgatttcacggtgacaaagagaagagggagggcaaggttttttagcgcgcgcggcttgtgaaatcttaattcttaacttataaacataacaacatccgttttttatggataac

SEQ ID NO: 125740 - DNA, 418 bp, Glycine max
gacctataaatctcagctaggagtagcctctacacaaagatgtgaagctactatggccctccatatgaacatccgaatgatataaggctataaaagaattactaagacatgtaaatgttgaggttttggcaagtgtaccaaattgctctaagtagtaatgttcggaagtccgagtatcgtttccacagagattttattgcacttttattgaatactcttcaatttgtaagtgagaaataaatagtaaaaaacaggaataaatgcgatagtaaatttgaactactagatcaaacaattaaaaagataattaattaagataaagatgttaagaccggacaaacctaattggcctacgatgcatgaaattatcatgtttccttaccaatgcaattgaacctgttctacccacatctgtcag

SEQ ID NO: 125741 - DNA, 365 bp, Glycine max
  unsure (1)..(365): unsure at all n locations
agctngaagaaacttgaaaatgttttgtcttttacatgtccaactcttttcaatggcatttgtatttattcttgcattatgtgttgcatcttagtctctatcatttcatatgtgcatcatgcatcatcacatatgagtaagaagaaacgctcttaagttagaaatttttattgtttaaaattctctattttaatcgattataagcatggtcataatcgaatacacaaatgtttgtagcttgcagagaaagttctcttatcggtttcgtcgattacaagggtattgtaatcgattacacaggtcaaataagacaatggattggttttcaagagtcttggctctattcaatactatgtgataattac

SEQ ID NO: 125742 - DNA, 399 bp, Glycine max
gtgtaatcgactacactgatttggtaatcgattttcagtgatagtttctgaacaaattctatagatgtaactcttccaatagttttcaattttttctagaagttataacttttccaatggttttcaaagtttttctaaaggttataactcttctaatggttctcttgactagacatgaagagtctataaaagcaagactttgatttgcatttcaagcattcttccaattcattctttagacaacaaacttttgccaattgatttctgaatctctttgaactccttcttcttattcctttgccaaaagctttctaaagttttctagttttccaaaccttgaaaacaaaacttgtgctattcatctttttcattcccttctccctttgccaaaaagaattc

SEQ ID NO: 125743 - DNA, 365 bp, Glycine max
ctgttacgattaattttaattcattttaaaatcaactaagatatgttatacagtcagaaaggtaaatgagagttataagattttacacgttttagtttcaactgtttaaattcatacgacacaatccaagatttatacacagaaagattttgcaatggttaacaagcaattcagctcaaatgcacgaaaaataagaacatatggatttaaatctcggccaaagagaaaatcaaatccagaccaataacttgagaatttaagagaaacctacaacgtgcgtgttagaagtaactgagagtacgcagatcagtaacgaaacacgaatttggaattgcaacctatcccagtgaaccggctgggaatgg

SEQ ID NO: 125744 - DNA, 396 bp, Glycine max
  unsure (1)..(396): unsure at all n locations
agcttcttatcctaggcaattcttggtggtgaagcttcttcttccttggcttattccctagtggatggtgcctcccctctcctcttctcctttgccttccgctgcatctccatggtgtaaaatcaccattgaaggacctcattgaaactcaaagatccaacctccatagaagctccacaagcaagcttccatcataacataacanaacaaaaacagaatacaaactaagtttaataacatcaatccagctcaccaaaccaatgcaatcacagctactacgaatgatgttcactatgaaagtttagtcnaatgcattagagataattcaatcaaatcaatccttacattgtttgagatccacattacgttggacaatatccaaaaatctgggattaa

SEQ ID NO: 125745 - DNA, 415 bp, Glycine max
caagcttgattgaactccaagacttgtgtgattcacataatatacaatgctaggctgtgatgacattataaataatatatttgattccaccaaaataacttttaaggcacttaatttttacaatctgttttgatctcaaagtggataacaaatcatgtttttaaaaggaagggactacatatatattatacaatcaaagtggataaaaacatgtttctctctagtagttatcaccctatcacctggaaggagacaaatcacagggccttacaatataactaacataccattgttaacatgaagaaaagagtctgtgctaatgcatgttattaggcagaatgttattaattttaaattctctcctgcattcatttccttccctctatctaggtttagccttctcttcacataagta

SEQ ID NO: 125746 - DNA, 354 bp, Glycine max
aattttacaggactaaaaattaaaggatcatatattctaactcctgaaagattggttatatcctacagacacattgaaatgattcattggcctttattgaaaagcgctgatttacccccactcacgccctaggctatgtgcctggagtgtggcaatgcaggtggcccaaaaatgaatctaagatagactctgggaccatcttagaatttcttacagtaaagattaataatatattaatatgagatgcaatatgtgttcccgtaatctatataaatatttggtaattgaacccaccatatggaaaaaattgcaggttgtgtttgccgatatgaaattgacgattaaattgaagta

SEQ ID NO: 125747 - DNA, 384 bp, Glycine max
tgccttatagcataatgattttttaagccaaatctaccataacaaaaaaaaaaaaaaactaatatccatggcatgaatagcatactaaagaaccattaattatatgttgaaagtttaagagaataagacatcaatgtgtaaaaaaacaaaaggtgttaagctaccacaaatagttgccatggtcaaagggaagcatcatattgtagaataaacttattatatctatattcttcaacttaatcctgatgcctcaatgatacagcaacaaccagtcaatttaaaaatatatttggaaaaaggttttatatcttaagttgtactgcatgcaatatatggtttcttaagtatctttcctgaatgaaaacaaattaaaaagatgataaa

SEQ ID NO: 125748 - DNA, 345 bp, Glycine max
tgaaaagggctggggaagatattggccatttggtccaccgaggagacatatgagatgtgcagtaccttacagtcaacaaggtcttcaataaaatgaaagtccaaggcaatatgctttgaccttgtatgaatgactgggttatttgtcatgaagatggctccaacattgtcacataacattcgtggaggatggggcagcgttgcatgaagttcttgcagcagttgatttatccatagaagctcaatggaagtataagccattgaccgatattcaacttcggtgctagaccgtgcaactagacactacttctttgaagtcaactaataaggttcgaccatgaaatat

SEQ ID NO: 125749 - DNA, 392 bp, Glycine max
  unsure (1)..(392): unsure at all n locations
ntccacatccacaatgcgcgcataaacccaccattctctgttgcccacctccaagtgagctcacgtactcccacgtagcccatatcctcgtttctctcaacaccgggtccccatcaatcctctcaagcttccacaacatccaagcaaaacaacattcaaaccgcacaagctatcacagccaagcaaaacagagcataggcagaaaactctgccaaaacaccaaccaaatcacagcttttctcacttaaagaccccagtaacaattccttcgatccaattcgttaaccattggatcgactccaaaattttactggaggtctatagtgcataagcctacattttgaccgttgggatctactagcaaacatccagaactcattctacattagact

SEQ ID NO: 125750 - DNA, 383 bp, Glycine max
agcttgtctcagcgtttatgcgagactgagaccaacatgctagctatcatcgctaagtaccaagaagagttgggtctagccacggcccacgagcatagaatcgcggatgagtatgctcaagtatacgcagaaaaagaggctagaggaagggtgatcgactctttacaccaagaggcaaccatgtggatggaccggtttgctcttaccttgaacgggagtcaagaacttccccgcttgttagccaaggccaaggcgatggcagacacctactccacccccgaagagattcatgggcttctcggctattgtcagcatatgatagacttaatggcccacataattagaaatcgttaggaaacttgtatggtctctcagaccttgac

SEQ ID NO: 125751 - DNA, 377 bp, Glycine max
tttaactcggagggccgatttatgcgcataatatatcgagacgctcgaaattaaccaacggaagctctcgagaaattcaaatggtcataacttttaactcggaggtccgattcaggcgcataatatatcgagacgctcgaaattgaacaacggaagctctcgagaaattcaaatgttcataacttttcacacggaggtctgattcaggcgcataatatatcgagaccctcaaaatttaacaacggaagctctcgagaaataccaatggtcataacttttcactgggatgtccgattcaggcgcataatacatcgagacgctccaaattgaacaacggaagctctccaaaattcaaatggcataactttttactcgga

SEQ ID NO: 125752 - DNA, 176 bp, Glycine max
gtggaccacactaaagaaaagatgtgacaagggtataaaggatagtgggacataaaagggaacataaaaagtgaagacttgtctgcacattcggttagaggctgcctgcccttgggaccgacgtgcggggtgctaataccttccccgtgcgtaaattcaacttccgaacctttcac

SEQ ID NO: 125753 - DNA, 363 bp, Glycine max
tctagtctcaattttgagcgtctcgatataatactcgcttcaatcggacatccgagtaaaaagttaatgtcgtttgaattccctacgagcttcccttttcaatgtggagcgacatgatctattacaggactctaccggacatccgtgggtaaagatattgtcaatataatactctcagagctttggatctcaattttgagcgtctagatatattactggactctatcatacatacgagtaaagcagtgaatgtctttttgaatttgagtcgaacttgcgtgaaccatatggagcactctcgagataaaacacgactctctgataggcatgcaaattatagttattgtcggatgactatcgaag

SEQ ID NO: 125754 - DNA, 383 bp, Glycine max
tcatatggttctgccatcaacagctctgcacttgtatcctttgtgagagggggaataatccaagaagacacattcctaagatttgaattggaacttgtgcttcttgtatggtctaagaaaggggaaacatgaccaaccaaacaccctaagaaatgaataatgaggaattttgttgaacagtttgtgatagggagccccattatcaatagttgaagatggcagcttgttgatcaagtaaatgctggaagcagaggcatgatctcagtagtgtagcggcaatttggcataagaaagaagagtgagaccaagctccactatgttcctgtgcttgcgttcaactacaccattttgatggtgagtatgaggacaaatgagcctatgct

SEQ ID NO: 125755 - DNA, 382 bp, Glycine max
tatgagactatttttcttggttactcattgaaaagtaaaggatatagagtgttcaataggagaactttaagtgtggaagaatatgttcatgtagtgtgtgatgaaactaactctattgctcaagatagttctttggaagatgaagatgcaggtttttaggataaagattctgctcttgaagatgaaaccaaagctgaagaacttgaacaaagtaaagagatctcaaccatacctcctaaggacctctttagagaatggagaactcaaaaagacctcttcttggataacataattggagaaatatcaaagggagtctctacttgttctagactcaggattttatgtatcaacgtggcttttgtttctcaagttgaaccaagaa

SEQ ID NO: 125756 - DNA, 392 bp, Glycine max
  unsure (1)..(392): unsure at all n locations
agctnntcacttgagcagaacctgtttggagacctgcatattcatcttgcattaagcacatggctaaaacataaaagaaacggtttacagcagcatgcacaatttataaaaagtgtgatcataaactacccaactgcaaagcaactgtgtgatgcatatataaagataaagatatatgtttaatagcaaaatagaatgtataatacggttagtgttatgaattacgaaatattgattccttcaacaaggtgcgtgagattcaaattttgctttgcacatacatgctctggacattattccttcaattgaaaactatattatacctttccaacatcatttctccccaaatcaactagcattacgtgctctgcacattgcttttcatcattcaa

SEQ ID NO: 125757 - DNA, 401 bp, Glycine max
ttgatatggaggaattatggaggtcttcccctgaccagtttgggaaaaccaataggcttattacaagacataggccaccacctatagcaatggtggctatacgatctttagcaatttcccacacattatcaacacggtaacttgatacagttatcaaattgaaagtcaagagaaatatcataacaccatagtcataattcttcttgatatgggggatgaacctcacataagtagtcgtagctcctgccaaccaaaaataatggctcagcaacaacatttgtgaatctccaatcacaggacaaaatacttgattacaagttctttactttttgaagatgaggattacaagttatcacatacatgacgagaaaaaaacttgattacaagttctcaatatgtaa

SEQ ID NO: 125758 - DNA, 410 bp, Glycine max
  unsure (1)..(410): unsure at all n locations
gtcacctgcggcatgcaagctnaacatcagaccacttgcagggtgctggaactacttcacatggacttgatggggcctatgcaagttgaaaaccttggaggaaagaggtatgcctatgttgttgtggatgatttctccagatttacctgggtcaactttatcagagagaaatcagaaacctttgaagtattcaaagagttgagtctaagacttcaaagagaaaaagactgtgtcatcaagagaatcaggagtgaccatggcagagaatttgaaaacagcaggttcactgaattctgcacatctgaaggcatcactcatgagttctctgcagccattacaccacaacaaaatggcatagttgaacggaaaaacaggactttgcaagaagctgctagggtcatgcttcatgc

SEQ ID NO: 125759 - DNA, 404 bp, Glycine max
tgaaagggtgcttcaatggaggagaagaaagagggagagaaagagagaggtgggagcacgaaattgaaggaataaaggagggagagaagtggaactttgaaagatgtctcacaagactctcattcatcaaagttacaacaagtgttacacatgcttctatgtatagactaggtagcttccttgagaagctttcttgagaaaacttccttgaaaagcttctttgagaaaacttccttgagaagctagagcttagctacacacacccctctcataactaagctcacctccttgagaagcttccttaagaagattcgtaaagaagctagagcttagctacacatacctctctaatagctaagctcacctccttgagatgagaagctagagcttagctacacaccccc

SEQ ID NO: 125760 - DNA, 389 bp, Glycine max
  unsure (1)..(389): unsure at all n locations
agctntacaacagattgtcgtaatgttccactaacctanaattaaaataacttaatgccattaacctagggaattaaaaaaaaacttaatggctgagtgtaactgaaattggggcaacctaaagtcaccctcaacagccaacaagtcagccaccatttggtctcccaaaaggctgatgcctaggttgccaattgggcccttattacaacttgaactaaacctaactaaagcccttttagttgattaacccaaaacatatttttggtcagccaactttacaaggattggaccattatttagacaaactaaacactctaaaattgagacaaagtggtgtcatttagtcctcctccatttgggccatgatacaactcacaactttggacttt

SEQ ID NO: 125761 - DNA, 282 bp, Glycine max
agcttaggcttatgcaaaagccttattattctgatttgccggcctatatatatatatatatatgtatatagatatctctacttatattaagtgccgggtacaattaatattattttttaaaaaactaccagatttcatatcctatcatatcctattacgttcatatccaaaactcatatcctatcatatcctattaagctactatacacaacatatatccgttttctatcaggtatattctttttgtaaagtttcctattacgttcgtaaccaaacaaaaat

SEQ ID NO: 125762 - DNA, 382 bp, Glycine max
aaactcagctttcaaagcggccgatacttaaaccgcctctggcttcaaattctattggccaaaaaggcttccaaatctgatcaggtttaacataaaaacatgatttctttcttttattgcataaaagcttgatttataacaggcattaaactgctctaacttattttttcaaagccttttttcatgtgcttgagtctttatactttttcgaactcttaattttagacttcagctttctttttcgctaacaccattcatctttgttgctaagtaataacgacatagcaacagaccaataatcatgtatgacttttttatgtatgtcttttcaattgctccagtgacgactttaattgatcaaaatttatattaagtactaaaa

SEQ ID NO: 125763 - DNA, 326 bp, Glycine max
  unsure (1)..(326): unsure at all n locations
agcttgaggaggattgtattaaagagatgtttgaccatgaaaaaactcggggggaaaaaaaacctcatgcagngaatcacctttattatttcctttagctcttacgatttaatctactaacaacttcaaattaatctacacaaaccctaatttaactgatcaacaccccaccctaatttatttaaattatactacatttcgaccttttatataacaaataaataaaaatattttattgatcctaacaataagaaacataggttcatctttaaatacattcgcactgctaattgcttatacttaaactattacttaaaacttttttt

SEQ ID NO: 125764 - DNA, 399 bp, Glycine max
  unsure (1)..(399): unsure at all n locations
aactcaaccctcatatgaaatcatttctaaattatgagaaattttcttccnaaaaaacattatgacaaaattcctcctcactagttctcaataaataatcgaaaaatattggcgacttacatgtacaggtgataccctctaaaaaattgatatgggaatataaattattaatattgtgacattctaaacatcgacacgcacaaaaaactgaagaaaaaaaacattcttaaatttttttaagaattttaaagcgtgtaaaaataatcaataaatgttaatatttgtgggaaacattcttactctcgcgaataaaaactctattctcacatattggtgaataaatataatttctccgtgagaactattgcatacttttcctttgaatttacactatctata

SEQ ID NO: 125765 - DNA, 189 bp, Glycine max
ttttctaaacggactctatctcctcatccattgaaccagtattgcacattttacatcataccccaatatataactttgtaaagccaacaccactatataatatttttaatgatacagcagtgtatacatgctatttcctacgcacatacctggagttgctataacccgaacgcacttcatcagcaatgt

SEQ ID NO: 125766 - DNA, 390 bp, Glycine max
ctatcaggacctatgaaactcagctattgagacaaagcgttggtgttattaattatggcgtataaatacccgttcttgcattcttctgtagcgctcacaagatagctaacatcatcccttctttaacagtgggtgatggtactatcacttatgatcccatagttgcttacttatttcaatatcttgcgcaatcatgacgataacgcatttgatttaatgccacgtatcaatgaaatttttgcttgcatctcattgggtgataatgatacccttggtgaacctttatttatgtctaaattcataaacgctctatctgaaatgaactctgacaaaagtcctaatactgatggcggaaacctcgtcttgtatagacgatgtgaaatgaatcga

SEQ ID NO: 125767 - DNA, 384 bp, Glycine max
agcttcgtccttgcatatgttgagtatttataaacatacaatttcaatattgtgaataatacaaaatgacgtgatatttaatatgaagagaaagaagttcgccactcacctatattgatgattaattttttgatggggttgttcttgtacctcctcacctaattctatgcaatgtgtcgaatatagaacacatgcatagaattctgtgtcatccacccactatcacatcttgaatatgcacttttgattgactcatgcttgtctaaaatcaaacacataccatgttgtgggataacatgccttttagattttggaggaagaacaaccatgctcctgttgattcactcttgaaaacagccaaggctattggaaggattttattgt

SEQ ID NO: 125768 - DNA, 393 bp, Glycine max
ttcttgagaaaacttccttgagaagcttctttgagaaaacttccttgagaagctagagcttagctacacacacccttctgataactaagctcacctcctttggataagaagcttggagaggatgcttcaatggaggaaaagaaagagagaaggggggagcacaaaattcaaggaataaaagagggagagaaatggaactttgaagtgtgtctcataagactttcattcatcaaagttacaacaagtgttacacatgcttctatttatagattaggtagcttcattgagaagctttcttgagaaaacttccttgagaagcttctttgagaaaacttccttgagaagctagagcttagctacacacaccctctcataactaagctcacctccttg

SEQ ID NO: 125769 - DNA, 378 bp, Glycine max
agcttgtttataagttttgggtctttaagggaactaatggacagacaaaaacgtttgtgacatggactacatttgtcatatgacagtacgaaaaaagaggtaggagattacctggattaaatgctggcagcattgaggatagcaaattgcagtggtattcagagagataagcaggaggttttgttagtctatgtgattttctggttggtgcaggaggggaggtaggttcatttggtggaggtaaggatagtggaagatctaggagaatgtcagatgtgtctaaggtagtaatatcaacgttgacactgacaggattattggcaggtggaggtgaggcacaaggaaagacaatttcatggaagattacattccttgaaa

SEQ ID NO: 125770 - DNA, 388 bp, Glycine max
tggtggtgtgtatatagatggtccatcttagtgttatggtaggagtactatccaagaaagagagattggtcttgaactgttagctaagggatgatgtcgttaaacctgggaaaatactttatgaaatggatggggtacagaaaatagcaagtaactatcatccaaaatgcctatacgaactcaattcattatttcaggatgtccttggtacacaggcacaaaattaatcacaagtaactattgttaccccaacatattagtttgttaattcaaggattatattagattaggtattaggtattcctatgcaaattcaagtgtgcttggcactggactgcaatcatctgcagtctaaatagaactgcacactatcatgacccttataatt

SEQ ID NO: 125771 - DNA, 148 bp, Glycine max
gacctatgaaactcagcttaacacagcacacggcgactagctctgcgtcatttgttagcttgcgatgacgggccatgcgcgtggagaccggctgaaagagcacatgcttggcatcaactgttgacaagctactttgtgatcctacgct

SEQ ID NO: 125772 - DNA, 382 bp, Glycine max
agctttagatattattatataatgcacatcagacttatttctggtgaatctctattcctaacgctgttgaggtttatacccatacatagtgtaccatgtttatgtttgaaacaatgagaatctgccttctatggaatcttaagaatgtttagattgatctttagaaattcatttattgtagattgtagatgctgccttatttttttgttcctgtgttttgtgcttccactgccttgtgtccttgtatttatttcaatgggttttgtaagattctcaatttaaatcaagggagaggcaggactcttttgaaggtctgacatggttatgattggaaatttttttctatttggattgctttgcgtatatcaatgaagtatccatg

SEQ ID NO: 125773 - DNA, 386 bp, Glycine max
tcatgcttcctccatgtacattcgatagcttgcatctattaccatggcggttaagaagtggcaacattacctgttaggtcaccctttcgtgattctcactaatcaccaaagtctgagggaccttatgactcacgcggtccaaacgccgaagcaacatcgatacctcgtcaggctattgggattcgagtatagcattcagtatcgcccagggcgcgagaacggcgtcgcagacgcattatctcgagtgaatgaggaagacacccaggcttccttatatctactgtccattccccagttcgcctttctagctgaccttaagaaggagctagtcactcttcctgaagcattagcactactagagaaactccaaaaggaacccacgctag

SEQ ID NO: 125774 - DNA, 382 bp, Glycine max
  unsure (1)..(382): unsure at all n locations
agcttgtacacactcgatctttcatttgtttcctactcanaccctttcattcttcacgccccggtgacaaccttcacatcataaccttaacagtgctcactaaggatgatcatcttatcatttaacctctagttatattgaacacacaccagacagctgactccaagctagaagtccttgttcaatggcaaggattatcatcggatgatacttcatggaaagactggacccaacttcaaactgattaccaccttgaggacaaggtgcttttggaaggcatagggaatgatagcaacacagaaaaaccagaagcaacaaaagcacgaccacaaaggatgagcagggccccaacttaccttaaagattcctataaccgtttctg

SEQ ID NO: 125775 - DNA, 375 bp, Glycine max
tgtgcccaatagtttaataataaaaattgactcattacaattgcgtcatcaagaaatccgatcactgtaatagaattcgtattaatacttgataatattaaattttaattgaaattacatattgtttataatttaatatagaaatgaccaataatttgatttgtttattgataagctatctttttaaatttggttattcttcctcgtgaaatgacctctcttccgctagcactgcatcctccttactccaggaaaaataaatctttgattcatctccaatatttttattactcaattgtccactaacatacgaggcataatgagtgaaggtgttgttttttaaaaaggggcacacgtgttgcgattcatgatgtt

SEQ ID NO: 125776 - DNA, 363 bp, Glycine max
  unsure (1)..(363): unsure at all n locations
agctttagaagagaaggttattgggacccctntctctcgcaaacatgggatgggtcaaatattcgaccttccaacgtgccacatcttctatgtaggaaagcttctcggcataccccagagacatggttgattggtgactcagtgtgctgttatgacagaaattctctccaagtccctcactttctttctctctcagaagaaagaagaaattgagaagaagtgtgttttgttcttcagacacagagagagagaaagagaaacatttgtttcttttaaggagaccccaaaacaccaatgtactctcatacactgtatcatcccctggaacattatgaatcactagcacatcacacaacatttaat

SEQ ID NO: 125777 - DNA, 376 bp, Glycine max
tatagactttatagtcgcccctcattcatccactattgtggtacttgcagaaaaagagaaggttgtctttattcttttatgtttcatttttttatccttgctatggtaatttctttctacctaggcaactatgttctggtcacaatattcatattatttatgttttaactattatcagcccactaagggaacaaagcgcatgcgtgttgtaaaacggtgttcatcaagatctgggacaacttcaagacgctctgtgaatgtaatatctctcctttaactgccagaatgtgaaatataatttgtgtatttcacagttaagtcatgtagaatatcagtcttgcattgttttgactatgctagcttatctcacttttgc

SEQ ID NO: 125778 - DNA, 421 bp, Glycine max
  unsure (1)..(421): unsure at all n locations
ccgggatccttaagcacctgcggctgcaagctttgatctgcaaaatgcatactatttgttttcatgtttgctcatccttgcgttttcctctacaaaacaaaaacaaaaaaggggaagcgtgaaacttcacactacattcttagttgcatgtgttaggcaccatgagccaaccatgatgggatcataaacccatttctaaaaaaaaaaaaaacatacaacaacaaaacaaaataattgaacatggtacctaatgcatggttaactaggaaatggtgtttcttcgggcatctcaatttcataattacattttccgtgcataagcttaaagtatgcctgagtcattcatccctatgagatgttgntgaagtattggcgatcagaattgccattccttggattatagggttgaaccaagctcatg

SEQ ID NO: 125779 - DNA, 401 bp, Glycine max
  unsure (1)..(401): unsure at all n locations
tctcccncaattntctataaaatagggggagaagtgaagtagaaaagggttcagccccttatgcacttctctctttctcgaaatagctgaggaaaattagttccgtgaagaaaatccaagccgaggcgcttccataacgtttccgtaacgtttccatgagtgatttcgcgaaggttttcgaccattcttcgacgttcttcatcgttcttcagtcttcaacgggtaagtacctcaaaccaagctttttaattcattctatgtacccgtggtggtccacatttggtttcatgtatttttattctcgttttcatttactttttatacccccttttgacgtgcttaagccatttatttaagtcatttctcgcttaatctaaaaataaaataaatttccaccgatc

SEQ ID NO: 125780 - DNA, 394 bp, Glycine max
  unsure (1)..(394): unsure at all n locations
agcttttcgattcattctatgtacccgtagngggccacattgtgtttcgcgcatttttattctccgtttggttactttttataccccctcttgacgtgcttaagccattttactttagtcatttctcgcttaacttaaaaataaaataaatttccaccgaacgtttgaattgtattatccgttaacttcggttaaaataaattccgaccgttcggtcgtgccgtaaccacattggaaataaaaaaaaggtaaaaaataatataataataaaaaaacatcttttagtaaaataaagcggaaaatcaatcggacgttttctctttgggatttctcattcttaatcgaattgactaataactaaagtgaaactaaggctaaaatcaactcgcctagt

SEQ ID NO: 125781 - DNA, 401 bp, Glycine max
  unsure (1)..(401): unsure at all n locations
taagtggttgcaagataatatgccatcacttccctcagaatcgacacagcttcaattagaagcacattgtagagcttatattttgtggctaattggtggggttttaatgccaaacaagacgggaaatcgagttcatttgatgtacctcactttcttggctgatctcgatcgagttaggaggtatagttggggctttgcttgtctggcaacactgtacagagaaatgtgtagggtcactaaccttgatgccaaaaccatgggcggctgtgcgtcattgttgcaatattgggcatggtatcgcatgcctttcattgcagcaagagttaatcggacaccatcgtatccgttggttacgaggtgatatgaatctcanattcattgttatatgattagcatagttt

SEQ ID NO: 125782 - DNA, 384 bp, Glycine max
agctttacttcaaccttgaggacaatgtcgttttggatgtttcggggaatgatatgaagagtaaaccacaacaagtggatactacaagcaaacccaagaggaacatatcagcaccaaagtatttagcagattataattgattaagtctattattagtaattagaccgagtgggctagggagacatgttgtctaccaccatttcctattagcactaatatggtttctgttaggagaatattctagtaacttttctgctaggggtttgttagtggtctgctacttctatcatccaagttctatacataggatgattagtgcaataaaggatataggaaaataatattcagttttctttattgtttggaaagggaggccttcctggt

SEQ ID NO: 125783 - DNA, 397 bp, Glycine max
  unsure (1)..(397): unsure at all n locations
taaatcagaagaaatatggntataatgctgactttctgcctagagattcgatttcttctttttcaactaagcaagtaattattagtaagggtgcattcttattgaagtaaaagtttgtttaagcatttccttgcgctcttcttctgagtcttctccttaagaagagtatttcatccaaggttatcaaacttgagggtttacttagactcgtgagagttccatagactcgactcgtggactcaactcgtagactcgtaagagtccacttcatataaaaataataagaaaatatctataaataacatactaattaaatatttcaacaatatataaagcaaaatagtaaatcataaatgtcacaatacttaaataaccgagtctaataatgcatcactac

SEQ ID NO: 125784 - DNA, 372 bp, Glycine max
  unsure (1)..(372): unsure at all n locations
agcttgggcccttctccagggagtttatggattcttcagntgggataccacaatatctgtatggaagtacatagcaaatccgtggttgatgatttgtcaaacaaaccaggccaaacaccacatgtgaatcccattcttaataggagtagagacttattgttcaatttctaaacccaaagatgggttttgttaggagcaagccaacaattttgctcattatattgtaagagtatcattgtcttatgctagcatccatatatgaattctaccatattcctaatcgtatcctctatgtactttaaatgaaatgatgaacaatggttctgtcaaaaaaaaaaaaaacaccacggcaataacattctcttatgcaaa

SEQ ID NO: 125785 - DNA, 400 bp, Glycine max
  unsure (1)..(400): unsure at all n locations
ttgcttgaagctcagcttctacgattactntatagatgcaatatagagtttacacgtaaatgagtatttatcacaccccatgaactttcgagttgatattgctttgtggaaccaaatattaactttacaagttaaatgaatatttactcagtaacattatgcatttgatctttcctggattcattggactatgtcataatatagcatgttttggggttcacatttgttgcatctaatgatctattctttaagttttttgtgccttagtagataatcttattgactatttgaacatctatgaggctccttatttctatatttcttatgatgaattaagaattctgttgttatataaaggatatgaagaaatattattcattattcagtgattcagtgcttt

SEQ ID NO: 125786 - DNA, 385 bp, Glycine max
  unsure (1)..(385): unsure at all n locations
agcttgaaggcaactgtantgcttttntaacttggcaacccagctggccttgaaccaaaaatttgtacctgtcccaagggtctgtgggttgtgttcctctgctgaccaccatacagacctttgcccttccatgcagaaacctggagcaattgagcagcccgaagcttatgctgcaaatatttacaatatacctcctcaacctcagcaactaaatcaaccacagtagaacaattatgacctctccagcaacagatacaaccctggatggagaaatcaccctaatttctgatggtctagccctcagcaacaacaacagcagcctgctccttccttccaaaatgttgctagcccaagcagaccatacatttctccaccaatccaacaa

SEQ ID NO: 125787 - DNA, 388 bp, Glycine max
tatatctcactatgttcaagaggaagagagactatttagagataggactaagagtgcttacttgactctaacctatcaaaataagaaaaggaagaagattaaggatgttgtggaagggtcttctcagcaaaggaaacaaaagagggttggggaatttacctgctacttttgcaagaagtcgaagcacatgaagaaagggtgtccagtatgctagttggcatgtaaagaaagataaatttcttactttagtttgtctcgaagttaatttggcttttgtacctaaggatatttggtggatggattctggtgctactactcacataagtatgtctttacagggttgcctataaagtcgaccgccaagtgatgatgaaagattcatctttgt

SEQ ID NO: 125788 - DNA, 380 bp, Glycine max
  unsure (1)..(380): unsure at all n locations
agcttgaatcccttacactagagcgctaagcacgagtgattgtgttntgcatgagggtcttgtgtgttgagcttgatatggtcatgcttagcttgggaccactggaacaagataaggctagtttgtttaaacttatatgttaaaaaaacacttattgtaataaaataagcaataattttcttcttatgttgagaaacaaatcctatttgcttattatataagtacttttttaaaaagcacttatttaaaaatttaatcaaatcgacccatagtgtgtttagcgcatttccattcacataaccaatgctnttactttttatgtatcacatgattgcttgaggatatatatgcacaaatacatgaatgttaaaaggtcccca

SEQ ID NO: 125789 - DNA, 389 bp, Glycine max
tgttctgattggtgctagtgtatatgcagagggttctggaaagctagcaaccttacccagagcagtagcctatgccggggtgaatatctctccaatttactatattatttctggcgattatcaagaaaatcacacaatatcccatctctctctaggcaatgtctcccttgctgaataagttcatttgtatattcaattatgtagaaaattattttcaaaatattcatcaaccccctaaagtagtcaatggaactttttctgcttgttatttttggctctttatgatgatacctttaagtataaaatttcttaatatttctttggtacatgttcctttttctttcatacatataaaagttcttaatatgacatttaacttttggaagtgg

SEQ ID NO: 125790 - DNA, 357 bp, Glycine max
agcttcggtattcattttcgagcgtctcaatatattacgggactcaatcagacattccgactaaaaagttactgtcgttcgaattactcggagttataaatcaatttcgaaacgctcaatagattacgggactcaatcagacattcgagcaaaaagttattgtcgtttgaattagctcagagcttcaaaattcaatttcgatcgtctcgatatattacgggtctcaatcaaacatctgaagtaaaaagttattgtcgtttgaatatgctgaaagcttcaactttcaatttcaagcgtcacgatattttccaggactcactccgaaatctgagtaaaaagctatcgtcctttgcattt

SEQ ID NO: 125791 - DNA, 388 bp, Glycine max
  unsure (1)..(388): unsure at all n locations
ntacagcgaaatttagttatgacccactaacctataattaatataacttaatgccattaacctanggaatttaaaaaaacttcatggctgagtgtaactgaaattgtggcaaccaaaagtgatgagaatcatgaaactggccaaatacaggctaaaggcccaagtggagaaggacgaatgcccaagtggagaatgacaaagcccccgattggataatgatgaaggcccaagtggagaatgatgaatgcctcaaggcagagacactatcaagactattaattgttgctgaatgcccaaactaatttgaaggcccaagttaaataagtttttagtataatttatttttattgtaattttggcccaaactgcttataaggcccatgtctat

SEQ ID NO: 125792 - DNA, 219 bp, Glycine max
  unsure (1)..(219): unsure at all n locations
tgccctcatgcaagcttgtgaaggtgtgangatacgatatgacaatgattattttagngccgacgaacaggacggcgggtcgaatggttttccttattcgattacaacatcactatgttgcgaatataatcccgggctatcatctgatatcaaactagcactttatgcccttcattttatgataacccgggccgatattgcaacattgcaaggcacgat

SEQ ID NO: 125793 - DNA, 330 bp, Glycine max
tttatatccaaacggcaggatttgctcactttagctcttgtctacagaacgtgctcgttggaccactttaatgcatctcatttgtgtgcgctttttcatactagcacaccaatatttttagctaccacgttcaacacttcatcaagaaacttccttttgcattgaactagatttgcatcagacaatgcatctgttgatgaacactgataacttacaaaccttgaatatcattcattcttcataggatctcacagaccccaacagagtcgtggtaaaatagatcttaacatactatagtctcaaatgaagcatggaatgtactctcttaaa

SEQ ID NO: 125794 - DNA, 173 bp, Glycine max
tatgctcacgtctttttcgtcttttggaagcagaatcaaagcctttatattaggtttttaaactataaaaagtaacactatttagtgaacacgaggtcacaacacacctgctatgatgacaaaaccattcctatttttgtaacataaccacaggattgataaatacactcaat

SEQ ID NO: 125795 - DNA, 395 bp, Glycine max
  unsure (1)..(395): unsure at all n locations
ctgaaataaagagacactaattntccacaacatccttcaattgtgccaaagcttcctttcctattgacaaataactggttgttagtatcagtcttctcttttttccaggtttccattgatggttaaaagctaatatgaaccagtcactccttaaaatntccaccaacgtttggtaaataaatatagattagagtgaataatacaagccttgcattctatctctaaattactaggtatatganacaggtatgggtatttggttttagaaagtatgtggttcatcactatttatattattactacaagaatcatgtatactttattatggtacagtaaatttggtgtgagggtgtaactacgttatatccatctcacttagcacgattatttaattt

SEQ ID NO: 125796 - DNA, 351 bp, Glycine max
  unsure (1)..(351): unsure at all n locations
ccccgcttttgccgcatgttcatacactaaattagtttttgcaaagcgnnaatatgcataactattttttctacctggtcatatcgcatctgctgataactttataaagaattggccaattatcgaccgttataattatgcgcgaaaagtgaccaatttttatcgtttcttaccccatggatcatcgagcaagaaggcattccgatttattctatactcttgcattatgaaggggaggagtaatctggagggttccctactcctgcttaacgagactacatttcgattgcattctgccattgtgcagcatttttttttatggagcgacattatcacttttttcctctcttc

SEQ ID NO: 125797 - DNA, 352 bp, Glycine max
  unsure (1)..(352): unsure at all n locations
gctcgtacgacttttgtttcaataattcactattgttgtcactattgttttgccttcaggttttacaaagagaggctctatgtaacatcccattgttcgtaagctaatttaaaaaaaataatctttatttataaataaatagagtttgagaaaaatgatgagattctataaataaataaataaggagatataattattaattaaaataattatttgagagaaaataaaaagggtattntatttatttgtttgatagagaataaaatagagtttatctttataaaataataaataaatagagtaaacataactataaatagtgttaggtcagttttcacactggacgctgctc

SEQ ID NO: 125798 - DNA, 360 bp, Glycine max
  unsure (1)..(360): unsure at all n locations
ctgatggtgttgagaagaaatcacatgtttgtcatcatcaaaaaggcggagaatgtgaatgtatgtatacatgactttgatgatgccaaagaagaatcaaacaatgctgcttcaaatgataagcatatgctntaacaataattcaagattgcttcaacaaacaaagccttgtttcaagattcactaaagaccaagccttgccttagaacaaagtgctttcaagacatgcaaggctctggtaatcgattactaagaagtgtaatcgangaccacaagacatgggtgagaaatagctgctgaaaaaggttctgaatttgaattctcaacatgtaatcgactaccatatgtctgtaatcgatt

SEQ ID NO: 125799 - DNA, 420 bp, Glycine max
  unsure (1)..(420): unsure at all n locations
nttcgcanagcttacggtaaaatctgggacctagccatggtttaagtctccatagaggtcattgcctccctcgcccagtattatgatcagtcgttgaggtgcttcacctttggggacttccagctatcacctatggtagaagaatttgaagaaatcctaggatgtcctctagggggaaggaaaccatacctcttctcagggttatatccctcattagctagaatttccaagatagtccaaatctcggcacaggaattagaccacagaaagcaagtcgaaaatgaggtggttggaattccgagaaaatatttggaggcaaaagcaagaatctatgcaggtaaagacgagtgggccccgttcatagatattctcacactgttgatcttcggaggagtcctctctccgaatgtggatgggttg

SEQ ID NO: 125800 - DNA, 440 bp, Glycine max
  unsure (1)..(440): unsure at all n locations
ctatgaaactcagcttctatccaagcgatattatcaatatcattcaactgttgtcttatttgctgaaatttcttggaattgacatccccaaactctctactcctctgctttaagctggantttaagttcctcagcttatttttaagcacaaatcccccccaaccagcctgctgatctctggtccatgattccttcaccaatgtttgatattctttatttttgagccaccaatccagcacccaaagggcttagggccccaatccaccatatctgttttcaataatattttgcagtggtctgaaaagtcccttggaattacatgttgagaggagtccggccaatgggacagccactgttctgagaccagacatctatccaatctgctcttcacagatccattgggtctgaaccaagtaaatctcctaccataagatttgatc

SEQ ID NO: 125801 - DNA, 431 bp, Glycine max
  unsure (1)..(431): unsure at all n locations
cgactnntgcgagttcatttagccttagtttcactttagttattattcaattcaatcaagaaagagaaattccaaagagaaacgtccaattgctttttttggtttattntactaaaagatatttttttattattatattattattttacctctttntggtttccaccgtggttacgacatgaccgaacggtcgaatttcattttaacagaaattaacggatattacaaatcaaatgatcggtggaaatttattttattttttgattangcgagaaaatgactaaagtaaatgactgaagcacgtcaaaagggggtgcagaaagtaaatgaaatgaaaataaaagcacgtgaaacaagtggggaccaccaacggtacatagaatgaatttgaaagttcgatttcaggaacttatcggttgaagaccgaagaa

SEQ ID NO: 125802 - DNA, 316 bp, Glycine max
gtgcgggtctgggagatgaaggtcaagtgttcgcgatatgtgaagatgatgttccaagtactttggatttggtccgaccatgcccttctgatttccagctgggaaattggcgagtggaggaacgccccggcatttacgcaacaagcataatgtaaacctttacggtttaaaagctctatagttgggcctatgctttagagtttttcattatgttaaggctttgtgtcttttggtttttgaattataatacgaggatctttcttcatctgttcctggtctctacccactctcattcatttgcatggttacttctttt

SEQ ID NO: 125803 - DNA, 54 bp, Glycine max
ttacggacactatgatactcagcttctccgtctttccctataatagggggagga

SEQ ID NO: 125804 - DNA, 70 bp, Glycine max
atgagatacatgaaatatgggataaatattcttggacacctatgtagagagacagagcagagtagagaga

SEQ ID NO: 125805 - DNA, 431 bp, Glycine max
  unsure (1)..(431): unsure at all n locations
ttgtggctgactagctaaatatctattattgttagactaattgagcctacgcgttatcctcagatctctcttggtggactagacttagaccaaacgacattattgtaacatcatatttaaaacgagaacttaatccgcaaatccctcatttaagactaagttccaatcctgctgcattcgaagactaaggcaacaatacattttccaatgctaaagtcacctaactatgcacacaaatgatngatcagaccaagagcatatataatgtaagcactgaaagaagcattgaacacaagaaacacaatttattacatattaaagtaattacttcaactgttctttagaaatcccccaccagggtgtatagtctgtcattacatgataactctaacaataattgagataagagtagagaataactgctcattaca

SEQ ID NO: 125806 - DNA, 438 bp, Glycine max
  unsure (1)..(438): unsure at all n locations
ttgccagtacattaagctcttatgtctttataagtacctcctcattgacatcttttgtcttgaatggaattgccatgacacgcttattgatactatctttgatgtttggtacctgatattgcgttgcaggaggtaattccaattggattaactcaccatccttcacttgccaacttgttatgacatttgttgttggatcacctatgatgtcttgtttccaagggtaatctatatcctttctgatggcataagcatgacaccaatcaaacaaaaggacattaattttgactctgtcgacanattcgtagaacttgtcttggattagtttctgtatgtacccttgcatgttggaaaaaccatctcctttggggtcattctccgagaataaaatcttgctaaggggtgcgtatcatcgctaagtttcagatacatctaacg

SEQ ID NO: 125807 - DNA, 424 bp, Glycine max
  unsure (1)..(424): unsure at all n locations
cactaagcccttctgagctaaccgnggagtngggagaaggctcttagatgtggtttatgtcgtanaccactncgncgagtaccttatatggtagagagttttcccaacgaggatctaagtggctcattcctatataaataaccctaagataaccttatccaaaggaacaanattctatgataagttgtctattgcttgaaattacattactgtctagntttacaaagttttgctcttaaacttattttcaattttctatgtgttctgggagatcggttttcatgaatattctatgctaccctgtattatcacacctacaaaatttatttttgaagtcaaatctttaagaagagcaatccttacatctataacaatcagtttagttgtgtgatagatttattcctacacaaacaaccttaaactt

SEQ ID NO: 125808 - DNA, 443 bp, Glycine max
  unsure (1)..(443): unsure at all n locations
actatgagttgatgaattacagaagtcataaattttatatataaataatcgggaagctacataaaactggagaacttgaattggttttcttagttatntgaaaagggaattatatagagctttcagcaaaaccagcactgatataataagtgcaaaatgaataaacatatattgtcagggaaatggaaggaagactaatatataatatagaacatgtttaatgtccctaattaagcagattttgcctttcagattttaatgaagaagcaggaaagacccagntntgggattcatattaaaattctagaagtaattttagaaccttcaaaataaaaaaataatgtgacagaaaggtcagcatacctaacatgacacagattttagctccttaatctcctgcactatgaatcatcttgaggaaatattgaacacctaagcaattt

SEQ ID NO: 125809 - DNA, 391 bp, Glycine max
  unsure (1)..(391): unsure at all n locations
ngtgttgcannaagtggtggtattcatacaaagatgggtntgttcttatatgtcattaccaggtggaattctacttttctgatgcttgagagtgcccttgtatatcgacatgctatttgtagtcttgtatttgatgataggagctattcaagttgtcccactaatgaagaatgggagagaggacaaaaaatgtgtgagtttttgcgtcctttttttcaaatcacagagttgatatctggttcctcttacccaatgtctaatttgtatttcatgcaagtatggaaaattgaatgtttattgcttccaaatatgagtaatgaagatgagttgattagaacaatgacaattcatatgaaaacaaagtttgataaatattgagagatatagcaat

SEQ ID NO: 125810 - DNA, 481 bp, Glycine max
  unsure (1)..(481): unsure at all n locations
gagatgaagggcacatctaccctgaatnggtaagagttttctacactatttctcatattgattgtgatattgtaccttgaaataattgattatctcatattgtaatcgattagattntgtatggaaccttaggagctttccatgtttcgaaataatcaattaccacatttgataatcgactattctagaaaccatagaagcttgagaagctctntgtgaaacgagataatcgattacctcattctgtaatcgattaaccatgttttggaaatgtagaacatgagggatttaagtgaattaattgattacccaaactggtaatcaattaaatctgttattctattaaaattatatatatcctcacttggttattctcattagtgactctcggttagatcttatctttngaacactaattgagagtcatctaagggaaccactttggatttcaacgagagattcatgatgatcttcatcatgg

SEQ ID NO: 125811 - DNA, 442 bp, Glycine max
  unsure (1)..(442): unsure at all n locations
ggtaaggctttccgtgggaaatgatagtgagactcaacttgtatacctaccttgnngctataaaaatgcagcaagacccactatccacaatgagagaaccaattttgtttaaaaccttacatcttgtatgaaagatgttctctctttgggtttggattagtgtcacaacctacccttcggcgggagggcgaaaaggtcaaaataggtgggccaagggagttgtctcaagggagaaaacaaatggagtcgccccaatgtttattcgaggaanatttagaaaaaccaaaaagacaaaggtatgagtattttgaaatgagggtcaggagttattacacacggggaagtattagcccccacgcgtccgcacaggaacgacagccttaatcaatgtgaaaatctgactcacattatttatttcccttttatgttttatcttttgggc

SEQ ID NO: 125812 - DNA, 443 bp, Glycine max
  unsure (1)..(443): unsure at all n locations
ctctaaattactngatgtttgattatggangaggtttttctatttttttatagtgcccactggtaaactaactttccacatgtttgccttttcaagaaatggccccgaggaagcttgnctcaaagaggtccaggaaggacaatgcagccgaatgaactagttccgctccggagtatgacagtcaccgctttatgagcgctgtacaccagcaacgcttcgaggccatcaagggatggtngtntctccggtagcgacgggttcagctcatggacgacgagtatactgatttccagaggaaatatgcgccgaccgggacattactggttctcccatgcccaatttattccagaatagccttttgttgtttgcccgcttgataacgaaaatgcgtgtggcatattatcttgtaaacttacttttccttttttttgacactacctggt

SEQ ID NO: 125813 - DNA, 263 bp, Glycine max
gctcatagcatctgttttcaatttcgagcatctcgatatatgaccggactcgatccaacatccgagataaaagttattgtcattggagattgccgagagcttctattttcaatttcgagcgtctcgaaatattagagcactcaagcaaacatcttacttaaaagttattgtcgtttgaatattctacgagcatctgttttcaatacgagcgtctctatattctatggacattattcgacatatgaagtaaaagtattgtcgct

SEQ ID NO: 125814 - DNA, 464 bp, Glycine max
  unsure (1)..(464): unsure at all n locations
atttttataatgtgcctttgtcatttntatctaaaatagcttnttaaaaagcttaagtgtgacctttataataaacaagtcaagtcaaaccaagtcttaaataggtcgagcaaaaggcccttgacaagcggcgtgactcatttccattcccaaattccaccaataatatgttttaatttagcatttattcccaccgaaataactagccccacctacgctaatctttcaaccgtcctccaataatggcatttatttccactgcactaactactccgacgtcaatccttcaactgtcttccaataatatggtttaatttagcatttatatattctcacaaaccatntatcttccaaacctatccaagcttgtgaccttcctcatctcaaacttttgcatctatgcccacatgaataggagtattatattccagttaaaaattcatactgtggaaacaagcttatat

SEQ ID NO: 125815 - DNA, 341 bp, Glycine max
  unsure (1)..(341): unsure at all n locations
ctgagacgaggaagtgttgaagggtgaaacttcctgcttntattgttgaccacagagnggtacctggagatatgtcgcggtggtcatgagaccttgtggacgtcacgtggggtgctattgcccaaaaccaagcttgaccaatcccgacccaacccgggcatagtcggtcagtgagaacctgtgatgtacctaagcaggcgagctcctggcagtcaacagataaaaggaaaacaagaccacaaagcaaggaggcttgtggtggctggccagctgtgaattatgtgtaatatgtggattgtggcctctggtaatcgattaccaanggtgggtaatcgattaca

SEQ ID NO: 125816 - DNA, 430 bp, Glycine max
  unsure (1)..(430): unsure at all n locations
gacttggactctgtaagatgaatatgggaattggtgttttatttcaagtntttcttcacattaatggataggtgttctacacaccatctttgagacacttatggacatggttgggtcttacaccagcaacaaagaaaaattttatcttcctgttagcatctggccatagttgcattttaatacctggtggagtgcaagaagcatttcacatgcagcatggcactgaggtgtatngcttttcattcctcttactcaatgcttatgtgatatatttattcttttgactaaatgaatttatttttattttcctctacatataggattgttattgatgccaagcttaataatacaacagctggtgcagagaattntcccagctattgtatcaatggggctcaactaagaactgtgtgtgtgtcaatatttcaat

SEQ ID NO: 125817 - DNA, 444 bp, Glycine max
  unsure (1)..(444): unsure at all n locations
tgaatctgaagctgaacacaggcagctgacttcccatgaaaatatgataaggaagaagctgcaacaagattnttggtcagcagcccaagctcacgagtctttaatgaggcagaaggcgagatcgcgttggattaaggagggggtcagatatctcgatattttcacctggtgattaactcccatcgaagtttgtagctttttccaacagagatttcaagaaactatgagcagcataccagttntgaatggcacctcttttcaagaaactatgttctttggggaggctactatgaaaaatgtcaagacaatcaaattgattntgagggcttttgaattgtcatcangacttataataaattatgggaagagcagctatggngtgttggccaatctaaatatggaaatgcaggtgccagtatctgattgaaatcatcctctgctttc

SEQ ID NO: 125818 - DNA, 255 bp, Glycine max
  unsure (1)..(255): unsure at all n locations
acacacacgatttttttcttcgatttaacaggcgcgacgtgctatttgagataaactccgcgccgcagagagtagtttgagaaagcctcggttctttattaaaagagatagtgagttgngagtgatattaggtgctagacaccctgctgggaatttctacgaacaactgatgtaattacttaatatcttattaaatggtggtatgagacaatgcttctttcatgcttaattactgatgctctggactaataccca

SEQ ID NO: 125819 - DNA, 336 bp, Glycine max
  unsure (1)..(336): unsure at all n locations
gaagaggatgctntaatggagganaagatagagagtaatggtgttgcacgacattgaaggaataaaagagggagagaagtggaactctgaagtgtatctcataagactttcattcatcaaagttacaacaagtgttacacatgcttctaattatagactaggtagcttgcttgagaagctttcttaagataacttacttgagaagcttctttgagaaaacttccttgagaaactagagcttagctacacacacgcagtctaaaacttagctcaccttcttgagaaaatacatgaaaatacaataaaaaagtccttctctaagactcccaaatggcc

SEQ ID NO: 125820 - DNA, 317 bp, Glycine max
  unsure (1)..(317): unsure at all n locations
ctgcatagttntggataaatatacacatgcgatcatgacaatgacaaaacagatcgatntatgttgtgtgaatttatccattttgctacagaatgtatgtttttaatttgcgatataattcaaacactgagaagattctgttttacattcttatttaatcatgagatttaaatgattgagtctttgtaataatcacttaaaaaattatatctaaaataatttctaattacttgatagtataatttctttttttcacaataacaacatgtttaaagagaaatgttaaatagattgaatattaatttttatggttacct

SEQ ID NO: 125821 - DNA, 307 bp, Glycine max
  unsure (1)..(307): unsure at all n locations
cacctcggaaaagcatatctcacttaaaattagtgaaaagaacgagaaaaaagaataaaatcaaggtcgaagctcttcagtaacactttcgtgacattctngtaaccatatcaccatgtaaatgaatttcaaccgatncgttgtgttgtaatctcacttaagcaccatttaaataagtcttgaccgatcgtttgtattgtaaactcgcgtcatcaaataaaaaccaactcataaacttcttcatttcatcaaaaaatcaagagatacgtttatggtcaacaccttaacgattctctcctttaaaaat

SEQ ID NO: 125822 - DNA, 285 bp, Glycine max
taaactaagccttccaagcttacgtaaatctgggcctagccatggtataatttctcataaccattgcctccctcgcccagtattatcattagtcggtgaggtgcttcacctttggggactttcagctatcacccatggtggaagaaattgaagagatcctatgatgtcctctatggggaaggagaccatacctctcttcagggttctatccctcattagctagaatctctaagatagtccaaatctcggcgcaggaattacaccacagaaagcaagtgctaattg

SEQ ID NO: 125823 - DNA, 430 bp, Glycine max
  unsure (1)..(430): unsure at all n locations
tgctaacttacttccatatatactcaataatgcatgggaaccataatcccagcaaagaattctcaaccttcatttttccaaggatacaactcgaatgcaacatgtgcttatcatggaggtgttccggggccattcattgagcattgtgtgaccttgaaacataaggtgcagagtctaattgatgcaagttggctaaaatcgaggaggacaactgcttgtgaattctaacgttgtcgagcgatactatgcatggtacttgtggaaattngaagggtttgtgtagatgtctccaatgactcattangattttcaagtttatgccattattgtaaataacaatcacaatgctaataatatggataaatttgatgttcttgccttcattctcttacaattacatctttgccatattatttaaacatcccactga

SEQ ID NO: 125824 - DNA, 371 bp, Glycine max
gagtaatttgctgggtgtgcactccaaagttctataagggtttgaagacctaatgcaaaagaaggacatctattgatttgtacgcaatatttgaaccgcttctccccaaaaggtgtttggtaaacccacactcaataacatgcatctgaccatttctatgatgggtttttcatcctttctaccaagtcattatgtttttttttgggaggcgggtgagtaaccactgtcttatgcctctggattttatattattgaaaactattgaaatgtctgaacaaactcacgtcatagttgtctaacattaacctggctccattgaattgtctctatatccatcctaaatcttcaaaagtcacttatttaaaacaaaa

SEQ ID NO: 125825 - DNA, 392 bp, Glycine max
  unsure (1)..(392): unsure at all n locations
actcagcttaccccactattacccacaaccacccaccanacctatcaatgttaatanaatgacatcggcagaaatgcagttgagaagagaaaggggcctatgctntacttgtgatgacaagttttcccctagccatcgttgtcctaataagcaatattttgttccacagtgggaagaagaggatgaacctgcattacaaccagatccaccagacgaggttgagacagctggtgaccccagtttgcaagatcatcatttgtcttataatgctntaaaaggctcatcaggtcttgggacaatgaagtttcaaggatcaataaatggattgggagtgtagattctactagatagtgggagttcatataacttcctctagcctagactagctcaat

SEQ ID NO: 125826 - DNA, 398 bp, Glycine max
  unsure (1)..(398): unsure at all n locations
tataaatttctcagtgtagtatccctctttattgcttctcatattnncatctttggtgcatacatgctataactnttgaaaagaaanaaaaaatctgattttacttaagcataacattatctacaaccaaaaggttttccaaatatgttttgatcatcacaagtagcatttatttttcacaaagaaagaaaatcagaatctgttttgaaacatagtatgtcagtttgaatgttttttttttagaacaacttcttattgcataaccctaattggttnttataattgctatttattatataaccaagtatacaaagaaaagtatcattgctcttaaccaaacttctaatattagagcataagcctaaaaagcccaatctcataagcacaaattgtttatg

SEQ ID NO: 125827 - DNA, 287 bp, Glycine max
atttagagagaggagagtgaatttgaatatgaactgaagaaagagaaggggcaaagcaaaaacacaaacaaaagctatgggagcgtgaaagccagtattaaaaagcaagtgtgtttagatttgtgttcacgtgtcgctgttgaaacaggtgttgctgttttatttttttaaaattccaactttgtcaactagaagcatacacgtgtcaagcttctaggaagggtacattagtaattatcctggccttctctcttaatatataatatatagaattatagatatagata

SEQ ID NO: 125828 - DNA, 320 bp, Glycine max
  unsure (1)..(320): unsure at all n locations
acactcaagcctctattgaccactcatatatatacaacgatcatttgtgcagttctatattcattcttcatcgcagaagacattacggtctcatcaagatgtcattgagtntttgctcgacgtaaaaattcctctaaaaggcggtagcaagaaagctaaggttgtcggggctgtagataatcaagtacgcattttttaatattcaaaacatgaagcattgtctataatatatatacacatggtctacataacaatgatatatcgagagaaaaaatgggagatatagattatagttgacgatgttgcaccttacaggtctc

SEQ ID NO: 125829 - DNA, 488 bp, Glycine max
  unsure (1)..(488): unsure at all n locations
aagctcactcatatgttactgaatctgttgtgacaacaatgcatctgcctcaatctatatgccccatttgtgggtttggttctgaaagttgtgttagtgacaaggattaaccacattctaattgttaaaacaaatttaacaaatctaattaaataatctaatataaacctggataaatatttaccttgcccatcccaaatataaacttttggattatttccaagttctttaactattagtatttgataattgtttaaaagacaaataaaggtgaataagtatatcttttgcccagtgaagttaccaaacataaatccttatcctcatttgctaatactaacaattaagccaattaaaacttcaaacttttgttgccgtaacacagctcataacggagcgggctcgaaaatagcgaaagagggactcanaaatagtgtcagcacaagcacaggttcatccaaggtgttnttttttttcaaagtttgtta

SEQ ID NO: 125830 - DNA, 430 bp, Glycine max
ttctgtaagctaacacacttcagcatagatgcttattgttatcttttccaagcaacaaagtaatgctaacttctataacatgagtaattcaattatatttcaagtaactccagtacgatcgcaatctatttaaatcaccatgaagaataacacatacctgtgaaccatcagctctatttgtccatcttgtaagctggatcctccaatagctctatccaccaaaactgagaatgctgttttattatcctctgtgtatatcccaagattaatctggaggataaaataaataatattgtgaacctgaaggttggatataacttcttgttgaattatgaagtgctttgccccaagcaagctgctcaatatacaggggagtggctacattgctgaatgcaaactcactgccaaaaagaacttttttttcttgaac

SEQ ID NO: 125831 - DNA, 447 bp, Glycine max
  unsure (1)..(447): unsure at all n locations
tgcttgtggagctgctatggaggctggatctttcagcttcaatgaggtccttcaatggtgattttccaccatggagatgcaacggaaggcaaaggagaagaggagaggggaggcaccatccactagggaataagccatggaagaagcagcttcaccaccaagaatgtgccttggattagaaacttgaagaggatgctttaatggaggaaaataaagagagaaggggggagcacaaaattgaaggaataaaagaatgagagaagtggaactttgaagtgtatctcataagactntcattcatcaaagttacaacaagtgttacacatgcttctatntatagactacgttgcttccttgagaagctntcttgagaaaacttncttgagaagcttctttgaacttccttgaanagctagagcttagctacacacaccccctctataacta

SEQ ID NO: 125832 - DNA, 449 bp, Glycine max
  unsure (1)..(449): unsure at all n locations
tgtgactctaggcaatntctntaaaactagtcacttaaaaagttgtgactnttgaaaaaatcttcagaaacaagtcacttgaagaattgtgacttttggaaatgtatttttcgaaatcagccactggtaatcaattaccattaaggtgtaatcgatgacacatcaacagatgtgactcttcattttgaattttgaaaattaaaacgtttagaggctctggtaatcgattacaaatattgtgtaatcgattacacaagtttaaaatgatttgaaaatgtttaaacccaagttgtgactcttgaaattngaaatctaacattttaaagacactggtaatcgattacatgattatggtaattgattacagctttgtaagtcaagttttgaaaataatgctggctactggtaatcgagtactgatgaagacatganggttcatatcaaatact

SEQ ID NO: 125833 - DNA, 364 bp, Glycine max
  unsure (1)..(364): unsure at all n locations
tcttatganaccgcttgagatgtcgctattactatttattacacacgtgagcccgcttagaagtatgagatgagtttatcgtaattgaggataaaacgaacatgtgtagggatccttagaagatcctattgaggtgtattttgagatatttaccgtgttgtaattttgcctttatgattataatcacgagattgttatgtttgacgggtcaattaatgacataatgcgaattggttgataaaatagagagttcttggtgattttgtgtttttgaacctatgaatntgactcccttgattttgatatgactatgtgaaattttttgagtgattctactccccacgttgcgagaagtatttatgta

SEQ ID NO: 125834 - DNA, 310 bp, Glycine max
ttcaaactcagcttagctagttcatttttcttggaggctctcttacttcttattttgcacgtaccccccgtcctcgatacccttaaccctctctgtcatccgcatcgtgagaatgtgttgtgcatgaaccgataaagtttgtttatggagaacgacatgtttattcttataagattcaaatattggagtgcaccaatgatttctctatcttgtgtagacatcatgaggtgtaaacggtggctatgttaacacagtggtgtgggtgatggtattgtcccccaatgattttctatcttgtgtagtcatcatg

SEQ ID NO: 125835 - DNA, 222 bp, Glycine max
cctcacactcaccacactatgttgctcggtcgaaacgctcgacgttgaacctatggattgtatctgtccgatactcagagcttggtacctcttcatgattcgaccatctcttggacttcatccttcatatataaattcaccctcatattttcttcattctagcgcgcttggaaaaacaaccttcatgcatatggttccctgacttcaacagggatcatggca

SEQ ID NO: 125836 - DNA, 376 bp, Glycine max
  unsure (1)..(376): unsure at all n locations
gtctntagatttgngagccaatccaatccttgtgtccggactctcagccacttatgatagccgccgatgatcccattactgcttcccctaagctctctgtcctttcttcacgccgcatcccatgccttgcgaactccttggagtaccctcgcgttgtggtcactgaaaccccgtgcgatgaaaggcgtgatgctttcgtctgatggcactcctctcatggggtagccaagctgtcttatggcgaggacgggattataattaatacaaccccttgttccatcaggggaacatttggacatccttcgcatgaagatagaatcctaattnttccttccttctagcgagggaaccaattaacagacgcccctctatgcta

SEQ ID NO: 125837 - DNA, 326 bp, Glycine max
  unsure (1)..(326): unsure at all n locations
ctcatcttggtggtgaagctccttcttccttggtttattccttaatggatggcgcctcctctcacctattttcctttgtcttccgctgcatctccatggtggaaaatcaccattaaaggaccccattgaagctcaaagatccagcctccatagaagccccacaagcaagcttccatcacgcgcagagacagattctgcgccctttatcattcatgagcagcgagtcgagtggtaaacgcgcatagacgaattctgcgccctttgccattcagatttcgcanattgggtgataaacgcgcatagacaaatatggcgccctttatcat

SEQ ID NO: 125838 - DNA, 440 bp, Glycine max
  unsure (1)..(440): unsure at all n locations
ctccattgcactgaagactgtgataggtacgtttcgtctacctgtgttgttctattgaatagctaggtctatttctggaactcgtggttaagctaaggaacctttttggtttctggtgcaaggattggtgaactcgtggtcacctgaggtacatttcactgctagtatgtggtctttgtggtcacctgaggtacatttcacctaaggtacaatctcgccggcattgtcgctgttgggttcgaggtacatttcactgccttcatgccttcattgtaactntgtgcttccgcgtacgtggtctttgtgctctttcttcttatagattgttagntaggttgttaattacgtattactactacggtttggaatgcagctagtcttgctgaaaagctgtgtcnaatattgcttattttgtgattgtgcttgaagcattacttctc

SEQ ID NO: 125839 - DNA, 373 bp, Glycine max
  unsure (1)..(373): unsure at all n locations
gattctctgtggtaacctcaatgctatctgtttcatttagtcaactatcttgcctgaaaccaattctatttgaaacctttattgtattgaaattcctgcatattgcataggtatggtagatgtattttaggctttggtccatatgttatgcacaaatttttttatttaatttgttttatgtattttttgaatttcttaaaactaattttactacacgaatactattgagtgtgttttttgtgatgaatatctcanagttatcatatacttattaagagatcgtaatgtgtttcctccattattttggccttcattatatcgactaatcttgttgacaattaactaaatacatgacaatgaaacaagtgaaatg

SEQ ID NO: 125840 - DNA, 206 bp, Glycine max
  unsure (1)..(206): unsure at all n locations
tgctgtttaagcccctaagaaaatntatatagtgaaagtagggagacctaatttactaaaaagcaatgaggcttttctaaacgtccatcaaattaacatacactcattaaaaatttaaagttgcaccagtatggcataatacttttttaaacatgaactttttgttttcccattaacacttttttacctattaaggctgcagctaa

SEQ ID NO: 125841 - DNA, 358 bp, Glycine max
atatggttctgccataacagctcggcacttgtatcctttgtgagagggggaataatccaagaagacacattcctaagatttgaattggaacttgtgcttcttgtatggtctaagaaaggggaaacatgaccaaccaaacaccctaagaaatgaataatgaggaattttgttgaacagtttgtgatagggagccccattatcaatagttgaagatggcagcttgttgatcaagtaaatgctggaagcagaggcatgatctcagtagtgtagcggcaatttggataagaaagaagagtgagaccaagctccactatgttcctgtgcttgcgttcaactacaccattttgatggtgagtat

SEQ ID NO: 125842 - DNA, 88 bp, Glycine max
caaggggtttttttttgtctccaaacacgcgggggggggtttagatcccttctatgtcgccacacttccagtctttttctcggcttaa

SEQ ID NO: 125843 - DNA, 388 bp, Glycine max
  unsure (1)..(388): unsure at all n locations
tgcgttggtaacctggaacacaactgatcgtgaatcanaatatgcacatgtcggcggactctgtggnttatgctcatctgtcgaccgccacacagacctttgcccttttgtgcaacaatctgaagcaatngaacagcctgaagcttatgctgcagacatctacaacatacctcctcaacctcaacagcaaaatcagccgcaacagaacaattatgacctctccagcaacaggtacaatcctgtgtggaggaatcatcccaaccttagatggtcgaatacttcacaacagcagcaacaacaaccttatnttcaaaatgttgttggcccatgcagaccatacattcctccaccaattcagtacaacaatagcaacagccccagaaacaac

SEQ ID NO: 125844 - DNA, 419 bp, Glycine max
  unsure (1)..(419): unsure at all n locations
actagatgtctgggtaacctggaacccaactggtcatgaataanaaatctacacctgtcgctagactctgtggtttatgctcctctgcccaccatcacacaaaccttagcccttntgtgcaacaatctgaagcaattgaacagtctgaagcttatgctacaaacatctacaatagacctcctcaacctcagcaataaaatcagccacaacataacaattatgacctctccagcaacaggtacaatcccgggtgagggaatcatcccaaccttagatggtcgaatccttcacaacagcagcagcaacaacaacagccttattttagaatgctgctggcccagcagacatactttctcaccaatcacaacaacacaacaatacaacagctcaaacaacaacagtgaggctctcacaacttc

SEQ ID NO: 125845 - DNA, 412 bp, Glycine max
  unsure (1)..(412): unsure at all n locations
cataaagatttagtgaaggaaagtgatccaaaaatgtccaagaatagggtgttgaaagagcataacaagactnttctaaatnggtttaaagatacaatncttgctgacgataatgcttctaaaacgttaataaagttagcagatgggtcgaanaaaatgttataacttgggaaggatacgatataaacaagtattcattctacatgaaaacacaagacgacgagagtacaatgcataatagtgggggtgagtctaaaggctgaacctcaacactttgcgagtgtacatgatgactatccccggctagctgctatcccttactttggagtcactgaagaaatctgggagcttaatatgtcaaatcactatctgtcgtttaagtgagtgggttgcacaaatcagtgtggaccgt

SEQ ID NO: 125846 - DNA, 458 bp, Glycine max
  unsure (1)..(458): unsure at all n locations
ctcagcttggcacattctgattcttccaaccncgactcggctatgattctcatagaaggaacctncacctcanataggagcacaacctctatcctgtacaccaaagagaaaggggtttccccagcagatgtgcgcaccgaagttcgataaccatgcaatgcaaatgggagcatcttgtgccaaccttgtatgacatggtcatcttctaaactatcttcttgatatntttattggcagcctcaactgccccattcatcttatgcttgtaaggcgtggaattatggtgttggattttgaaatcctcacacatttccttcatcattttgttgttcagattggtggcattatcggtgataattttcttgggcaacctgtatcggcaattatttccttttgatgaattaatcccacaccctagtacactactatgatgctgtcacccattgtgaacaatcatg

SEQ ID NO: 125847 - DNA, 392 bp, Glycine max
  unsure (1)..(392): unsure at all n locations
ngaatngagaaagcgtggaagagtcagtcttcctacttttatttcttgaccacagagtgatacctggagatatgtcacggnggtcaggagaccttgtgaacgtcaggtggggtgctattgcccaaaaccaagcttgatcaatcccgacccaacccgggcataatcagtcagtgagaacctatgacgtacctaaacaggcgagctcctggcagtcaaccaataaaagaacaaagaccacaaagcaagaaggcttgtgtggtggctggccagctatggatcttgagtggtatctggaatttggcctctggtaatcgattaccaagggggtgtaatcgattacaaggcttaaaaatggagacaggaagttaagatggcctctggtaatcgattat

SEQ ID NO: 125848 - DNA, 382 bp, Glycine max
  unsure (1)..(382): unsure at all n locations
tgtgccanatagtttaataataaaanatgattcaagacaattgtgtcataaagaaatngataattgtaatagaatttgtattaataatcgataatattaaattttaattgaaattagatattgtgtataatttaatatagaaatgacaaataatttgatttgtctattgataagctatctttttaaattnggttattctttctcgtgaaatgacctctcttncgctagcactgcatcctccttactcgaggaaaaataaatctttgattcatctncaatatttttattactcaattgtccactaacataccaggcataatgagtgaaggtgttgttttttaaaaaggggcacagggtgtgcgattcatgatgttcacaacat

SEQ ID NO: 125849 - DNA, 355 bp, Glycine max
tgtcatgttcagaatatcacatatgcaaactgatgatgtgttatatataatagcctcagaagttgattatcatgactcaaaattaaaagttgcaccattacactgtcataccatttaaccacaagaaaggagttaatacaaagtcacactaaacttgacttacaccacatcttcttaagacactaaatataaacattgcatgaagtatacatacattcaacataaaactgaaacctgatggctgataagcattactgcatcccaatatcaggtgaatttacttatgaatacaacaatgacattgttattaaatgagtaacaccagacttctacactgtcgatacaatattgcaca

SEQ ID NO: 125850 - DNA, 308 bp, Glycine max
  unsure (1)..(308): unsure at all n locations
gagtcaccgcgtgcatgactntatgcatgattatcacgtctgtgatttattcactgcatcttctcatctgatagacaagatacaacaacgtcgctgaagataatatgctacgcgcgctctcctctcttgcatgttgaagtagcgtagtagctaccttcgcaatgattgaagccacacctttcgaatctttgctccaccaatgaagcatcttccttggttgtagatgcctttcagagctctataaatagatacttgcgtccacactctgaagaatcaagaacaatgctgtgctatcgcgatttataaca

SEQ ID NO: 125851 - DNA, 259 bp, Glycine max
  unsure (1)..(259): unsure at all n locations
tagttatagtggtggagggaaagaaaggatatcttttcatttgaacaccagaagaagagagataaagaantttgagtgtggattgatacgctaaacattttcttggaagaatatttanaaggtatgttgtcatttgtgatgcgtgattccaaaatgatggtggtgaacaagcatgggcaagtagagtacggataatgttgttaatggttcatatatttctctcagctcttccatcttgtgatgaagtatgtggacatga

SEQ ID NO: 125852 - DNA, 492 bp, Glycine max
  unsure (1)..(492): unsure at all n locations
ctcagcttctatagaaggttcgttcctaatttatctacaattgcatcatctctcaatgagctggtgaagaagaatgtggtatttacctcgggtgaaaaacaagagcaagcctttgctttgctcaaggaaaagcttactaaggcacctgttctagctctttctgacttttctaaaacttttgagctataatgtgatgcctctggagtgggagttggagttgtattgttacaaggtgggcaccctattgcttattttagtgaaaaaattcatagttccaccctcaactaccccacctatgataaagagcattatgccttaataagagccctccaaacttgggaacattaccttgtttccaaggaatttgtcattcatagtgatcatcaatcacttaaatacattagagggcaaaacaagtctaacgaaaggcatgcanaagggtagagtaccttagcaatttcctatgtatcaatacataatggaaaacaatgt

SEQ ID NO: 125853 - DNA, 444 bp, Glycine max
  unsure (1)..(444): unsure at all n locations
tacggacacttagaaactaagcnttcagcanatttagtaatgacccactaacctagaattaatataacttaatgccattaacctanggaattaaaaaaaacttcatggctgagtgtaactgaaattgtggcaaccaaaagtgatgagaatcatgaaactggccaaatacangctataggcccaagtggagaaagacgaatgcccaagtggagaaagacaaagcccccgattggagaaagatgaaggcccaagtggagaaggatgaatgcccacaagcagagacactatcaagactattaattgttgctgaatgcccaaactaatttgaaggcccaagttaaataaagttttagttataatttaattttattgtaatntggcccaaactgtntataaggcccatgtctatttttatcttctttgtcagctacactataagtattt

SEQ ID NO: 125854 - DNA, 388 bp, Glycine max
  unsure (1)..(388): unsure at all n locations
ctacaacagaatttagtaatgacccactaacctagaattaatataacttaatgccattaaccttgcgaattaaaaaaagaacttaatggctgagtgtaactgaaattgtggcaaccaaaagtcacccccaacagccaacaagtcagccaccatttggtctcccaaaaggctaatgcctatgttgccaatagggcccttattacaacttgaactaaacctaccaaagcccttttagttgattaacccaaaacatatttttggtcatccaactttacaaggattgggccattatttagacaaactatacactntataaatgaaacacagtggtgccatttagtcctcctccatttggtgcatgagtacactcacaaccttggacttttct

SEQ ID NO: 125855 - DNA, 321 bp, Glycine max
tgcccgagtcattcatgcctatgagatgttgttgaagtattggcgatcagaattgcgattccttggattatatggttgaaccaagctcatgcttttacaaaaaggttcatatagtcaagttgaaatatggaagtaaccgtcttgcaaaattggggcaaaagatgaatcgagttacatcactgcttcattttctgtcaaaacacatataagactggtgatgtgctttgtacttccagtttcaccttgaccaagatgtcatgaaccatgtgggaaaatcttaattgttcaaccccctgttctgcgtgaagaatcgcaatactt

SEQ ID NO: 125856 - DNA, 380 bp, Glycine max
taagctcgctgttgctacccccacagagcccctcgtatacttgtttctgccatgctcttccctacaagccctcttggtttcttgttccaagggcttcggtggtagccacatttatatctctcagttcagcattctcctttcggatcttcagaagagctgatttgaacctttctttgactgtttgggtttgctcgagttctgtcctaaaggtctgcacctcttcgtctttctcccgtgcctcaacttcctccctttttgcggttcttaaactctggagccaattcaaacacttgcacgtgggctcttcaccacttactggagccaccgatgggtccatgttactgccctgagatcttgtccttcttttgaccacctccatg

SEQ ID NO: 125857 - DNA, 437 bp, Glycine max
  unsure (1)..(437): unsure at all n locations
tcatcctcanagaaggaagaaacaagttctgctgaataagactaataagatcccttttaccaaaacgaagatgattgttttggtatctgtttagattaaatttaatttcggtcacaaaaccgtctgtttgtaattaatgtgtaattaatgctggacaatactacctgtcctgtagccattaaagtcccggtcaaaactacttgtcttgtaacaaacagtcaaatagtcccggtcaaaactaccggcaactaccggtcttagatatttggctatataaggagtcctcaagcatgttgtgaggcaccctttcattttagccatttttcacgtttcggaagagaggtgctctgaaacaagatatttgtaagcgcttctttctagattcaataaatatctatttgtcatctttctctcttctcccttcaccgatcctgtgc

SEQ ID NO: 125858 - DNA, 109 bp, Glycine max
tttaggctgttaattccgagagaaaataatctagaaataaaatcctaactgtaatagtaaaatagaggaagccattgctaagtactatttaacataaacccctgctttt

SEQ ID NO: 125859 - DNA, 228 bp, Glycine max
  unsure (1)..(228): unsure at all n locations
tgatggtctgttctgactcacctctaccctgcctctgttttatggtcatacttctgaaattttcagtgtgcttcctcaaaaattggcggtacctgccatgttattctgcagaacattgtcttataaataagtctcattaaatacattctctttgatacttcttgtttgtcatacanacctgagcatcatgatatcataccataaatacacttctcacttgatcaattt

SEQ ID NO: 125860 - DNA, 127 bp, Glycine max
gttgatggccagatcacttatatggttggtcatgactcactggtgtaaatttcttcatcgttaaccctcttggaattaacaacccatgtgtatgtcacatctataggtaattcttgaatttctcata

SEQ ID NO: 125861 - DNA, 228 bp, Glycine max
gtatacaatttatgggcaagatctacaaacattctttcatgacgtgacacactttgagagacagtaccctgcagatgattgaatctgacagctgtgtaaaggctaatcataaaacgggcaagaactttgatttacgcaatttgccggccactctagttagtgctgtcaaaagtttgtgggatgaagtgttaaaccaaactcctaagtctgtgcaaaaatggtggaaag

SEQ ID NO: 125862 - DNA, 319 bp, Glycine max
  unsure (1)..(319): unsure at all n locations
actcctgataatcttgtgccttgacctgtccttctgttgagcactcagcctaggaaacatgttactatctaggatttgacttgatgttggataggtggggtttgttatgacactgttgtgcttctatgagattggctctgagcatgatatgtaagtgactctataatgtgttaagtaaataaaaaaaaatcaaaaaaaaaaatcaaaatcanaaaaaaaaaacataatgagaaactatgctaagaaactgctcctagtattactctttatttttaacctatctgttatctgataccatctttctctgctgcatactaac

SEQ ID NO: 125863 - DNA, 64 bp, Glycine max
aaacaactcctattactactttattgactaatccgcaactttctagtctatactttagttgaaa

SEQ ID NO: 125864 - DNA, 156 bp, Glycine max
ttatctactgcacagtccctctagaacctaggtcttacttcttacgctaaagttttcatctgtgaccagcaatacctagctgtatcaaaaattctaccgaaaagttggtcatctcttataatttcacacttgctgtttattgcagaccttgctaaa

SEQ ID NO: 125865 - DNA, 377 bp, Glycine max
  unsure (1)..(377): unsure at all n locations
tacacatcttaatctacattntaaagaatggtgtattnntaaattaaaattatcaaaaattgaaaacaattgtaaatatcacttattatttaaaataaaaatttaataatacttcttcccgtccataataagtatcatcttanactttcattattaagatcaagagaaagttaataataaatagatgagagaagaatatattctataaaataaccatatgtaatattacattaattgagacctatagtatacttgtaagaatatagtgaaatcattaaaaacggtatagtaaaaaatatatacatcacaaatacatgcactttggacttattttttaggcctatatatgttagacacaggagaataataagattgaa

SEQ ID NO: 125866 - DNA, 262 bp, Glycine max
ataaattctccagaatcacattataatctactcttacacaaagttaactccttaaaatgataattttgtaataattctgtaactccttaaaagctctaaattaaaaagttgagtaactttaaaagtaaattatgaggcctgtatgtctgacaagaacctataatggctttgaatgatggatgccaatatctccaaataagaagatactatatccttcatcatcgaacggaaagaaaaacatctgcttcaaagtcgtatcttc

SEQ ID NO: 125867 - DNA, 306 bp, Glycine max
  unsure (1)..(306): unsure at all n locations
agatttggcacagccagctacatcttatgagcaaagcgaatccttgatagagggcaatttcattttaccggatactcctcagtgtcttttccgaattaaacttgacactccgtttatggccttttaaaacttgtctttggagctcttaaaatgcagacatcacatgatttgaggcttttgatgtctcngactaaataatatggaagacactatgggtgtggccatctaaatatgaatgccgtgcagttctgatgtaacatcttgctttctattgatacacttgctatcagatgggtatggacatct

SEQ ID NO: 125868 - DNA, 165 bp, Glycine max
tctctgttcacaatctatgatcctgtgatcaaagctctcttatgtaacggagctgttaaacccaactgggatcctgtactggagcttaaaacttgatgcatgctaataacaaatcactcgatcgatttagggttgcgaactactctgtctaacaagtaatggcta

SEQ ID NO: 125869 - DNA, 337 bp, Glycine max
  unsure (1)..(337): unsure at all n locations
agtcttgttgaacactgaagtcttctgataaactatacaccacttattcttgaatgaaggtaaatgagtgatctattcctattcttattcacaaacaatgaacttatggcaagtgtctgtgacacgaacacatctatgagttaggtcaacctnactctaataattgttcacatgccttacataaaatctggcatgactatctgcatcaacttgtatagtatatacatcttataaactactgatggataatcctagaaccacacaggtctctgattcctttttatttaaaatgaattgtggttcaactcactactagtgtgagacagaaattgaatat

SEQ ID NO: 125870 - DNA, 222 bp, Glycine max
  unsure (1)..(222): unsure at all n locations
agcgagcatcaatgagcacctatganatccgtgtctatattttgaatgaaacacacacctactctncattgacgaaaatcatttagaatttggaacagaagaaaacatataactgggaagaaatactaacatatactctctatggggtgtaatagctggctgctgctcatctagagtcggtgagatctgcatcgatgacatctccgtcgggtcccttacctg

SEQ ID NO: 125871 - DNA, 345 bp, Glycine max
  unsure (1)..(345): unsure at all n locations
ttctctctctctcganatcgctgaggaaacatagttccgtgaagaatattcaagccgaggcgcttacgtaacatttgtgtcataaattacgcgaagattctcgagcagtcttcacacgtcatcattcgttctttggtgtcgtcagtcttcaacgggtgagtacctcataccgagctcttcaatacatcctatgtacccgtggtggccacantattgttcatgtattttattctcggttcattactgttatacccctttgcgtgctagccattattaagcattttcctaattagaataaataattcacgtcgttgatgatatcgtatttgtaaagatcgacgtcgc

SEQ ID NO: 125872 - DNA, 315 bp, Glycine max
ttggaactctggagctttggaactctggagtggctctcccccttctatagtactctggagctttaagatctagagtgagttgtcctcctttatgtagtactctggggagtggctgtccccttatgtagtaccctgacaaacgaatcaaaagctctcagacttaaagccgaatcaagtaaccttcttgaggcaatcagccacaagaaacttttatttcaagaagggctgtgctggtgacactaggttgactggctctgattgcatatgagttcagctgggagagtatctcctgaggtgctatcgggtttttgtctc

SEQ ID NO: 125873 - DNA, 159 bp, Glycine max
gtctccctttctcacatctcctgtaatcgaaactggtgtccaaatcattaacatctaactactgctcggttttactaactctaagttaatgctctctttattgtattttgttgagaatgatatccttgggtaatttatcgagaatttataagtaattta

SEQ ID NO: 125874 - DNA, 87 bp, Glycine max
actgtgaagctgatagcttggcaatggcgtcttctaatctggctgctgaaccctcgatcgtgtagcttttcgcattgatgctcaatg

SEQ ID NO: 125875 - DNA, 204 bp, Glycine max
tatcactactcggtgcttctacactttatctcatttttttaaaaatatctcatagccatcttgcgatatatgtacaaggcactgactgggcattaaggttcaactaacagcgttggcgcccctacaacattgattgttactaaccactctcaacatgtcctaatgcatattgtcacggagctaaaaactcttgttctacttctg

SEQ ID NO: 125876 - DNA, 307 bp, Glycine max
  unsure (1)..(307): unsure at all n locations
tgttacangagtgcaatcatctctattatgggataatatgttacgcgttagttgctggaaattctatcattcaagaaatgagcactcttatcatacctttataaaaacaatagtaagaaatgatcattctcatatgaatgaagaagttccaatgcacttttggcggtacgaatacgtaagtgaattatcatgtggcctttttttaaattaattccaagcagtttacggacaagatgctcgagagtacggttatataaagcacatatcaacgacaagaagtcttcttcatatggcatttgcactctcg

SEQ ID NO: 125877 - DNA, 321 bp, Glycine max
ctcactgtaaatactgacacatgcaagtgacttaataatatttctgacatgaattacaacttcaaggtttctgcttcttactttcttctctcttcacaatactacaattgtataggacacctgctatttaaggaagaacaatgtcatgacaccagccgctttaccatggtgagaaacattgccctactgtgctctgatctctgctgcatgtgacttgatctgacagtggctagctgcagctatttaccaacacattgcagtagctcactgacgcttcacgtcacctactcgcctcacatggccgacatcacgtatcttttc

SEQ ID NO: 125878 - DNA, 383 bp, Glycine max
  unsure (1)..(383): unsure at all n locations
ctcttgccagctttgagtgacttaatgtgatctttccacctcttccatactgtcatttttgtgccgctgagcacttggtggttatatctctgagacccatcactgattgatggtgtcaccctgcatatcattctatacacaattatctaatatactctttttatatgatagaacacatattaaaatatgtatttatttcatataagatattttatattatatccttatatatgagacacttctgaatactatgagattaatatttgaaatacatattttatcaatttatttncttattgtgaaacactaaatacatggttgttttaacacaattatgaatgctgatatcagtatgactatgctatgatggtcaaaatatatac

SEQ ID NO: 125879 - DNA, 217 bp, Glycine max
  unsure (1)..(217): unsure at all n locations
catctaagatcttgaccatactacagggtgtgcagctttctgctcccatgatgattatgctactctcaatgcaatatgagctatatntaatatacttcacatgtgttctaaactatagttgtaaccattgatgtctgactctgccacaatctatctaactctttaatgtagtctctttaacaactctgtatctaactgaagctatcaaatgcgctca

SEQ ID NO: 125880 - DNA, 375 bp, Glycine max
  unsure (1)..(375): unsure at all n locations
atattatttagtaaaaattaataattcatattgacctgtattatggtactattttttgccgattacctgggaccgattattcttactttttttggtctgccaccgaaatttcttccccggctataaaaaccctcgtcacttttatgtattaataggtgatggttattttaaatctagtctaaatattaatgattgatttatatatttntagatttgatctcatttttgtatacaacaanaatgataatggattaggattttatttatatttcacaatatgatttatttgtatctttaaaatatcattaacaattgtctatctttttatataacacagattatgttggcagctcatctaatgtatcttacgtttca

SEQ ID NO: 125881 - DNA, 261 bp, Glycine max
  unsure (1)..(261): unsure at all n locations
cagttgggtgtatttatacctaattcttaatgaatgaaggatcatgtcatgttttgggcattgaaagcttcaagtgtaagcacttgttccttcttgtaagcatggcactagactatttgtgtatgcgtataatgtgccagggggcattaccaattagctattagttggtctagaaaagtgatttctgaatctcatgaatacttactaattacacatngtcatcagtatgtcatatattacttagtatctaatttacttgaa

SEQ ID NO: 125882 - DNA, 166 bp, Glycine max
ttgggaccttctgtactagaggccttacattcttgctctgatctggaaacatagacctagtaaacacctaaccccacacctcccaacattgcctatatagccagaggacccataattgcctgataatcaatggaaccctaaatgcctattagaaagtggggacaca

SEQ ID NO: 125883 - DNA, 386 bp, Glycine max
  unsure (1)..(386): unsure at all n locations
actctgttatgtaccaatgactgaatttccgggtagaactgggactcagggtgtatgcnaacactgacatccaccaccggctttcgcatgaaactgtatgacctacagcgactctgcgtcacagataagaaacagacccaagcaggtggctgtggtgctgccagctgtgattatgtgtatatgtggtgtggccttggtatcattacaaggtggtatcatacagctaaattgagacagagctaatgctctgtatcataccaagggtatcatacagctgaaacagcagaacttgaccttgatcatacactggatcatccaagatggactgatcatcagctggatcatccatgtatgtatatgctagtgtatagtacttgtatatcagt

SEQ ID NO: 125884 - DNA, 236 bp, Glycine max
cattcgtcttcatcgtcttcatcttaatggaagacctcaaccaacttttgatcttcttgtcccgggtgccacatggttcggaattttctgttattctttatccccctttgacggctacctttattagcatttcctaactagataataattcacgacgttgatgttatcgtactcgtaaagattgacgcgcggctcccttgataaaaagtattatttaacaactctaaactttgata

SEQ ID NO: 125885 - DNA, 260 bp, Glycine max
ttacttagggtgatgcgtgatttgaaccctatgagatgtgcttaccaagagttttagtgagattcactgttgtatttataaggattgaatctgggactttgcaagtctagttttgtacactaaaaacattctgcatctcggtacttctaccttgagtctatatactaatataagttgtacttgaacaggtctggccgtctctcccagatgtaatcaatgcaacaaagctgttaactagatagctgattaccttttcttaa

SEQ ID NO: 125886 - DNA, 408 bp, Glycine max
tctaactcacacatcagcatcactcaactctgacttcaaacttatatggctagcgaaatctccaaccatcatcaccttctataatccatacttctttctcatcttacgtgatcatcaaatttctgaggcctatcataattacattacctggactcttaaactcatcccatatgtcacctttccaacacaatgctaacatttttgccaacacaaattctctgacattcacagcaaatctgctatatgcaatttcaatactttcctatcatttccaatgatctcatctaatatttatctttaacaaacactcaacaacactaattagtttaaccctattatgattcagttgagtaaataatggtattgacaacttttaaagcttaatattactctacggttcacaactcc

SEQ ID NO: 125887 - DNA, 246 bp, Glycine max
attttcaaacacctgctccagaagttcagcattcagccttataatccatcatgtatatacacgttgaagtgatcatacctctagtatcatccaaacttactggatcaattatgaggtcacgtcaaaacctggatcatcctattgatcaaccaagattaggttgcacgccttttattattgtgctcagctttttgtctgataataaaattctgcaatctcttcaaaaaaaaccaactatgcatctta

SEQ ID NO: 125888 - DNA, 255 bp, Glycine max
aaaattcaattcatttgtactcagggacacttcaccctgacatgccatagattcatacttatttaactattaattttttaaaatactatatatctcttcaattatatttagtattatttcgcacataatactgttgccttcttgattattgtgattggtcaaatgtcatcaattgagcatatcagaacctcttacaaactttaccctcgggaacaatttaatgtattctagtatatatcatatacacattattgc

SEQ ID NO: 125889 - DNA, 431 bp, Glycine max
atcaactactatagcaccactgtcgactcgaatctataaactatactttgattaatctcatgctttgtacacacaaggtcttgttatctgagtgtatttttaaggtgtacactctacttatttaattctcatcatataatagagacgttaatagtcaccactaattaactaaatctactttaaaccagtatatagtattacaaaatggctcacttaaactcttagagttcataccctttctaatcaatgatctgatcccattatcaactaatattctcataattctagatctacattattatatttcttcagctcaattcattctaacaaatccatatacattagcatatggtgacatattgaccagatttttgatatctatcttaaacttactagactaaattacagctagtcttatgcttttttacatc

SEQ ID NO: 125890 - DNA, 364 bp, Glycine max
ctatctcccgaaaagataatgtgactagagaagctctactaattcagcgggctatcatatcgctgcatcctatatctcttcttcccctaagcattcaacaaagatgaaagtggaatgaatctgaacctcagaagtaagtgaactccttgtaatgctcaacaattcagattgcagttcaaagagtgtgcccacaaagactaagcatgaagatacatggcaaatggcacatgatgtaattgtctccatctgaaatgtagaccatctattttactgcttttggaagaattgaattctctgacagactattatgctcttgcattcaattatttggcttgacacaaggtgatatgcaaatgggtcccag

SEQ ID NO: 125891 - DNA, 77 bp, Glycine max
atgtcctgagatatgtacggggcaggaacttggacatcagtggcgtgctattgccataacaacttgattcatccgac

SEQ ID NO: 125892 - DNA, 67 bp, Glycine max
aatttcatcaaagaagcaaaaaaaagaagatgaaattcatcaagaaaagaagaagaattcatcaaat

SEQ ID NO: 125893 - DNA, 322 bp, Glycine max
atgcagatcacactgtgaatattgctccgtctctcttctttgagtcctggccacctccatgatgagcacacttcgatcttcttcacagaacacttctggtgtaagccttagactataaaaaaactgctcacctcgagatcagacacgcttgttccattatgcttttgagcactttggcgtgagatgttctattagagctgtgacatctagacttgaacaaacacactcttatgtcttgcctattgcctcagtgaatctgaatcatccactgttcagagacatttagtttattattcagactctgtgtagttatcaatttaca

SEQ ID NO: 125894 - DNA, 158 bp, Glycine max
tgccatatcctcttcccctctctacttgcgcggaccctctggagatctccttcatcgcctgagacagtgcaaagtgaattcaggcaacatctttccttttttcatttcccacaaaagcttgcctattttttaaaaaataaacatcacctatttttttt

SEQ ID NO: 125895 - DNA, 283 bp, Glycine max
  unsure (1)..(283): unsure at all n locations
gttacaaatagaattactatgttnntatgaattttactctaataggataaatatttataacagctaaaatttcaaagtgttcttttgaaatcatgacctanaatctatctactcacacttaatgatccaacaaaaaatcgataaccaacaaaaaataattgaattaatgccaacaattacaaacactaattgcacaatcaatggttctttactaaagtactctctgtgactacaattaaattaatctaattaatgctggacgcaattaaattaactattacaa

SEQ ID NO: 125896 - DNA, 240 bp, Glycine max
  unsure (1)..(240): unsure at all n locations
catgggttatatacttgtatgtattcatgcttctatcatcctatcatgcctaactcatgttatagtacacatctattacccatatattacatatatggtgtcttataggatcatctctcgacaaagtcaaaggaaggggacacaangcagatgccattaaatcaatttgtttatttttcatgaaaaatatttatccttattcatgtacattggccaatgcctgttgtccaatatcttaaa

SEQ ID NO: 125897 - DNA, 230 bp, Glycine max
ctgctccccatctttggacacatcttagaacacgcaccacacgtttatgagctataaggagctcctatgaccctgcaaaactaaagaaaaacagagccggaattgagaaggaagcttttaaccactgtctcatgtatatcttgaagcaagaatttaatggctaatgattaccatcagtgtaattttgttcatcacatgttggaagcaaatggtatgtaaaaactggtcta

SEQ ID NO: 125898 - DNA, 420 bp, Glycine max
  unsure (1)..(420): unsure at all n locations
tggcattttgataattcttagagagctctctcactaataggagatgaataaggttggctcagtcatcaacatatacttactaaaggggcaaggataataatctgccaagaagcttttagctagtggctatcttacatctaaacatggaattcatcatcttcaattgaatgcattcattcccactcggagaatcattgcaaaaccatcacttaacgtttgtcattctctcacaattagagatcacactctcactgggttgcggctaatgcgttccttcataatcaacctgacaaaccaactaacattntcaggcatgatccctaatccatttctttctttctaatgaatggatgctattcaaggcatatgatccatgcatatcaattcactacatcatacaattgatcaattcaaccaatc

SEQ ID NO: 125899 - DNA, 280 bp, Glycine max
gtttgtatcttcacggatagggcataatgtgcaatatatacagttttgaatggctattatccatctttatttctaaaaactatttgaaaaaagagaattacccatataaagtcaagtcgacaaactaatgttgtacatacctataacacacctttatgagataaatataatagccctctgatcaagataacactgtatccaatcaatgcttccgctccttgatctgcaaaaccataacctaaatcttgtaattgaacagagtcgtgaagctttaacagct

SEQ ID NO: 125900 - DNA, 337 bp, Glycine max
  unsure (1)..(337): unsure at all n locations
tgacgccgcctaacacctcgggtgactctctgctgtggcatcaggagctgagaaagatcttgtgtggtatttcaatactggcactttaaaaatcaccctgagatcagatgagtaactcagaaaaactggctaagatagggcctgggaagtgaacacagtactgattgcttgagctatctgatttgcgctcccccacaatggctgtgaggaaactgcttgcaaactgtaggatcttatgcnaaactccttatttgctgacctgaccgctgtttccacaatccctaaaaggctccccctgtaactggagagagcacgcacctcaccttgagctgtcatt

SEQ ID NO: 125901 - DNA, 323 bp, Glycine max
  unsure (1)..(323): unsure at all n locations
tatctgcatgaatttctttgcttctagaanctgatcaactacatcanaccaatgaatgccataattagntagttaattaatactactatatatgttagcaggtacacttcatacataaccaaaatgctataaataattccagtgtctggccatgggcttangaacattgattattgctactacaactntgangaaaagtcagtctgtaatgatcttcggaaggaattcttttccaggagcataataattcgagtattacctacacgcaatgctcaataatattaaaactgaagtgctatgattaaaagtaataatggagtgtg

SEQ ID NO: 125902 - DNA, 451 bp, Glycine max
  unsure (1)..(451): unsure at all n locations
tatatatagnttcatgtgtgattgatgaccacgagttgggttacaatctataanaatanatgatcttataatcaatcatgcataaatatatatatgaattataattattacatgatttgcacattaacaaaaccatacataatatgattatagtgatcctattcagttcaaggatatgaagaatatatgtgatttaaaccaaaaataaaattaaaaccttatgttacaagaaaaaaaactttgttgactgcaaaaaatgattctcacacattcagaccgaataagaaaagcactttgtacatcaataacanaaaacgtctgcctccagaaaaaaaactattattctgttttataatataaataattatgactaacatctttcttaattattgacaatataatttaaaatcagtctaccactcttttcttcttttattttacactaacaatc

SEQ ID NO: 125903 - DNA, 221 bp, Glycine max
  unsure (1)..(221): unsure at all n locations
attgcttgcattatctctagctcaatgaagctgggagactattctcttgtatggccgcgcttgagacagtaaaaggcagacaattgttccccatgtatcggcccgccgcttgatgacaaggtgaaaaatgcgggacctanggttctccgatgtcatcgggcccgtcgcctctggatgacanaagttataatagtgcgggaacaaatgggttcccgtatgtc

SEQ ID NO: 125904 - DNA, 386 bp, Glycine max
  unsure (1)..(386): unsure at all n locations
tacaccatgccacctcttttgngttccttgtagtgtttgcacgacgatagatcaattgtgtcggtctatgatatggtctggtaaaggagagggttgtanttggaatcttgtcaactggggaacaatcacgtagccaaagctttatgggggcttatgtgcagaactagcggtgataatgttcgcttttggaattaactagatgcttaatcccctgagcggggtaagtataaacagaactgatactctcctcatatcctcagaaaggcctttttgctataataagccgatctttgaggctttctattgggaaacacccttgataatgcagttggcctgccttggttctcctatgcacatgatgctacttaaatgactgattcatcacc

SEQ ID NO: 125905 - DNA, 308 bp, Glycine max
  unsure (1)..(308): unsure at all n locations
gtcttgtagagagacttctgtgatattgctagcaaatacagaatcttaacaacatacataaactagagtaattcaagtaatatgcaagacanataatctgcatggctgattctccctctcttttacttggctgagtgaactatttccaacattgatatcaattgtataacaatagtctatacactaacatttcaaggatattcaccatgagaacccttntaataatttcctccaatgtccttcttagtcttctatccctcttacatgagtagaaaccatgccatctactctcctcactgatgtctcta

SEQ ID NO: 125906 - DNA, 317 bp, Glycine max
  unsure (1)..(317): unsure at all n locations
caagtgtacacatgcttctatatatagactanggtagcttcttgagaagcttcttgagaaaacttcctcgagaagcttctttgagaaaacttcctagagaagctagagcttagctacacacacccctctcatagctaagctcacctccttgagaagcttcttatgaagattcctaagaaggtgagcttagctacacgacatctctaatagctaactcacctcttggatgagaagtagagctatctacacacccctatatagctatctcacctcatgacataaacattaaatacagaaaaatgtctactacaagactc

SEQ ID NO: 125907 - DNA, 212 bp, Glycine max
tagagaaggatgaatccttagaaaaagcaacaataccactagagcatgataaactgagtgaaaatagagaagaaaggccaattcttagagtaagagatttaaacaaaatgccagcttttcagcaatagatatttctctgtatggcatgccactttatgattttgtgctacaaacactcggggtctgcactgtaaatcaaagtttcatttttg

SEQ ID NO: 125908 - DNA, 301 bp, Glycine max
  unsure (1)..(301): unsure at all n locations
ctctgngatacctgacagagcaacttttgttttcaagacaactcttgctaatgaaagaaaaaatccaagaaccaactagattntcattacttnnttaacccttatcatgaaaanctaaagagaatgacaatattatattagtaaactaccttgctcaggatggataaagcatngtgagattcactattgctcttcttataggatccacattcaccttcgggcacaccaaagctggcaaantatatttagagatgacttgtcctcacgacatgataattctagcacgtttccttcatatgaa

SEQ ID NO: 125909 - DNA, 324 bp, Glycine max
ctcaagaatcacttaatattagtgaggagaagaagaaagaacgaaaataatcctagccgagacgctttcataacgcttccaagacgtttccatgatcaattctgtggacattcttcgccattcttcgcagttctttcgtcgctcttaatcattcatcgagctcaaccgcttagtttcgattacagcttcattcatcaagcccctagggccgtctgctgttgttctttatatggtctattcatttacactcataactaccgtgttgtaaaacatattacacttgggatttatatgaaaatacacgacttactgtataaagaacca

SEQ ID NO: 125910 - DNA, 349 bp, Glycine max
  unsure (1)..(349): unsure at all n locations
cttagcacgcgtcnctgcatctcttctctgttggagtggtagctgacccattagacttcttgtggatgctttgttgttatgtctgaacagcctggtcctgttatggactattttccttatgttaatgaaaggacagattggtgctactatgagtatattaactgcgatgacagaccatatgcattctccttgggaaaggcgattatggatatnccaactctttttttatatataaaataggctatagggctactcttggctgaggtgaggctgggaccgtgggaaaagggaggtacttcagaactcgcaagagatgtcgagccggcgcttaaatatctaacatatttgt

SEQ ID NO: 125911 - DNA, 339 bp, Glycine max
  unsure (1)..(339): unsure at all n locations
ttattctcatttcatttactttttatacccncttttgacgtgcttaagccattntacttaagtcatttcttgcttaacttaaaaataaaataaaattccaccgatcggtgaattgattatccgttacttcggtaaaataaattcgaccgtcgggcggccgaaccacgtggaatataaaagaagtaaaatatatattataaaaattcctttagtaataagcgaaacaacggcgttttttgaattctatctatcaatgctaactaaggactaggtaacactgcttcactgtccaaatagttgagtgcttcatttagaaagaattcagcaaagaacttagaa

SEQ ID NO: 125912 - DNA, 237 bp, Glycine max
  unsure (1)..(237): unsure at all n locations
aaaagtagaaaatagcaaagaaaaccaagctgtcatccaactccctgattattagcatctacacttcaatggcataaaagtatgtaagcccgtgtccttgaagctaaataataaaatatttgcccataagcaatcttggtatcatgtttaatgataaagataaagaatgatgccagaaattttttccatgagatatttaagggtacggctntatcactcagagtcaatnactaaccc

SEQ ID NO: 125913 - DNA, 249 bp, Glycine max
atactgcgcactgttgactcaactagctcatagcatgtcctttatcattataatgaggcgctaactccaatctcattccctctttttagataaaaatttttatttgacttctcacactgacattctgattgaagtgccaagattttcactcatagcaactatggaacttttgtctttgtcctccttggcctaggtcattcttcttgaagagcttctccatctaaacgcagcttatgttctctgtatctt

SEQ ID NO: 125914 - DNA, 401 bp, Glycine max
  unsure (1)..(401): unsure at all n locations
gacttgtattgatttggtcaagcactgntatcaatgaatactttggttagttttgaatacatccattacagttcatctgtatctatatctgaggtctattggcaccgttactattttggtttacttataatgggcatatngatgtacaaactgtatattgggttctctttaattctctgctttgactatgtatggggattagattcttgtataattgtatagagagtaaatanacatgaagtttgtagggaaattttttaattcataaaatatataccaagcacctgcttaatgaattaaataattccattgtgatctaacgccttataattaatatttaaatcaacatacatgtaagtaggatggagactacgaatgttaaactaagacaatgaattaat

SEQ ID NO: 125915 - DNA, 164 bp, Glycine max
gtggaactttgatgtatgtctcacaagactctcattcatcaaagttacaacaagtgttacacatgtttctatatatagactacgtagcttccttgagaagatttcttgagaaaaacttcttcgagaagcttctttgagaaaacttccttgagaagctagagctt

SEQ ID NO: 125916 - DNA, 293 bp, Glycine max
  unsure (1)..(293): unsure at all n locations
tatgtntttatttgagcctatatacatgaattgctaaagacattgggggcttaaaatcttagagacaatacaatatgtacaagatcaacgaacaattactatttttagttagagacctaaataaaaacttctgaatagttgagggaattaaattaaccttgaatgagcaaaaacaaacaatatttcacatggatatgtaaataataacaccaaaattcttaattaanatgaagctgtgactcttacggatcaccttntcgtatagtatgtcgagtaacttacagatcacctga

SEQ ID NO: 125917 - DNA, 279 bp, Glycine max
  unsure (1)..(279): unsure at all n locations
acttttatacccctgtgacgacttaagcatttacttagtcattctcgttaacttaaaatgaaatcaatttccaccgaacgtttgaattgtattatccgttaacttcggttaaaatgaattccgaccgttcggtcgtgccgtaaccatcgtggaaatcaagaagagggttaatataatttaattatcaaacaacatttttttatgtaaataaagcggaaaatcaatcagacgttntctctttgggatttctcattcttaatcgaagtgattaataactaa

SEQ ID NO: 125918 - DNA, 184 bp, Glycine max
  unsure (1)..(184): unsure at all n locations
ttcaaggggacttacacttaccctatcaatgcaatatgccgacatacacccatcctaaatttatatatttaactaataatnttgattttttaatttaaaaaaatgtaatgatagaaattttgttgttacttaataaaaacagtaacatcaaaataaaaattgttaagcgacaaattaacaaaaa

SEQ ID NO: 125919 - DNA, 252 bp, Glycine max
  unsure (1)..(252): unsure at all n locations
aacgagaaccgcaataaatcaagtcggagtgattacctgagaagattacactctacgttgtctcaaggacacagcctatntctagaattgtggaattgtgttatcttaactattaattctttttatttnttgaggtcgacanaagcggngcttttgctcctacgtaccctccnttggagaggaaatcatacctaacgtagtctttctatgcgtgaacaangattgatcttacttgaggggacatttaggcgt

SEQ ID NO: 125920 - DNA, 257 bp, Glycine max
  unsure (1)..(257): unsure at all n locations
ctgaaccccccatacatactttgtctatacattgcaggaattaaagaaaatgaatggnatacactncntcatacatcaaatagaaggagaaaaaagatcttatgcacttttgacatcattgacgtagccatcatgctcttacgagaactcannatatggatagaagacaagtagctctcaaatacatatgtgattatagtgcaatatagagatgcgagtcgagtaaatagcaagggaagcgctattatactcctaat

SEQ ID NO: 125921 - DNA, 351 bp, Glycine max
acgccagttatcactctattgctagacttaggtaattactttatatctttgtgatcaaattcggccagattaaaattaatcttaaatattatatggtttaagagataactctgtcaccaagtcttttattattatattatagactgaaataattttgatctaacttaagaaagatatcataatatatattcattatgatacaaaaaaatgatctatatatcgcgtgtcccagtaggcaaataaattaaatacttctagattagctaccattctgcggtcaagccacattcttacagtgggcctcaatggaaagggaattaaaaaaaccttttaacttgagtgactgacatt

SEQ ID NO: 125922 - DNA, 341 bp, Glycine max
  unsure (1)..(341): unsure at all n locations
aagtataaatataattatagatattttatgttcacggcaaatacattatgccaataatttttggatcataatgcttaatgattgttatacagcaatgttaatatatttaatatttaatgtcacataaataccatgctccttacttatgaaaaactaactttgatactacttataaataaaaaataaggattattataccacancattaatatattctaatatttacttatattgaaatacatttgccttaactttgtggtaaactagctacgattctattatatataaagattgcattgacacaacatttttgccttcaaaagatcttatcaacattattt

SEQ ID NO: 125923 - DNA, 291 bp, Glycine max
caaaaggaatcttgaaccttaggaagtaaggtaacataccttgtagatgcataagcaaatccagatatgtcaagttctaaaggagttgtgcacccaccaaaggaaactcaaaggaaatgaaaggattagcatcgataagtaaatttgttcctcacattcctgagaaatgtaaggacccaggtactttctgtataccttgcattattgggaacagtaaatttgagaatgccatgttagatctacgagcatcagttagtggtatgcctctgtccattttcaattctttatctc

SEQ ID NO: 125924 - DNA, 262 bp, Glycine max
  unsure (1)..(262): unsure at all n locations
gtcactccctccagagaatgaggaanagcctttagaaagatatgatcttcctggacatcanggggcttcatggtgcaacaaacaatatggaactccttaagatgcttattggggatcttcacctgcaagaccatganactcgggcagcanatgtattagtccagtcttgagaacatatggaacaccctcatcaggatattgaatgcacaagctttcataagtgaaatcaggtgtagccatcntcctaagattcctctcacgt

SEQ ID NO: 125925 - DNA, 400 bp, Glycine max
  unsure (1)..(400): unsure at all n locations
tctggaatgggatcagcangaaactgatgtttcagaatggtaagaataactcagactactgtgtatntanatgttcagatattccttttcgatttttaactacatttgtgtatatgtcttgggggttaatgacccggacttagtataaaatacggttgatatcatcatnatctgcatttcctactgcatacctccaagaccttgaanttggaagcttcttctttctgactggaaataatagttaaaaagtcatgataacatgtgatttgaaagcactttgtcaaaatgtttcatagtagcactatgcttgttccattctagtgttcttggcacataagtttcaggcttatttcagagaaaatcttctaatcagcatgcctaaaattgtatgtttttgcat

SEQ ID NO: 125926 - DNA, 413 bp, Glycine max
  unsure (1)..(413): unsure at all n locations
cttagcacgagctcgcttatctatcaatgatcaaatgttgttatcaccagagttgtctaatactgatccatctgactgagtttatgttgcagttgtgcatgcacttcatgttatgttttcatatacctcccctggtatgacatggatgaaatccttgctatgaatctggatccaacnatcagggcttgtatgatgagctcgcttatctcttggaaatgaggcatgcatgcttcttttagttcttatatttactggttcaattgcttggttgatatgattctgcaatggctgtactaaatggaacttgtccaccacttaatctatgtatatgacgttactgattcagctgatattggatcaaagggggatacacgaattggtcacagcagtcctagtggtgttggaactctact

SEQ ID NO: 125927 - DNA, 136 bp, Glycine max
tgcagaataatctgttcggcatgtgccaggactgcaatcccaacatcagtgattgtgcacttggagacatcatgatcacatagcagtgcacagttttcagcaattgccatcaagctagcatcactgatatttttgc

SEQ ID NO: 125928 - DNA, 272 bp, Glycine max
  unsure (1)..(272): unsure at all n locations
ttttttatcctaatggccccctttttttcttttttctcatgagctcttcagctctatcaagctatctgggggagctcttttcatgctatcctagggatgcgctcttactctctncttgctccactgatctcatgaaaaaaccaccataagacctatgagctaagatcagctctaaactccagcagctctaatctctctttagatacatatttataaactttaacaaactagctatgcactgtcctttgttagttttccaaagcggtgctgat

SEQ ID NO: 125929 - DNA, 198 bp, Glycine max
gctgcgtggacgacctcactgcttctttttaacgtgatcctacgccttgactcacttgataaccttcttaacgaagcgttgattgtccatgtttacatagtatacaaatcagtgcgaatcataactctgacatctatcatgggtggaatggatgaatgcatgacgaattgcattcgacaccgacgccatttattgaat

SEQ ID NO: 125930 - DNA, 409 bp, Glycine max
  unsure (1)..(409): unsure at all n locations
tacttttattgctgctggcatgttgacacttcatcaacaaaccaatatcttttgtgtaaaggatgtctatgtagcatagcttnnttttcgatgacgattcactaactttagagtgtggcttatcgattcattcttcataagaattgacagatgctaaataaatgtgtctacatnatagatcttagacaccnagtattaaatgggtcttaaatgccaatttaatatgaatcattcatgatgcatctactatcatttttanggtaataatcaatgttttatctactggatcttctcttttcttttattctagatttcagaaaattcttacaattgcaatattacatagaatgctagatttcgtatatctaacattattattagtaactaaatatctcttaattatatcaac

SEQ ID NO: 125931 - DNA, 148 bp, Glycine max
  unsure (1)..(148): unsure at all n locations
atccacgatgtcggatccgatgtcatgacatcttgctccgaaatactggacatatanatctggtatatctttaacagaatattgtgcagttagcaagagattagatgatcttatcttatgaacgaattaatagatgatttaagttcga

SEQ ID NO: 125932 - DNA, 398 bp, Glycine max
agcttgtccttcctgctctgtgttgcagtgcattcaagagtggctatctcatcaaggagaactgaagctattggaatagagagctcataagggtaaccatatggcagcgtttggtattcaaatcatgctattgctggcagctttcttgcttccactatctgtggaagctatggttcgccactacaagttcaatgttggtgcattttattatttgcattttacatgcactcacacatgcatctaacttatagagaatggctcattatacatgaaaataagaaaataattacttggaacaagacccattgtcatatgcatgtcagcgtaatggaaatataaagtgatttttttgctcctctataagcataataaaactccaattggctttgaacatgcct

SEQ ID NO: 125933 - DNA, 311 bp, Glycine max
  unsure (1)..(311): unsure at all n locations
acccgatccttaagcactgagctgcactatatcctgcactctgacgattgtctttccttacaatcatggcgcntgagatgctgaaaagagcacatagatatcggaaattaatgagtgggtcgaagctcaaatttaatagaatattttgaaacactttgcagaagaaaaattgagtactttgggctgcaaagattaatataccattcctgattctttatgaatgattttattatctcagagcctaacaagaagtttggtaagtccaaggtaacaagccgatggggagacagttcttataacacttttttttc

SEQ ID NO: 125934 - DNA, 414 bp, Glycine max
  unsure (1)..(414): unsure at all n locations
actgagaaacccattggttggccatataaatattctcctctaaatctccatntagaagggcggtttcacatctatttgatgtagctccaagtcataatgggctattgtcatgataatcctaanagaatcctttcgtgagaccagtaaaaggctctttaaatcaatgcatcttctagtaatncctaacaacaagtctagccttgtaacgttcaaggttgctatgagagtcacgtttagtcttgaagacccacttacaaccgactctcttacaaccctntggtaattctacaaggtcctaaacgccattatgttccatggaatttatctcttctttcatggcgattaaccacttctcagaattatcacancttatagcttgtgaaaccaaactggatcatatcactaatgcttaag

SEQ ID NO: 125935 - DNA, 297 bp, Glycine max
  unsure (1)..(297): unsure at all n locations
tttctctgttacataataaatcattccgtgctcgttttatagtaattcctggattacatattgtttctatcttcttatctggtgttatcactatccaatccattagcttattcattgacagctacgttcatgatctaaaaattaataataccctattgtgaggacttatacnatttgatctatcatactgatgggtaggtgatgcctcagatatacacaacactatttattcacattttccgctctagtcttaagtgacacaaatgaaactaatctattgtctaagtttgttgttta

SEQ ID NO: 125936 - DNA, 300 bp, Glycine max
atgtgagtgaactctcttgggctctccactcacaaaaccctacgcacatgacaccactgttggagtcctctcctacactgcaaacatcgggtggaatgctcaacgacatcatgttagataagctcaaatctacgagtcccataatggtgcatcatgttctcttttcttatgatgaagaaatcgtccatcatgatcatgttgtcccttctcgcgatcaatcgagtcaccatgtgtgaccccatgaattctatgctatccatcaccatgacccacaggcccttcctcttaatcctcaatgac

SEQ ID NO: 125937 - DNA, 264 bp, Glycine max
aatgtgtcacttcagcctgacacttacatgatatttgtcgctgactatgattagtgaaatctatgttgtactgggatatactcaagttactggaccttgtttgaaaccaaaagaactttgatgcttcacaacatccaggtgatcaataaaaggctcacttgttcattttagataatttaaaaatctttaaacttggaaaaaggaatacccctttctgcccgacacctcatatgggtggaagaaaataccttaaaagtgaaaact

SEQ ID NO: 125938 - DNA, 393 bp, Glycine max
  unsure (1)..(393): unsure at all n locations
cttctctttntgagcatcatggagcttattcacatgatctatcattccttttcacttatctgaaaagatatacggttcctcatattgaataatgggaagatctagaatgtgttagacatgtggcctcacacatcttaagaaagggtgaattaatttcccactaacaaacttttaacccccttctaaaagaacagataggcctataatgtagatgaacagctatcaattaataatgtctttcatttgccgacaaattgatgcattaattgatgattatgggaaaaagatgcaaccaattttatctggtngcaagtccgcctcgtctgactcacaccacttgaattcctccttgaaaatcttaaagtgacatacagcaccatcctggtagatctc

SEQ ID NO: 125939 - DNA, 255 bp, Glycine max
  unsure (1)..(255): unsure at all n locations
ctgattctatgctgctgcctatgccctgccctaccatacttttttgatgtgatagtacaccttcctaccttattcagatgtgcgcctagcgtattggttttgtgagaattgngctagtgagctcgctaagccaattctacagaaaattctgatctgtgtcaactcgctaaagacgtggctatcatgctaagcgcatgaataatntttcataaggtgcgctaagcgcatctgtcgcgctaagcgcctaatctgaat

SEQ ID NO: 125940 - DNA, 344 bp, Glycine max
cccccttaactactactctaagaagcaactactccacccattaaactactcactcttgcaaatactgaaatcaaaaagtcctctcaagacactaaagcctaatcaagctaacctatctatagatggcaaatacaggccaaagaagaaacctatttaaattacaagagaaggatcaacctcaccatggctcaaaattacctgagtcatgaaacctacaccttttagactctgccaactactgagctctatcatgcctgcgggagatgctatcctcacttgaagatgactaatctatgtttatcttggctttctacactgcaagacaaactagattatgtgtgatg

SEQ ID NO: 125941 - DNA, 232 bp, Glycine max
catgtttttatttgtccacatatagactctacacaccaagctgatgcccgcagaagaatcattcagtgttgtgtaatctcacattgcaggtttaaaataagactacgtacaactcccatacaaccactaatacttgaaataactcctttcagagctaagacttataaataggctaagtccttttatgcttcaatatattctgaacggccaaatgccattgcttacacactca

SEQ ID NO: 125942 - DNA, 85 bp, Glycine max
taactactacacatgcactctcctacctgaccagctattatgaaaggagaaaatatcactcaatgttcaaaaacaatgccatatg

SEQ ID NO: 125943 - DNA, 210 bp, Glycine max
aatttgttttatcggaggatatggttttgccttctatcagcgaaaccctgctttctatcctggactaaccagctttctttctccagctaggattccgcagaaatcttgcacgagattgaagagctcttttaggcttgaagatcgccatttcgtctataaaaaagctgtgtgataccatccgtgcttgttactttgagacgacgcctctgg

SEQ ID NO: 125944 - DNA, 315 bp, Glycine max
  unsure (1)..(315): unsure at all n locations
acagacatgaacttgtgtacagtaattatacaatcatgttcacataaatgcattgacagcaagagtatgctatatgtcaggcaatgcataactgtgtcatcatacttggttctctctaaattaacattatacatatataattttcaatataatagaaatgtgagaagcattaaagcacatccaagatgtttcactantaaattataataagatgcgtgtaattgatggaacacacatatcaacgaagcttttaatcagtnttgtagctaaacacctaaatcacgatagcacgttcaagctttaaagtactaacat

SEQ ID NO: 125945 - DNA, 438 bp, Glycine max
  unsure (1)..(438): unsure at all n locations
aaatcctaacaatcgtcatgcatcttctatacgccgccctcatgttgatcgaacatatacattctgttgtgttgtcactcctctagcgatccttatgcactcctcgatcacagagtgtgcttctgttccttcagtgactaccctcagcttgatcaagcattccaacctttctgctatttcttggcgagcctcctacgacattgacaacaattgaaaagagaaacacttaatgtgtgacacctaaaatgagtaacagtgacgattcataatatattatacctgtgcatgtcgaggctggtctacattactaggttcagttataggtggttcgtccatagccactgtagcgaccgactactgatgatgaatnggttcaacaaatgtctcattgtgtaccacgggtggatgtctacgagtatgcctaagctatgtttgact

SEQ ID NO: 125946 - DNA, 257 bp, Glycine max
ctatattattatcgacattcgaacaaattagtatttcttttatctgcatggtatgtttgaacaattatgaattatgttatatgactatgtggttttatatatttgatctatcatgtttctttttctgagtggtttatattcttaatgaatgcttgggaagataatagtgatgatgtttatcttgtaccactttactttgtgatgccaagggaagaataggatatcagactcctagtattctaattcaggaactactc

SEQ ID NO: 125947 - DNA, 231 bp, Glycine max
  unsure (1)..(231): unsure at all n locations
gtctcttaatgcaagacaaagcnaatatggtctctctactggaaagatatacacttaacgttgacaggtccaatgtcagataagactcgagtcagtgcattcccacgcttattgactatgtggatattcattataaaaaaagaagagagttaaaataattaaagaacatggttaaatatactttatagaaacaaagaattattggattcatggaatgtacgacctacctgt

SEQ ID NO: 125948 - DNA, 367 bp, Glycine max
  unsure (1)..(367): unsure at all n locations
acaacacaaaccaatatcacagcttttcacataccaataccctagtaacattctcttcgtccaattcgttaaccgttggatcgactccgaaaatttactggaagtctctagtacataagtctacattttgaccggtgggatctgctagaaaacgtccagaancccaatcggtgctatctctttcacaacccagtatttcattacattntttgcacaaagtcaaattctgctgcacctagttgacagcaaaattctgcataagtgcagattttcgaaatcacactctccctcatccaatnntgcccaaattgaatcctacaagtcccaaatcatgtgtcaatcatgtctaaaccaagtacaagcttca

SEQ ID NO: 125949 - DNA, 207 bp, Glycine max
  unsure (1)..(207): unsure at all n locations
cagtagatagtcacaaccaaccttgtaagaatatcttgctagctgttggacagctagcgtgcactatattaccggcatttatagtttttagcataaaagtttaagttaaattctatttgagaatatcaatcatacatgttctctcaacaatgcttcatttctgaacctaattaaaggcnaaccattagtccctggggtcgatactcg

SEQ ID NO: 125950 - DNA, 146 bp, Glycine max
  unsure (1)..(146): unsure at all n locations
taggaaaaatattnttccctatcctctttactcatatcaccttaattaaaataattatggggagaatattttaaaaataatttttcatttttaatatcttctaaataataaatacctcgagatatttttttgataaattgataaca

SEQ ID NO: 125951 - DNA, 305 bp, Glycine max
atcaaagaatgaatgcaagatgttcaagaatgaatcaagaacacttcaagggtcaagatgaaattcgatctcaagatcaagaatcaaggttcaagaatcaaggtccgagaatcaagatcagattcatgactcagaatctaaaatcaagcaagactaatcagataagatgaaaagtttttcaatacgagagcacatggatttctcaaacttgtaccaagttttatctcggaatcattaccaatgttgaccaatccagagcaaatgttttaaaagttcactgaatacatgtcaatgactaaatgtga

SEQ ID NO: 125952 - DNA, 322 bp, Glycine max
tgaaaataaaatgttttggggaagcgtttatattccagctccggggtaaaagtaaaaagggttgacaaaagtttgtagattaaggatcttgtctaaaacttaattataatcttacttattcaaaggatgtacaattttatcttcggccaaaaatatacttaatcttaaaaaatctaattaattattttcattttaacacgattcacattattctgttatcttagaaaatgtggtaaagactatttatatgaatgaaaaatcagatttatcaatgcccaaagtatttgatcttttaaacttgaccttaattcttgatagaact

SEQ ID NO: 125953 - DNA, 301 bp, Glycine max
  unsure (1)..(301): unsure at all n locations
tttataacagtcangtttaaatataattatagatattntatgttcacggtcaaaataccattatgccaataaatttttggatcatatgcataaatgattgttatacaccaatgtaaatatttaaatttaagtcactaaatacctgatcttactaagaaaactactttgatctctttaaaaaaaataagatatatccacactaaatttcaaattactctttaatccttgcttacttgggaactactcatccttttataaatactaacccatttgctcaaaactttacattttttttttttat

SEQ ID NO: 125954 - DNA, 297 bp, Glycine max
  unsure (1)..(297): unsure at all n locations
acataacttatctcatgatccatangaaacacttcgactcatttgtaaacttgaatcataaacagcatagcgagtactatttacacctctatctggctccggtgcaangttgaccaagctatccttctgtggtatagccctggctatagcttgcttattcctgtgacaaacatgttcataatttatnttaacaccctttatgcaatgtgttcatatttgatatgaccatctatactgttcttaaattgtcaaccctatgatggaatatcaaactacttgaggctcttataacaggtc

SEQ ID NO: 125955 - DNA, 320 bp, Glycine max
  unsure (1)..(320): unsure at all n locations
tcaatctgatggcatatctacntaattggtgatgaagcaagttcacagtgtgatgagcaacagatttctcatcatgtactccaccatgatgatgagaagacagccatcgacttaaatgttcagaagcaagctcagagctattcctctggccatgatgttgactactagacccctacacatgataaataaccacacaaaatgtccatgatgtcacctgtattccggcttgtgtttatcttacttatgtgttattntatgtacactattagattgtctccatcattatgggatgatgtctctaatacacaattctgggagac

SEQ ID NO: 125956 - DNA, 371 bp, Glycine max
  unsure (1)..(371): unsure at all n locations
cggtatgcgaggtgtatgaatagatgctttgaaggaaaagattgatgaattaaataatattntatatanaatcgaatggtacgtgttgattgaatatatatntgggcatttactggtgtgaccatcttntatacagttgagttattgtaatgattacaaatagaagtatattaatttactgataatgataacaaaaagtgaacaccccctaatcttatttttttgagattttgtcatagacatatatatttggatcgactctgtcatagacatatactaatgatntaagatatgatngatcacgaagcatatcctaatgggggatagcaataattatatggagcgcatatagtatggtcttctggttaaag

SEQ ID NO: 125957 - DNA, 154 bp, Glycine max
  unsure (1)..(154): unsure at all n locations
acatctccctttttatgatacaccacctgangttggagcacaacaagaaaaatatctnttccatatagttactcccccttggtttgcaatgattgcttatatgagacagttgactatctcatatttttcatatgtaaacaaatcgtctcataaa

SEQ ID NO: 125958 - DNA, 140 bp, Glycine max
aagtaccatcaagaaaactacctctcccccaaagagttttctttatcacacagacttgggaatattaacagaactgccatctgacccaatctttgaaacgcaaaatgagaagggcaggccttgatgagaaatcgatgatc

SEQ ID NO: 125959 - DNA, 387 bp, Glycine max
  unsure (1)..(387): unsure at all n locations
actgagttctgtacactacccangtttangtctgagntgtagctagacgagctctttgatgaggttggtgcctccatcagaagtgtcatcgcgcgagtctatattgaattcatcattcacgcttgcttggtagatggttagggctcagataggagacccttcgtccatgctcatgacttaagtaccttcaatcactgtggggtgatgcttggcaagctccctggtgaaaggatagggtgctacatttaggctctttacatagctttgtcgtgcttgcttttggtctcccttgacgggtacaatctccctaatcatgttatggaatttcattctctaatacggtatggagactatggctcccaactcgctatatgtctttctggcgat

SEQ ID NO: 125960 - DNA, 228 bp, Glycine max
  unsure (1)..(228): unsure at all n locations
tatgttcacttgcctttacaagacccctaagctccttcaccttttgctcacctncactcttgaaacattccccaaagaagaaagagaaagagagatatactttgcacctctgagagtacactcatcaccaacatcccctttatcaatcttttccatcactcccctaactacaccttcaaggctagtaacacactctcccacaatcacaacacttctctttctctcaca

SEQ ID NO: 125961 - DNA, 232 bp, Glycine max
taattcatacatttattatatcgtgaatgtaagtcgcaaagtgataaaacccatgcatgttttcttatgtcattgaaccccacgttcagcaagataaatgcccattgcatactatgtttttatattattacatttatcatccctttgcattctatagaggatagagacttcacatggtgttcacaataattttcgcatacacgaaatagcatatctctctttcttatcttat

SEQ ID NO: 125962 - DNA, 221 bp, Glycine max
ttctgacacttcattaacttattcttgcttatgcgataagtgatctgtgtggtctgaccatggcatattgtttttgtatgaatgtatgatattgacttatcttactttcaccattatagatatgtgtaaatgttattcttatattaatgtatctatattctaagtgttatgtttatattattatttattaattaatatgttttagattttgttaatccacg

SEQ ID NO: 125963 - DNA, 491 bp, Glycine max
  unsure (1)..(491): unsure at all n locations
gcttgatgcacatatggagaggttaatgaaactacgagatgatgcgctccatgatatgttggatcaaatggagaatagagatcataatgaagaagaaaggatgagaagagggaatgatggtgttcctagacaaaaccgaattgatggtattaaactcaacattcctccatttaaaggaaagaatgatccggacgcctacttggagtgggagatganaatagagcatgttttctcatgccacaactatgaggaggaccagaaggtgaagcttgccgccacggagttttccgactatgctcttgtgtggtggaacaagctccaaaaggagagagcaagaaatgaagagccaatggttgatacatggacggagatgaaaaagatcatgaggaagcggtttgtgccggctatttactctagggacttgaaattcaagcttccaaaactaacctcaggcaacaaggggggtgaggagtatttcaaggaatggatgt

SEQ ID NO: 125964 - DNA, 269 bp, Glycine max
tgtctgtatctagcgacatatatatatagatcgctctatatctacatactgatgtagatgatatatatctatgtgtctatacctatctctctatagctctatatatgtctatatatatatgtatatctctatatatatctatctgatagctctctagatatacatatggtcatatatatacacacggatgtctgtatctagcgctatatatgtctagacgcatgatatagatctacagatgcgcgtgagagatcaataggcccgacctc

SEQ ID NO: 125965 - DNA, 368 bp, Glycine max
  unsure (1)..(368): unsure at all n locations
gatatgaaatgtctgcatatataattcaaaaatttgtatgccaaatcatatataaaaatagaaaattacattagatgatgtctaataattctccttcatcatgatcattatgaatagcatgaacgtcggcagcttcttcttcttctccgacaatgttaggagtgatttttgtggacaaaggactaacatangtgtccatgtatgaatcatcatcttctacattaacaccaattgttttgccctgtagaaccacgcaccacctttcatcacaagggtcttggacgtaaaatacttgtctagctnggtctaccattatgaaagggtcattgtggtaaccaagtttcttttgtctaccaacgtaaatccta

SEQ ID NO: 125966 - DNA, 267 bp, Glycine max
  unsure (1)..(267): unsure at all n locations
ttgcgcttcactatccatgttcacatattattgcagcttgtggttacgtgagcctgaactactaccaatatatagatgtggttatacaaatgggcacatcttaaaagcttactctgcacaatggtggcctcttgggaatgaagcggctattcctccttctaatgatgcatggacacttatccctgacccaaccacaattcgtgcanaatgtcggcaaagatcaacaatgataaggaatgagatggatggggtcgaaccgtctgagca

SEQ ID NO: 125967 - DNA, 396 bp, Glycine max
  unsure (1)..(396): unsure at all n locations
tcatcatcgtctgtcttatattatttaatagtatagagatctgttgtcccacagagtccctctcatggaactataaatatcgntagatgtcccattgcatcatcattccatagaatgtcatgtcttggtcactacattatagtagcactagttatttataactttgatctcaacatgtttataatcttaccttatagaataacatacaagctcttgatagtatgaaagaccctccctttctctttgtatatatgattctatatatatcttgatatatatctatatatatctcctatatatggagagatggatgtgaccctcaatatatcttttttctactatatgtatttagactgtgttgtatacactctccattcttcaaagatatatatatat

SEQ ID NO: 125968 - DNA, 437 bp, Glycine max
  unsure (1)..(437): unsure at all n locations
ggggttttgaaaatgcactctgctttattgcaggatattacttgtctcacaatgcttcaatcaaaaaaccgaatagctcatttatcatgttngccaaaagagaggtttaattaagacccgaaactagtattatgacagaaaacannaaaataaatggctcccatgtaaggggaagttccttatgacccaagttataagctaagaccagtgttctttctgctctaactaacttttctcctatattgctgtatacatgctaattcttggagccttttcangcccattattaatagtaaaaaatcttacacatagtgaataatatttcacaatctgcactgtcctgattcataaactagaactgtggcttacacatacatatatacaactctcttcattgcacatatgcacacacactcaaatcatttctagtaacagat

SEQ ID NO: 125969 - DNA, 462 bp, Glycine max
  unsure (1)..(462): unsure at all n locations
tgtatgctanctatcatgatttcatttgtattcctcaaaatgtattccttgatatccttaataaaaagacatgagatttgttccttaaaanataattctatagtgccatgtaactaatatgaaagtcacaagaggttaagaatagtaaagagaagggttaaaagtggttgttgaaactgaggttnttcacaagaggtttttcattaaagcacaaaaggtgcagtatttgcttgcagtaactatcagaaaacttgtattatactctttggcacttctcagtagtgtttttcctctttaggttcaactttaaaataagattaaacaggaatccgaacaatntatgttatggaaagcttcacgtgaaaaagaagttctccaggtaaatgcanatgacaagaattctgctcaactctntagtaactctcttagnttatgatctatttatctattatactactatat

SEQ ID NO: 125970 - DNA, 418 bp, Glycine max
  unsure (1)..(418): unsure at all n locations
agcttcatatgtatgtntcgtttcctgtantaatgttcttcttggggattggtgtgtaactgtttatggcgatgagtaattgcattacggtgcatccttcttggtactgttttcgtttttgactcgggactactgtgggtatcgatgatggcaggaaagacacttatggtgtgtttgcagaccctgttgatccagaagaggtatgtcgaattatntttcctgtgagttgttaatcttgcttttggaagacacccgagttgggaagttaaattctgtttttgacatgtagcttcctgactatcacgatgtgatcaagcatcccatggactntgccactgtgaggaagaaagtgggaaatgaatcttcttatactacctcacaacaatatgaggtatgcagacatgtctcacgttgtcac

SEQ ID NO: 125971 - DNA, 189 bp, Glycine max
atttaaccctaaattattctattctaaaccttggtggggttattgtaggggtaaacaactctttcttgctcaagtaacaggaaagctccctataaccccacaatctctctgaactccatatgctgatatgtaacagtattcttacgctcataatatctgcccttatttaggagttactatgtttgactg

SEQ ID NO: 125972 - DNA, 381 bp, Glycine max
tttttgtgatgacgactacgaactgttcggttggcttcatcccgtgatgctttttggtatacctcgactggtaatctttctttgccgatgtcgcatcggatatatttcgatcaatgattgtgatggagtcttttctctgttgtaggcgggtacattttcgtttacctattctattaccgcagtccaatgtcacccgataagataagtcagttgagtgtgcacgaaataccataggcgaccttgacggagaacttttgagcgcaatgaatagaaaactcctcatggtacaaaatatattgccggtctgatggaaaaaaacattgccatgtcggcaaaaaaaacttctctgtcagattccgggagtcgtgccaatgtcagtgg

SEQ ID NO: 125973 - DNA, 127 bp, Glycine max
tcttcagttgacgacttaccatacatatagacatatatctatatctgagtaaaaaggttttttttaaatattattgtctttgattaacacataaatccacctctggtctagtggtgatattggtatg

SEQ ID NO: 125974 - DNA, 352 bp, Glycine max
actcatgattctgatccttcatatgaagggttcattgcaaaattgctggataagtatttgactaattataatcattgaaggatcacaagccatgattggagaccagtgcacattgtttcaatacctaaagggttttttcgtttatcattatcattgtccatagatttactgatagaagatgaaacaacttggaagatctgattaccgcttcaaatgtataagttaatgaagacatactacaactgactaaagaaatttgcgaccacttgaagccgaactgactagataaaatatcttctatttgttacctactaggtgggaaattgatacatgcctgctaacttatcatacc

SEQ ID NO: 125975 - DNA, 417 bp, Glycine max
accttctcatttgcctatttgttgagactattaccccaatcccacttaatagctttgcagtttaatatgtgcgtgccatgcattacataagcacaacaatcatggcacttttagaatgaggatgaatagtttaagacagagattaggaagcccaatatgaccatgggaagcagggcgtcaaatttaaaacaatctaaatgctagcctaatgttagacaaaattccatgtaataaaacacccaaagcaatgctaataatacattctctgacacacttttttcaacattctcttctaatagcatagttatcaatccctgctgactccataagatgctataagacacagcgtgggatgaccactattttgaactttctatatagtttatataattcattctaaatacacacaagtgctca

SEQ ID NO: 125976 - DNA, 383 bp, Glycine max
  unsure (1)..(383): unsure at all n locations
ttgggcgtattcattgaaaagatccgtgcccccctttntgcacatgttctgtaattgcatcctatccgatgggccttttccttcatgtgccatgggccttcctttagatgatccaccttttccatttccgccatagcatgaaggtttttaatcgtgtggaatgcaaggcgtgtggttgtgggtgatactgacggcccttcaaagtgttttgcaggggtatatcaccaactgcttgaccttcagtggcatatccgaggcaaggctcaaagtcngctgggatgtggtggagaatttcatgtgtctcctncacggtttaagagacatgtgcatgattagtttgggttggtccgctctcaacgagtatgggagtggagttattgaca

SEQ ID NO: 125977 - DNA, 318 bp, Glycine max
aaaaaaaatttaatggctgagtgtgactgaaattgtggcaaccaaaagtaatccccaacagccaacttcagtcaccatttggtctcccaaaaggatgatgcctaagttgccaaatcgggcccttattacaactagaactatacctaactaaagccctcttagttgattaacccacaacatattgtggtcaaccaactttacaaggattgggccattatttatactaactaaacacttcttaattgagacaaagtggtgttattcaatacttctccatttgggccatgatacaactcacaaccctggactttctccttg

SEQ ID NO: 125978 - DNA, 241 bp, Glycine max
atatctatcgctccatatgaatgtatggctatatatgtatatctccctccacagctatgtcctatcgctctctctacatctctccctctatatatatatcgccatctatatctacatgtgtctatatatacatacatatatatatatataggcatatgtccgtacatatatctctgcctctacatatacctccatatagatatatatctatgcccctatatacatcccatatatatatata

SEQ ID NO: 125979 - DNA, 446 bp, Glycine max
  unsure (1)..(446): unsure at all n locations
agtatcataagctgtaagggagtacaagagaagcacggtgttattatgtttcacaatacttnctacggtatactataaagaagcaacatagtcacaaaaaataaaaataaagaagcaacatagtctttttgaatttgtttggtattactcaacctcgatatgactaattatttgcctccctgaggatccttaagatggaaaggaagaggttgagtatgtcaagataaagagtaacagaggctccaatgtactcatcataagtgaaacgcttgatcaggttgtcagtgtcatacacaatgtagccagagaatatcatagcaccaattgcaccatagatagcatgggcagtatgctcaagaaggaagaacatctgcatccatcatatacatagatattaagccagaggaaaatggcaagcaaagcatccatcatgatgcatgatacac

SEQ ID NO: 125980 - DNA, 411 bp, Glycine max
  unsure (1)..(411): unsure at all n locations
tcaactgctagtgttccaagatatcctataagcaaggcttgtgcttcaccaattgcttggccttggtcatcaaaattcacaatgatgcataactccctaggtaagctattgactcccctaactttcaccttaatcttcttgatccgttcttcagagtctctaacaataaaagaattctcaataagaaaatgtaatatacttcatatgatgataattacaaaaataaaaataaaatacaatacttgtatacctattgcctcaacagtccaacagtgtgtagactcacgcccaacatgacatctagttgtttcatcttcttgtggaacttcagagtngatacatgagaaatatggacattaccagttgggacttccggagctngtgtggaatcacttggtggngaagaaattc

SEQ ID NO: 125981 - DNA, 293 bp, Glycine max
ttatcagaccaaatttattaaggatttactggtcaaattactcactaaggcatacacttatggcaagaaattactcactcctattatctcagctcaatgtgtttgttgttgcaaaataactcatctcttcctactcactaatgagtccctctaatacttaagatttacttcctccttctcaaagtacaaaaaagaatgcacctaaaatagattactaaatctaattcaccagataaagagaacaccttaaatgttaataataacgcttgacataaaatagattagcatatatg

SEQ ID NO: 125982 - DNA, 410 bp, Glycine max
  unsure (1)..(410): unsure at all n locations
acgcctcctctcacctcttatactttgtcttccactgcatctgcatggtggaaaatcaccattaaaggacctcattgaagctcanagatccggccttcatagaagcttcacaagcaagcttccatcaagtggtatcagagcacaagagcttcaagtaggtggtccttaaacctccattaaattttntgctgtaccttctcttccattggtttgtcttcaatttttctccatgtatctcctcaaatgtcttgtgctaaatgttgttaacatgattctttatagtgttcaccgattaaacttgctatagaagctagaaatttatttctatcggtcacatttcttgttcttgttcttgaaccatgaaatgtgttgagattaggctcctttgagtttcttcttggtattttttg

SEQ ID NO: 125983 - DNA, 324 bp, Glycine max
  unsure (1)..(324): unsure at all n locations
tccacttggaccccatttctaccaactaccaacctaagaaaactatantttctacacaaaaggtacatttctctatattttcatagagggtgtttttcctaaggactgaaagaacttgcctgagatgtcctaagtgatcatctaggctcctactgtacactaaaatatcatcagaataaacaactacaaatctacctatgaaatcccttaagacatgatgcataagcctcataagggtgtttggtgcatttattgagcccaaaggcatcactagccattcatacaaaccaaacttggtcttgaaagcaagtttccactcatcac

SEQ ID NO: 125984 - DNA, 261 bp, Glycine max
tatctatgcctatagtaatataatatgtctatatgtgatatcattgatccctagctcgatatatatatatctatgtctatatatggtctatatcctatatcttatggctgtacatacgtgaatctatatctactgccatagatatatacctatgcatatatatgtatatatatatatagtcaacgatacctatgtatgtatatatatacaccgccatatggccatccatgctgaagatatgtcctatacatcccctccagg

SEQ ID NO: 125985 - DNA, 342 bp, Glycine max
  unsure (1)..(342): unsure at all n locations
acatgactatgctcgctcagacatggagcgttctttctctttctaacctcattcgtacctcccacaaatctgatgtgacnatggataaagccaacatgatttatgggattattatgaagatggacatgaacctgtgctacctcatcatccaccagatctctcggattgcacaacatgacaaatccagacttggattccttgctgtcgcaacatgcccttttgcgggcgagcgaggcgagcctcacgggtgtgctttccataggaggaaagatgcgcggagtcaccaccaacgtttatttgtggaaaacatcggaataatcgaatgaaaccggtcaaaataaa

SEQ ID NO: 125986 - DNA, 372 bp, Glycine max
tttcatatccctacattatcaccgggctacagttaaactattggtgcactataattgatgtagactaaattgatagtgtttgtagtaaaattacgaacttatatttgctaagatcgtttatttgatatcaccttattattagaaaaatgataatatctattttaccagatatcttaactgaagacattttgtgtagcagtttcttatctaaaaatgtaatatacaatatatttggtagagttatggtaggtgtaaaaaaaagttataatgcaactgaaatgtgtgaatggcaaatcttaatctttctatatgttcatatactttcctcaccgatctattgatcaatggaatagttccattgtttcacactta

SEQ ID NO: 125987 - DNA, 375 bp, Glycine max
  unsure (1)..(375): unsure at all n locations
tcaaatcatgggcttcatcatgttctgagttagacaaatcattctagaattcagagaattatgcttaagatcaatattcacagttagtcgttcactcacagagtaaggtcacactcttaccggttttggttcaagcatttcttttacaatcaatctgctactgactaacaatttaatacaagttacattcttgttctntctttgnctaacatacacacttgctcatactcatgataagaaacacaaactccatcacgatcatgcgttcaattcaaaataaaagcatacacccatatntataagtcaataaaagtgcttcactgccatgtcatcaaaacaagttatactatttataatacttcagaataagcaaac

SEQ ID NO: 125988 - DNA, 413 bp, Glycine max
  unsure (1)..(413): unsure at all n locations
tctatatatatctctagctcgagtaagcctctctgagagagtagatatatagctcgagatgtctctatacatcatcatgtgtgtgcctccgtagagcgagntgtctctctatacatgtatgatatacatactctctcactcctacacactctcacactcatatatatatatgtaactatatatatctatgtccatagagatatgaccatagacaaacgtctataggtaacactaagtacatatgtatcagccactcaaccatgcgatcacaatagctgggcgtatgtatctatatatatatagacatgtagagagatggagtcgctaatatatataggtataaaatatatctgctatgatctatatgtgtgatatcatatctatccacgatagggtgttgcactatcttgtca

SEQ ID NO: 125989 - DNA, 378 bp, Glycine max
tattctatactctacatatctctatacatatatatctatatatctatatatagatctatagatctatctcaccacatatctatatatatatatatatctatatgtctatatatgtatacatatatctacatctatatgtctatatatatatatatatctgtatatctatatatctatgtatatatatctctacatatatatatatatatatctctgtatatctcatctatatatatatgtatatatatatatatatatatatatatctatctatacccatgtatatatacatatatatacatctactatatgtatatatctatatctctatatatctctatctatatctatatatatatatatatctatatatatata

SEQ ID NO: 125990 - DNA, 438 bp, Glycine max
  unsure (1)..(438): unsure at all n locations
cgacttagcacgcgctgcactttagctgtgcaaactatttttttaaacatgatttactcagcccccttacatcttatctgattaatcctggaatagaaacaaggatgctttgccatgttaatccatggatcatttaatctggtgaggcagaagacgccaaatcacagggtggggcatatgatcagtttggccaaaaccccttttctccttcanaccatttcctttccatatgtgactatgtgacttctctaacctaatctccatcacattgttttgaattgtgtgccattggacctctttcacaactgtngaagctttaccttgtgccactattgctactgcnggttgtgnngtagtttggcactgtcaattgaccttccttacctaacatctttctttgtgggtctctcttactcagncactctcatctcattctct

SEQ ID NO: 125991 - DNA, 230 bp, Glycine max
  unsure (1)..(230): unsure at all n locations
attttactatatggntggagtgatatgataattctaatttgtctttttccatgaaaacggcaatgtgttcgtgaaaactgactattcggtcataatatatcttccattggatnttctgacacgtcacaccttcgcccaaatagcctatgtttgcgtttaaataccaaaggggactgacttgcgtggctgatcctagcaattacacgaatggcatgcggagtcatagtggt

SEQ ID NO: 125992 - DNA, 117 bp, Glycine max
  unsure (1)..(117): unsure at all n locations
ctacttgccctaattaaaaaaccattacactttttatatcaggtatgaatttccctaaagacaatctctntaatataatatcatatatcacaatctggatatgaatatatagccata

SEQ ID NO: 125993 - DNA, 377 bp, Glycine max
  unsure (1)..(377): unsure at all n locations
cgagatatcttgccaaacaaagtccggttagcgataactcgcctatgctctttcttccatgctatatgtaacaaagtcattgatctagtcaagtttgatgagttgaaaaatgaggcccgcaatatactgtgccagttggagatgtatttttcccccactttctttgacatcatgattcactagattgtgcatctgggcagagaaatcaaatgttctggtcctgtntatctaccgtggatgtacccgggttagcgatacatgaagatcttaagatggtatacaaagaatctatatcatccacatgcatctatctgtgagaggtacattgtagaagacgccattgaattttgtcaaaataatagagaaagctaacctgt

SEQ ID NO: 125994 - DNA, 331 bp, Glycine max
  unsure (1)..(331): unsure at all n locations
atctatatcatctgctccctctctcgatctatatgtgcctctatagctatatatatctatagagcgagctctctatatatctgtggatatggatatatatatatcatatcatctccctacatagatgtctatatctacatatatatatatatatatatatatagtatccctctagatctatccatagatatctatacctctctgtatacacaggcatatatatatatatagtatatatatncggaggccccaccgcggcggggggcccgcggggcgcgcggccgcccctctgcatatatatctatatatatatatatacggccgccagggc

SEQ ID NO: 125995 - DNA, 396 bp, Glycine max
  unsure (1)..(396): unsure at all n locations
gatgtctgattgagtctctgaatatatcgagacgctcggaatttgatatccgaagctgcctaagcaaattcaaacgacaaaaactttttactcggatgtctgatggagtcccgtaatatatcgaaaaagctcgaatgggaatgtagaagctctgagcaaattcaaacaacaataactttttactcggatgtctgattgagtcccgtaatatattcagatgctcgaaatggaataccgaagctcggagcaaattcaaacaataataactttntactctgatgtccgagtgagtcccgtaatatatccgaacgcttgaaattgaatgtagaaactctgagcaaattcaaacgacattaacttttactcggatgtctgattgagtccccgtatatatcg

SEQ ID NO: 125996 - DNA, 460 bp, Glycine max
  unsure (1)..(460): unsure at all n locations
agcatgcaagctngcaatctttgcgtatgtgattggaaagtatatatttttatcgggcaaagaattgctcttatacaatgacactccanaataattgtttccattcccaaggctaacatacgctgggaaatcacgatcgattgtaccagctcccaccgtgatcacccaaggtgctgtgttggagccgagagacgatggatcagggccatcatttcctgctgagcaagaaactagaatccctttctccattgctgcaaaggctccaattgcaacgccatcgtcatcgtaatactttgatccaccaccaccaagtgatattgaaaggacattgacgttgtcagagatggctgcgtctatcgcagccaatatgtcagaaacaacacaagaatcttntcaacaaaccttatagacagcaaccctagcgcgtgagggcatcccacgcgcctgtaccgaagcatag

SEQ ID NO: 125997 - DNA, 532 bp, Glycine max
  unsure (1)..(532): unsure at all n locations
atctgactctatctatatctatatctgtatatatatctatgcatatctatctatgtatgtatgtacatatctctatctatctatctctctatctatatatatatccatatccctccatatacatatacatctctatatatatatatctatatatacatctgtatgggcactgcatgtccatacatatacatctatccctatgactacatctatatctctactaatacgactagcgatatctgtgggcgcataggactagataaatgcacctgtctntatatacatggagagccctgccgctctgacggtagatacatgaatatctatggatgaaagacgctgtccctatgcggctagntctgactccatgtagatgtatgtatccggatacatggatacccgcctggatatatacccatatgtggatgtacctccgtatatatctcgatatctatggatgaatatacagctatagatctatctcatcatatgtggtcacatatagatgtatatatatatctatacatatata

SEQ ID NO: 125998 - DNA, 394 bp, Glycine max
  unsure (1)..(394): unsure at all n locations
aatcttctctatgaagcttctcaaggaagtgatcttatttattagaggggtgtgtgtagcttagctctagcttctcaaggaagttatctcaaagaagcttctcaatgaatatttctcacaaaagcttcttaaagaagcaacctattctataaatagaaacatgtgtaacacattgtngtaactctgatgaatgagagtcttgtgagacacaactcagagctcaacttctctcccttttcttccttcaatttgtgctcccctctctctatcctacctcttcttttcctcatcgaacatcctctccaactttttatcaggctatcttggggtgaactcttctcatggttatccctaaggatgccctctatactttctcttttcttcctgcatctca

SEQ ID NO: 125999 - DNA, 211 bp, Glycine max
  unsure (1)..(211): unsure at all n locations
atagatcaatggggctggctatatctcatgatatatatacatatgcattgtctatatctagctngatccttctatctatctgtagatacatattatcagtggatactcactgcctgaaattatatgtgtagctatgtntaagtatttctatagatnactatctatacacacatntntccacatctcatttgaatgtgcatatatataaata

SEQ ID NO: 126000 - DNA, 332 bp, Glycine max
  unsure (1)..(332): unsure at all n locations
tacctggagatatgtcgcgggggtcaagagaccttgcggacgtcaggtggggtgctatcgcccaaaaccaagcttgaccaatcccgacccaacccgggcatagtcagtcagagagaacctgtgatgtacctaaacaggcgagctcctgacagtcaaccgattaaagaacacagaccacaaagcanggaggcttgtgtggtggctggccagctatggatcttgagtgatatttggaatatagcctctgtgaatcgattaccaagggtgtgtaatcgattacaaggcttaataatgaagacaggaagataagatggtctctggtaatctattac

SEQ ID NO: 126001 - DNA, 281 bp, Glycine max
  unsure (1)..(281): unsure at all n locations
actgcaactacttcaaggacaaagacaaagaagaagttgctggacaacatgatcaacaaatgacttataatatggtccttgaccagatcgaacccctaggactggtagacaagtggcctcagatatcttaagaagggggggtgaattaagatattgcaaactatttccccaattaaaattctatttcaatttcaatgcaagttgcaagttcccttatanatgaactcttatattatgattcaaatagaacaatctgaatataaatatatagtaataataaa

SEQ ID NO: 126002 - DNA, 446 bp, Glycine max
  unsure (1)..(446): unsure at all n locations
tctagtattgcggaattatttacttaagtnatattcaacaagtcagtttaactagcttataatattttttactaactaaaaaacttgtttgattgttcagtaaacaaacttttttggcatattntaatagcttctaactttttttaaaatgttacttgaagtagcattttttaaaagccagcttctaactttggagctttatattttatttcctatatatcgttaaaatatgtattcaatttccttgtaccatatgtaaataagccaatgtatatttcttagctacttcaactgttaatttattaaacacttataatttaataaactaactttttagcttccaactaatattttagttttcaagctgttcaatttcaattaactattagactagttgttgtgaacataaccttaaagtagcatgttttaacacactatgctttcgt

SEQ ID NO: 126003 - DNA, 324 bp, Glycine max
ttcactgcctagatgacatcgacttcacttttctctttgagtgtattctattacttccaattctgggaatctcttgtgccaacaagaatccttctacaaacttaagttgaatctttatcccatgaatcttcaaaagctcagtcttatttgtagtttcatgtattctgcaatggatggaatgatatgaagtcaaatgatgtcaatatattaaaacctctaaaaaaagatgattcgggttattacgtacgacattatttatttggtcttggtgatgacacttgcttattattagtcctttcttctttgctaagtactgtttgagtg

SEQ ID NO: 126004 - DNA, 69 bp, Glycine max
tatatatatagccatatatatatatatatatggatatgtatatatctatacctatgcctagcgcgtcta

SEQ ID NO: 126005 - DNA, 363 bp, Glycine max
atctcattgtgatacgcacgtaactatttattcacgagagacagagcagaataatgctattctagaccaagtgatcatatgaacaggaagtgtagcgttagcactctaatacgtgttgtattcaatgcacaagaaccttgtcgggtaatttcctttattaacatattgcaatcagaaaggctggcttattaatctttagcattagtatcaccaaacaaaatttttaagcattagactaaaacttcactttgtaaccatgtatagatctctaacacacatagaatacatggttgctcgatcgagcattattatttatagactttacatttaaatttagtcatatgtctttctatctacatatat

SEQ ID NO: 126006 - DNA, 179 bp, Glycine max
  unsure (1)..(179): unsure at all n locations
tatacgtatgtgtatatgtacatatctatgtgtgctactatctcgnggtgtgtatagatacctatatctatatctatatgcacatgcatatgcctgtggattgatgtgagtgctcgtatctaccgaggccgataaatcaatacataaggttggggattacagatgcgtaactatatgta

SEQ ID NO: 126007 - DNA, 356 bp, Glycine max
  unsure (1)..(356): unsure at all n locations
cctcatgcactcctctaatgactatggcatcatttctggcgcttaactgctaagagttggaagccatcttttcaattaaatttctggctttagcaggagtcatgtctccaagggctccaccactggcagcatctatcatacttctctccatattactgagtccttcataanaatattggagaagaagctgctccgaaatctgatggtgagggcaactggcacantagtttttaaatcgctcccaatactcatacaggctctctccactgagttgtctaatacctgagatatctttcctgatgggtgtggtcctggaagcanggaannatttttctaagaatactctcttaatgtca

SEQ ID NO: 126008 - DNA, 152 bp, Glycine max
ggggccaaatgaacatctggctacatccatctctccaaaatatgatccatatctattggcatatatatatatcccacacatatctgtctattatatacgtatatctatatatctcttgatatgtatagatagagaccctgatatctgtatat

SEQ ID NO: 126009 - DNA, 462 bp, Glycine max
  unsure (1)..(462): unsure at all n locations
atctctgatcttcaatgtttattctccatcatggagatgtcttggaaggaaaaggagaagaggagaggggaggcaccatccacaagggaataagccatggaagaaggagcttcaccacanagaatgtgccttggataaaaagcttgaaaaggatgctttaatggaggaaaagaaagagagaaggggggagcacaaaattgaaggaataatagagggagagaagtggaactttgaggtgtgtctcataagactttcattcatcanagttacaacaagtgttacacatgcttctatttatagactangtagctttcttgagaaaacttccttgagaagcttctttgagaaaacttcctttataagctagagcttatctacacacacccctctataagctaagctcacctccttgagaagcttccttcagaagctagagcttagctacacgcacctctctaatag

SEQ ID NO: 126010 - DNA, 347 bp, Glycine max
  unsure (1)..(347): unsure at all n locations
atatagaactatggctgaattgaaaaattgcgtaaacagctaaacacctccctttatnttcatcttccgatgggccaagcctttgacaatatatatgggcttgacttgggatgaaaaaggaaataaaataaaataaagtcaaaattagaatgaggagaagttgaaatgaaaaaccaagtgcttaacctagactagagtagtgctaaggagcgagtntgtcttgtcttaattgcatagcatggatatcaaaacctttgccttcgccccatcttctccgccgttatcggtaatcgccgccgccaagctcgccggaatctctcccacgaatgataccgctctctctcctg

SEQ ID NO: 126011 - DNA, 372 bp, Glycine max
  unsure (1)..(372): unsure at all n locations
caaatgcgattttcngtttcggngttctccgccttaagaacagtcgtaataagctcatcatggtactcaacaatcttcattgttcaagatcagcgacaatggttatcccactgattggcctcacgtagatgttggggctcccatcctgcanaaagcactccattttcacagtccttgtgctcttggtctccccaaaccacccaacggagaaggtggtgcaagccacctgcgacacgttgaagcccctcttcttcaaggactcaagaaagggaccgtacttgggaagaagctctanggcttcggtttgttcctcctccgttaaggtggggaacccgttccctgtgtggantttgtccaagacaacgtttcgcg

SEQ ID NO: 126012 - DNA, 380 bp, Glycine max
  unsure (1)..(380): unsure at all n locations
gttgaccacaacagcgctggaggcggcaagggacaatggtcttcaaaaaacctgttgtcatgaacaaacattatatcatgcgttgaccgcgccaaacgaaccagcaaaggcggtgcctaattgttatactaactatatacaatgtacctgaacaaaatgatttccaaacacatgaccgacatatatgatgcggtggccagaagagacacgtgcgggttgacttctaatagggaaaaatgttatgctttgttggtgggacaacgatacaaggaatacgctataccgtgaagcaatcacatatcccatgtgtgttatatccatccacttgttcacactaaccgctgatgaaccanacatacacatgtaagtattctaacatt

SEQ ID NO: 126013 - DNA, 407 bp, Glycine max
atatgccacttcttgtcctagaaaatgattatatagatctaaactatagactatagatcgattaatcacatgcatttcacaacgaacttcattcaattgcatcatctattttgatcacaaagttgataaagcaaacctttgccgtattaagcactacactcttgcagtctggtaagatgctcaaagaccatgcggataagtgatatgaatatccattgaagcttacttttgcatcactattggcaatgatggcaaggaacgcaacacttatatctcctatgttgtaaactgcagcctaagttgaatagtaaatgtaaaagatgtattaaagtattaagccttcatctcattaactatgtagcctttgggataagtggtctaaatgttatggagaatgacactcagct

SEQ ID NO: 126014 - DNA, 179 bp, Glycine max
  unsure (1)..(179): unsure at all n locations
tgaaagaataactatataaaaacctatagatatatgggctgaagaggatatgaaaacgagtccatacaactctaaagccacanatataataacatctgccctgtgaatggatgaatatttcatggcttcacattgtaagagtgctaacgaaatgnggaacactcttcgatctacacatg

SEQ ID NO: 126015 - DNA, 441 bp, Glycine max
  unsure (1)..(441): unsure at all n locations
tcatgtgtacaaataagctctcattgtataagaacttatagaataaatgcttagttaacttgtttaccaaaacatgccatagtctcaattaaaaaacctggaaaggaagctataaagaatttaaaaggtcagtcacctgtagtttagtaaaaagtcatataaagcatgtacattgttgatgccactaaaagccagcaaagatgctgggctattatcaacatcagagaatgaccttaatcgccaagtctgtgttatttcaaatagcaagcaccaattaatataaattatacatagagaagaaaaaaatagcactagaattaattgatagacaaactcataacaccataatatgcataaaaaggacagccaactattaacatganatgcaagacanactcaaagagaagtatgtattaatgggaagcttgtgtacacgttata

SEQ ID NO: 126016 - DNA, 427 bp, Glycine max
  unsure (1)..(427): unsure at all n locations
ctagactgctctttcacgggcaaccaatngattatcagtttatcaatttcctgtatgctcatctnttttaatccttgcctttggttcaaatcacaggattcagctccaacagtgcagacaggtggtgtaaatcaaggtgaagcatctaatattgaggttccctttgtacctttgggttaagacgttcagttaaactgcatgcgaaatctccatttaactagtttttcaataatgctggattgattcttgctcaagttacactntgaacatggcttattntaattctaacagatggccaattgaaatcgtcatcaaacattcagcaacaagcccaacatcaaactttgcagcccggtttacctgcttctactggtgttaatacttcgccgggaaccttatcacgctccaaatatcactggtctcatac

SEQ ID NO: 126017 - DNA, 282 bp, Glycine max
cttcgtactgatcatcgattgttactaaagagcagattatcttttacagataataatcataatccattaatgtgtattaattatttaaaataaatatatggcatgctggacaaaagatagtctatcaactctattaataaatcaaaacaattggaccggaatgatattacattaaataatagtaggtttgccattttaaattaaggatattcatttttttctccacgctaatcattcgattctaaatttaaattttaaagatcatccaagttaagaaaattg

SEQ ID NO: 126018 - DNA, 343 bp, Glycine max
gtgcattaatgtatcaaggagtggaaatagtaattgtctcgcatgatgggtctagtaaccaagggaattttaatattgggctggtttggtgttgaacaaaaatcgtcagtcgaaatatttaggatgttactattggctgctaccataactactgttggcccctataaaacttttattttttgaaaaagactattttacccctttattcaaaacacttcattcctttttctttctcccttcctattacccgtgctatccttattcttgcccttgttaaatacacaatgaaaatacaattatggtatgatcctcattgagacacacaatgtattttcattgtata

SEQ ID NO: 126019 - DNA, 466 bp, Glycine max
  unsure (1)..(466): unsure at all n locations
atatatatatatatagctatagtgtatgcgactatctatatatgccctctctatctatgtgacatctacatatatctgtngatataacangatgaatgtgtacgtattattcgatatatngaattatattaaccaatgttttaaatattggtcatcgtggtcgtattgcgggtttatcgcgtatattaatatatgtatataattactaatacatatgactatagatatctctatatatgtctctatatggagatatacatatatatatatgtatatatagatgtatatatatctgtctacatgtatatatatatatatatatatgtgtatgtatatatgtatatatatatgtgtacatgtatatatatatatacatatatgtagatatatatctatctatatatatatatatatgtatgcatatatatatatatatacatatcgatatatatatatatatatatat

SEQ ID NO: 126020 - DNA, 424 bp, Glycine max
  unsure (1)..(424): unsure at all n locations
aacttgatcccatatctacttgataattcaatggtnagcaaaaccctagccaaggttcatcaacctccatttctccgagaatacgactcgacacaacggtgcttgtacggagaagccncggggcgctccattgagcattgtanggctctgaagtgtagtgtcgcaacctacccttcggcgggagggcgacgcgagactcgcgggatgcgtgttccacgataggaatacgcgcggagtcgccaccaacgtttatttgaggaaaacgtcgganaaactggaaaagacgcgatctacgaactttctagtgaaaggttcgggagttgtatntacgcacggngaaggtatatcaccccacacgctcgtcccaacggacggcagcctttaatcgaatgtgcanacatgactttgattttatgttcccttt

SEQ ID NO: 126021 - DNA, 523 bp, Glycine max
  unsure (1)..(523): unsure at all n locations
tcattatggacctataatactcagtctgttgatatggngtctctacacatgtggatctatgtggctgtctggcgatggagctctacatgtntntctctctctctatgcgcgcatatacccacctatctctntagtccaccttctactgatctcacgtactctcatctntcccatatacatgtatctctcaacaccgggtccctcatcatctctgcctagcgttcgcaaacatcaatgtatacaacattcacacagcataagctatcacagccaagtaaaacagggcaaaggcagaaaactctgctcaaaacaccaaccaaaatcacagctnttctcactatagaccccagaacaatatctncgaaccaatacgtataccgatagatcgacatctatatgtctctggatgtctatatatatatagccatctgtatgtccgtagggatctacatatatacatacatatatatatctgtatatctctntctacatncatatacacacatgcatatatatgtatatg

SEQ ID NO: 126022 - DNA, 229 bp, Glycine max
agctttcgctgtgcagatggtccggcgcaatgtttataccaaatttgacgcctaccggcagcactttttctaattctgcggcatcgcgggcaattaactcaaacaggtgctgagtcagcggcacaatcatcttttgcgattcggcaaagttaatgaaggcatccgggggaatttctcccgcgacaggatgccgccagcgtatcagtacttccaggcccgttactcgcaa

SEQ ID NO: 126023 - DNA, 435 bp, Glycine max
agcttagccttacattacatgcaaaaactcattacttcaagaaagaaacggcttttggcgaaagaaattggaaaaagatgatggacgatgtctcttccaacctctaaatcctaagtctctctattttcctgagctaagcatctctattgctacctaacttgtctctctactacttggcgttgtcgattgttgccaacttcagtgatacaaaggctcttggacctttcaagcttttgaaggtctcccttacacgagcatgttctcgcttagcgagagtggacgcgctgagcaggagaaaagacaatgacctcactaggcgggctaactgcatgctgggcaagcacatctatgacttatcctcttctacgtgctcccataacgctttctagctggatgactcgctaagcggatgccactctgtgaacgggactgtct

SEQ ID NO: 126024 - DNA, 458 bp, Glycine max
  unsure (1)..(458): unsure at all n locations
agcttgtagcaactgggctgagcttttgtatgatttgtaangggccgcaatatctttttgcaagtttcgtgtatggggcgcccacgacggtggattggcgtcttggatggagttntaccagaaccatgtctccttcggtgaagtggagttcgcgatggtgcttgtctgcaagttctttcatgtgttgttgggccttgaacagtttgtgtcgcaagcttttgaacattaagtcgcgatcagttaaccaagtgtcgacaacgtctatatttgaatttctcgccacgtattgaggaaggttgggtggtttcttcccaaaggtaatctcgtaaggagacatgcctgtatcggagtggacagaggtgttgtaggaccactccatccacattaggaagcgaccccatgttgagggtttgtcgtgaacgaatgccctgagggtattgtcaacgactctatttatc

SEQ ID NO: 126025 - DNA, 420 bp, Glycine max
  unsure (1)..(420): unsure at all n locations
agcttgtaatcgattaaactgatactatagtactttntgcaagctacaaacacttgtgtaatcgattatgatcagtttgtaatcgagtaaaacaaaaaaatttaactacataagaaattntctaactttagaacttttcttcttactcttacaagatgatgcatgatgcgcatacgaaatgatagagactaagatccaacacataatgcaacaatcaatacaaatgcaactcaagaaagttgggcatgtaaaagacaaaacttcttcaaggtcttcttcaagcttcaaggctaagtcttcatgttgctccccttatctctagcaaaattgaagccaacgggtgaagttgctaaatacaaggcatgattagtggccaaagggttactgcagaaatatgttttggattaccatgaagtcttt

SEQ ID NO: 126026 - DNA, 485 bp, Glycine max
  unsure (1)..(485): unsure at all n locations
atccttgagtcacctgcggcatgcaagcttataagaacaaaatngcctcaatcatttttcaatatgcatgtgaattaggacgcatcaacaagaatcaagccaaggctattgtgcaagcaatcaatggggcaaaacacaccaaatgattatgatgatggatggctcaaattctcacaaaggtaaaatcatcactttcaaattgagctttcaaaactatcatgacatgtagagaagaatcaaggatttcaaatcacaaaatatcaagaacttttattttcaaaacaattacccatttcttgaacatatcctataattcaaagaaaaacatgcaaagtcgtacgtgcacacaaaattgacccaaaatattaaactaaaaatccgacgaaactaacaacattaacaaattaacacaactaacanattaacaaaaccaacaaaactagcaaaaccaaagaacactccccccccatacttaaacaacacat

SEQ ID NO: 126027 - DNA, 443 bp, Glycine max
  unsure (1)..(443): unsure at all n locations
agctttaaccaattcaggataaatattttattgtaatgacataaaaggtataagacctaagttctgaaaggcttgaatgcaatcaaaggtttcatcagaaaagaattccatatcaataaacttagggtcgataatggaacgagatgagaaaagatttaagtaatgtttctgctattcttcgaagaaaacaatgggaaagaggacaatgagggtggaattggtgttgtggatgcgctagtggctccggaacgatgagctcttgaagccgaagcggaggcggaagaacccttttgtttctttgacaattctgccatttgaaggagtttttgcagatttcaatcggtgaaatcaaaagaaaaatgaanaagaagaagatttcaatttacgggagttgatttgatgaagaaatgagtgagataccaatgtttggaggtttgggaatg

SEQ ID NO: 126028 - DNA, 455 bp, Glycine max
  unsure (1)..(455): unsure at all n locations
agctnttggttcanagctacttntgttgatttgatgaggagaacactctgtccatagtgggtcaaggtgacctgatgatttccagtgagcccataaaactctctaagttctgtccatccagcaagtagagttggcttaccagatcttggttatatgtgaagagtccatgttgccactagagtgtagcaaatgtcaagtaggctctagttcatccttccaccttacaacaaatgacctactcacttcaccgtaaggctacatttaacaagtaaagtaatataagcaaacgtgttatatcaagtcatgtttattatataatagtcttgaaataatttataacctgatcaataacatgaacaaggttaaacatttcctctgattctttatcaatcttcatcattgtgaggggtcatctccttccagttctgctgatgttcatccattgtttctaaact

SEQ ID NO: 126029 - DNA, 402 bp, Glycine max
  unsure (1)..(402): unsure at all n locations
agcttgaggtggataatattcttggtgctagtaatgatattagaatttctagaagtagttgtaagttcaggcttaggctgtgatgaattcactaatacatatattattattgttgattagaattatatatatacatatatatatatatatatatacatatatatatatatgccattgttatattatattactattactatttcgtttcatctttttgtggtttgtttgattgaaatttttcataaaggatggaggatcagatgtgggttttttctctctccattggcacttttgagttacagntcatgtaattngattctagctatttattattccacctctatttcttattcacaaagtagcatatttattactatctattttatatgtttaattggaata

SEQ ID NO: 126030 - DNA, 436 bp, Glycine max
  unsure (1)..(436): unsure at all n locations
aagcttcacttatgtggcgggttgtcttccttcactntcttggctccaacgcaagctttgaccactgctgntccttcccgcgatgcttctgttcatatccgcctgagtgggcttatagcctaaaccatacttcccacgatttcctttggcgtttatcaggctagttatgccgtcgttgtccttgcctaaacccatttcgggttcgtaatcgttccctaacataactcgggccatcattactgctgcatcgaacagacaaggctgcccagagaaggagtccacggaggaaatgctgaccacctcaaaagactggaaagcggtttctaacgattcttctgcggcttccacataaggcatagaggatgggcagctcaccaagatgtcttcctcgcttgatacgatgaccaaatgcccctccactacgaatntcaacttt

SEQ ID NO: 126031 - DNA, 415 bp, Glycine max
  unsure (1)..(415): unsure at all n locations
agcttcctaaaataaatattctttcatgttctctagtccatataagtgttgatttatttatatataatacatttattttgctgataaaaaaaaaacataagtgttgattgatgccttaaatcttaaaacccattagttttagatgttggattgngttcccaccatgatttggtctagaaattatataagaattaggttaattaacacttcatatcctacactctacagtcttacaattttaaccaggaactgttaccgttgacctgcttattgttgcagtcttgctgtaatgagatatgcttctaanaaatgttgaataaataanaaatatgatgttgttaccccttggaaattggaatattattagacaaggaaaagaactgcttgtgtgcaaaatgaatctgtacaatgtgta

SEQ ID NO: 126032 - DNA, 443 bp, Glycine max
  unsure (1)..(443): unsure at all n locations
agcttctagtcgtccatagacctcctcattggtactttctatcaaacattgtatctgtgcattcatcgcatccagtaacagacgttgagcgccgtccaactgatgatactcgtcaccaccaccacctgctccagccataattcaacaggaaaaaaaatgtgcaataaaaattattaaggtttcaggacctcacaacactctactcacgtgtttaactcttagatggtagtacactcgtgtttaatgctctcaataggcttttgtgtaatgtattccctcttgccttttaccactcgtgtttcctcttaagttcctggatggaccaaattagacacacaaggtaatataaaataaaaggaaagacaatataatgatcacaaacagatttgatttgggataacaactnggacttgattnggataataatatattagaattggatt

SEQ ID NO: 126033 - DNA, 464 bp, Glycine max
  unsure (1)..(464): unsure at all n locations
gcttcacatgtccaagcaaattcaaatgttctacttattatattggtcccacaaaaagcagntgtcctgtccttcaaactttgtattgcaagaatacaatgcatttttcaacacatttggtgcagacaaaaggaaatacacaattttaaaaatttattgtgaaataaatgtcaatatttgtacattattttttgtaatgttcagaataaccatcaaattcagcacaatgcaatgtcctatatcatctacggctntctacatcgaatggtttgaacttttacaaaatatgatgtccatttcttgcaaatcgttgttatcgtttccatgtctaatgatgtgccatcagcaaaccactacaaaatataaaatatacaagtaatatgtcacgtacatgtaaaaagattaataactatagtgaagtactaatttaaagttgttcaaccaagcataccattgctcaatca

SEQ ID NO: 126034 - DNA, 380 bp, Glycine max
aaagagccatttatggggtatattgagtgttgagaggtcaaattttgaatacgtgaagattttaccttaaaattatgttgagcaagtctaattcaatgttatagacttgatgaagatgagagtttaccccaaaatcacctaattttcattttcacctttcaaaccttgaaaattcactaaatttggtgggttttggatacctatgttttgctttaccttggtttgaagcttgtttttgacttgaacatgatttatacatggtttacgacttgtacgatccacattgagtggaattggatgcatgtaagctagatttcgaagatctgcataattctacataaaagctgcccaattatgcagcagatttgccaattatgcag

SEQ ID NO: 126035 - DNA, 457 bp, Glycine max
  unsure (1)..(457): unsure at all n locations
gcagctttctctggtgtggctggattggttctctagttagatacatgaaatagattgattggtgtaattccaattgtgtgcctctggtcttcattcacgctgcatttcacagcataaatccttgatggcatcgccacatcttcaaccaaccaacaactgacatacagacttgaatccaacagtttaggcagtgaaaaattgaccattatatgtgacactcagagctcactcatagatgatccattagccttcagacagtggtgggtcgaccagtttgcaagaaaatcagacctccatgcctgccatatgaaggttatggttccacaattctagcagcataccacttnaaatccanagtttttgagccattgctgccttcccctgtttgacttcgttctctatttcttcgactattagtatgggttatcttaaaaagggtctttgcaacccaaattct

SEQ ID NO: 126036 - DNA, 450 bp, Glycine max
  unsure (1)..(450): unsure at all n locations
gtcacctgcggcatgcaagctntactcttcactgcgcgaaggcgggatattatttttctctggcgtgccgccaattaaagagctgctcaaacgcaccgaagaacatattaaaggcatggtagtgcctggcacgttgtttgaagagctgggctttaactacatcggcccggtggacggtcacgatgtgctggggcttatcaccacgctaaagaacatgcgcgacctgaaaggcccgcagttcctgcatatcatgaccaaaaaaggtcgtggttatgaaccggcagaaaaagacccgatcactttccacgccgtgcctaaatttgatccctccagcggttgttngccgaaaagtagcggcgggttgccgagctattcaaaaatctttggcgactggttgtgcgaaacggcagcgaaagacaacaagctgatggcgattactccggcgatgcg

SEQ ID NO: 126037 - DNA, 410 bp, Glycine max
agcttatctgatttgtccttcctcagtgttttgtatctatcatacaacaacttatcaggcagaattctcacgagcacccaacttcagagctttgaagaacttagctacactggaaatcctgagctttgtcggcctcctgtaacaaaaaattgcacagacaaggaagagttgacagagagtgcttctgttggacacggtgatggtaatttctttggaacatcagagtttgatatcggtatgggagttggatttgcagcaagattttggggtttttgtaaagttgttttcttcaacagaacttggaggcgtgcttattttcattatctagaccacttgagagatctgatttatgtgataatatttttgaaggaaagacgttactctggaaattgtgagtttacatgttaact

SEQ ID NO: 126038 - DNA, 456 bp, Glycine max
ggcagcaagctaagctccttaactgccattgttttattatttgaaaagtatccttgtggaaccttcacccgacgaagacactgacaaaaacttatcttctcctttttggacaaagtatgacaagcagggggcaagtaaattttcttcccatcaaaccttggatgcaactgtgatcgtatccccatatcagctagatcttgacgggtattcaagccatccttcgtcttgccttgagtgttaaggagtgtcccaatgacactgtcacaaacatttttctccacatgcataacatcaatacaatgtctaacatctagatcagaccagtacggaagatcaaagaaaatggacatcttctttcatatgctactcttacttttatccttcttttggatctttctaaatacaatattcaggtgttgaacccgctggtatacctgctcaccaatcaacggtatc

SEQ ID NO: 126039 - DNA, 457 bp, Glycine max
  unsure (1)..(457): unsure at all n locations
agcttgtaggattatggngtatccatcatttgggtactaggtggcggncgggcgatggtgcacaacaaattttccacatccacaaatcgcgcataaacccaccatcccctgttgcccacctccaactgagctcacgtactcccacgtagcccatatcctcgtttctctcaacaccgggtccccatcaatcctcccaagcttccccaacatccaagtaattcaacattcaaacaacacaaactatcacagccaagaaaacagggcaaaggcagaaaactctgcccaaaacaccaaccaaaatcacagcttttctcacttaaagaccccagtaacaattccttcattccagttcgttaactgttggatcgactcgaaaattttactggaagtctctagtacataaacctacattntgaccgttgggatctactagcaaacacccataactcattctgca

SEQ ID NO: 126040 - DNA, 431 bp, Glycine max
aagtcacctgcggcatgcaagctttacttggtcatacaccaaagtgtaatcattcctttgccatccttccatggtgcatgcaatcggtcccaaagccttatatgttcttgctgtgcaaaatcgtcaaagttttaaacgaaggacagggaaaaaccctacgatcaatatttcagttggttaaatgtcaaacaactccattgccatcactccaaaattgtcaagtgactaaatcaaaccaaacatacactctgagggagtccccaaagagatttgcaaaaagaaaggatgaggtctcatgagttatcacgtctttcaaaaagatacagttaatctgtgttttcacaaaaaaagcaaaaaatcaatcataatccaaaaatggaaaaatgtctgagcataccaattttatgaatcaaacctttgcttactaatac

SEQ ID NO: 126041 - DNA, 455 bp, Glycine max
  unsure (1)..(455): unsure at all n locations
agcttctatataagctgaaccattttatcaataaacacaagntgagtgttattcacaaaattagagtttatctcttttatcttagtgagagtgattctcctaaattcttgagtgattcaagaacaccctggctgtatcaaaggactttcacaacatttgtgtgttgccctcgctgaaaagagtgattctttccttcctttcatcttcacccttggtctttcaaaccacaattccagaaatccacctctgcctagaattatctcgtggccataactcccgttttacgcactcaaattaagtgattcttgagcctaaattgaatttcaaaacgagacctttcacctcgttgtggaatcacctcatttggagccctgtagcttcagttattgccatttctatatttctgtccagccaccacttaacctacattntaccatcccattcatccattttat

SEQ ID NO: 126042 - DNA, 404 bp, Glycine max
aacagcttcatgaaacttaataacaaacatcttacagattaggtcattttttatttaagaattaagttaatatacattaatatttgctcatgtgccgtgaaatgctgtaactttactgatagaaacgaattttgtactgaacacccccttttataataaaagtgaaataatgtttcattcgttcacccccctttataataaaagaaaagtgaaataatgtttcattcgttgttcatgtatgtgttcagctcatggatcagtgatcgtacctgctccttccattcattacaagaatttgtagcttctcatttaatagcaacgaatgaatgcctttttggttagaagtcaaatggcagttggtggaagaaaaacaattgtcacgagaaaatttgattttggtaaca

SEQ ID NO: 126043 - DNA, 459 bp, Glycine max
  unsure (1)..(459): unsure at all n locations
agctttgaatcgattacacacatacagatatctatttcagagcacattntcaaaaaatattctcaacagtcacatctttttatgtggttcttgaatggctatcaaaggcctatatatatatgtgacttgagacacgaatttaagaagagtttttggagaacaaaaaggtcttatcctattaaaaagcaaatcgtgttatcctcttacaaattccttggccaaattacttgtgattcaataaggaattatttgagtgctcaaattgttcagtctatctctttcaagagagatttcttcttttcttcttcttcattctgaaaagggattaagagaccgagggtctcctgttgtgaaagaattctaaacacaaaggaagggttgtccttgtgtgtttagaacttgtaaaaggaatttacaagatagtggaactctcaagcgggttgcttggggactggacgt

SEQ ID NO: 126044 - DNA, 429 bp, Glycine max
  unsure (1)..(429): unsure at all n locations
agcttctaagaatgacctacacaacntngtatctttcatggaggcctcaccaaaaaagatagtctcacccgcatatagaaaaacaaccacaggcgcctggttataccccaccaagaaacttctaaagcagatatttgagattgcttccctcatcagacctgtgatgccttcaaccactaaattaactgttgactgtatcccacaaaatacacttattgtcgatgccacatggagaataaataataacaagggtgaccagttgagcatcttggacccattccccagacattaaaataaaaccactaccactgatcttgctttacaagctaaaagaattatcattccacaaacatagtatgccacctgttgagttaatagctggcagcaatacccaactgacatctacatgtccacacaaagcctgacaca

SEQ ID NO: 126045 - DNA, 358 bp, Glycine max
tgacacaatcggacattcgaaggaaaagttatagtcatttgaattcgctcagggctcctgttttcaatgtcgagcttcacgatatactacgggacacaatcggacctccgagatataagtatgtttctatttgcatatgctcagagcatcttgacttattacgagacacaatcatacattcgtaaataaagctatcgtctctagaattcgtaagagcctatatattcaatctcggggtctacatttattacgggacttatctaacatccgacattaagttatcgttctttgaaatactcagagcttttgatttaattccccgtctagatatatttcgtaccaatcgaccttgagaaaa

SEQ ID NO: 126046 - DNA, 300 bp, Glycine max
gaaggaggggccttttcttgatacgaatacgccgtattacagtgtcttgaaacgcatacatctctgtacaacagactcaagcacatgtatcactatcttgagtttggtatactcacaatgattgcgcagtgtaattggcgcattgatgcaactgcaacacagattgatggagtagtctatgaggaattgaccaacagaccttgatttgaacctccaagttatataagtaccgatagaatcatctcttgtaatacaggagggggatgaacaacatgactggaattgtatatctcatgtgcc

SEQ ID NO: 126047 - DNA, 329 bp, Glycine max
ggtgaatgcgattcaaaggtgtgatgaggaggacaatgatgaccaccaaagatgatgactaaagtgatgaacacactgctcatagactacagaacatactcttgtgagctccagaacatctcaggtgaatcaataacatgtcaagaggttcagatgagaatgaagaacaatgtatgactcgatatgacatcctagagtccacaatcatgattaaaggttcaagatctcatgaatcgctatctagattcaagactcacgattgaagaatgaagaacagactcactctacataagtattaaaaccgtttttcataacttttaatgcacatg

SEQ ID NO: 126048 - DNA, 463 bp, Glycine max
  unsure (1)..(463): unsure at all n locations
agctttacagcagatattagtaatgtctctttttctagaattaanataacttaatgccattaacctatggaattaaaacaaactaaatggctgagtgtaactgaaattgttggcaaccaaaagtcacccccaacagccaacaagtcagccaccatttggtctcccaaaaggctgatgcctaagttgccaattgggcccttattacaacttgaactaaagcccttttagttgattaacccaaaacatatttttggtcagccaactttacaaggattgggccattatttagacaaactaaacactctaaaattgaaataaagtggtgtcattcagtcctccatttgggccatgatacaactcacaaccttggacttttctccttgagacttgtgctcgtattcaaatagtatggacagcacttgttgaagagcgtcttggtttccttgctctacccttgcataag

SEQ ID NO: 126049 - DNA, 399 bp, Glycine max
  unsure (1)..(399): unsure at all n locations
agctttaagccaaaatcctgacttattatttactttgattcanggtgagaatgccaatctttaccctcggaagagaaaaaagataagaaggaaaattttcaatcatataggaagcataaaaaaggagagaatgaatatttccaatctaaggagaaaaggaagcaagataattcccaatcaaagagtgggagaaagcaaaatgaaaagaaagaatattccctatctaagaatgggagaaagaaaaaaaaaagaaggagatgaaggaaagaaagctcctgatcaaggatcgaaagaaaacagaaaaaatgtgcagagaggtctttggaccagacaatatctgaacaatacggaattgtcacctaattgaacaaagaaagaaaaggaaaccattacctaaaa

SEQ ID NO: 126050 - DNA, 446 bp, Glycine max
agctttctgactttgggctttccatatttgttcttgggcctacgcgcaagtccaagattagggtgatgtttttgtgataggatgggaatgcacatgccatcgatgaacgatgttgtttcaatgctggagtttgcgctgcacctgcaagagtacggagctgcacaacaataccgccactacccagtgatgggttgctgcagtcttggactactttcttcaagctaggttatggactcaaagccgcctatagtgaatcaaattaatccaacgctctggacatacataatcataatgattataatgtatacaaattaaggttttgaagaccaactaatagctagaagctcacaggttgcgtcaatcttcataatcataatattataatggcgacaacacacgttgcttttatcttctgtgcatgtatacacataccaccgtacttgcag

SEQ ID NO: 126051 - DNA, 426 bp, Glycine max
  unsure (1)..(426): unsure at all n locations
agcttaccgctntcaatatatggcctgaatgtttcctgagtggcaattgttattcctgcgccggcaagagccagcctcaacatcagacgcagatcattagtcgtaatctgcggttcaatcgcaaggtcgaaagttctcccgttttcttcaaatggccagcgataaggcgcaacctccggggactgacgccagccgatacacttatgggtatttcccccggaggcgagaaagcactctccacgcccggccgcaaggatcaggacgacgggggcaggcatgaatcctcctcctgatggagacgtacagaggcgacttctgccagcacggagagtgccagagtatgcgcatcccgggctttggggaatatcccgacgggtgcccggatttgcgttgtttcctccctggaccatcccagctcgtggagct

SEQ ID NO: 126052 - DNA, 443 bp, Glycine max
  unsure (1)..(443): unsure at all n locations
agctntntccaatcaagacaacaaatcatgttcattgtctttgggtttttcttttatataggaagggggggatagaaggggcatgtgattagaaggatacaaccaacaacgcacctgtgcatagctacttgccttatcttttatgctccgtagctattccagtttgtggatattatttgaatgagaaaatatgaaatttatatacattgaattccttgatgttgcatggaagtggtcacagaactgttcaaacaacaaataaagctcgtttgctgaattctaataagatgtaaaaatgagtcaggaaaaacataaagacactactaaaatagaaaacccaagaaaataaaacatgatgaaaaacatttacctcgataaattntcaagtgtatccatgttatatacaacaacaaaagttggatggtgatcaacatttccggaca

SEQ ID NO: 126053 - DNA, 354 bp, Glycine max
  unsure (1)..(354): unsure at all n locations
agctngagagatcgtctttatctttggaataccaaatcacatcttctagtgatcaccactactccacaggctatgtgaccaaagagtgccctcctcctcctccacatgtggagattgctacctctccacaactcatatttggggaggagattcttcacttcagccaccctcagcaccctctctcaatggtggaacttcctgacttgttcaatgtgtggggtgcaaagagtattgctctggaaagacgttngtttgccaacaatgtgactttcagcttcatgacttctgtgccgttggctcttctgctctcaaggcacaccccattcactcacaacactcttgtttgttccattc

SEQ ID NO: 126054 - DNA, 407 bp, Glycine max
  unsure (1)..(407): unsure at all n locations
agctggccacccagctcacccatgcgagcttaacttgcccaggcgagcagggttgcttcctccanaagcaacaaccttctataggaatcttctggagggcccaagtgggcctggttgctattcgcacccccatttttactaagtacacccccttgcctttttttggtgattctttttttgtaaagttacggaaacttacgaatttcgtaacgatacttgttttctttccgtaatgttacggaaccttgcggattacataatcatcccctttttgacttacagaatgttacataacctcactaattgtgcaacgatgcttctatttgatttccggtgtgtcacggaaccttacgaaatgtgcatcaatattttcttttgttttccgtcatgtcccagaatatcacaaa

SEQ ID NO: 126055 - DNA, 448 bp, Glycine max
  unsure (1)..(448): unsure at all n locations
atcctctgagtcacccgccgcatgcaagctnggagaggtngatggngacccggtgattatatgaacgaggagaaggctacgtacatgtacgtgagctataattgaaggtgggcaactggggatggtgtgcttatgcctgngcttgtggaaatgggatgtttgttttgtgccatcgccacctagtaccacatatgacgagttccccataacccaataagctcagtgtgagaaagcatggaagagtcagtcttccaacttttattagttgaccacagagtggtacctgtgatatgtcgcgggggtcaggagaccttgtggacgccaggtggggtgctattgcccaaaaccaagcttggccaatcccgacccaacccgggcatagtcagtcagtgagaacctgtgacgtacctaagcagacgagctcctggcagtcaaccaataaaagaac

SEQ ID NO: 126056 - DNA, 468 bp, Glycine max
agcttcttccacagggttgcaacagtaatgttatcttcaatttaacacatatcatgaaatgttattttatattgggaagcacaaattagaataagaaattacagaaataatatatgagcagagaacatgccagtgtcagtagagcataaataaatagaaaaaatataaaagaattaagaaaacatgaataccttccatgtgagtttagagttagatctacttatcaaagtttctttccaagtaacatgtagacttcttacctatgctttgtcttgaaagaaactgaagcacacctttcatgtgtaacatcaaacttaatattttaactggaaatggtataaccttttaaagcacatgaattgatttttcattcttacctctcttttgcctctttaaaaaggtcaaaactacatattggtactataaacacatgtcaaatatagatggacacagacacactatatctag

SEQ ID NO: 126057 - DNA, 362 bp, Glycine max
  unsure (1)..(362): unsure at all n locations
tctacacaagattggagctgcaaactgggtacccaccaatcatacttccactggtgccacaagttagggaaaatcactgtttgccgatggaacctaatccaaatttaattacggaacctatatctttgatcaaactgataagcattcagaatcttttgctatcgaattacccattgccttccccactgcattgagtggcatcatgttgagtcaccatcccaatatgttaaactacactgactctgtgatgaatagagaatctcctatatccctgcactataaactgattgatgggacacatgtcccaaacattgtcttgacatcanggacagctgcagacttaggtgctgtgttcaacgatg

SEQ ID NO: 126058 - DNA, 463 bp, Glycine max
  unsure (1)..(463): unsure at all n locations
tgcaagctntatcaaaattaggcaaacaaagganaggtgcattggttagcttatctttcaataaattaaaagctttctcatgcacatcggtccacttgaacaccacattctttttgacaagttcatttaaaggtgcaacaagtgaactaaggttcttcacaaatcttctataaaaacttgctaaaccatgaaaacttcttacctcattagcattcttaggtatagaccattccctaattgtctttaccttttcttcatccacacttattccttttgagctaataataaaacccaagaacacaacatattcatggcaaaaagaacacattttaagattgacatacaatttattttctctcacaatattaagaacatcatgtaaaagatgaacatgttcctctaatgttttgctatagatcaaaatgtcatcaaaatacaccacaacaaattttccaatgaaagc

SEQ ID NO: 126059 - DNA, 482 bp, Glycine max
  unsure (1)..(482): unsure at all n locations
cttgagtcacctgcggcatgcaagctngttcttttcttttttataacaaagattaagttcgtttttttccaaggaaagaatgcaatgagcaatgcaaccaatgaaaagcatggatgtatgcgaatgatacacagttgaagtattgcgaatttttacgtaggacatggggttgaatcaatttagattttcaacatggtccatgacatctttgtcaaggtgaaactagaagtaacaaggacatcaacagtcctaaatgtgtttggcagtagacgaagcagtgatgtaactctatctatcttttgccccaattttttgtaagatggttacttccatactacaacttgacttgatgaacttttttgtaagagcatgagcttggttcaaccgcataacccaagggaatggcaatttgatcgccgatacttcaacaacatttcatagagatgaaagaacccggaatatgtatgctatgcatggaaaat

SEQ ID NO: 126060 - DNA, 414 bp, Glycine max
  unsure (1)..(414): unsure at all n locations
agcttactcatcttntaccatctacttcctttatctaccaatgatgacaaaaaaagggccacgagtttcataattcttcttctacagcactcccagccaaaacttaagtggacggggaaaaggctttacatgttttagctatgaaatttgcatgaacgagcacgatactcaatgtcaagtgctatttgcttcctgctgcacccaggtcctttgctgactgtttgaaagctcaccttgaatgtcaaaaagaattgatcccacatgtgcttaagatcttgatctgcggcaaagtctcctcaagcgaactctttccttcaaggagtaaacacaacattaaaaacttgtaaattacgcatcaaatggttaatgcaaccaaatgcaaagttgatatgcacctcactgttgtcatgatca

SEQ ID NO: 126061 - DNA, 138 bp, Glycine max
  unsure (1)..(138): unsure at all n locations
gcttgggaatattanggaaccgcttgatactttgctatcacttgcggactacacacgcgcgcttgcttataggtgaagggtgggtctatctgatgttgtattcaaatgcacatgtcttaaaacccttcaaagaacaga

SEQ ID NO: 126062 - DNA, 444 bp, Glycine max
agcttgagtgagccaccgtagagtgagtctttcccaagacaagagtgaatccactccttggagtgagaaagcgagaaagttagagagcctctttgagagagaagataaatagcttgggaagactctatcctcaagtttgagtgagccaccatagagtgagtcaattttgtaaacacatccttgtaaccctactattcttttgtatagtggaagaatctccatattggagaatcataatcgtgtgttctcattactacctttaattacttagtgcctatcttaaacttcacgaagcgggaaaatctgagttttcccaacaaatactaagtcaagaaatcaagagctcacactgttataaatttacaactaaatacttgtgtctttgtctttactttgcatacaaacactcaaggtcaactatactttttacttattttaataata

SEQ ID NO: 126063 - DNA, 425 bp, Glycine max
  unsure (1)..(425): unsure at all n locations
agctntacgtgtntgatgcagcaacggggagttatgttctcctatgtcctactcaaatatggcatgtgtttatatactgcttttgagcttttccaatggcaaaacatactgtattagtgtattctataaatattttctggcgatgatgattctctttattttcaaaatactagcagaaaatgtttttttgacattttttgtaattactacacttctaagaaattcgtttactctcatacatgtatcaactatcgagtattgcttgttccaatagataacagagacttttagttataagcactgcaaagcttgatattctgactaaggcagctgaacattatctcatgatttggtagcaatactttaatgacgtggtggagggcgttatttgggctctataatctaaatcccctgcatattatgca

SEQ ID NO: 126064 - DNA, 379 bp, Glycine max
agcttatgctgcaaacatctacaacagacctcctcaacctcagcagcaaaatcagccacaacagaataactatgacctctccagcaacaggtacaatcccggatggaggaatcatcccaaccttagatggtcgaatccttcacaacagcagcaacaacaacaaccttattttcaaaatgctggtggcccaagcaaaccatacgttcctccaccaatccagtagcaaaaacaataaatagttgagacccttccgcaaccttcccttgaagaacttctgaggcaaatgactatgcaaaacatgcagtttcaataagagaccagagcctccatttagagcttaactaatcagatgggacgaatggctacataattaaatcaa

SEQ ID NO: 126065 - DNA, 447 bp, Glycine max
  unsure (1)..(447): unsure at all n locations
agcttgatagaagctgggcggttaatgccatctaggtgagtaggtcacacgggcccaaacttttgaaggacgtaacgacctgcagaaggtttatcaacaaagccttgcaacttaatgcatccgagtgtactgcatgaaatggaaacatgttcgatggtaagagatctattacaacagatgatagaccaaggccggcctgaggtcagcagtgagggggaagaggaaaaacatgtatatatgcagtcgacagatgaagaaggtcctaaaaagcctaaacctttggtaatacacttcaccagggacacggctccccaaagacctcaacacccctcggcagtgtcgggcggtagacctattccgtttccttacgagaacagtcacgcagttccgtggaggtatgccccttcgggcggtaggaaggaagaagtaccgatatanctcactatc

SEQ ID NO: 126066 - DNA, 355 bp, Glycine max
  unsure (1)..(355): unsure at all n locations
gatgaaatgatgtattttctaccatgatttaaagggtatatcccacccatactacttcctcttcacaaggcacgtgtgaggctgcaccaaatgatgaagtaatgatgtgaatactctgacagaaagattactggctgctctttaaactctagtgccaaagaagatttggcaaagcagcatgctacagttgcggaagaagctgtctcgggtatctgttgtttggccatcttgcatctcaataacttcaccttgatttgacaaacaagtttatctacatgataaatctgtngaggcattgagcaattgcaatgagtgttttttggctgatattgtgttgttaagtgttgtcttgcta

SEQ ID NO: 126067 - DNA, 466 bp, Glycine max
agcttggatttccttttagtagggaatctttccttcctaagatggagccaaacccagtccccctcattaagaactagctcctttcttcctctattgcccttagttgaatacacctttgtttggttctctatttgggtcttaaccctctcatgcaacttctttacaaactctgacctagattccccttctttatgtataaaagaagtgtcaagtgggaggggaatgaggtctaagggtgttaagggattgaacccatagacaacctcaaaaggggattgcttggtggttctatgaacccccctattgtaggcaaattctacatgaggaagatactcatcccaagacttatggttgccttttagaagagcccttaaaagagtggataaagacctattcactacctctgtttgcccatcagtttatggatgacatgtggtagagaaaagaagcttatttcctagcttag

SEQ ID NO: 126068 - DNA, 447 bp, Glycine max
  unsure (1)..(447): unsure at all n locations
agcttggctttacatgaaagccatagtttgattgtttattgccacttagctaaaaagcttaccttgtgcatgattgatatatccctcgcacccattttaaactaaaagtatgattgtttgattgaaccttgagcctgtacagctcatctccttgtatctcgtcttacgttgtacgacagcatcattcataaaaggaaattttggttcaaagaaaattatcccaaatttgtgggaactattgggtgaaaacttgtaatggtaagaaaagagcaacacacacagtcttctaataagcaacaagtaaaaacaaaaaacaatggcaagtctaaaataaaagtgtgtgtggtgctatttaagacaaagaaaagctcagtgaagaaatgcaagtaatagagctggaataaagagacnaaggctgatctatggatgaatgctcctttataacct

SEQ ID NO: 126069 - DNA, 158 bp, Glycine max
cttgattaagtagcaatccccgcttcccatcacgagatataaaatacattcagagacatatgtgtcaagcctgactaccactcaagcggaaaagcacggaatccttcctcaacagaacaattccgcccgttggtgtgaatctaatcatccaaaggcgt

SEQ ID NO: 126070 - DNA, 421 bp, Glycine max
  unsure (1)..(421): unsure at all n locations
tgcgagcttacaccatatncaccatatactataaagtattcattccccgtatgacgttttctttgcgaggggccacaatatatgtgttataattgcgccaactattaatctataagcctttcggacttgcagttgtaattacgtacatggtaagcagataatacacggttcatgatctttcataaaggacgtgtgggtaccttccaacaaattaattcatgtcatttttgggaatggaattggattatgttgaaggaagagagatataaccgagggatatatcactgctaatgactgtgctaatcatgctggtgaaaaatgagatcacaaaacgtgatttaataacaagtgaatatgccttcttatttgaaaattgcactgtcaacaaacggaatgatccatgacattaactcttacaaaa

SEQ ID NO: 126071 - DNA, 413 bp, Glycine max
  unsure (1)..(413): unsure at all n locations
ttaacaccttcatgtaccgcgcgactggatacattcaccataatgaaaccagaccagccaaccagatcttcctcactagatgaacaatctaatgaaccattatgtcaaaaaatgagggaggaaaatacatctgcatttgacaaaggacaatggcagcctcgttctccagatcatccaatcttctaggagcaatgactttgctacatataacattacacacaaagcacaaatgaagtatagcaacccaaactttgtcaggcaagattccccgaatcgatacaggcaatagatgttgcattaatacatgacaatcatgagatctcaagccaaccaatntcagctcatcgacagatacaatgctctcgatatttgaacagtattcttgtgggactttaacattacatacacattga

SEQ ID NO: 126072 - DNA, 459 bp, Glycine max
  unsure (1)..(459): unsure at all n locations
agcttcctctntaagcttcttatccaaggcactcttttggtggtgaagcttctccttccatggcttatcctctagtagatggcgcctcctctcacctcttatcctttatctttcgctgcaactccatggccgaaaatcaccattgaaggacctttttgaagctcaaagacccatcctccatagaagcttcacaagaaagcttccatcaatattatacttagactatcctaaaaaatgatagctttttcaattggaaacccaagattgctaaccagacctttaagttagatcccatcctttattgcttctattagagcatgcactctacccttgtagtggataaaaccacaatgggctaaagagtntccttccaactatcaagagagttgccagtcatgaatgcgcaccttgtcacagttctccttgcattcaaatctacagcatagtcaaaatctaaat

SEQ ID NO: 126073 - DNA, 400 bp, Glycine max
  unsure (1)..(400): unsure at all n locations
agcttggagaagaaacttcttgatcagtatcactctccaacatgttaggaaccatatctgaaactggaattggaacaggactaggtgatctatctctcttcctagcagatctcaagttattctttaacggaattgggggcagtgaacttagccttcttaccgcgttactagcatgaccattttctccattatgttgttgatcatgtctactcaacaacaggtcctcatcgaattcaaaatcactagcattgaaatcagaccccaacgtgagaagtttgttcttataagccagggcttgatactcaagagaagtaatttccatctccttctgatacataagctcttcanaaacttcaaggctggcctcagcatgacctatcttctcctctgccattctcct

SEQ ID NO: 126074 - DNA, 423 bp, Glycine max
  unsure (1)..(423): unsure at all n locations
agcttacacactctccactccacctctatctanatccatggacactacaaggttatggtgatcacatcttantttttcagcacgggcttttgttgtggtgtacaaagccaagggcttgcaacttcactctcccttcttttttgtgattagaaaatcagtggtatgggggcctttgtgatgaactcagctgcccatggatgcctattgagtattaatcctacaatgcattgcatgcatcaaagttctttctttttttcagttgtctcacttgtgtctgagctaatgttcttgattttcctcctcagcatctttcaaatgtctcacctctccaagaggaaaacattgatgcaggtcaataatcatttgcaatgtgttctataatttaaaaattcttattcaatacttattaattgttgtttacta

SEQ ID NO: 126075 - DNA, 331 bp, Glycine max
agcttgtgactcgtaagttccatatttaattttattatcttccaacaaccaaatttcttgtctaaaatcagaatctcttggcaaatctcaaccactgcagattttgattgtatttttaattgtatataattgaacctgaaaacattcaaagaagttctcttagaaagttaatacaaaaatcaacccaaactgtgcaaccaatgtacagaacgagagagtcttgatattgtagaatgtgaaaaatatgtaatttctaacattgacaaacaatatcagagacaagaaaaacaagggtggccctctgcagtaattgaaattgagtgagtgtctg

SEQ ID NO: 126076 - DNA, 427 bp, Glycine max
agcttatacttatgtggcagggctggctttctttacttactagactcccacgcgagctctgaccactgttttgcttcccgcgatgcttatttacatgttcgcctgagtgggcttatagcctaaaccatacttcccacgatttccttgggtttttatcaggctagttatgccgccattgtctttgcctaaacccatcccgggttcataaccgttccccaacataactcgggccattattaccgttgcatccgacaggcaaggttgcccaaagagggagtccacggaggaaatgctgaccacctcaaaagactgaaaagcggtttctaacgattcttctgcggcttccacataaggcatggaggatgggcagcttaaccagatatcttcctcgcctgacacgatgaccaagtgcccctccactacgaac

SEQ ID NO: 126077 - DNA, 383 bp, Glycine max
  unsure (1)..(383): unsure at all n locations
agcttataatatatcgatacgctcgaaattatacatcgnaaactctcgtgaaattccaatggtcataacttttcacacggatgtcccgatcaggcaaatcacatatcgagtcgctcaaaactgaacaacggaagctcttgagaaattcacatggtcataactcttcacacggatgttagaattaggcgcatcacataataagacgctcgaaaatgaacaacggtagctctcgagaaattcaaatggtcatcacttttcacactgatgtccgattcgggcttataatatattgatatgctcgaaattaaacatcggaagctctcgagatattcaaatggtcataatttttcacatggatgtccgattccggcgcataatatgtc

SEQ ID NO: 126078 - DNA, 407 bp, Glycine max
  unsure (1)..(407): unsure at all n locations
cttgcgctacaacaattggcagatgacccactatccacaatgagagaacaattcttgtttaaaaccttgcatcttgtatgaaagatgttctctctttgggtttgggttaggtcaaaagattgactcccaaggagccttctcaccattagaagatcaccttcttcataggggtaaaccttttcaatatgcccatcacccttggcttcacccatagtttcacttgatgaaggagaagaagtatcctcctcttggctattatacatgtcttgacccctcatgatcatggttttctttgtggggcattaagaagcaatatggcctttggagggatttcctctatgttnttacccttatcatcctatggcttagaaggtggtactcctaacacacttagagcttgttccttc

SEQ ID NO: 126079 - DNA, 369 bp, Glycine max
tggaagttgcttcttttgcgagcaacaaaaataaggcacatgactctcatgacgatcaccaaccagaataagtgtgctataagaaaactaccaatttgaaattgctacgtggcaatctatatacatgcagtaggcatggtgcaatggaccacttcctcttcatcatacctaattctttctttgataatgatcactcgatcattttattagtcttctcgtctgcttttattgattgatggaagctcttgagattgaatgaagataagggtgaggagtcgctgtgcatgacaagtgaaactgcaactgaatcaaatatatgaactctctagaatatgagagctattatacgtgtttataatatattaaaat

SEQ ID NO: 126080 - DNA, 328 bp, Glycine max
  unsure (1)..(328): unsure at all n locations
tctgtgaataaaatcctagccgatgcgctttcgtaacgtttccgtgagtaattacgcgaagattcttcacccgtcttcaagaatcatcggtcggtcttcgttttcttcagtcttcaacgggtaagtacctcaaaccgagcttttcaattcattctatgtacccggggtggtccacattgtgtttcatgtnttttcatttactttttataccaccctttgacgtgcttaagccctttatctaagtcatttctcgcttaatctaaatatacaaaaaattccaccgatcgtttgaattgtatcatccattattntcacttgaaatgaattc

SEQ ID NO: 126081 - DNA, 468 bp, Glycine max
aagtcacctgcggcatgcaagcttgtatttcctatcccacgacagtgagaacatatctgtttatttatagagaaaatagttatgattacctgtaattgattaaatagtcaatgcaatcaattatttcaaagaagtaacaattatattatcatttcaatcgattaaagtgttctttccaaaatctggaaaactctcaagaacaatgtaattgattatgaacaaagtaatcgattatgattatccggtaaccgattaaagcggagactcctgaaaaaccctcattgtctgactgacagactaatcgattaggcttagcttctaatcaattaaatcgatatgaaagtctctctccaagctacacacacttgcataatcgattacgattagcattgtaatcgattaaaatagagagtgttatgcactgaagaaaacttctaagattggaaacaatcttcttactcctacatg

SEQ ID NO: 126082 - DNA, 449 bp, Glycine max
agcttctagccaaatggacttaccttgaattaattcctttgatagcccttttgagccttgtttccctttcattgttttgaagctcactacaagccttaaatgaaaaaccatgatatcaccatatccttaaggaattttggagctttggaattgttttgggaataagtgtggggggttttttgtttcattggataacttgttttgttggctatgcttcgtgatgtattttgggccatacttgatgtacattgtatattgtgtaaatgttggacatgctgaatgaaatgttgtttctcaaaggctatagagtaaaaaaaaacatcgaaaaataaagaagaagaacaagaacagcaataaagttgagtgaataagatcttaagtggcacaagaatgatgaaactctcggctctactctttatgcttaatttttatcttcacttctttttatt

SEQ ID NO: 126083 - DNA, 461 bp, Glycine max
  unsure (1)..(461): unsure at all n locations
agctntnggcacaaagaagaagaagaagttcaaagagattcaaggcttgtaaaggattgtaatgaattgattgaattgttaaaaagattgattgaaaatgaaaaacaaagccttgcttttatggactcttcatgtctggtcaagaggaccatttagaagagttataacttttagaaaaaacttaaaaccaatttgaaaaagtcaaaaaccatttgaagagttacatcttttgatttattcagaaacaatcattggtaatcgattaccaaatcggtataatcgattacacaaagcttttatgtgaaaggatgtgactcttcacatttgaatttgaatttcaatgttcaaaggaactggtaatcgattaccaaaacattgtaatcgattacagattttttgaaatcaattggaacgttgtaaattcattngaaaactctttcaaattcattttgctactggta

SEQ ID NO: 126084 - DNA, 417 bp, Glycine max
agcttatcattcaagaatgcatagttttcttgtaattctcccattcaatccatagatcatgtttacttgcatccatgttttcataatcatgatgagtttgtaacactctctccatagatcatatctttcttcatgtaggtgatcatgaagttctttgagttgtttcaactcaacttgtaagtcttctagttggttttccgacttctgaagatcttccaaaaagtcagactcttctatacaaattttcttattttcaagatggagctttgtagtctttagtttaggatcttcaaagacaacatgcttctaagtgaagaattctacaaaactatttttcctttgaagttggttatgaatcttttgagaggagttttgaatattttcttaaactttgattagctttggacaacatgaatg

SEQ ID NO: 126085 - DNA, 430 bp, Glycine max
  unsure (1)..(430): unsure at all n locations
agcttctacacctatntttactaaattctgtatctaatatagcttgctcattccactttgattcctttggttaaaaatagtcctttggatgtgtgggagatttggctggaaaagcttctacacccattttttgtccatgctcagcaagcacttagctgttcatggtctagtcttctacaagatggtagagcaatggttccggatgctcatggcattcttagtggatcacacttgaaagtgtgaagtgatggaggaaacaattccaggataatatttggctgattcggtactaggtgatattgcaacataactaacgcttaatatttgaagaagctttataaaaatccatgttattcataattcacatgcttcactgcttaatgtttgcttcaacagattattctaaggattttgtaatgaaattattatg

SEQ ID NO: 126086 - DNA, 399 bp, Glycine max
  unsure (1)..(399): unsure at all n locations
agctataacctcatcgacactcactgtctttatatnttgtagccaatccaatccttgtgttcggactctcagccacttatgatagccgccgatgatcccattactgcttcccctaagctctctgtcctttcttcacgccgcataccatgccttgcgaactccttggagtaccctcgcgttgtggtcactaaaaccccgtgcgatgaaaggcgtgatgcattcgtctaatggcgctcctctcatggggtagccaagctgtcttatggtgagaacgggattataattaatacaaccccttgttcccatcaagggaacatttggacatccttcgcatgaagatagaatcctgattcttccttccttctagcgagggaaccaaataacagacgccctcccatg

SEQ ID NO: 126087 - DNA, 441 bp, Glycine max
  unsure (1)..(441): unsure at all n locations
agcttattacgtgttgattattataacacatacaacacatatatgtatatggattggtaaaataaatgaggaattaataattccaataataaaattaaattgcagaaaataaatatattaagattcaacactaaatatgtttaatgcattgtaagtctaataatataatttgatttaatatatatgtgttgtgtgtcatctaaatattaatatcatgttatgtgtatatgattcatgaggtgtgataacatgttgtgtcgcaataaatatnttgttaacttttttaattgaaaataatataatttgatttaatatatatgtgtgttgtgtcatctaaatattaatatcatgttatgtgtatatgattcatgaggtgtgataacatgttgtgctcaattataacattcgtgatgagataagcgtatgtgataaatgagtatg

SEQ ID NO: 126088 - DNA, 407 bp, Glycine max
  unsure (1)..(407): unsure at all n locations
agcttaagatgtaattaagacccctgacatcttctgttcgtgttngaggcttgatagaaacacacatgttagatataataatatgaggaaggttgcttctcgtgcagattccagggacaactatttatactgtcctagggctgtagatctacaggatgaggatttaaggcattttcaatggcattgggaaaagggggagcctgtcattgtcagcaacgtgcttgcaaaacatctggtttaagctgggaaccacttgtcatgtggcgtgcattccgtcagatgactaagaccaagcatgaacaacatttggatgtgaaggcaattgattgcttaaatcggtgcgaggtttgttaatctctcaatcttgaaccttganggaatttngcacaaatatcattgctcacatt

SEQ ID NO: 126089 - DNA, 445 bp, Glycine max
  unsure (1)..(445): unsure at all n locations
agaatgaaaaatggttgatttgaatcaagtgagatgtattaaggaataaggatgaagtanggaaagttttggtcacaaatcaagatataaaaaagagatctaagagttattttaatatttttataagcattttgatgatggactgggattgactttgtaatagggaaggactagtaatgtaggaggacaaacagaatttggcttaccaccgtagaattcagattggagtggtaaaataggtccttaagaggatgatggatggatagtggtgaaatgattggtctagatggtattcctattgaggtttggaagtgtgtaggaatctcgagttaagaatattntaagaatcttggataagactactattgaggtttggaagtgtgtaggaatctcgagttaagaatattntaagaatcttggataagactactattgttcttgatgc

SEQ ID NO: 126090 - DNA, 455 bp, Glycine max
  unsure (1)..(455): unsure at all n locations
agcttcttatccacgggttatcctgagggttatattctttcttacatggcttattccttagaggatggcgcctcctctcacctcttttcctttgncttccgctgcatctccatggtagaaaaccaccattaaaggaccttattgaagctcaaagatccagcctccatagaagctctagaagcaagcttccatcactatgcgactcaagttacaagtttattttttaaccagcctgatatcaaaattacatctttaatcatgtatctgatctataaaagatgtcattaataacaaaagataatgagtgtttcggagcaaaactagcagcagctgaggctcaaaggaagagtatctcatatgcatcacaggaaaaatgcgatgaagaataccgttatcatcagaatttgcaatggtttcacgcaccaacggtctatgtgtagagatgactacttggg

SEQ ID NO: 126091 - DNA, 394 bp, Glycine max
tgccttgctccatgatatatatgagggactctttgtttctatgaatgacaaattccttgggataaaagtagtgttgccatgtcttcaaagcccgtactatggcatacaactccttatcataagttgaatagttaagggtaggaccacttaactattcactaaaataagcaattggatggccttcttgcatcaacacatccccaatcccaacatttgaagcatcacactcaatttcaaaagatttttgaaagtttggcaacgcaggaatggtggcattacttagcttctgcttaagaacattgaaagcttcttcttgtttctctccccattagaaaccaacattgatcttgagcacttcattgagaggtgctggcaatgtgctactatccttcac

SEQ ID NO: 126092 - DNA, 454 bp, Glycine max
  unsure (1)..(454): unsure at all n locations
agcttgcggatntggtcttcgccggcgaattgatctaagtgggtctaaaaagaggcagatctaatcatcccgctttgatgaatggaaaaactggggcaaatgaagaagatgtgaatgagggagaaacccttgctatgattgtcattcctacatggtcaaatatcccatcagcccaacaatgtcattactcagccaataacagtccctctcacccaatcatccataaaagccatccccaaatcagccacaaggcttgcctgcttaccacacccccaatgcccaaacaccacctatagcgcaaacaaaaaaggaattttgcagcaaaaagcctgtaggattcaccccaaattccggtgtcatatgctaacttgctcccatatctacttgataatgcaatggtagccataacccctgccagggttcctcaacctccatttttccgaggatacgactc

SEQ ID NO: 126093 - DNA, 429 bp, Glycine max
  unsure (1)..(429): unsure at all n locations
cgccgcatgcaagcttctttgggacctcgaacaagcaattatctcctctttcagaaccatgctatgtactcgcgactggtccctttcttcccttcgcaacttgagttcactattgctaccccatagagctccgcaaatttgatccggtcatactcttccttgcgagccctcttggtctcttgttcaagggctcttgcggtaattgcattctcttcccgtaacccggcacactccttccgaacgtgtgtagcggccaacttgaacttctccttggcaaggtttgcctttcctaactcgcttttgagagctnggacttcttcgtcctcttccggtgcttcaaaactctcttcgctgacgacgtttatactggcgagccaattaaacctcgtatatgaactttcaccattcgtggacccaccaatgatgcca

SEQ ID NO: 126094 - DNA, 452 bp, Glycine max
  unsure (1)..(452): unsure at all n locations
agcttgacaaacctgcagctcttgcacctgtctatgttaccaccctcaatatcgggcaacacctgtccaagcttggggggcttaacaaactcgcaaccctcctacttgtcatgacaactaccctcgacaccagatagtctccatcgacataagataacctctttcacccacaagctgactcagagcttgngggcttatgtactactattcatggtccacaaatggatgtggcaagcaacgtggcactccaacacacatgtcagccctccatgccagccttggcacaagatcacagacgcatcgcccttatcagctaggctgttgggccaagaggatatctctaatacctcattatttgaatattaattagaatgtcacaactctcttatcaagtggtagatacctaattatctatgagataaacattatctcatagtcatagaatatctact

SEQ ID NO: 126095 - DNA, 380 bp, Glycine max
  unsure (1)..(380): unsure at all n locations
agcttcccgcatccatacttggtatgacttgattactgctntcctaaggcaatatcagtataattccgatatggctcccgatcgcactcagctacagaatatgttcaagaaggaaggtgagacctttaaagaatacgcacaacggtggagagacctgtcatcacaagtgacccctcccatggtcaaaagggagatgatcaccatgatggtagacaccttgccagtgttttactatgagaagttggtaggttacataccgtccatcttcgcggacctattgttcgtcagggaaggaatctaagtaaggttgaagagacgaaagttcgattacgtttcctccacaagtgccaatgcttaaaggatcggagcaactgggacaa

SEQ ID NO: 126096 - DNA, 365 bp, Glycine max
agctttaatggaagtcaagagcatgatattgcaccgataccattgactggtgagcaggtatatcagcgggttcaacacctgaatactgtatttgggaagacccaaaagaaggataaaagtcagcgttgcatatggaagaagaggtctattttctttgatcttccgtactggtgtgatcttgacgttagacattgtattgatgttatgcatgtggagaaaaatgtttgtgacagtgtgattgggacactccttaacattcaaggcaagacgaaggatggcttgaatacctgtcaagatctagctgatatgggtatacgatcactgttgcatccaaggtctgatgggaagaaaatttacttgccccc

SEQ ID NO: 126097 - DNA, 424 bp, Glycine max
  unsure (1)..(424): unsure at all n locations
agctngacctagntaaggttattgtagttttcattanatgacagnacatttgatttatgtattgctggtttatgagaagagctaaaactactccgttgcacttcggctacatatacctcaactatgcttaagggaagaatcattggacattatgttgatcttaataaaacataaagctaatgtatcaaatatgaagatcaaatatcattcacagtatccaagagatggagcctaaacaaataaatgagaacatttaacaactgaattacctcacttaatatgagaacccctttcttggatgcttggcacgcaacagattcatagctgacaagattcattccatcccttaaagatgtaacaagtgctacatctaaatacgatgtgagtcagactggtatggtacatatcatggatgctgaatact

SEQ ID NO: 126098 - DNA, 306 bp, Glycine max
tatgcaatatgatgtctatacccagacggaggtcagttatggcaaaccatcgaggcggttccggcaattttgcagaagaccgcgaaagagcatcagaagcaggtaataaaggtggacagcacagcgggggtaatttcaagaatgacccgcagcgcgcatctgaagcatgtaaaaaaggtggtaagagcagtcacggcaaaagcgacaactagccgggctaatcaatgacgaatgcatttttgtctgtagctcgtcaaaaagccatcaccgccggctacccggtggttgatactgatgacaaatgta

SEQ ID NO: 126099 - DNA, 396 bp, Glycine max
  unsure (1)..(396): unsure at all n locations
ttctatgtggttagacacaacattgattcttaaatgttagatatgattatgtgaacctaatgtcaatgcacattttctcatattcaaaagatcattacttaaataaaatcatttctcagatactgttattatgaaaaactcatgttaagccatgttaatgcaatactcacaatgttgttcagaatgttatactaagaaagacattacttagaatgttgtttccatcttttcatgcacaataatattcttatgtttaatgaaaaccttcttatgtacgcactctgatacaaatgtaatattcaatacaataaatagaataatgtaaaaggaaggccagaggtgactaaacataatgatctntatacttgatcaccccaaccttgggtcacacccaat

SEQ ID NO: 126100 - DNA, 286 bp, Glycine max
cgagcagcaactaacggctctagagcaagggaaagattttattcatcagagaagacaccggggggataggagactaccgcgaagaagccaaagcgacatacaccctatggaaagccacgcacagattagctgatagaccaacgaaattcgacgagaaagtaatacaaaaaggacccaccaaccaaacaacccccaaccacggaagcaacaaggacaaacctgcacccacgaaggcgacaaagggctgcgggaacaaccacaaacaaaactcacacgggatgaggaa

SEQ ID NO: 126101 - DNA, 455 bp, Glycine max
  unsure (1)..(455): unsure at all n locations
agcttatgtcgcactttcaactgccaaagcgaaattcatatttgcanagaagtgntgggctcaaagtctttggatgaagaaacaccttgaagactntggagtatctcttgatcacattcctatgaaatgtgacaacacaagtgctattaatctaatcaagaaccctgccatgcattctaggactaagcacatagaaataagacatcattttcttagagatcatgtgtctaaaggtgatagctgcattgagttcattgatagtaagcatcaactagtagacattttcactaaacctcttactagagataggtgtttacattagaaatgaactaggcatattggatgcatctagcatagaataatatttttgttggcatagtgtgtgactcacattgtcactgatatcatttggtgttggttagtgtatgtgttagcttagtgggtcatgtgcgtac

SEQ ID NO: 126102 - DNA, 346 bp, Glycine max
  unsure (1)..(346): unsure at all n locations
agcttncgtatttacctcacttcnacctattttggttaaagaagctcactttagttggtgaaaatctttctcatttctgcattatacttgcgtagtccacaacctaaccaatatcctgcattttcattctttggtgtggaagaggtgttcacttgtgttgcttgaagaacctgacttcacttgggaagatacttggtataaatgatgtgatgctcagagcaccatatcctctgttggttctatctatgtactcattgcagaatcctatacactattctggtgatatcgtcgctccttttcaaagggtcatcttattagcatgcttgatgattcatgagtatctatg

SEQ ID NO: 126103 - DNA, 458 bp, Glycine max
  unsure (1)..(458): unsure at all n locations
agcttcttagaatagtcttaatagctttaacttttattcattgatggncccccagcagtgttcacagcagggtgccactcccaatcaaactctggatgaccccacaaagcctggcaagctgccttatcaagtaaaatctaaaaaagatccccatcttgcaatttatgaaccaacaagaaaacaacaattttgtatgtaagttntgaattatgattggatgaaacagggcattaagatccttaatgggagaagagtggtagtgtaataagtttgcctttttccaacttccccagtccatataaaaagaaattagaaaaacatataactatagggaaaaaaatacatctagcactgtatcgaaaccattagtagtgactatatccatgcccattaaagagcacacaaggaagaatattctctagaggatacatttactatagggtgaacgacttaaatct

SEQ ID NO: 126104 - DNA, 443 bp, Glycine max
agcttgatgaattctatgtaaagactgaaatcatgactttgcttctcagatagactacaatctcctacctaagacctctagtttctattccttggtcattggtattattgtgttttaaatcatccaagtttgacataggttacaaaattggtgtaagtcatgggaggaacaataaaatataagattaagaagaaaacaacattgccttatttttttctatcttctttttattcactattgaagttatgttttggaaatttgctagaaatattagataggaactgcaatttattttgttatttcaaatcatccaaggtgggattgttaagttggttcatgaatattttttattactaggaagatctaaacccttatcaattttatatgaatcctcatagaataagaagctttagcgtcttagagaattcagtaattattaccta

SEQ ID NO: 126105 - DNA, 439 bp, Glycine max
agcttcctttacaacaaacaaaagaaaatgttgtataattgaagaaatacaagtggtggggatgtctcctccacctctaggacctcacaatcactcacaaactcatctcaagctcttaggacgacttcctcttcaaactcgattctctgcaggtcttcacacagcaaaatctttcaaactctctggaacttggacctttctctctctagaaaaccctagacacgcagaagcttcaagaaaaggctcacactcccctccaaaatctgatttcattcttaaataggtggctttgttcgtgcttgcacgcttaacgcaactctggaccgcttagtgctcattagtggattttggcttaacacatgcttttctcgcttagcggatggactgaagcggtgcgcttcgctagatgacccttcgcttagtgcaaatgcacaactca

SEQ ID NO: 126106 - DNA, 360 bp, Glycine max
  unsure (1)..(360): unsure at all n locations
agctntattcagcagtcaaagggacagcttgttatggactaacgcaaangtgcaaagaatataaatatcgtaatcactcccgtctctgctcctctagatatcagatgagagcttctccatcagccatggagagttgggtacataacaatatgatcgtcattaaggtgtatccaacacgaccataaataataaccctcgctaaatagtcatcttgaacaggaatgactgtttaccttgcatacgaaatcattaacagtgcgtttgctgaattatgtcatattgagcataagaatgacgacataatataagggccatactcaaaagcctctggttgaacaccgatactgccaagtcatagac

SEQ ID NO: 126107 - DNA, 400 bp, Glycine max
agcttatccggcctcccatcagtagagccttcattgagaaatactgcatgcccaggtatgtgcagggtcaggcgccacaccagccagaggaggaccagctgcaggcagttgcagatgcaccattgccacctctataggagacaccatccctatggtctatctctgccacttgtggaggatagaactccagatgaacacatacatgcaacatgtgactagccagcaagcggctaatcacaggaggcaggtgcagctgaatgagacattttaccggtacaatatgcaccagtagagtcaggaccccaatcctttcccttggcctactctcgagcaattcggggccaccgttgcctggcccagagatgaggccaattttgagacacaggcaagacccacaggg

SEQ ID NO: 126108 - DNA, 361 bp, Glycine max
agctttgagataggaatatatttttattcttacatataagcacctactcataatagcaattatcctagaccaacaaataacaatttgttagtcatcatataacaaggtaattgaaaggaaagtttcagccaacttaatttaaaagagaatggttttgatgttgcctttttcatgatttaagtgcctagatctttaaatatggaagtcagacttttgctttctgcttaatcttcatgtgagaggttctcatcgctctcataatccttggaagaaagttgatctccttcttcgaaccatcggatgagtcattgtcatactaagcaatatatgccatcgtggatcttcttcttcaggcttttct

SEQ ID NO: 126109 - DNA, 158 bp, Glycine max
  unsure (1)..(158): unsure at all n locations
acttatgagaaagtttgggctgtgctagagagaaaaacaaacgaccaaagtgaacaaagagtcaattctanggtaaaattgggtgttgaggagtcaaattctgattcggtggaattttatgtgtagaatcagtttgagcaacgttatatngacgttat

SEQ ID NO: 126110 - DNA, 352 bp, Glycine max
ctgaccccgctccagacagtgtatgataacattggcttaaaatatttcatcattattaggtataatgcttaagccatttgatttctcatctacaaataaattttgaatgatggttgtacatgtatcaagcctctttaacaagtgtcaagactctctaattctatcttaattgtccatcttcttataagaagtgaaatgaataagctaagaagccgccatgttcaactccacaggatgtgtgaacctataaacatgtatatttttgctacagtatagtgtactttgggatatggtacatacactatcattgctactctacataactaagctgcttcatacacgagaaatacac

SEQ ID NO: 126111 - DNA, 234 bp, Glycine max
aagatgtttcaacatcttccaccccgaatgtttttgtgcctgatgttgagaaaagatgtccaacatcttccggcccaaatgctgaagccctcccttcacccagtgaagaggaatcaacagaagaagaggatcaagcctcaaaggagactcctgcaccacgggcaccagaacctgctccaggtgacctcattgacctggaagaagtagaatctgatgaagaacccattggcaaca

SEQ ID NO: 126112 - DNA, 252 bp, Glycine max
  unsure (1)..(252): unsure at all n locations
gatatgcttatggacaatacaagagattcttttgtagatattgtcaaaacatataccctttacttttgaaaaatattgcaaactcatcttttttttcactagatagctatttttagctctaactaatgacattgttcatgagttgaatgaattcattatgctattgattcctagagaatcaaatacctacttaagttttgatgcaccatgttcaacaaatggaaatatggatacaccanatgatgtacatac

SEQ ID NO: 126113 - DNA, 309 bp, Glycine max
  unsure (1)..(309): unsure at all n locations
aattaggctcacatagacacaaaacatcattgttagagaatattttattacatcactgtctgtaaaaaacccactattacctatgctgcaatttacttacattttattgttttatcctagactttagttaatttctgttttaaaccatcagttatcaatgtttctttcaacaatgccttaattatgaaaataacccggtcttagactagttccctgagttcgatactcggattcatccattntaattntaaatactcgatgatccagtacgcttttcggcanactagatttcccttgaacatatttgta

SEQ ID NO: 126114 - DNA, 257 bp, Glycine max
  unsure (1)..(257): unsure at all n locations
attttctgatatcttgctatgataactccatctaatgttcanatacattttattcttctcttttgatactgcataccnttgtganaggcaagtgatgagggcattttactccattctcttatcatgcaatcagtaacttttgtagcatacacctttgtacatagtcactgcatgttgttgtcacttgaggacaagtgaattgttctctttttgcttgaggacaagcaaacctgtaaattttgnggagttgttagttg

SEQ ID NO: 126115 - DNA, 301 bp, Glycine max
  unsure (1)..(301): unsure at all n locations
gtcggctcggcgctaacgcacgatgaccgttacacacgtaggaatttggctaaagcgttntttgcttgcggatgactgaacggtgccttgatacctggacgggcgtcagcgacctgaagcntatttctttggatcttcccgcgctaccacgaggcgcgctacaagctcgctagccaatatggttagcgagaaggaaacacatntgccattgctataactgaataaaaaatgtattacacacaacaagataatatcataccatataataaagactatatatacaacacttaatgagagtgaa

SEQ ID NO: 126116 - DNA, 374 bp, Glycine max
  unsure (1)..(374): unsure at all n locations
attatgcacttacatgaacagtcacatttgcatgcacaacccccaataccaaaccaatgggctttatatgatatatgcccccacatgataattcacatgcacaatcagttttcgaccaccattattctcaatgtattccacgatatttntattaatttcatcaagttctttcgagtacaaatgtttacgaagtagctccacaatgttcatgctaccactaatcaattctctacaccaccatccacatacaacctacgcgcatttgaatataattgtttctaaagctcattctattcttacaccagtaatattgatatattgatgacatgatgttatagttatatgataatatgatgatatgattgtagaggcac

SEQ ID NO: 126117 - DNA, 310 bp, Glycine max
  unsure (1)..(310): unsure at all n locations
ggggatttgatactgatgatgtggtatttatgataatgtgatataatgtgacgcgctatcacgatatattgaaaagaatgatgttgtattaatgataggtgacatgactgatgctttcgacgatatattgaangagatgatgttgatgttggtatgcattgagatagatgatgtaatgatgatatgccttagatgaatgatttaatgatgatatgacattgaatgaatgagttgtgatatatgcattgaatgaatatgttgtgtgaaatacatgaatagatatgtatgtgaaagcatggatatttgtgga

SEQ ID NO: 126118 - DNA, 250 bp, Glycine max
ctttaccactctaatccccttgagtctaggcattcaagaatatggcccaacaaaaacaatcacctatatgtgaaggcatgctcaagacacgacaggtaaccaaaaaagctacatgttttggcacaagaagaataaatcagattagaatcagaacaccttctacaccatatatacttaagagattgtttaaagtctcagctgacctcacccaatttttttaattgcttacactcgcttttttttgataaaa

SEQ ID NO: 126119 - DNA, 388 bp, Glycine max
tttccctacttgccaccaccactaccaatgaatgttatgcaaaataatgaaatttcttctagtgaaaatattcaaaatacttcaccatttttttctactcgccaccactaccaacaatgatatttatgcaaaattatcagactccttccactgaaaattctcaaagttctgagagtttttcttcaatgccacagaacaaatcttccatgtttcgtaactctcccaatagttctagtggtccacacactccttcaaatgatgacgttgaaacgcaatttccaaattctctactcaaaataaaaacatcacattggaacgaggagaggtttctaaaaaaacagcccaaaacttttgtttctattgaagaggatacacatcttattggtta

SEQ ID NO: 126120 - DNA, 314 bp, Glycine max
atggatatccatttaaactactattttccttccaaactaccatcgagatacaatcttaacacatcacattgaatatcaattagacagcatcaatctctaacacattcataagacaatcaaattgcaaagacattatacacagtgacactctatactatcaacataatatgaagagattaactcaacaagacatcattatctataacaatatataaagcaactcattcagaacataaagaatacatctaaaaagaatatatcaccagtaacattattagattgtattaagtctaatttttatacaaaaagtttat

SEQ ID NO: 126121 - DNA, 469 bp, Glycine max
  unsure (1)..(469): unsure at all n locations
agcttctcaagcaagctagcatcatgtgctctttatcttcagtangnngctcttanacctccattaacctccattggtggttcttcatttntctacatgtatatcctctcatgtcttgtgatgaatggtgctacaagattttttataatttcaaccgantaaacttgctttaaaagctgcatctgatttctatgcgtcaaattcttggtcttggtcctgaaccatgaattgtgttgagtttaagttcctttgagtattgtctttctattttctgcggctggaacctacaccataacattcttactaaaacattataggagaagaaaacctcacaaatctagagtgacatgttcacctatcgtagttttgtcacaanagtcatgtctagtcacgaaacctgcacataagattcttattgtggctgaatttatgtttttgttctttgctaactcattgtcatgaaggatga

SEQ ID NO: 126122 - DNA, 199 bp, Glycine max
acacctcggagcttaaaaatcagtggacttttttaatttatgcacctaatgtgcttatatgaatcatacatcatgtgctctcaccctcattaaaacagagaaagtcccattacggcaataaatctttgtgattcatctttatcactgccctcgaaaagtgcattattgacaattctttgcgcttaaacatactacacac

SEQ ID NO: 126123 - DNA, 385 bp, Glycine max
  unsure (1)..(385): unsure at all n locations
gatagggggaagcacgaaattgaaggaagagaaagggagagacattgaactttgagttgggtctcacaagactctcattcatcaaagttacaacaagggttacacatgcttctatntatagactangtagcttccttgacaagctttcttgagaaaacttccttgagaagcttctttgagaacacttccttgagaagctagagcttaactacaacacccctctcataactaagctcacctccttgagaagcttccttaagaagaatcctaaagaagttagagcttagttacacatacctctctaatagctcaagctcacctcttgagatgagaagctagaagctagctacacaccccttataatagctaagctcacccccatgac

SEQ ID NO: 126124 - DNA, 459 bp, Glycine max
  unsure (1)..(459): unsure at all n locations
ctctaattattctttctcgaccttttttgtcttttatgttgccaagggggagagaacttaanggtagaatntaagaataaattcccatcttaagggggagtaaggattgagaacacacattatcaatngtatatcgtttatttagatttcagattattgtcatcatcaaaaaggggagattgtagaagcatatatgatatgaagttttgatgataccaaagatgagcgtgattcaagtcaagaattcataaattcaagaagaacgatgtacttagttgataggatcttagaaagaattccttatttgatgccgcacaggtttggctaaggaaaatatcttacaaaatcttttaataaatattatgtttcaaaaatatgatattttctctctagtaatcaantatcanaggatgtaatcgattaacagtaactaaaatgacttctgaaacagttttacaa

SEQ ID NO: 126125 - DNA, 324 bp, Glycine max
  unsure (1)..(324): unsure at all n locations
atctatcttcacaccatatttatcaatagccacataaaaaatctttgcacgggaatgatgaagaatagtgatagtcctcccttctgctcttgaacgaccccgaaccggtatttcgtcatccatatttggtaccggaatacttttagctacacaaaatccttggacatcggcaaaaaaattattccagccactctctctcattgtgcccaaccgagctttgacaacatcaactaattccatggcattcacaatattaagatcttttctctgaatacatntgaaagctcgttggtgataccaaacaacnttttcattaacctcaaa

SEQ ID NO: 126126 - DNA, 296 bp, Glycine max
acgatatcgctcctttcattttgggggaccaccgggccggcaaacccttcaacttttgggcgtgttcttgaagaatcctccccctttttgcacatgttctgtagttgcatcctattcagaaccatatcaaaattgtactgatactgcctaacaaaggcaaccattaggtccttccaagaatggactccggaaggttccaagttagtgtaccaagtaacagctaccccactaagactatcttggaaggaatgtatcagcaatttctcatcttttgcggattccccatcctctgacat

SEQ ID NO: 126127 - DNA, 368 bp, Glycine max
  unsure (1)..(368): unsure at all n locations
tgcacttctttaatgactataacatcatctctagcactaaactgttgggagttggaagccatcttctcaattaaatttctggcttcagtaagagtcatgtctccaagggttccaccactggcagcatatatcatacttctatccatgttattgagtccttcataanaatattggagaagaagttgctcttaaatctgatggtgagggccactggcacatcagtttttaaatctctcctactattcatataagctctctccactgagttgtctaatacctgaaatatnctttctgattgtcgnggtcctggaagcaaggaaattgttttctaaaaatactctcttgaggtcataccaactcgtgatgga

SEQ ID NO: 126128 - DNA, 225 bp, Glycine max
agtacatccttcttatactcattgttagaagcaagtattatgtcgaggtgcattgtatattcttaggttcaaatagttactacttgtgatgtacatgacatattgtcgtacaaacatcattttaaagaacatcttatatattcatactgattatagatatgaaatataagtctgcatatacacatacaaccgtttattaataaaagactatttctatatcacgta

SEQ ID NO: 126129 - DNA, 350 bp, Glycine max
  unsure (1)..(350): unsure at all n locations
acctcagagcacctgcaggctgcaagctccatgcatgcaannncactgtacttctatatacatacganaaaaccttcctgctaattcattcctcagggattataatgctggaacattgatacggcactattggctcacgaggggacaggaaataactaacgaaatatcactacagattggggaatacctatactataccactccgacagacatacaagaaaactgttgatctgtgtatacaacgagctgaagaaggggggtttaactctttgcctagacgtatcgacctcttgggatactataccttaaactaacatagatatcatctaccatatcgacaaaacccaaaa

SEQ ID NO: 126130 - DNA, 302 bp, Glycine max
cataattttttcttacctctttccatgttgttctcatttctcatgatgcctccatgcttgtctaatgctgtaatattctttgagttgcccgataaactgcttaaaactaaatgatttcttggttaaattcttgtcttgtctgaccataatgtgtgagttaatccttgagttgctgtatttttgggtgaaccaacctaaattttacaaatttacgatagagacctaaaactaaggactgtcacatgtgtttgcgaaagctgtatctaactgccaagatacttgtggcgattattctgtcttgc

SEQ ID NO: 126131 - DNA, 237 bp, Glycine max
ttttttactactggaacatgttgagagagaagaagtgagacaaagttaatgctggccctcttactcgtacttgatattaatttgcgcggtgccttcatttatcttccttgtacactgaagtataaaattttgtcaagttgaaaattcgacatacatcagagaaaatcagtataaaatttaggacaacacctcaagattccgtatgacacttgacgtacaacaaataatattgagtag

SEQ ID NO: 126132 - DNA, 289 bp, Glycine max
acttatgatagccggcgatgattccattactgcttcccctaagcactctggcctttcttcacgccgcatcccatgccttgcgaactacttggagtaccctcgcgttgtggacactaaaaccccgagcgatgaaaggcgtgatgctttcgtctaatggcgctcctctcatggggtagccaagctgtcttatggccagaacgagagtataattaatacaactccttgttcccatcaagggagcattcggacattcttcgcatgaagatagaatctcgattcttccttcctt

SEQ ID NO: 126133 - DNA, 374 bp, Glycine max
tactctaagtacacatataactaggggggttagcacaataatcaagacattagcatagtaattaagacgtttagaatagaatttactagttgtggtaaaaagcaagaatcacccatttttggaaaaactctactctagcctttttaagaaaaaattcaaaagtgaagcacatcacatttggaagtgatgtacacattttccatggcttgagcaagggtaattcatgaatctaaattgagtgattaagataagccaacctcctaatccattggaccaaagccttatgcacacttacaagcttcattaaaaaccaaaaccttgccatgtctctcattatatatcacctctagggagttagagcacaaactatcttt

SEQ ID NO: 126134 - DNA, 436 bp, Glycine max
  unsure (1)..(436): unsure at all n locations
caccgaagatntctcaaacattatcatccctatcggcgaatgaaaagagccttcgatggaagtcaagtaaatgaaagcgtgcccaccccattagctggcaaagaagtttatgatcgggtaaaggatatcgtaactatgtttgggaagacacaaagaaaaccatcatctgattcanacatatggaagaaaaggtcaatattctttgatcttccatactggtccaatcttgatgttagacattgtatagacatcatgcatgtggagaaaaatggttgtgattctttaattggcaccctcattaacatcaaaggcaagacanacgatggtttgaagtgtcgtgaagaccggttgcatctatctcaaacggccacanatgtattttctccaacatgttacacaatgtcaacaaagaaaataaaagtttttgtcatgtatg

SEQ ID NO: 126135 - DNA, 297 bp, Glycine max
tcaatttctgtctactgtgggcgggagaataatttacgtgtgcctttgtgatccatttatctagtctatagaccatttagctaccgcatgtgctagtgttgctgttaaaatattccgtggataacaaatgcaaaaaaaacaaaagaatactgaatgcatcatattgaatctgctcaagctggactatcaactttggtataaacaaagaaaacagctctagtatcaagatgacatgtgtgatcacattacaatatcaataggctaatccctcttatcatttccctcttactattatat

SEQ ID NO: 126136 - DNA, 309 bp, Glycine max
  unsure (1)..(309): unsure at all n locations
tggaattcaatataactatcacagcttcaattaattttctgatgaattgattgccacaacgaacgcttctatgatgtctcattantcacagagatgacaggtatcataattccccatcaaagcacttacaagtgcacgtatagattgggatctatactagccattgcaggtgttatcatcacctcaccgccacataatcaatctacccctcatcatgctttcaaacagaacatgatttcaacacaaacgaagaggacaactcattttctacttcgcaaaccgtaataagaaactgaaatattggatcaa

SEQ ID NO: 126137 - DNA, 441 bp, Glycine max
  unsure (1)..(441): unsure at all n locations
cttaagtcacctgcggcatgcagcttacagaaattagtaattcttttattctagannataaaaacttaatgccattaacctcaggaattaaaaaaaacttaatggctgagtgtaactgaaattgttcaaacaaaagtcacccccaacagccaacaagtcagtcaccattttggtctcccaaaaggctgatgcctatgttgccaattgggccctttatacaacttgaactaaacctaactaaagcccctttaatttgataacccaaaacatatgtttggtcaaccaactttacaaggattgggccattatttagacaaactaaacactctataaactgagacaaagtggtgtcatttagtcctcctccatatgagccatgatacaactcacaaccttggactttttccttgaaactgggcttgattcaatatatggacacac

SEQ ID NO: 126138 - DNA, 470 bp, Glycine max
  unsure (1)..(470): unsure at all n locations
atccttaagcacctgngctgcagctgttgtagaagacccactttttatctattgtgcactntacctaccttgcattttatagtttttagcataaaaggtaatttaaattctggttgaaattatcaatcgtacatgttctctcaacaatgcttcatttcagaacttaattcacgctaacattagttccctgtgtgcgatactcggattcatccgttttaatttttaaatacttgacgatccagtgcgctttccggcaaaccgaatttcccttgaatatatttgaacgaagaaaaagtggaacaaaaagtaactgtatgggaaatcaacaactactggaggagacatgnnnttctcttnntcattcttcattaattntttctttctcctctcttatttttctcttcatctgacttattcttcactctttttaccttttctttcctctggttctctccaactagggactcact

SEQ ID NO: 126139 - DNA, 205 bp, Glycine max
  unsure (1)..(205): unsure at all n locations
acctcaggagcaaaatcaaccacaggcagaacattatgacctctgcagcaacagatacaatcccggatggaggaatcaccctaatctcagatggtgttgccctcaacaacaacaacaacagcagcctggctctttcttccaaaatgttgttggcccaagtagaccatacattcctcctncaatacaacaacaacaacagtagcaa

SEQ ID NO: 126140 - DNA, 241 bp, Glycine max
aaaaaaaaaaaaagtaccttagggacttcatcactatttacataatgaaatatttatatattttttgccgatgaaaaaaaaaaccatgcagatcatagcaacacactaacaacagtaccagatatcacacatataacaacatcagacaataattccaaccaagaggaaatcatgactacaaatagcagaggcaataatagaccaaaatgcaacacacacaggcccaagcacctcagtgact

SEQ ID NO: 126141 - DNA, 354 bp, Glycine max
  unsure (1)..(354): unsure at all n locations
gaataaaaaatcatagaagcggttgtgccgctattactcaaggacctgaattcaagctccaaaaactaacccaaggcaacaaggggggtgaggagtatttcaaggaaatggatgtgctcatgattcaagcaaatattgaagaagatgaggaggtaactatggctcgatttcttaatggtttgactaatgatatccgtgatattgttgagctgcaggagtttgttgaaatggatgatttgcttcacanagcaatccaagtggagcaacaattaaaaaggaagggagtggctaagaggagttttaccaactttggtcttctactcgaaagacaacgaagaaagatgggctgctact

SEQ ID NO: 126142 - DNA, 341 bp, Glycine max
  unsure (1)..(341): unsure at all n locations
caccactcactatccatagaagaaaacctcagtctcaaatgcatcgtgcccactgcccaagcacattcttgcctctcaactttcctcattgtagatcatccccggaaacatttcttaggcttcgcttcaagtaagatcacagcatgtggctcggcattcaaaccatcagagattatgaaacagttccaaatggccagagcatccagcaggatctccaaccattgacccatgttctgacatgccatgctngactcacagatgtcatactttctggtgcatgatggctcatgccttcaacatatggcccagttactccatggaatcagttgaatccttcactt

SEQ ID NO: 126143 - DNA, 293 bp, Glycine max
accaccttccctgtagccacctccactgagctacgtcccccacgaagccatattctgttgttatcaacaccgggtcccataattctacaaacttccccacataaagcaatcaacttcaacagcaaaactatacagccagaaacagagcaagcgaaacttgccaacaccaccaaatacagcttttacttaaacccagaacattcttcgtcatcgtaccgtggacactcaattttactgagtttagactaacctcttttgccgtggattatacaacatcaacttttgctgttttc

SEQ ID NO: 126144 - DNA, 55 bp, Glycine max
tcttaagcaccgcggctgcagcttagttcacagcgtgacaatgtttttttgactg

SEQ ID NO: 126145 - DNA, 396 bp, Glycine max
  unsure (1)..(396): unsure at all n locations
agctgacacctctttcacacctctttctctattgtgatgtngagccctctctacggctggctgaatggtctatagtcttcttcctcattatctngtgcatacagtaggcaaggctgattccctttagatcagatatgtgccaccctattgcctccttgtgtcttttgaggacatccaccaacatgttctctttctttgctgttagctcattgctgatcaccacaggcttggtctcgttctcctctaagaacacatactttaggtggttgggtaggatcttcagctccaccttggtcttctcgaatggactctcgcttttcaattcttcaaaaatggtcccctctacagggaatatttctcctcttcactggttagacaatctacaacattgatcaa

SEQ ID NO: 126146 - DNA, 454 bp, Glycine max
  unsure (1)..(454): unsure at all n locations
ttaagtcacctgcggcatgccagcttaaatttgaataaaacgttctttatcttctggttaangaataccatatatgtgtaatcgattacacanggcaaaattttgattcaaattttaataactggtgtaaatcagtttggcccctggaatcgataccagagagtaatttcttgtaaagactttatatttaattttcttggccaaccttttgctacttcaatatggaattcccttcctatntaatataccctttctaagactctatagactgtcttgatcatctatcttgaatatctttaattgctttgtcttgaataaagcttttagacgcatgtgatctttgggcatcatcaaaacattggcttgatccctcgtctacaccttgtacacgaattaagctctgctaccaccttgtgaacaagtggccttaataacttaagaggggggggggggg

SEQ ID NO: 126147 - DNA, 292 bp, Glycine max
  unsure (1)..(292): unsure at all n locations
aaaaatctgacccttttgaaatgcctaaaatcttgcctcgaattgcgtgtcacttctctggttccagtccctcgcgtttctctgcacccatcggggcccgttttcgaaagtaagcaatatatatatcanaacgctcaaaatgaaaccccgagcatggttcagaggttggttttgtaaatttaagtcgacccaaaatgataattttagactaataattgagaattatctaaactgtccagtatggattctcttcttaattagctacccgcgatctntcccaatatcctactct

SEQ ID NO: 126148 - DNA, 190 bp, Glycine max
tgcaatgcactacttcttccaaatgcaatgtttctcctcccttttggcataacaaggccaaaaagtcacaactacttatagagtaaacaaacaaatatatgatagcatttcattcatagaagaacattacaactcaatcattatagacaaaaacaaaattaaacataatcagaaaggacaattataccat

SEQ ID NO: 126149 - DNA, 175 bp, Glycine max
  unsure (1)..(175): unsure at all n locations
atgctntaatggaggaatagaaagagagaggggggagcacgaaatgaaggaataaagacggagagaagtggaactttgaagtatgtctcacaagactctcattcatcaaagttacaacaagtgttacacatgcttctatttaaagactatgtagctttcttgagaagctttcttg

SEQ ID NO: 126150 - DNA, 206 bp, Glycine max
  unsure (1)..(206): unsure at all n locations
aagagtagtacagaatgagttctggatgtttgctagtagatcccaacggtcaaaatgtaggcttatgcactatagacttctcagtaaattttggagtcgatccaacggttaacgacatggatcanaggaattgttactgtggtctttaagagagaaaagctgtgatttgggttgatgtgttgagcagaagtttctgcctatgctct

SEQ ID NO: 126151 - DNA, 332 bp, Glycine max
  unsure (1)..(332): unsure at all n locations
cttgatgaatgaaagtcttatgagatacactncacagctccacttctctccttctcttataccttcaatatactgctccacaccttcttctctttctttttcctccattataagcatacctccatcaagcttcttattcattgaaaatttaggtggcgaagctccttcttccttggcttattcactactggatggngcctcccagctactcttcttcttttccttccgatgcatctccatggtgtaaaatcaccattgaaggaccccattgaagctcaacgatccagcctccatagaagcctccacagcaagcctccatcaagtggtatcat

SEQ ID NO: 126152 - DNA, 237 bp, Glycine max
agttataccatttgaatttctcgagagctctggttggtcaaatttaagtgtctcgatataatatgcacccgaatcggaatgaccggagacaagttatgccaattgatatttcgacagcttccggtgtcaattctagcttctcatatattatgccctgaatttgacttcgtgtgaaattatgaccattggaattgtccgggcgatcgaggtcgatatcagcatctcgattattatggc

SEQ ID NO: 126153 - DNA, 357 bp, Glycine max
gagcctaaccttttaattaaatagaccagttcaagttagactttatataggccaggtcgtaagcccctgtataccgacctgacctatttccacccctacactccacctacaacccaaaaatctcatttcaccaaatctatcccacaatttcagatctagtaaacttgcacttttattttcatatcgatctagaagggtcttgttggatgaatcacagagaggggaagggacactaattcttgatggacaactccctgatagcacgatctacaatggtgaagatggatgacatgctgacggcatggtacatggttgcattaaaggtggtgggaaagacacaaaggatctatgtacacc

SEQ ID NO: 126154 - DNA, 160 bp, Glycine max
  unsure (1)..(160): unsure at all n locations
tgtgatcatatacccatatcaactataactagacgtgtatgaaagccatgctttgcattgcctagaatgttaaggaacgtntccattcacatgtcacaaacatttttgtcacatcctatcattcatacacatgctagcgtcttgatcacaccagtactac

SEQ ID NO: 126155 - DNA, 384 bp, Glycine max
  unsure (1)..(384): unsure at all n locations
agcttcttgatatattatgcgcctgaatctgatatccgntcganaagnaatgacgatttgaatttctcgagagcttgcgcttttcaatntcgagcctcttcgatatattattcgactgaatcggacttccgcgtgactaagtatgacccattgaatttctcgagaactttcgatgctccatttcaagcttttcgaaatattatgcgcctgaatcggacctctgagtgataagttatgaccatttgaggttctcgagagctttcgttggtcaatttcaagcgtctcgatatattatgcgcctgaatcggacttccgttcgacaaggtatgactatgtgaatctntcgagagctctcgctgttcaatttcgagcgtctcgatatat

SEQ ID NO: 126156 - DNA, 303 bp, Glycine max
ccaaagccacttacatggggccttccttataaaggcccaatcctatcatatcaaatagggagttgggacacaaatttggagttgctttaaacatcaccgacatgataaactaaaatattcagagaaatcaagatatatcttacggtccaactggtcaccaacaccaagaacttcctgcacattccgagtcattatctggtgaacttcatagagttcatcattcaattttgcaatattgcgctgagtatgtgtatcctggtaaagttctttgcctcctgataaatgtatctttaaacaattaaa

SEQ ID NO: 126157 - DNA, 281 bp, Glycine max
gatggggtggttatgtttgacttgtgaaagtgggagagttgatttgcgcccatccccgattgccacctattactaccacatatgacgggtgccccataatccactaagcttgatgtgagaaagcgtggaagagtcagtcttcctacttttgtttgttgaccacagagtggtacctgaaaatatgtcgcgggggtcacgagacctggggacgtcagtggtgtgctattgccaaaaccagcttgaccaatccgaccacccgggctatcagtagtgaacctgga

SEQ ID NO: 126158 - DNA, 167 bp, Glycine max
  unsure (1)..(167): unsure at all n locations
tgactacttactcaattgattaacaccagttcttcaaacaatctaaacatgataatatagaaatcatgagtcacagtgaaataaaaagctacatagaaaaattattgatcgcnattcttatcagtatacaatccagctcatggaaagaagaagaaaaagagaatctg

SEQ ID NO: 126159 - DNA, 312 bp, Glycine max
  unsure (1)..(312): unsure at all n locations
aaaccttctttcttaggcttaaaaaacttctattatcttgacgtttctctagatctggacattcagacttgaaatgtccaagctttttgcactcatangcaactatggagcttttgtgtttatccttcttttctcgaggaattcttcttaaggagattcttcacttggactcaccttctttctccacatcttatggattttatgagggataaagatgagttcatcttcatttgagtcttcttcagaatcatcatcagatgaatcatcgactttaagtgctttggataaacttctcaagaattgttctctggg

SEQ ID NO: 126160 - DNA, 396 bp, Glycine max
  unsure (1)..(396): unsure at all n locations
tcagatgaagataattcaataactttcatctcaaggaagataatgaacttgtggaagaaaataaatggatcaaactggattggatccaacaaaaacacattgagaaagacagagaaaagctccatcgtatcctatgagtgcaagaaaccaggacatttcaagtcaaaatgtccaaattttgatatatcagcctataagaagaagtacttcgaaccaaaggacaagaaagtactaatgagcacgtgggagacatcatcaaatgaagaaagtcaacctctgtctgatggcagacactgcatcaaaaggatcatattctgaatcagatgcagaggtaaatataaacaacatctnaactcttcaataatcaaatcatgagcttctatccttttatcattt

SEQ ID NO: 126161 - DNA, 334 bp, Glycine max
  unsure (1)..(334): unsure at all n locations
agctngagctcactggtgctgcccacattccttctaaaacttgntntggccccattcttcctttcgggccctctttgtttctcgttctaacacttcagttgtggccacattgacgtccctcagcttgtcacactcttttctaaccctaatggttgtcgtcttgaacttttccttgaccacttgtgctctttcaagttccgccttcaaggcttgcacctctttgctctcctcgggggtttcaacctcttccaaacttgaaatctttatcttcgggaggcangttatctcttgcattctagccttcagccacttgtgatagccgccgacgatccca

SEQ ID NO: 126162 - DNA, 328 bp, Glycine max
  unsure (1)..(328): unsure at all n locations
tacacttcctganttttctggtgacagctctagtcttaaagaaccagaggccattttggatcggtgatggtacgagaagaggtcaagctgtgacctatgttttatgcaagtggaaacatcacttgcctgaggatctcacatgggagttctactatgatctaagaagcggtttcttctttctccttttttttggtcgcacaattaaatatattgtatatgaaggagcaccaaggtactatagatacaagagtatgtaagtaaggcttggtaatcctcatatcacgcctgaatacagactgataggagcttactatcctactatcaagcg

SEQ ID NO: 126163 - DNA, 466 bp, Glycine max
  unsure (1)..(466): unsure at all n locations
gcttgaactagagaaagcttatatgttttgtcttttcatgcccacttcttgagtggctttgtatttggttgtatattgaatgttgcatcttaatccatatcatatcttttgtgcatcatgcatcattatgagtaagtgagacactactagaaaaaatggttttacattagttattttagacattcaacatcgattttgaatcgatgttgaaacaaccgatgttaaaagtatcaacattaacattggttataaaaaccgatgttaaaatatactcacaacatttgatttnttctataaaaatgatattatcgtacaaaaagcatcggttnttactnaaaaccgatattgagttgtgtattctataatacattntaattggttctaaaaaaccgatggtgaaagtcattacaatgtgtatctacatactttttcatcgattaaaaaaacgatgtgaagtcattacaca

SEQ ID NO: 126164 - DNA, 212 bp, Glycine max
  unsure (1)..(212): unsure at all n locations
aatataccaatggatgaataacggatgaaaatgaatcctacctctcacccctcaaaaagggaaagaanacaagttccatgtattggctgccaccttatgtaggacagttatcatgaatatttatagaggaaggaaataaattctctcatagcacaatactatagtattaataatggcttgatgaaatggtaaatcaagaagatggatacttc

SEQ ID NO: 126165 - DNA, 339 bp, Glycine max
  unsure (1)..(339): unsure at all n locations
agctntntatcataggtggggtagttgagggtgttactactgaagttttcactaaaataagcaatatggtgcccaccttgtaacaatacagcttcaactcccactccagaggcatcacattctatctcaaaagttttaaaaaagttaagaagagctagaacaagtgccctaataagattttctttgagaaaagcaaaggcttgctcttgtttttcaccccangtaaatgccacattctgtttcaccaactcattgagaggtgatgccatctgagagaaattaggaacgaaccttctatagaagcttgctaacccatggaaagtcctaatatctcccaca

SEQ ID NO: 126166 - DNA, 306 bp, Glycine max
  unsure (1)..(306): unsure at all n locations
atccatctgctaagcgagaaagacacgcgctaangccaaaatcattaatatgcgctcagcggntcanagttgcgcangcacacgagcacgaacaaagccacctatttaagcctgaaatcagatttatagaagggagtttgggctgggattcagagctttgcatatctagagaatctagagagagaaaggtccaagctttagagattttcgagagattntgttgtgtgaagatctgcagagactanagcttgaagcagaagtcgttctgagagcttgagatgaagttgtgagtgattgtgagatcat

SEQ ID NO: 126167 - DNA, 384 bp, Glycine max
  unsure (1)..(384): unsure at all n locations
tagaatcgcggatgagtatgcccaagtatacgccggaaaaagaggctagaggaanggtgatcgactctttacaccaagagcaaccatgtggatggatcnggttgctcttaccttgaacgggagtcaagaacttccccgattggtagccaaggccaaggcaatggcagacacctactccgcccncgaagagattcatgggcttctcggctattgtcagcatatgatagacttaatggcccacataattagaaattgttaggaaactngtatggtctctccgaccttgactagatatgacttcctttntgaaataanatgaagtggtcccatgtttctactnncaaaagctngtgcaaatcanatcactcctacatctcatctcta

SEQ ID NO: 126168 - DNA, 207 bp, Glycine max
  unsure (1)..(207): unsure at all n locations
ataagtaagtaaataatactactatatatgtagcaggtacacttcatacataaccaanatgctataaatattccaagtgtctggccattgggcttaggaaccatgtattattgcttactacaactttgtaggaaaagtcagctcctggtaatagatctctcggaagggaatttcttcttcacaggagtcataattaattcgagttat

SEQ ID NO: 126169 - DNA, 85 bp, Glycine max
  unsure (1)..(85): unsure at all n locations
agcttctaaactttatacaagaatgaagctctgataccacttgntagacaagtggcctcagatatcttaagaagggggggggggg

SEQ ID NO: 126170 - DNA, 270 bp, Glycine max
  unsure (1)..(270): unsure at all n locations
aagacctttatcataagattatcctagactgtttccaattgtggaggataaagatacaaccatagtggacaaaggaggatggctcgatgatgcttgggtttggaagagaagacttttcgcatgggaagaggatttgttatttgatttgctacaataagtacaactacatgggatacatccaaatctagaagattcatggaattggaggcttaactcggctaacattntttcggtttcatctgcttacaaagggatttcttcatatgactc

SEQ ID NO: 126171 - DNA, 281 bp, Glycine max
aaggtatgttcttcttactaagcggatcctctcaccatattcatcatacacaaaaattctgacggatgagaaatacgaaaccccctctgtctgacgacccaacggattcgcatcatattggcccgatactttagcacacaatcctggactgggaaaatattcagcactctttatggccaccacttgaacaaactaatcggatcaaaataaactttttgcataattgaagctcgtggtccacacttacgtacctaataaacaattagcctcttttcatcacc

SEQ ID NO: 126172 - DNA, 241 bp, Glycine max
cgtttctctcctttaaaaaccaagagatcgttaatggtcaacaccttaatgtttctctcctttcaaaaccaagaaatcgttaatggtccaacaccttaatgtttctctccttgtcaaaaatcaaaagatcgtttaaaggtccaatgccttaaatgacttttgttcggttaaaatatatcttttggaaaaagataaagacaacttaaccaacgtctagttctgtaagaactacgtcatgttg

SEQ ID NO: 126173 - DNA, 191 bp, Glycine max
ggggttatgctcctctacgacgagatacaaaattgcccttgtgtgcaagaatgtatcacgatcgctctgggtggttactaaggccttcgatttttacaatcaagaatcctcgttctcgattcaagttgcacgaatcacgaacaagattcgacacctccgtcttcaggatctatagaagactcgatcaagat

SEQ ID NO: 126174 - DNA, 363 bp, Glycine max
tagacatgattgaacatgtattgggacttgtaggatttgatctgggcaagattggatgaggggaagtgtggttttcgaaatctgcactttgtgcagatttttgctgtgaaattgtgcaccatgattttgcacaagtgcagaaaaatgctatgtatttgctggttgtggaaagagttatgtagaacgagctctggatgtttgctagtatatcccaacggtcaaaatgtaggcttatgtactagagacttccagtcaaaattttgattcgatccaacagttaacgaattggaaagaaggaattgttactggggtcttttacagagacaagctgtgattttggttggtgttttgggcagagttttc

SEQ ID NO: 126175 - DNA, 427 bp, Glycine max
ttgatgataaccaagaatgatgacacttagcggagctcataaggcaagaacactccatgataacaaagatgatgatctccagaatcaaagaatgagttcaagattgaatcatgaacacttcaaggttcaagaggaaatttgatttcaagaatcaagaatcaagtttcgagattctagttccaagaatcaagatcaagattcaagactaaagtttcaagaatcaagagaagactctgtcacgataagtattagaaagttttttcaaaaactaagtagcacgtgaatttttctcaaaaccttttaccaaagagtttttactctctggtaatcgattaccaattgcaaaatggtttcacaaaactctcaaactgaatttacaacgttccatataatgtcaaaatgctgaatcgatacaagttttggaatc

SEQ ID NO: 126176 - DNA, 415 bp, Glycine max
  unsure (1)..(415): unsure at all n locations
tactgtgcatccatggcttctgtgccttccaattntgcttattaatcatttcccaattcggttgcaaagaaacttgatgactccaattatctacactggcgtcaacacatagagccagtaatcaaatcgcacaagctgcaacaatttgtggttaatcccatcattccctccacgttacctcaccaaagatgatcgcatcgctgattaagttaatccagaatatgaaacctgngaggttcaagaccaaacgtttcttgtttggctacaatctaccctttcgaagtacgtattgtcgagaggtcttggttccaatcactcgtatcaagtttgggacaaaattcatgagtactntagccttcacacccaatctcgtgcgcgacaactntgatctaccatgtcgtggtcaatcttgatg

SEQ ID NO: 126177 - DNA, 413 bp, Glycine max
actttgcatccgaaggaactatttccgctccggagtatgatagtcaccgctttatgagtgctgtacaccagcagcgcttcgaggccatcaagggatggtcgtttctccgggagcgacgcgtccagctcatggacgacgagtatactgatttccaggaggaaatagggtgccggcggtgggcatcactggttactcccatggccaagtttgatccagaaatagtccttgagttttatgccaatgcttggccaacagaggagggcgtgcgtgacatgagatcctgagtaaggggtcagtggatcccgtttgatgccgacgctatcggccaactcctatgatatccgttggtgttggaagagggccaagaatgtgagtatggccagaggaggaaccggtctgacgggttcgatgag

SEQ ID NO: 126178 - DNA, 326 bp, Glycine max
aattttgagcgtctttttatattacccgattcaatcggacatccgagtaaaaagttattgtcgcttgaatttcctacaagcttctgttatcaatttggagcgtctcgatatattacaggactcagccggacatccttgtataaagttattgtcaattcaattttctcagagcttcggatcaaaaatttgagcgtttcgatatattactggactgattcagacatccgagtaaaaagttattgtcgcttgaatttgatacgagcttccgctttcaatttggagcatctctatataaattacaacactctgtcaggcttacgaataaa

SEQ ID NO: 126179 - DNA, 403 bp, Glycine max
accgccttctggggaacttcctggaaggcccaagtaggcctggttgctatttgcacccccttatttactaaatacaactcctgcctttttttgctaattctttttctgtaacgttacggaactttacgaatttcgtaacgatacttgttttctttccgtaatgtcacggaaccttacggattacgtaatcatcccttttttggctcccgggatgttacggaacttcacggattgtgcaacaatgcttccttttgacttccggcatgtcacggaacttcacggattgcctaatgatgggtgccaagtacctcgaagtggcaaacgagggtcgcatcctaacaaatagatggtccccggacgatatatggtatgacaattgcccctcttcacttgtcttttattg

SEQ ID NO: 126180 - DNA, 450 bp, Glycine max
tctctctctctctgtcttgtctcacttgagccttacttaagcatataattgttttattctcctacctcatattcttacttgagggtcagagtcctctattttgcaagtccccccttcctatcaatggtatctttctaagccgacgtgtgaagtctgagaccccatttcaaccacatctaccctgacgtgtcacggttctggattttggcaagaacatcatttgtgccaatatttaatgggcttaacttctctaactagaatgagcaagtccaatttcaccttggtgtatggatcttaatcttgctatattggaagaaaaacctgcagctattactgattctagttgcaatgatgagaaagcccattataaagctcgggaaagattcaacagactcaacctaatgtctatgagactgactgttgcagacaatattaagatagctctcccta

SEQ ID NO: 126181 - DNA, 299 bp, Glycine max
  unsure (1)..(299): unsure at all n locations
gtcgtggggtcatcgcggatctccgaaagatggtggccagaattcgacggttgatgaanacgtgccggcccttgctcttgtagaaacgtagagcttcttcgccatcgccatcgccatccccatctccatgcaatagacgcactgatcgtaacctccgaggaatgaatccaactacgcgtctagaggcaccaagcatgtgccactctcatgtacattgtttatgccgtttccaaacataagcatagatacctagttcgtttgatcctttgttacaaaggcccatcaaagcgcatctggat

SEQ ID NO: 126182 - DNA, 245 bp, Glycine max
aaaggggacaaccctagatttcatggattgattaaacataaaccactcattccgcactccaaatggcaatactaatcaacaaacacctcagaggatctcacaagattgcaaaatagataggtgctgactatcaccttttaaagacttcattggtttcaaaacatcaataaacaatccaatagaaaaagcatgactgacacttcattcttgttgttattaagcccttaccaatacacaagtcatgc

SEQ ID NO: 126183 - DNA, 392 bp, Glycine max
cacaaaccacaaacccttgcgacaagtacagatttctgattcaaggccaactgggttaccaagttaaccaatgcatccagtttgccttcaagcttcttagtctcagatgatgcagctgagtttgtagctacctcatgcactcctgtaatgactatagcatcatttctggcgctaaattgttgggagttggaagccatcttctcaattaaatttctggcttcagcaggagtcatgtctccaagggctccaccactggcagcatctatcatacttctctccatattactgagtccttcataaaaatattggagaagaagctgctccgaaatctgatggtgagggcaactggcacatagttttttatatcgctctcagtactcatacaggctctc

SEQ ID NO: 126184 - DNA, 371 bp, Glycine max
  unsure (1)..(371): unsure at all n locations
gttggaaggcaatttggattccccttccaaaaaaatggtttcttctggaataaaccgngggggaagatggagggcctattgagtttttcggtctataaatttaaccccacattattacgaaaaaagaaatagactacgtatgtacgcgctgaagaaaaaaaatggaatatagcactaatttgcaatggttgattattctatacgtgcttcggtttttgttcaagatgtgattattttcatcgttttaaaaattagactggattagtcaattccactggttggatggaaaccaatcaggttacttggttaaaatatccaggacattagggaaataaaatagttggtaaagaattagtcgacctggtaacata

SEQ ID NO: 126185 - DNA, 422 bp, Glycine max
  unsure (1)..(422): unsure at all n locations
tacttatcacctctatcatatctaataatcttcacatatatgtctaattgcccttctacttcatcggagtaaatttctaaggcatccattgcctaataaatctcgggcagtaagtagacataattgtaacgtgaataatcatcaataatggtgataaagtatcattcctttccgaaagaactaacatcaaaaggtctacaaatatcaatatgcacaatctcaagaagctgagtgcttcttgtagctcctttctttgtatgttttgttggttttcctttaatacaacccacacaaatatttagatcccganaatctagataaggaagaaaattcatttttattaatctttccatcctttctctagaaatgtgacctacaacgttatgccacaagagagcagatcgctcattcactaaactatg

SEQ ID NO: 126186 - DNA, 408 bp, Glycine max
tgatgatcttcctggctctcatggatatcaaagattctattgtgtgccaaaaagcgcatgaatcgcttcacaaaacccaccttagatggtggaatttgcagggctgagaccaactcaagaagagtaatgggtttcccatggttggatattatgtctggaatacctagttcgcaagcccacataagacacacaggtcttaggttaccaaatatctgcatgtacaaaatgttttggccttcaaagaactcgatggcattttggttatccattactactgcgagcgatatttacttaatcgatgaattggcctttgttccatcacctgcatttgcgtggttatataatggttacgcttaaaataaagtagaaatgcaataagtccttcgaatacatggaatattgacaaat

SEQ ID NO: 126187 - DNA, 330 bp, Glycine max
tatattgagttttttattaaaccaaattctatttctaatttggacaaattcagttattgttgttcaattataaataataaagttagtctctcttatgattcaaatgttgcaagttatgagttcttttatggatatttgagtgtttctatcgtaaacaattttgggtggtacgaaacttaaaatttaatgagaatttcgttactttataacataagagcttaagtcatatttcttaatagagaatttggacgcttgtgttataggaaattttggatcatttatattggttggaccttatagtctatattgagtatataaagggaaaataaa

SEQ ID NO: 126188 - DNA, 388 bp, Glycine max
aatgctacccttaaaacaaaaatggcatacaacctcctccaataaatacaaacatcaatgtaaatttagagcaagcttatgcgcatatttccttacgaacattcactcgcacaagatattcttctaactaagaaaaatgcacccatgcacaatcaaggcactttcgttacctacattatttgtatgtacttccaaggtgtactacctacaccacatgcatttcctcggctaaatttacatacatgcatgctcaaagcctcttggctaccaaaagttgcacacatgcaaactttatgatgaatcttggctatctacacaataaggtgctacatttcatgatttattcaagtggttttactacctaaagccgcatgcaaattcaagtata

SEQ ID NO: 126189 - DNA, 422 bp, Glycine max
  unsure (1)..(422): unsure at all n locations
tagcataaaaagagggcaatttaatatcacaaagaagcactggggcagtgatttttatacctattgcagctttcatttctttgatatgcagatatgttccctgaaataagaccatcattactgagttgagacctttaacacatcctacactccctctgcctaaattgaatttatcgttataaaaaatattgcacagtaaacaaattattgatgttgatatacatggatgagatattcacttattcaaatagttttcttgtcaaaattaatcatccaagacccaccccaccacagtagttgaagacatgttccaattntttcagaattcaaacacatgtcttctttatcccgctctctctcttcgtgaggtgggtatcctcgaacagcccaacgagatatggcctcaccggcttctgaatagc

SEQ ID NO: 126190 - DNA, 395 bp, Glycine max
tgctccttaaacctccattaattttttgctttaccttctcttccattggtttttcttaatttttctccatgtatctcctcacatttcttgttctaaatgttgttaacatgattctttagagtttgcatcaattaaacttgctatagaagatagatttgattttctatggttcaaatttcttgttcttgttcttgaaccatgaattatgttgagtttaggttcctttgagttttgtcttgttattttttgtggctgaaacctaaaccataaaattcttacaaaaatattaaagtagaagataacctcaaaaaatctagagtgacttggtcacctattgtagttttgtcataaaagtcatgtctagtcatgaaacttgtcacataagaattcttatg

SEQ ID NO: 126191 - DNA, 403 bp, Glycine max
  unsure (1)..(403): unsure at all n locations
tgtttatcgtttctactacgacataactgccttgatgaacacgaaattggcgaacatggatatgcaaatctaccttggtaagcttgaaagtgtcattgctgattataacactctcatgcctttcatgagtgatgaanaaatgttttataagcagcgcaaccaattctttatggttcttgcccttgttgggcttacaattgaacttgaagcagtgcgcaatcagatcttgtcaggttctggtgatctttgctatgacacggacaatgaacaactgtttcgcctctctagtgcgcatgcctttggatcatgctctacaccaactggagagttctttgctcttagctaccattcttctaatcacaggtgacattccatatgttgaacacttatggtctattgaatc

SEQ ID NO: 126192 - DNA, 413 bp, Glycine max
  unsure (1)..(413): unsure at all n locations
tctgatgcatatggcattgataattaatgctagcattaaatgcacattgtcgcaacctacccttcggcgggagggcgacccgtgactcgcatgtgcgtcttccaagaaaggaatacgcccggagtcgccaccaacgtttatttgaggaaaacgttggaaaaaccagaacagacgttggctacnaactttaagtggaaggttcgggagttgtatttacgcacggngaaggtattagcaccccacacgtccgtcacaagagacgacagcctttaatccaatgtgcaaatgtgacttcaatttatattattttcccttttttacgttcttatgtctttttatgcctttntatattattatctttttgtggtcgacgagggtgntntccttgctcctacgtattcctcaattgtgat

SEQ ID NO: 126193 - DNA, 388 bp, Glycine max
  unsure (1)..(388): unsure at all n locations
ttctagagatttttttgtccaagttccaaaaagttctgagagcttgagatgagtttgtgagtggttgtgagatcctagaggtgaaggagacatcctcaccacttgtatttatgcaatctctcatcttgaagntctctttgctagaaaggacgcttcctggttatggaaagctaaaatcctctgttggatcttccctgtaggtacttgatgtatatatctttcaatctatttaatgattttttgggcgttctctgtgctattaacttttcattctagtatgcctttaccttgatcatgtacacgcatactttgntagggtcattcaacagtggaaaactggctgattcttatgaccttgataggacacggcttagttgttgtactatca

SEQ ID NO: 126194 - DNA, 307 bp, Glycine max
cactttgagtatacatatcccaagggaggttagcacactaatctaaaagattagtataagatttatcaattttagcaaaagcagtttttaccttttttttttgcaaaactctactttatccttttatagttagttttggaaagtgcaagaatccatattaggaatggctaagctcatggatagcacctcaaggcctgttcaagttgtcaaattagtgatattaatagtcattcaaagtgcttagattaagaagataaggggtaggccttgcaattccattggtccaagcgtttcacctacaataagt

SEQ ID NO: 126195 - DNA, 241 bp, Glycine max
ccttatacgggccttgcttggacctcaaatctacttgcttgaaacttggaaacctgtactgatagtggtcaaaaccattaaaactcttgacctcatctggagagaagagctttttggagccctttaaaagaaatagataactgagattatcgaggcgaagactctctaactgtgatttaaggttataaaaggctgggggtaatccccctgatgccaacacctactgtaggagataagtttc

SEQ ID NO: 126196 - DNA, 262 bp, Glycine max
  unsure (1)..(262): unsure at all n locations
accacaggaatgattcanggcgtaatttctattgcatgcaccataacatgcgtcaaaacccatcgaccaacgtaatggatatcacatagtatcgcagaactgtgaaacatagaatctagagtaatgattataataactaaaccaatttaagtctgaaaaactcctatatacatcacatttgaagtctttcggctttaacgtcatcaagaaaatattaactcactatgaccggaacttcggaactacaattgtaattgacctg

SEQ ID NO: 126197 - DNA, 405 bp, Glycine max
gagaaagggagagaaattgaactttgagttgggtctcacaagactctcattcatcaaagttacaacaagtgttacacatgcttctatttatagactgatgagcttccttgacaagctttcttgagaaaacttccttgagaagcttctttgagaaaacttccttgagaagctagagcttagctacaacacccctctcataactaagctcacctccttgagaagcttccttacgaagattgctaaagaagttagagcttagttacacatacctctctaatagctaagctcacctccttgagatgagaagctagagcttatctacacaccccttataatagctaagctcacccgcatgacataatacatgatgatacaatatactaagtctgtactacacagactact

SEQ ID NO: 126198 - DNA, 410 bp, Glycine max
  unsure (1)..(410): unsure at all n locations
cacttactgcagggtgtgacaacatgtctggtgagaggaaaaagctgtgctcnaggtcctcctcccaatataacggaaacgaacttttttgggacaatctttgatctcgagaatgaaaaaatttgtgaggcctggaactaagaatgtattgattctaagaaataagttgataacaggacaaaaatggaattgtactactcggagtcaataagccttcatattcaatgactgacggagtagatatcttattctagttcattaaagtcgcctcatctatatcaagaaagagaaaaacgttatctctactaattatacaatgagagattgaggtgagatccaattcgtattatcgataagacaacatataatgttatcttacttataacatctaaatagggaattaatcctat

SEQ ID NO: 126199 - DNA, 359 bp, Glycine max
  unsure (1)..(359): unsure at all n locations
ctccaatatcttgcaaatacagtaactacccatgtccacagtgctgagcaacacatccaggatgtcaactctctgggcttgatctcatctagatagacaaatgaagccatcgagatccttaagctcatgtcttccacattctcgattgcactntgccaagcacttgactggaggcatatagaggagaatgtgaaaaactcggtcacgaacaccgagagccaagtttccaaaatgattcttaccacaggtgtcaatggagaactccatccttcaagaatttgcgagaaagatctgctcatagagattgatagggagtatatattctcctacattgatgaccnctgcagagctacataccc

SEQ ID NO: 126200 - DNA, 447 bp, Glycine max
ctctgtctctctccttttttacttgagccttacttaagcatataattgttttattctcctacctcatattcttacttgagggtcaaagtcctctattttgcaagtccccccttcctatcaatggtatctttctaagccgacgtgtgaagtctgagaccccatttcagccacatctaccctgacgtgtcacggttctggattttggcaagaacatcatttgtgccaatatttaatgggcttaacttctttaactagaatgagcaagtccaatttcaccttggtgtatggatcttaatcttgctatattgtaagaaaaacctgcagctattactgattctagttgcaatgatgagaaagcccattataaagcttgggaaagatttaacagactcaacctaatgtttatgagaatgactgttgcagacaatattaagatagctctcccta

SEQ ID NO: 126201 - DNA, 449 bp, Glycine max
  unsure (1)..(449): unsure at all n locations
tgcgcagcccaccatcttttatagtggagtaccgataatgtgtctaccatcacgattatcgtctccctttccattattgggggtaccacctgggccgccagatccctccaccttttgggcgtgttctttgaaagatccgcccccctttttgcacatgttctgtagttgcatcctattcagaaccatatcaaaattgtactgatactgcctaacaaaggcaaccattaggtccttccaagaatggactcgggaaggttccaagttagtgtaccacgtaacagctaccccagtaagactttcttggaaggaatgtatcagcaattcctcatcttttgcgtattccccaatcttctgacaatacatctttagatggttcttgagacaagtagtccccttgtacttgtcaaagtccagcaccttgaactngagaatgaccatgtttgggtatt

SEQ ID NO: 126202 - DNA, 428 bp, Glycine max
  unsure (1)..(428): unsure at all n locations
cttcaagtaggtgctccttaaacctccattaattntttgctttaccttctcttccattggtttttcttaatttttctccatgtatctcctcacatttcttgttctaaatgtcgttaacatgattctttagagtttgcatcaattaaactcgctatagaagttagatttgattttctatggatcaaatttcttgttcttgttcttgaaccatgaattatgttgagtttaggttcctttgagttttgtcttgttatattttgtggctgaaacctaaaccataaaattcttacaaaaatattaaagtagaagaaaacctctgaaaatctagagtgacttgttcacctattgtagttgtgtcatagaagtcatgtctagtcatganacttgcacataagattcttatgtgngctgaatttattttcttgttc

SEQ ID NO: 126203 - DNA, 427 bp, Glycine max
  unsure (1)..(427): unsure at all n locations
tagcaaactgaaagctaaaatgaagttaatcattaagtatcaaccttataatggtaaacaagattaaactttgatacccatcaaaatgctcaaccaagtacatccttcttatcctcattgttagaagcaagtattatgtcaaggtgcattgtaaatttttaggttcaaatagttactacttgtgatgtacatgacatattgtgttagaaacatcattttaaagaaaatcttatatattcatactgattatagttatgatttataagtttgcatattcaaatacaattttttattaataaaatatattttttatattaagtattttaaaataattataatttctttaaaatatttatcgatgataatttagatattaatgttatttcatgtaaaatatttaatctctntaatatacctttactntata

SEQ ID NO: 126204 - DNA, 362 bp, Glycine max
  unsure (1)..(362): unsure at all n locations
acccgttgaagaacgaagaacggatgaataatggtgaaaaacggaccaaaaccttcacggatttgcttaccgaaacatctcggaagcgttacggaagcacctcggcttggattttcttcacggaaacaatttttttcacccaaaacagctaacatacatagccagggggctcaaggatccttataacagccaccttcagcctatttatatgaaaaagggggaggaggttgccgcccatctcgcccaggcgaccttcgctcgcccaggcgagctgggcggaattnctcatctcttggtattccccaaattctgacntacatctttaaattggttttgagacaacgagacccttgtacttgaca

SEQ ID NO: 126205 - DNA, 140 bp, Glycine max
aataagccttggaagaaggagcttcaccaccaagatgagccttggataagaagctcggagaggatgcttcaatggaggaaaagaaagagggagagaaagagagagggggagcacgatattgaaggaagaaaaagggagag

SEQ ID NO: 126206 - DNA, 294 bp, Glycine max
  unsure (1)..(294): unsure at all n locations
tgaaataatttgcttagtgacactagcttgctaagtgcaattcgaaatagaggaagaaatgtgcttagtgtgaatgtctcacttagcaacaaccttctgcgagtttaagttaaattttgcttagtgacactagctcgctaagtgagtcttgtaggttataaatacgcccaacactgagaaaaatgtgattntctacccctcttatccctaaaccctcacccaaaccctaaacccaccttctcttccacccatggccaccaaccgtcactgcttgccaccaaaccaccgcacaga

SEQ ID NO: 126207 - DNA, 345 bp, Glycine max
  unsure (1)..(345): unsure at all n locations
ggtttttttacctaattattatacccctggttaatgaatggggtttttctcttgacttaaatataattttgggcattttattttacctcataccgaattttgggtctctctattttaaaattaaaatatttgatactcctattttaaaaatctaccaatttggtctctctattttaaaatacaaacattntgtccctatattttagaaaattcataattntgattctcatattatagaaaattcacaattntggtttaatatataattnttcctatgttttatttcttttattttttactttggagntaattaaatcatttcttgatgatatcttaaatgaatat

SEQ ID NO: 126208 - DNA, 359 bp, Glycine max
  unsure (1)..(359): unsure at all n locations
aactagttccgccccggagtacgacagtcaccgctttatgagcgttgtacaccaccagcgtttcgaagccatcaagggatggtcgtttctcgggagcgacgcgtccagctcatggacgacgagtatactgatttccaggaggaaatatggcgccggcggtgggcaccactggttactcccatggccaagttgatccagaaatagtccttgaagtttacgccaatgcttggccaacagaggaaagcgtgcgtgacatgagatcctngtgtaggggtcagtggatcccgttcgatgccgacgctatcagccagctcctgggatatacgatggtattggaagagggccaggaatgcgagtat

SEQ ID NO: 126209 - DNA, 362 bp, Glycine max
  unsure (1)..(362): unsure at all n locations
caacagactcggtcattgccgtatagtaagaatgctaaacgtgaaaaaacacgagatatgctaaagaaaatttgtagaagtttcatatggaggaatgctgactctgctatcgcactatggaatcaaaggagaagttcanaaaagatgaaggtgatgataacattgatgaacgatattatgggagcttgattggatgtctaatgtatctcactacaacaaggccaaacattctatttgctctaaagaccaccactggagttattgttgacattcaagtactcattgatattgcaaacaatcctgtgtgtcatgggaagacttatcatttcaacatcgggttctattagttgatgttgatgccc

SEQ ID NO: 126210 - DNA, 417 bp, Glycine max
  unsure (1)..(417): unsure at all n locations
aactccaaaacgctnggacaaaatttgagctgcagtactatatgctactgctttccaatttccatcacctttattgcccaaatntctttgatctctaagcacttcagctagcacacgttccatttccaagttccatgcgaaaggtgagacatgtaaaattagcattctacgaaagtataaaattaactacacataaaaagacaacaaaatccaaagtattataaaatacaaaaatccaaagtatcacacatacatgagtatagagtcaattacacataagaaacaaaatccaaatccactaaaaacatctccctaatcaaagtttcttcttattngataggtggcaaacatattcattgctaaagtatcacagaatcttgtccattcctcagttgcttggatagttgtgacttcatc

SEQ ID NO: 126211 - DNA, 360 bp, Glycine max
gcagtggatgaaattaataaagataaaacttctgcggatgattctgacctagctgagagtgggaaaaaaaacccatttgtcagaaggcatgagctattgatcaagagtggacttgcagatgtgggttgctttaacctttttattttctaataatttatgattttcatgtttcaaaagtgttttatgctgatttttgtctgcctcctttccttaatcttttggtcctgatttcattctgaaaaaagaaaatttctttacccattttctgctgaatttagagggggagatttatagagagaaaactatctgttatagagaatttatacgatgaatagcttcttattcagagagatgtaatac

SEQ ID NO: 126212 - DNA, 342 bp, Glycine max
  unsure (1)..(342): unsure at all n locations
agctgtatatgtcatcttttgacttggattgctggaatgttgtattcatgtctgatgctattgcatttaatgattaatttttgnttaattcaccattgaaaacaaactattcagcttcttattttattcatttcatatgacaatacttgcttctccgctttcatcaacaacaatctatacttagtaatttactgcagagtgagattttatttacttagttcaagattgcctaacttgagctaatacaacatatccatacaaatgatagcacaaacttctatttatatgactcagttttgtagntcacaatttaaatgcactatgtctcatggttcaagtcac

SEQ ID NO: 126213 - DNA, 462 bp, Glycine max
tctctctctctctttttttcttacttgagccttacttaagcatataattgttttattctcctacctcatattcttacttgagggtcagagtcctctattttgcaagtccccccttcctatcaatggtatctttctaagccgacgtgtgaagtctgagaccccatttcagccacatctaccctgacgtgtcacggttctggattttggcaagaacatcatttgtgccaatatttaatgggcttaacttctttaactagaatgagcaagtccaatttcaccttggtgtatggatcttaatcttgctatattgtaagaaaaacctgcagctattactgattctagttgcaatgatgagaaagcccattataaagctggtgaaagatttaacagactcaacctaatggttatgagaatgactgctgcagacaatattaagatagctctccctaagactgataatgt

SEQ ID NO: 126214 - DNA, 446 bp, Glycine max
  unsure (1)..(446): unsure at all n locations
gacccaacttttctatcctattgttgtcacttttacttactttgcattttatagtttttagcataaaagatagtttaaattctgtttgaaattatcaatcgtacatgttctctcaacaatgcttcatttcagaacttaattcaggctaacattanttccctgtgttcgatactcggattcatccgttataattnttaaatacttgacgatccagtgcgctttccggcaaaccgaatttcccttgaatatatttgaacgaagaaaaagtggaacaaaaagtaactgtaggggaaatccaacaactactgtaggagacatgtttntctcttttcatttctttcattattatttttctttcttcctctcttattttttctctttcatcttgacttatttcttacactcgttttttaccgttgtcttttctctcttggatttctctccac

SEQ ID NO: 126215 - DNA, 383 bp, Glycine max
aaactaaatgatgttaatgtaacaattatttgctcaaaaaagaataattattagagaaaaattacaaattcctgtataatttagcccctaaaatatactcatgattagcggttatcatccactaatcaaatttttgattacaaccaagtattctctatgcgatttctggctacaacgactactgtctaggccactcttggcactacccttaatctccccctgagattaagacccaagaattctttgtcactaagccactcttggctgtaacaaacaatggatgtgtgagagaaaatgtattctaatcactcaaagactgttcacttaaatttatttaacctaatgaaactgacagcattacaacactttgcgcgctaacttag

SEQ ID NO: 126216 - DNA, 337 bp, Glycine max
tatgaaactcaaaaattctatgcagcaccactattatttgcctttttcctctctttccatggtcttctagatgtccactccttgaacacatacactctttcttccaacccagactcacctgttcgatacttgattgaaagaaaacatttcaaaagtaggaaatatcaataaataaatgatattaaatttgcaacataacatttcagactggaccatttctacaacaacataaacttcaattacatgatttgtagtcagaacaaaatccactaggaataactgaaaatgctgataaattaaattcaaagttgttctttcaactaaaaaaaacaacatc

SEQ ID NO: 126217 - DNA, 343 bp, Glycine max
  unsure (1)..(343): unsure at all n locations
taattagattcacgagtatgtacatgtatctgtacgactaccaatcccaaacaattgtttttttctggtttttgaaaaaatttgagaatttatttatatgtcatctatcggaaatgaattatggcctatcaaaattaaggtacatatggtcttgacacatttagaattgttaattatatatatacaatggtttaactaataagtagctcttcaatcaattaatccgaataatgtagtctaaatcataatatcagaagaaaataatgtctatatttacattgcagcgaaatatattntaatctagttatgttcaaaaaagaatatattctaatttatatcagtc

SEQ ID NO: 126218 - DNA, 350 bp, Glycine max
ataattaagggcttgatggctactttgacacaacctatatggacatatttgtatttaccgcttgtgttcataaaatgaatttttggaaagtaaatgaaattcttcccctatatcttgtcctaaaggaatataattttcaactgttttgattatgtaatcaaaattatgtttctttttaattgtctcgagaacatacagagtatcctgagggatttctggaatgttccagtcatccattgtttggtttatatcttcgaatcgaacttcctcatcgaagagattgtgttttggggagatctcatgggtctggcttccatgctcattgagcaagttattattttggacgattt

SEQ ID NO: 126219 - DNA, 426 bp, Glycine max
  unsure (1)..(426): unsure at all n locations
gctgtttggcaaaagagcttgtgtatgtacaatcatggccttcatcatgtcctcatttatacatttcattctaaaattcagagattcatgcaaagatcattactcacagttagtcgttcactcacggtttaagttcacactctcaccagttctggttcaagcttttctttcacaatcaatctgtctactgactaacaattctaattgcaagttcacactcttgttatttctttgtctaacatacacacattgtctcaaattcatgaaaggaaacacacatttaatcataagcatgcattcaatttaaaacaaggcatacaaccattttcacaaaatatataaactacttcactgccataccatcanaaggtaggtaaactgtcacgatgcttaaaatgagcactatctactctgccaagactacaa

SEQ ID NO: 126220 - DNA, 423 bp, Glycine max
tagtagaactctctctaaaccacaagccagttgcattggtcatttctgaagatgccccacagaaacatcagtatgcagccttttcaaaattttgttagcttttgggcaatgaagtaaaagatggaaaatgttttcaacaagtccacacctataacaagaagaatctaaggacaagtgacggttagtgcgaaaataatttgtgggaaggctttggtgatcaatacgccacaggaaaaatttgatgttttcttgtaattggagagaccaaaccaaggctccattcctcaagatagcgatagtaggggatcgggttctagtcaaccaatggtaagcagatttagcaaagtattcttcattaaaagcatgatcccaaatgataatatcctcaataagctcatttattgcaacactttgaagttcatg

SEQ ID NO: 126221 - DNA, 433 bp, Glycine max
  unsure (1)..(433): unsure at all n locations
ttctcaggaggtgagcttagttatgagaggggtatgtgtagctaaactctagcttctcaaggaagttttctcaaagaagcttctcaaggtagttttctcaagaaagcttctaaaggaagctacctagtctatatatagaagcatgtgtaacacttattgtaactctgatgaatgagagtcttgtgagacacaactcanagttcaacttctctcccttttttcttccttcaatttcgggctcccccctctctctttctctccctctgtcttttcctccattgaagcatcctctccaagcttcttatccaaggctcatcttggtggtgaagctcattcttacgtggcttattccctagtggatagcgctgtctcttacctcttctgctttgtcttccgctgcatctgcatggtggaaaatcaccattacaggacc

SEQ ID NO: 126222 - DNA, 368 bp, Glycine max
aaaggattgaataacattgactggaaaatcgtattgaacaacaaatcaaagcctcgcctttatagactcttcatgtctaaccaacaggaccattttgaagagttataaatcgtagaaaaacctacaaccaatttgaaaaaatacaaaaaccatttgaagagatacatcttttgatttattcagagacaatcactggtaatcgactaccacatcagtgtaatcgattacacacagctcttatgtgagaggatgtgactcttcacattagaatcagaattgcaacgcgtcaaggcactggtaatcgattaccaaaacattgaatcgagacagctatttgaaacgattggacactgtcaatactttgaaac

SEQ ID NO: 126223 - DNA, 442 bp, Glycine max
tactttcttgtctccaacgcgagctttgaccactgttcttctttcccgtgatgcttcttttcatgtccgcccgagtgggcttatagcctaaaccatacttcccacgatttccttgggtatttatcaggctagttatgccgccgctgtttttgcctaaacccatcccgggctcataaccgttccccaacataactcgggccatcattaccgctgcatcggacagacaaggctgcccaaagagggagtccacggaggaaatgctgaccacctcacaagactggagagcagtttctaacgattcttttgcggcttccacataaggcatggaggatgggcagcttaccaagatatcttcctcgcctgacacgatgacacaagtgccctccactacgaatatcagcttttggtggagtgtagaaggcacaactcccactgagtggat

SEQ ID NO: 126224 - DNA, 411 bp, Glycine max
  unsure (1)..(411): unsure at all n locations
tgactaccaatagccgcttctttaatcaaatatagattgcattgcagaaaagagtcaatacctcaagatataaacaagcaatttggacacattttgaaaccctgaatgcataatcaataaccctgataaaataaatgaaagttcaaatcagtaaaagagagacattttaaattttggctgaattataattataatagtttacaccagaaaataaatatgggaggtaagaaattctgagacctcattcctaaatcaaggtcaataccactgagcatttgagctgctattgaccattgcttctgagattcatatagcttagcaagtttctctctaataactaacacctatgataaanaatagtggccattaaagtaattgaattgagtcgaccaaatgcaagatgaagactac

SEQ ID NO: 126225 - DNA, 454 bp, Glycine max
  unsure (1)..(454): unsure at all n locations
ggctgctgttctcgtatttcctcttgagcttnggggtttttgaagagagggggaagagtttcnggtgaagaaaacgttccccctccacccctttatattttcgtacaggggttgctcgcccaggagagctaacctgtaccttttttacttnttttttaggggtgcattaaccatgtctcccccctcttacgggttagcgttttgcctaactcgagcctacttaagttagaattaggtgtcgattacttatttaaaacaaacaatagtaaaagaaacagcgaacgcaaaggatactgggctgccttgcagcgacgttctctgctcgtttagcgccgggaaggggtggcgctnntgtggtcgtgatcctatccttcattcgctttcatccctaaggacctgcaagtaagagccaaatgatatgcgaccaatcgtgaccgggcatcgtcttaccttg

SEQ ID NO: 126226 - DNA, 429 bp, Glycine max
  unsure (1)..(429): unsure at all n locations
gctcaagcagtggttgtggcaagtggattggacagtaaaatagaacatgtgttcacaaaaattaaagattactaaaaagtaagtgctaaaaactaaaaaatttaggtagttatggacagggttgctctaccttgagtattgcatttcatatgcacaaatatatagtttccaatatcacacttgatggttgtattcatcctattaaaattcctatcgtcctataggaggaatatctcattttgaagtatatctagtatgcatattacaaggaaaaataagatcaattccaataagaacatgtgttctagatcatgaataattaaaactcaacattggactcatcttatcaaaataagttaatttcacattggaacattcactctatgccctnggacaaagagtggtagctacatataatgcacctactat

SEQ ID NO: 126227 - DNA, 328 bp, Glycine max
  unsure (1)..(328): unsure at all n locations
atgctaaagcaatataatggcccatgttattccgacaaacatgagccacatatacttctaagatcggtcagggtcaaaacgaccaagagcctatggcatacccttatgatatctatattcacgcatacaaaaaaaagaaacatgtatggctgaaggacctatcgttaagataagcctgtattggacaatcaaaatgagggtccatcccctctatcttttctgtacaaaagaanatccaatgctgtgatagcatggatgacggcctaagaatatcagtaccacagataacatggatgatatcacatttaaagagcacaactacctatct

SEQ ID NO: 126228 - DNA, 245 bp, Glycine max
gcgataaagtgactgaaccgatatactgcattaatggcccgccactacatacccttgtatacccaacttattacaaaaaattttaaacgaaaactctttataaagcctttgtcataaatccatgaattccatttgggcattctgtgtgcgtctcggcaactaatcaatacagaaaatcgtgaatattccttattatataaaaaaattatatatggagagatggtaaagataatactttttaataa

SEQ ID NO: 126229 - DNA, 375 bp, Glycine max
acttctaatcaatagaagacaacaaggaggtaaaataaatcaaacttttctcacaagttaaaatcaacttatgcactttagctattttagaaactctcttaactaatttctccaaaggttgatttatttaccttcctagatcttctcttataaaatgcttgttggaaagtttatataaatttagcctatatatatttttaaaagtaaaagaaagtatgaatcaacactgcaaaataggacagttataactaccatgttaccaagagaagccaatatcctaaaacaaatcattccaatttagccatataattattaaaatcaaacctaaacaagatagaagtatactccctaatttctcctcaaacacgttattcc

SEQ ID NO: 126230 - DNA, 359 bp, Glycine max
catactcgctagcctcaaggcccgcttaacgcgagatcgcgtgaattttaagttatcttaggcctataaaaggagtaggaagccaaggagaaagacacaccaagacttatagctctctaatgaatacatccaacgcctgagcatctctcatggggaaaccctttctctttagccattctcccctcttcctttatccatccctcttcttctttcatccacattagcccctaaagtgtaaagtctctcatggcaatgagaggctaaaacccctttgttgggagcctagcagccaatgccattggaatgtaatctttctttactatctattaaatgcaatgccaatttttattggttctttc

SEQ ID NO: 126231 - DNA, 382 bp, Glycine max
  unsure (1)..(382): unsure at all n locations
cctcanataaatgttggtggcaactccacgcgtattcctttcttggaagacacacccgcgagtcacgtgtcaccctcccgccgaatggaaggttgcgacacatacggaagaagaggtccattttctttgatcttccgaactggtctgatctagacattatacattgtcttgatgttatgcatatggagaaaaatgtatgcgacaatgtcattgggacactccttaacattcaaggcaagacgaaggatggcttgaatacccgtcaagatatagctgagatggggacacgatcccagttgcatccaaggtctaatgggaagaaaatttacttgcccccagcttgtcatactctttccaaagaggagaagatatgttttttttt

SEQ ID NO: 126232 - DNA, 410 bp, Glycine max
  unsure (1)..(410): unsure at all n locations
ttcaaaaccatgctatgtgctcgcgactggtccctctcttcccttcgcagcttgagttcattgttgcttccccacagagctccgcgagatgtgttacggccatactctctcttgcaagctctcttggactcttgttcaagggctctcgcggtatttgcattctcttcccgtgatccggcacactccttccggatgtgtgtagcggccaacttgaacttctccttggcaagtttcgcctttactaactcgctgttgagagcgtggactctttcatcctgcttcggagcattaaaactctcttcggtgacgactntgaacttggcgagccaatctaaacctcgtacatgaactgtcagccattcatgtgaaccaccagtgatgccgttacnaacgcgcctaagatcttgatc

SEQ ID NO: 126233 - DNA, 228 bp, Glycine max
gaaattgcttatggcaaactgctacagatgaacggcagagttatcctacggctcaaaacagagaatgtggtgttattactggaaaaatagccaggcttttatagttggaacgctaaatctggactcacccgttattgggggttaaagtgagtcaattctaccttgaaatgtcattttggacttatgagatagctcacgctgtgcacttgatgaatatgagtgacccaa

SEQ ID NO: 126234 - DNA, 425 bp, Glycine max
  unsure (1)..(425): unsure at all n locations
tcgtataaagcgactaacaaatcataaatactttgctcaccccccattgcagttaccttttgtgcattaatgtgttaaagaaatttcaatgggggcttactggaaagtgcactatatcgtcaagtatttaaaattaaaacggatgaatccgagtatcaaacatagggaactaatgttagcctaaattaagttcaaaattgaagcattttttagagaacatgtataagtgataatttcaaaaataatttaaactaaacttgtttgataaaaactataaaatgcaaggtaaataaaatgacagcagtaggtagatatgttgggtctttctaacaaacaagctgatgcatagaaatatgtttctctaatcaatcatgctcctgtgttctatcgttgagcccaaantactaaaccctcgatccctcatc

SEQ ID NO: 126235 - DNA, 412 bp, Glycine max
aaatgatttctatacaaaagttattcgtataaagcgactaacaaatcataaatactttgctcaccccccattgcagttaccttttgtgcattaatgtctcaaggaaatttcaatgggggtttactggaaagtgcactatatcgtcaagtatttaaaattaaaacggatgaatccgagtatcaaacatagggaactaatgttagcctaaattaagttcaaaattgaagcattttttagagaacatgtataagtgataatttcaaaaataatttaaactaaacttgtttgataaaaactataaaatgcaaggtaaataaaatgacagcagtaggtagatatgttgggtctttctaacaaacaagctgatgcatagaaatatgtttctctatcaatcatgctccctgtgtctatg

SEQ ID NO: 126236 - DNA, 421 bp, Glycine max
  unsure (1)..(421): unsure at all n locations
cgcgagctttgaccactgttcttccttcccgcgatgcttcttttcatgtccgcctgagtgggcttatagcctaaaccatacttcccacgatttccttgggtatttatcaggctagttatgccgccgttgtctttgcctaaacccatcccgggttcataaccgttccccaacataactcgggccatcattaccgctgcatcggacagacaaggttgcccaaagagggagtccacggaggaaatgctgaccacctcaaaagactggaaagcggtttctaacgattcttctgcggcttccacataaggcatggaggatgggcagcttaccaagatatcttcctcgcctgacacgatgaccaagtgcccctccactacgannattcagctttggtggagtgtagaaggcacaactcccactgagt

SEQ ID NO: 126237 - DNA, 405 bp, Glycine max
  unsure (1)..(405): unsure at all n locations
cgtcatttgtattttgtggtcaagttaatttgtctaattctttcttgttctgtaaatataaattcagaaatgctttaaaaatgtttcaccaaatcgaaatattttcttttattattcctaatttatgttgttcgaatatacaacacaatattgaataaatatttgtaaataattaatttcttaaaatttaaggattaccgtaaaatctattataagcattacggtttagtaaattattcttataattagggcaatagttaaaaaaatataaagtttgtattgaaaaatataacatttagtgttattaatacatttctacaatgacttttaatataaaanaattccatatattaatctttaaccatttttctaagggtggtgttggataaagaatgtttaacattt

SEQ ID NO: 126238 - DNA, 380 bp, Glycine max
agttcacctcatcttcctggactgattcagacccttcattacacgaggtgttcgccaggtcctcccacctgctcataagacccttcttttctttaggcttaaaaacttcctattatcttgacttttctctagatctggacattcagacttgaaatgtccaagctttttgcactcataggcaactatggagcttttgtgtttatccttcttttctcgaggaattcttcttaaggagattcttcacttggactcacctttgttctccacatcttatggattttatgagggataaagatgagttcatcttcatttgagtcttcttcagagtcatcatcacaagaatcatcgactctaagtagcttggataaacctctcaagaa

SEQ ID NO: 126239 - DNA, 280 bp, Glycine max
  unsure (1)..(280): unsure at all n locations
ttcacacggatgtgcgattctggccaatcacatatcaagacactcgaaattgaacaatggaagctcttgagaatttcanatggtcataacttttcacacggatgttagattaaggcgcatcacatatagagacgctcgaaaatgaacaaccgaagctctggggaaattaaaatggtcataacttttcacactgaggacctattctggcttataatatattgatatgctcgaaattaaacatcggaagctctcgagaaattcaaatggtcataacttttca

SEQ ID NO: 126240 - DNA, 56 bp, Glycine max
  unsure (1)..(56): unsure at all n locations
tatccgagcctgctcaagcngctcattggggtgggaatcatgcgtcccccatggct

SEQ ID NO: 126241 - DNA, 365 bp, Glycine max
  unsure (1)..(365): unsure at all n locations
tctctatttnttattatggggaaaatagcatatcccttctttcttctaacactttccagatgtaatacctgccttaaatattttgtttgtattaataaaatatttcaatggtttataggttatcattgatcacaatttctgtttgttaaatagttttaaaatgtcttaaattagtggggaaaaaaaagccaaaaggtgttgggataacgggtacgcataacaagtcaatgaagggcgtattctaatttctaagtttgttttgaatgagggcatatttgtttaaggaatgtcagtgtattcaaaggtacactctgttttaatcaaattttgtggatgtaatttctcaccttaagacactcaaatgg

SEQ ID NO: 126242 - DNA, 312 bp, Glycine max
gctgagctatgagagagagagatgctctttggatttaaaaaaaaaacattcccctttcctattattctatttaagcaatgccacatgtctccgcctgagaggagcaaaaggggcccactttctctatagattgtgacccatcctcagccacatgaagtgagagataatccgacctttgaaatgcgaaaatcctacctcgggttgcgtgccgattctctggatctgaatcctcacgttcctttgcgtccaggagggccacgttttgaaagtaatcaatatatatatcacaacgctcagaagaagaccccgagc

SEQ ID NO: 126243 - DNA, 354 bp, Glycine max
  unsure (1)..(354): unsure at all n locations
cccctcaaacttgttttggccccattctttctttcgggccctctttgtttctcgttctaacacttcaattgtggccacattgaccgccctcaccttgtcacactcttttctaaccctaatgggtggcggcttgaacttttccttgaccacttgtgctctttcaagttccgccttcaaggcttgcacctctttgctctcctcggnggtttcaacctcttccaaacttgaaatctttagcttcgggaggcaagttatctcttgcattctatccttcagccacttgtgatagccgacgacgatcccattgccgcttcccctaagcttcccatcctttctttccaccacattccatgc

SEQ ID NO: 126244 - DNA, 428 bp, Glycine max
  unsure (1)..(428): unsure at all n locations
aacaactttttttgccaacaggaatcttggatgaaactccaataactcttcttattaggaatgtgaactctatcatgcaaaattgtgtggtcactaacagtcatattttcaattaagttcatggcttcttcaggtgtcttcaacttaattcttcctcctacagaagtgtcgagtaactggcttgactgcggccataacccatcaatgaagatgttcagttgtataggctctgaaaaactatgagtgggagtttttctcagcaagctatggaatctttctaatacctcactcaaagattcatcgggaaattggtggaatgaagaaattacagctnttccctctgcagttttagactttgggaaatattnttttagaaacttctcaacaacttcatcccaagtctttaaattgtcgcccttgaatgaatg

SEQ ID NO: 126245 - DNA, 339 bp, Glycine max
tttttatttgtacctcaaacatgctataaattcagctttcatggtagatgcgacaacaattgatgcatacagaatcgctttcatttgttttcgttccatatcatttctacgacattgtgtgagactaaatcttgctcttttctaaattggaataggtgatgaatacctttccatcatgaatctctctaccactttattgatatgttttttgagataagcctaacaatccttatgatctattatggaatatttatatccatatcacatagcttgcctctctctctttcttttcctccattgaagcttcctctctaaacttcttatccaaggcacccttct

SEQ ID NO: 126246 - DNA, 400 bp, Glycine max
taaggaaaggacgtaacgaaatatgatatgggcggctaacatggttctaagtcttggtgcgggggatccatgggtcatgtctaaacaccaagatgctctatatgacagttgtgattatatccctttccactattgaagagaactgccatagccattacctgtacttaatacaagaaaaatgtgtgcagctctctcttacagattccgaacaagtaacagacgtaaatgttaacaatatttcgcgattaaaatatctacacaattcaagcggttcataaatcaatattgtatgcacagattgaacatgcaacgcatactactgagatggatataaaccaaactctcataacctaccaacgatgtggacagagacctgtgatggatggtatgaacaatcaca

SEQ ID NO: 126247 - DNA, 388 bp, Glycine max
ctctgctcatacattgccttagtgaactcaagaggagtcacacccccaacacacagtcaacacttaagatgatcaaagtctctcccacatccaccgtcctgcagggcagactactcgtcgacaacccttcgtcaaccgcatcatggaagctaacatacctctaggttgaaaaccactgaacctggagtagtatgatgggaccattaatccagatgaacatttggatgctttcctgacccagacaaacttatacaccaatgatgatgcaatcctgtgtcgtgacttcccaacatccctcaaaggggcgacattgaattggtacggtggactctaccaaggtccattgacaacttcaacactcttgtcaagaacttaatgagcaatatgc

SEQ ID NO: 126248 - DNA, 227 bp, Glycine max
tcatacgtacaagaaaagaaaataaagcattaattattacagttacaagataacctttgtgaggccaaaatcagtcctaattggattttcatttttcttcaaatgaatattaataaaaaagacattaattcgtcaagattacccatcctttgccgttcagatacaccagtagcttccccgatcaagaaaccacccttagtagttctgtgagaatatacagagcagca

SEQ ID NO: 126249 - DNA, 335 bp, Glycine max
  unsure (1)..(335): unsure at all n locations
ctcataatggaacagagttttgactgtgattaatgatttttttatgcaactcatatatttgggtgtgatcttgtatcatatattgaagaaatattcacactcctttaaagaaatagagtagggttgtacttcattcatatattttaacttgactttatgtttaggtgacagggtatttgagttttttccaacagcgatgaaagcaactctcttacgcaggcaaattgcattcatgggcatgttttaaaatcaggttttggtgaccatggcttgttggtgctttctaattaccaagttcatgtgtactccanacgcaatgactatgaagctgctcg

SEQ ID NO: 126250 - DNA, 333 bp, Glycine max
  unsure (1)..(333): unsure at all n locations
gctgatcgaacgtacgtatgctattatcaacgaaagtgaanaatcgtgaattaaaatatgataatttcaacgacggtgatgggtataaaccgtagtagtcttgttacaaacaaacacggttcttataaaatcgcctttgtagcattcacatcaaaggcgattttataaaaacgcgcaaacaccttcataaagttgattaaaaattcaaaaatatcacacaatcgatgtagatttaacgatgtagattggttatattgtaggagtggatctagcctataatttgtaatctccgggctatagtgatttgatgaccgctcgtatataaatactatc

SEQ ID NO: 126251 - DNA, 332 bp, Glycine max
  unsure (1)..(332): unsure at all n locations
gtgactatggaacgagnnncaacaatcattaatcatcaaccaccaatcatctttgaatcatctattttntcaatctttacaacatcatctctcaacatctttcaatcaatctttcaatatctttctacagaaatttctgagacacttctctccatctttttaaaagatgttgatcaacactctctcttccaagagaagatctctgtgcaaaaaatagtgctattcatttttttcattctcttctccctttgccaaaagaacgagggactaaccacccggattcttttgtgtctctcttctccctcacaaatgattcaaaggactaaccgcct

SEQ ID NO: 126252 - DNA, 404 bp, Glycine max
  unsure (1)..(404): unsure at all n locations
ccctgaaactggtcgcaaattgactgggcccatcttgttcactatcgtatgcataaggcattacggaaaaatacacctctttcttatccccacctagttactctgattctgcagcacttcaacattcctcttgctaatgaacctttngtcaaggttcaacgttcatttgccattggagccgctgcagttgcatcctttgggtataggaaagatctagatggtcaatgggttcataaacaggatctatcgactaatgctcccgatgaacgcactccatctccaccaccaagggatccctcctcttcattactgaatgatgtccttagtgagctntgagatctttgtgcctttgtcggagaaagggttgactccatggattcacacatcacatgacttgaggatga

SEQ ID NO: 126253 - DNA, 390 bp, Glycine max
agagggaggggggagcacaaattgttgataaaataggagagaaggtggacttctagttgcgtctcacaagactctcattcatctaagttcaaaaagagagcacgggcgtctatttatagactattgtagcttcgcctgatatgccttcgtgacaaaacttccgtgagaagctcgagcttaactacacacactcccctatgatagctaagctcacctacgtgagaagcttacttataaagattgctgaacaaggctgagctgagctacacatacatctattataggtgatctcacctccctgtgattagaagctagagcttagctacacaccctgctatgatagctatactcaccgccctgacgaatgaacatgaagaatcataaaatagt

SEQ ID NO: 126254 - DNA, 327 bp, Glycine max
  unsure (1)..(327): unsure at all n locations
tggcaaataccactggatgcaacattcaatacaatcttctttttggctctagtagtagctaacaatatatttcaaaggaaagtcttcccaattccaccataaccataaaggaagaaaatctggcaaggattagaaaacacagcttcaatgatctgattgtagacatctaactactcttctgccaacaatttcaatagagtagaatggagctcaattaacttatttgtgtcataatttgagtgttctacaatngaattgttttcatagaaatcaaagttagaactatctggacatggtagagaagtataatcttttaaagatattcca

SEQ ID NO: 126255 - DNA, 397 bp, Glycine max
ataaaattatgatcgtatcgtttgtttatgagattaaagaaaatatgaaaccgaatcaaagtttggttaaatgtaaccattaaaaagggttatttatccactatgcaggttattcaagtcaatcataaattttttagaatttaagaggaaagaatatatttctttcaacagtagcactacttaaccaaatcccaactattactacatattcaattttgtcagctgaaaagatgaacccaattttgtcagctgaaaacaaattatacattcagatggagttaacaaagtttgtatctttatgaaaataaaagattggtctattggcttgttgacgggtgaagggagaaggaacataaatgagagattaccgcttcaaattattcaattgatatttcta

SEQ ID NO: 126256 - DNA, 271 bp, Glycine max
  unsure (1)..(271): unsure at all n locations
atcccatgcttctttggccgtcgttgcgttggatatcttctcaaatgtatcttcatccaccgattgataaatgagaaagagagctttcttgtctctctttcttgacttcctcaacgtctcctttacaccttggcttagcgaggcttcatcttgctcctcgaacccattctctacgatatcccacacatcttgagctcctagtagcgccttcatcttgatactccaattatcatagttgntctttgtgagccatcgcatttgggaagggaaa

SEQ ID NO: 126257 - DNA, 483 bp, Glycine max
  unsure (1)..(483): unsure at all n locations
actcacgcttctcgcatccacacctggaaggatctgattacggcctttcttatgcagtatcattacaactgtgacatggctcctgattgaactcaacttgcaaatatgagtaaacgggaacacgagtcttttaaagaatacgctcgacgttggagggacctagcagcacaagttgcccctcccatggtcgagagagaaatggttactatgatggtaaataccttgccagtattctactatgagaaattagtgggctacatggcctctagcttcgcggactttgttttcaccggagaaaggattgaggtgggtttgaagaggggaaagtttgattacgtctcccccgtanggtccagtggtaggaggaccagaacagctgggacanagaagaaaganggagatgcccataccatcacttcaacacctgcgtgaccaangccgcgcanacccccatgtacccaccatatgacaacatacccgagt

SEQ ID NO: 126258 - DNA, 268 bp, Glycine max
aattcaaatggtcataacttttcacacggatgttagattaaggcgcatcacatatagagacactcgataatgaacaacggaagctcttaggaaattaaaatggtaataacttttcacactgaggtccgattcacgcttataatatatcgatacgctcgaaattaaacatcggaagctctccagaaattcaaatggtcataaattttcacacggatgtccgatttgggcgcataatatgtcgagaggctcgaaattgacaacggaagct

SEQ ID NO: 126259 - DNA, 443 bp, Glycine max
  unsure (1)..(443): unsure at all n locations
tgatcggcatcggtgaaactatgaaatttgtatttacgagagctnccgtggntcaatntcgagtgtcactatatgtgatgcgccaacaatggacattcgagttaaatgttatgaccatttaaatttctcaagagcttccgttgttcaatttcgagcctctcaacatattatgcgcccaaatcggacatccgtgtgaaaagttatggccatttgaatntctcgacagcttccgatgtttaatttcgagcttatcgatatattataagcctgaatcggacatccgtgtgaaaagttatgaccatttgaatntctcaagcgcttccgttgttcaatttcgagcctctcgacatattatgcgcccaaatcggacattcgtgtgaaaagtatgactattngaaattctcgagagtttccgacgttcaatttcgagcgtatcgatatat

SEQ ID NO: 126260 - DNA, 89 bp, Glycine max
ggggggggatggggggaagcaaccccccccccgacgaacagaggaaagacgaagagaaagacgacgacaaacggagcgacgaaggagaa

SEQ ID NO: 126261 - DNA, 439 bp, Glycine max
  unsure (1)..(439): unsure at all n locations
agcttataagaaccaaaatgcctcaatcatttccaaatatgcatgtgaattaggacgcatcaacaagaatcatgccaaggctattgtgcaagcaatcaatggngcaaaacacaccaaatgattatgatgatggatggctcanattctcacaaaggtaaaatcatcactttcaaattgagctttcaaaactatcatgacatgtagagaagaatcaaggatttcaagtcacaaaatgtcaagaacttttattttcaaaacaattacccatttcttgaacatatcctataattcaaagaanaacatgcaaagtcgtacgtgcacacaaaatngacccaaaatattaaactaaaaatccgacgaaactaacaacattaacaaattaacacangttacaaatttacaaaaccaacaaaactagccaaacccaagaacactcccc

SEQ ID NO: 126262 - DNA, 468 bp, Glycine max
  unsure (1)..(468): unsure at all n locations
nttaaactntatacaagaatcccgctctgataccacttgttggaccttgtggcctcaataatcttaagagggataggcttagaatgcagaagaagcaacaacataaataagataagggaagagagaatgcaaacacagttttatactggttcggccacaacccgtgcctacgtccagtactcaagcaacccacttgagatttccactatctttgtaaaatccattacaaagtctgaaccacacagggacaacccatcccttgtgttcaggaatcctttacaacacgagactcacagtctcttaaccaatctcattgaataagaagaatggaagaagaattctctcttcaagagaagaatattacaataaagatcatgtaggaatccttatagattttgcaagtgtttggccaaggatttctttngagagagcatttgacaatgaagttcttttggaatctctctcatt

SEQ ID NO: 126263 - DNA, 97 bp, Glycine max
gcgaacaaaatggacgttgtttatacacttacgctaacttcgtcatccaaaaaaaaaacaatccttttcgggactgcttaacgacttgttttcaaat

SEQ ID NO: 126264 - DNA, 326 bp, Glycine max
  unsure (1)..(326): unsure at all n locations
tccttgtggaaccttcacccgacgaagacactgacaaaaacttatcttctccttcttggacaaagtatggcaggctgagggcaagtaaattttcttcccatcagaccttggatgcaactgtgattgtatacccatatcagctagatcttgacgggtattcaagccatccttcgtcttgccttgaatgttaagaagcgtcccaatcacactgtcacanaacattttctccacatgcataagatcaatacaatgtctaacgtcaagatcacactagtacggaagatcaaagaaaatggacctcttcttcatatcaactctgactttat

SEQ ID NO: 126265 - DNA, 353 bp, Glycine max
  unsure (1)..(353): unsure at all n locations
ctctttttttttaatggcgcaagctgatggtcagaattttaagactttcatgcgaagatcacaaattgaagggttaaaggcatggaaacttgagtgagcctgtgtgacatcatttatgcaaagcaagttattctgaccctcaaagagacttcccattntttgatattgtcaatgaacatttaatgattgagaaatctgcacaaggaaaataatcttctgttctttaatntgagattggttgtagtattttgtacccagagaacataagatctcagcaatgtataacaaggggatntgattatcctgcagcataagtgagggaaattctcgatacttctcattntcatctttta

SEQ ID NO: 126266 - DNA, 393 bp, Glycine max
  unsure (1)..(393): unsure at all n locations
tgcaagcttcaagcaggagcatcataacacttctctcatatgtcaccattcccttctcttgagcagcctacaattcttgctgtgcctaggttcagcccttgaaaccaaagcccgccatgctgtctcagatatgcctttttatcacgcagntccataaaatctctacctggtaaacttttagaactaatgtcttcatctggagaaaatacacctatttcacggcatatagcttcagcggtgttcttgttgtctccagtaataaccataacacgaattccagcatctctgcagtcttcaattgcttggtatacttcctccctaggaggatcctgaaaacaattcaatattcaatttcacnaaaacattaaatagatatgataaaaccgagaaagc

SEQ ID NO: 126267 - DNA, 477 bp, Glycine max
  unsure (1)..(477): unsure at all n locations
ctccataatactagataatatgaagcacaacttattatcatgttaattaagcctgtcccaatcttctttacctgccagtgatttgatgctaattagcctaacaaatacttcatttttattctatttggagttgggttggcaagcagcaaattaatacacgaaccaaattagattaacacatattaactattaattaagtccaccaattcatgtttaaccagcaatttccaatttccttaaagacatatttgaaccaatgtgggcctgagtcaatgacagacggatattaaaaatcaacggggaagaaaaggtgtgttacatacatagctactaataaaaagcctaccaattattaattatttaggaatcgtcatgatntaatgggctagctaattaactagcgtcttcatcattacatgcatncatatacggtatgcagatttgtgtgtatatatatatacacacacatacatacta

SEQ ID NO: 126268 - DNA, 410 bp, Glycine max
  unsure (1)..(410): unsure at all n locations
gcatgccagctnnggagaaattcanaggggcataacttttttcacggatctccaattcagacgcatcgcatatcgagacgctggaaattgaacaacggaagctcttgagaaattaaatggtcataacttttaactcggatgtctgattcaggcgactcacatatagagacgctccanaatcaacaacggaagttgttgagaaattcacagggtcataacttttcacactaaggtccgattcagccttataatatatcgagatgctcgaaattaaacatcggaagctctcgagaaattcaaatggttataattattcacacgggtgtccgaatcgagcgcataatatgtcgagacgcttgaaattgaacaccaaagctcttgagaaattagatggcataaccttcacactg

SEQ ID NO: 126269 - DNA, 428 bp, Glycine max
  unsure (1)..(428): unsure at all n locations
tttattcagaacattagaagttatctcttttatcttagtgagagtgattctcctaaattcttgagtgattcaagaacaccctggctgtatcaaaggactttcacaacctttgtgtgttgccctcgctggaaagagtgattctttccttcctatcatctccacccttgttctttcaaaccacaattccagaaaatccacctctgcccaaaattatctcgtgaccataactcccattttacacactcaaattaagtgattcttgatcctaaattgaatttcaaaacgagatctttcacctcgttttggaatcancctcattggagccctgtagcttccgttattgccatttctatatttctgtccagccaccacttaacctacgttttaccatcccattcatccattttatgccagaaaccaccttatta

SEQ ID NO: 126270 - DNA, 265 bp, Glycine max
ttaagcaccgcggctgcagcttagtgtgaggattgacaataattgatattagatgtaagatcatctaattcctttcctggagaagatgaggggtctgaacattgaacacgatgaaggaggatggaggaatgacaagtatatggagagaaaaaatcctacaagatatgaacgtcgaccaagagatgaaaggattgagggagtgaaggtgaatatccctactttaaagggacttttgatccggaagtgtatcttgagtgggaaatga

SEQ ID NO: 126271 - DNA, 366 bp, Glycine max
tattcatttaccagcctaagggggttgggttaaaaaagacggtggaccattagttcgatctttcttttctcataccaccatatgattaattatggtgagaataccctaggtggagagagaactgtcccgaaatttgagtgaaaagtaaaacatttgttgaaaaataagaaaatatcttcaccacgcaaagaagacaaaataaagacattttcattgtaaatgtcatcactatgagagaaaattgagagaatgcatcaaattatccatatgttgtctgaacaaactatgaaacaaatccataaagctaaactatacagctctatgatttaccatttactctatccagatgtattactatgataacta

SEQ ID NO: 126272 - DNA, 310 bp, Glycine max
agcttcatgatgaatcaagaatgattcaaggagttttgatgattttctagatgatgaaaaaaaactcaaaagtcaagatcacttcatgataacaaagatgaagacattcaagaatgagttcaagattgagtcaagaacacttcaaggatcaagagccaattttgtttccagaatcaagaatcaaagaattcagaataatcaagatccagattccagactccaagattcaagaatcaagaagagacttaatcaagatatgtattaaaaagtttttcaaaacattgagtagcacaagaaggtttcaccaaat

SEQ ID NO: 126273 - DNA, 410 bp, Glycine max
tatccaaaacaatgattggagctcgaggtatatccttataactcaacacaaagtccagaggcaaaatatcaatcgaaccatcaaataaaatatacaatattaagtctagaggcacaaaataaataaaaagttccaagagcacagaaaaaatccaccctcgcgtttagtttaattgaagacgaaattaacgcattttgccacaaatacaatatccctatgtttgtgattcacaattgaaggcgaaacaaacaaaaagggagtattactattcccacttatcaaaagctacgttcgtggagtggtaacagtaacacaacggaggcgcggttgtggactttgaacaaccccttgagaaagaaatagtaaatgaatgcgagtcgtacttgaatcgaagtcgctaatctggatta

SEQ ID NO: 126274 - DNA, 429 bp, Glycine max
  unsure (1)..(429): unsure at all n locations
ctgcagctgtctattagggatacttatttgcccagacattaanaattaatgacttccctcacgtactgtctcgtggggggtatgaactgcttgacaagaaacttatggaggagaagagcaagcgtggacatgaggaacattcgtgttctgaaagcccatcactcaacgtcgacccaccatctccagttgcaagacacttgaagtggaagatcgcccgcactaagcggcatggccaaatgacgtctgaagtggcacatgatattgtagacaaaattgtcagctcatatatttttttggttactgtcattggcaaataatggttagctaacctattcaaatttgtttattcaattcaacatttgatatcatgaggattcttaccggaacaagaacacggggattttgtttgctgggcacagactactcaca

SEQ ID NO: 126275 - DNA, 228 bp, Glycine max
  unsure (1)..(228): unsure at all n locations
tattataccagacaagggaaccattntgctaacagctttgtgatcagaacgagctgggtggactgggccatgtgaaacttttgtatagccttcatcacattgcatcagatattaataaagactttacaaatattgacttataaaaacaagtcatcaatatgggtaagtgtctaaccactttctccatcaaataattatttattatgtgtccaacatatctactactca

SEQ ID NO: 126276 - DNA, 384 bp, Glycine max
gacctgtcacccacaagagaacaccttcatctctttggtatgtgctgtagaagttcgttgtcatgtttcaatctcaaggaaaaatcactgcacagtctcatcctttgtctacagagaggtgagcttgaatttaattggatcacaaaattaaccttgataaaaaatgtcttcaggatgaaaaaagaatgaagcccaatattgttgcccaacgaaatagcaaactatgtacagtttgattaatatcaatcatcaagacaaaatgtggcagtgttaggcacataaccaaaccctttgatctgtagaatcaaattgtctaacactagagatataagtatagagtcacgatgggctgtgcctctggcaataaatctgtgaacttcatta

SEQ ID NO: 126277 - DNA, 309 bp, Glycine max
  unsure (1)..(309): unsure at all n locations
agcttctattcatgacatattgtgtactcttcggccattcattaacccaatcacttgagacaagcactcggtcgagcctactntttgaatgatcattcaccctataccaagtgaacttccttcccaccataagtatgtcctccacctccatatccccaataaatttgttaaatgcctccatatccncaataaatttgttaaatgcctccatatcccttcctcccatcaaaattcttgagtctcttctttcttgtgttggccatgccgaactaaaatcaccattaaacaccaaaccccactcttggcatt

SEQ ID NO: 126278 - DNA, 423 bp, Glycine max
ggggcggtcccacttgcgcccagaatggatcctatttatgttcccaacagagccgcatcaggcacgggcaggcccctcacaatccccgccgcaaacccgccgagaaaacagtccccggcgccggtgggatcaacctgatcagcctcgaacggcgccaccttaaacgcaccgttttcacaaaacacctcgcaaccatccttcccgtgcgtgacgaccacgcaacaccacttcctcacctcctccacgtcaataaaaacggcctcatccgcagaagccttgagaaacgccacacgcggcaagaggtggaagaacccgctctctcttagcgccacgtggctcacgcgaccgttgatgttgtcgaacctgcgaatcagagcctgaatgtccacgaacacgtggtcgcagatcgagagcatttttttc

SEQ ID NO: 126279 - DNA, 353 bp, Glycine max
  unsure (1)..(353): unsure at all n locations
agcttgatagatattttatagggaacaanattttttaattgaatttgngtataataacctacaataaaattttacttaaaaaaaccgattattaggtcaacctggaaggctatttatattggtcatttggcataactttttaagaaaatttctctctgcaaccctttgaaattctcttagaaataggtgaaaccgtgaaagatacaaagcctaccactctttagggtactaggatgtatcttctctttattcttcaagcatggtacgaactccatctttctcttttattaagtctctttgtcatcttctgtccaaaaaaagtcacttgtcatctaatcaaatgatttgacgtt

SEQ ID NO: 126280 - DNA, 451 bp, Glycine max
  unsure (1)..(451): unsure at all n locations
accttaaaactacctatgcgaacttacataacctctaacctatttgctatataaccacaacagaccaattatgacttctccagcaatagatacaatcttggatggaggaatcaccctaatctcatatggtctagccctcaacaacaacaacaacaacctgctccttccttccaaaatgctgctggcccaagtagaccatacattcctccaccaatccaacaacaacaacagccccagaaatagcaaacagttgaggctccttcacaaccttccctcgaagaacttgtgaggcaaatgactatgcaaaacatgcagtttcaacaagagaccagagcctccattcagagcttaactaatcagatgggacanatggctacacaattaaatcaacaacagtcccagaattcagacangctatcttctcaatttgtccaaaatcgcaaaaatgtca

SEQ ID NO: 126281 - DNA, 435 bp, Glycine max
  unsure (1)..(435): unsure at all n locations
ctttggaccttgaacaagccatcaattcctctttattattatgctatgtgctcgcgactggtgcctttctttccttccaacttgagtacattattgctaccccatagagctccgcgaaatntgttccggccatactcttccttgcgagccctcctggtctcttgttcaagggcttttgcggaaattgcattctcttcccgtaacccggcgcactccttccgaacgtgtgtagcagccaacttgaacttctccttggcgagattgcctttcctactcgcttttgagagctggacttcctcgtctcttccggtgcttcaaaatctcttcgctgacgacttttaacttggcaagccaatctaaacctcgtatgcgaactttcagccattcgtgtacccaccaatgatgccattacgaacgcctctaagctcttgatct

SEQ ID NO: 126282 - DNA, 411 bp, Glycine max
  unsure (1)..(411): unsure at all n locations
agcttcgnatatcaatggtgttgaanttttatatatatatatacatatcaatatcaacgaggacaaacttatactttgctttcaggagattttttttttactgcaaggagataaaaatcattgtaatcatccggaaagattctcatttatatgtgcggattgactagaggaagaaagggcgaggaagcttacttgagggatgaatgacttatttctccatttcaatggattgagaaatggaaatcattaatggattgaaacacttcaattgttttttctgagatgtaggctntcttggcactgtaattatgggatgtatttttttggcttcttatattggcacaactactctgaatgagaatgcattgccaggtgaaacatatcagtctgttaaatatcagttccattaat

SEQ ID NO: 126283 - DNA, 380 bp, Glycine max
  unsure (1)..(380): unsure at all n locations
aaacaattaccaaccagatatcataatctcaatataatctctctgtttttacgatctccatttaaattattaattcaccgacaaaatcactcactcgacccctcctttctttaaaaaaaattaaaaatttccatatatggttcttcatatattcattagtatttggataaaccgctgcaatattaattctaaaatcataccatctatgttntatatcttattataaaactaaataaagaatgaaatttattataaaatttaaattcnaaatcaatcctaatttctttaacctaaaaataaacatatataaatatatttaaaattaattctcaactcataatcaattgtctaaccatacacctaatatacactaatactat

SEQ ID NO: 126284 - DNA, 310 bp, Glycine max
  unsure (1)..(310): unsure at all n locations
cgttcttccggagcgacgcgtncagctcanggacgacgagtatacctgatttcangaggaaatanggcgccggcggtgggcaccactggttactcctatggccaagtttgatccaggaatagtccttgaattntatgccaatgcttggccaacagaggagggcgtgcgtgacatgagatcctgngttaggggtcagtggatcccattcgatgccgacgctatcagccagctcctgngatatccgatggtgttggaagagggccaggaatgcgagtatggccagaggaggaaccggtctgatgggttcgat

SEQ ID NO: 126285 - DNA, 427 bp, Glycine max
  unsure (1)..(427): unsure at all n locations
gctntgtgtaatcgattacactaatttgtttatcgattatcattgatgggttctgaataaatcaaaagatgtaactcttcaaatggtttttgatttttntcaaatggttttaagtttttctaaaagtcataactcttctaaatggttctcatgaccagacatgaagagtctattgtggctttgttttgaatctttctatcaatccaattaatcttatacaatcctttacaagccttgaatctctttgaactttttcttcttctttgtgccaaaagatttccaaatttttctggttntctaaaccttgaaaacttngtgtattcattctttntcatctctttctccttttccaaatagaattcgccaaggactcaccacctgaattcttctgtgtctctttctgccttttcaaaaaacaaaggactaa

SEQ ID NO: 126286 - DNA, 402 bp, Glycine max
  unsure (1)..(402): unsure at all n locations
tctatacaaaagttagtcatataaagttactaacaaactcccncaaatttacagttttgcttgtcctcaagcaaagaaagaatagttcacttgtcctcaagtgacaaagacagtgtccaatcgaacgataatggtgtttgattcaccaaggacatcaaccatatgaactgaatatcatggaatgcctaaatcaatcacctctcacaagtattagagtcacaactgaaataagctagtaagcatgacataaatcaaggaaggatcatcaaccaaaacctcacagtcattgtttcactcaaaatcaagtgtttaggcttattccatcataaacaaccaacacaagtnccaaccttttcatttcatctcatatcatacagtaatgaacacacaaaaatgaatccg

SEQ ID NO: 126287 - DNA, 353 bp, Glycine max
  unsure (1)..(353): unsure at all n locations
ttctggtttgttggcttgccttgcatagctcgcaattttcttttcaatttgaaccttcacttgctcatgcaacttcttcacatactcagctttagcctgtgcatccttattcttaaacatagcaatgttaggcataggcaacaaatcaagaggagtcaaaggattaaatccatacactatctcaaatggtgaacaattagttgtgctatggacagcccgattataagcaaactcaacatgaggcaaacaggcttcccaagatttaagaattttctntaaacagtcctaagcaggtgcctaaagcctattgactacctagtttgaccatcagttgtggtgacaagtatataaac

SEQ ID NO: 126288 - DNA, 347 bp, Glycine max
tttttttcaaaaatttaacaaaaccacaactttttattggggtcttgaatggctatcaaagcctatatatatgtgactcgagacacgaatgtgctaagagttttttagaacaaaaagggccttatcctcttaaaaaagaaaatcatgttatcctcttacaaattccttggccaaattacttgtgattcaataaggaattatttaaattctcaaattgttcaatctatctctctcaagagagatttcttcttttcttcttcttcattctgaaaagggattaagagaccgatggtctcttattgcgaaagaattctaaacacaaaggaacggttgtccttgtgtgttta

SEQ ID NO: 126289 - DNA, 391 bp, Glycine max
  unsure (1)..(391): unsure at all n locations
tgcagctacactgttgttagatatatataatttgattattattaatcaattgtagcttttacaataaaattatttaataagtaggtattaaataacggtagtataaattaaagtagttatttgggattggctaaatgttaaagacacccaattcaacttttacatgttcctattttcggtacctacactatgggattatttaattaattattatggtattgacatggagtattgaataattttgttgctaaataattatgatggaaaaanttaactgattantttaatgtggtttcttttctttcacttatgttttttatcctcaaatttaattaaattttattaaagatattaatattaccctatggcacatgtacttactataaaacat

SEQ ID NO: 126290 - DNA, 410 bp, Glycine max
  unsure (1)..(410): unsure at all n locations
tttccttaaagaaaaaatagggtaaaaaaatccactttatgaacttaccttcangtaccataaagggggaaaacatcttcatatgctacacccgacatggcataaacaaattacaacctttattgccaacttatggaactagaatgcaggaaaaaaaatgctaacgtggcctttaacgtcaatgatactgaagaggatagagtttgacaatattcctctntntttggctctatgagaactaaaacaaaatggtattaccgtggccttatttcttaaaattagtaacatgctcagttaatcaaatattagatacctttgaaacaaacattataattattttcttcattcaattcccattaaaaatagtgagtaatgactttcagatatttttgcagcaaagtataatctaa

SEQ ID NO: 126291 - DNA, 346 bp, Glycine max
  unsure (1)..(346): unsure at all n locations
agcttgtaaactttatacaagaatgacgctctgttccacttgttatacaagnggccncagaaaatcttaagaaaggggggtngaattaaaatattaccaactatttccccaattaaaattctatatcactttctattcaagttaccaagtcccttaacaatgaactccttaaatcttgatgcgcataaaaccatgtgtatcttaataataggcattattttattaaagagtctaaggaaagagaaaatgcaaactcggatttatactggtttggccacacccttctggctacgttcagtccccaagcaacccgcttgagagttccactatcttgtaaaatccttta

SEQ ID NO: 126292 - DNA, 350 bp, Glycine max
  unsure (1)..(350): unsure at all n locations
cttgtatattgctacttccaaagctactcttacaatctcaaattttgatacccaacaaaccatggttntcacttttgttactcaaagtaagtgttttttcttaatgctgcgccaagatcagattataattcacaaaagaatgagtgtcttgtatgaacaagaataagcataatgcaggaaaaaggatgaacagaaaaaattgcattgtgcttacagcagcccctttgttcaatctctgtacgatttcttctaaatacagaactctctctctagttacagaataaaaactctcttgatctatgctatacaagaagaagaaatagaagcactatttcaatcctaactaacct

SEQ ID NO: 126293 - DNA, 367 bp, Glycine max
  unsure (1)..(367): unsure at all n locations
cctgaggcatgcaagcttgcttctacagaaaagactcaatctatatttgtactaataagtttttcaaaacattgagtagcacatgaagtttccacaaaagcttataccaaagagnttttactctctggtaatcgattaccagtttactgtaatcgattaccagtagccaaagtttgtttcaaaagctttcaaactgaatttacaacgtttcaattaatttcaaaatggtgtaatccgatacaagatttggtaatcaataccagggtgtttgacattgaaatcaattcattgtgaagagtacatctttcacaaaatgctttggtatcgatacatgattggtatcgatacaggataagttgataaaatc

SEQ ID NO: 126294 - DNA, 454 bp, Glycine max
  unsure (1)..(454): unsure at all n locations
cccataacatgtggtactaggtggcggtcgggcgatggtgcacaacatgttttccacatccacaaatcgcgcataaacccaccatcccctgttgcccacctccaactgagctcacgtactcccacgtagcccatatcctcgtttttctcaaccccgggtccccatcaatcctcccaagcttgcccaacatccaagtaattcatcatccaaatcatcacaaactaacaaaccaagcaaaacagggcaaaggcagaaaactctgccccaaactcaaaccaaaatcacagctttntctcacttaaagaccccagtaacatttcctttgttccaattcgttaaccgctggatcgacttaaaatttactggagtctctagacataagtctacatttaccgtgggatcactatcaacatccagactcattctaatactctttcacaccagcattacatac

SEQ ID NO: 126295 - DNA, 445 bp, Glycine max
  unsure (1)..(445): unsure at all n locations
agcttgtagaatggctagacattatctatgtagggtttggctgggctcaaggataaaagggatgccccacattatttccatgacacanaaatgcaaaaatgatgatttggaaactntatgcaaaactggtcatgcatgcacctatgcggacactcaagtgtcaaatttttatggtcatgtgatgctagggctcangattcatttcctctattttaatcaacccaatgtttccaaaatatgttcttttatcaatttgtgcattcatccgagtccatttcgggcgtccgggaaaatcttcacagcattcacccttcaggtgtatacacattntttcaaaagctagttacgatcaatgaatttttcaaagaaaagtggaaatcgtctcttttcaaagcatgttggtctttcacttgacaactatttttccttttctacttttccttac

SEQ ID NO: 126296 - DNA, 356 bp, Glycine max
gcattatgtaccatgttcaattattctgttttgttgctgtgtgtttttttttttagaaatgggtttatgatcccaacatggttggctcatggtgcctaacacatgcaactaagaatgtagtgtgaagcttcacgcttccccttttttgtttttgtagaggaaaacacaaggatgagcaaacatgaaaacaaatggtatgcaagtttgcagatcaaaaagtttggtgaacgcatatgcatgatgatgccatgactcatgcaaaatgtgaggctggaatatgataacagacaaatgcaggaacgatatgttcattatgatgttatgaagagatgcttatgcgatgcatgatatgaatg

SEQ ID NO: 126297 - DNA, 448 bp, Glycine max
agcttaaacattcaatttcgagcgtttctatatattatttgactcaatcaaacattcgagataaaagttattgtcgtttgaatttgctcagaggctcaacattcaattttgagcgtctcgatatattacaggactcaatcagacatccgagaaaaaagtcattgtcgtttgaatttgcttagagattcaacattcaattttgagcgtctcaatatgttacgggactcaattagacgtctgagtaaaaagttattgtcgtttgaattggctcagagattccacattcaatttcgagcgtctcgatatattatgggactcaatcagacatccgaaaaaaacgttattgtcgttggaattgggtcagagcttcaacattcaatttcgagcatctcgatatgtacgggactcaattatacatccgagtaaaatttattgtcgttgatttgct

SEQ ID NO: 126298 - DNA, 285 bp, Glycine max
cgacataacgtttacgctgtttctgatttattcccgcaatatatcgagacgctcgaaattgaatgttgaagccctgagccaattcaaacgacaataactttttactcggatgtctgattgagtcccgtaatatagcgagacactagaaattgaatgttgaatctctgaccaaattcaaacgacaatagctttttactcggatgtctgattgagtctcgtaatatatcgagacgctcgaaattgaatgtggaccctctggccaaatcaaaccaacattacgtttta

SEQ ID NO: 126299 - DNA, 346 bp, Glycine max
  unsure (1)..(346): unsure at all n locations
agcttataagaacaaaantgcctcttttattttcaaatatgcatgtgaattaggacgcatcaacaagaatcaagccaaggctattgtgcaagcaatcaatggggctaaacacaccaaatgattatgatgatggatggctcaaattctcacaaaggtaaaatcatcactttcaaattgagctttcaaaactatcattacatgtatagaataatcaatgatttcaagttacaaaatgtcaagaacttttattttaaaacaattacccatttcttgaacatattctataattcaaagaaaaacatgcaaagtcgtacgtgtacaccaaatttacccaaaatattaaact

SEQ ID NO: 126300 - DNA, 437 bp, Glycine max
  unsure (1)..(437): unsure at all n locations
ntataagcgcgggtctgggagacgaaggtcaagtgtgttttatatacgaagaatgtcgtccgagtacattggatttggtacgaccatgccctcctgatttccagctgggaaattggcgagtggaggaacgccccggcatttacgcaacgagcataatgtaaacctttatggttntaaaagctctatagttgggcctaggctttagagtttttcctttggttaaggctttgtgtcttttgtttttgaatttataatacaaggacctttcttcatctgttcctacgtctctacccattctcattcattngcatgtntacttctttatttctgaaacggcagatccgatgacgagtcccccgaaggtacctgtgacccgcttatcaacttcgagcaagaaacgaatcaaacgaaagatgaagggaacgaagatgtgggac

SEQ ID NO: 126301 - DNA, 399 bp, Glycine max
agaacacacttttatcttttattaaatccggacttgagaaccaaccataacatcaaggacttgcaaatatggtctccagatggagatggagatgggactacttgggcttcatccagcctgatcacactgccttcttcatcaacgttggtgatctcttgcaggtacacattttaacattggtttaatatttttttttatttattttggtacacgttttaacacttctcctatctatgattgtttgtcttttagaagataaaaatggaattagaagaaaggaaaacgtgggagaataagaataggataaggagaaaatgatcctatgaatatcattgcttttgaattagaaagagataagaagagactgtcatggaataaaatgtataggtgataaataga

SEQ ID NO: 126302 - DNA, 462 bp, Glycine max
  unsure (1)..(462): unsure at all n locations
ctcagctacaacagacgcagggcggggtacaaaagtttatttgtggtgcatgaagaactaagtccaaaagaagaattacaaaaccttcttacctcaacgactacgtttgaggaagaagggtgagaccagttgaggctaccttctagaatttccttgcttgatattgtctactcctaggggacaatgtggagaaattatgttatggccaaatattcctaggatctttctgttactaggaagtttataaatactaatgtaaataacaagcaaggcatgaataaaatttccaattacctcactctttccctctctgttcttcttcttccttattgaatttttggaggtactaattcctcgaaaaccagcttattgcgtcctaacacatgtnncacacttgtnnagcacattcatgaccctttgtatatgctcctagatcatanacctagttgttacatatgagtg

SEQ ID NO: 126303 - DNA, 401 bp, Glycine max
  unsure (1)..(401): unsure at all n locations
agctttgaatcgccacgtcatgcagcttctgatcatangcgcgttgcaggaaagtggagtaaatcgcgacaatgggtttgtacccaccaatcgccagacccgcagcaaaggtcaccgcgtgttgctcggcaattgccacgtcgaagtagcgatccgggaatttacgtgaaaactcgaccatgccggaaccttcacgcatcgccggagtaatcgccatcagcttgttgtctttcgctgccgtttcgcacaaccagtcgccaaagatttttgaatagctcggcaaaccgccgctacttttcggcaaacaaccgctggagggatcaaatttaggcacggcgtggaaagtgatncgggtcttttctgccggttcataaccacgacctttttttgtcatgatatgc

SEQ ID NO: 126304 - DNA, 472 bp, Glycine max
  unsure (1)..(472): unsure at all n locations
ntactcttcactgcgcgaaagcggggaanaagttntctctggcgtgccgccaattaaagagctgctcanacgcaccgaagaacatattaaaggcatggtagtgcctggcacgttgtttgaagagctgggctttaactacatcggcccggtggacggtcacgatgtgctggggcttatcaccacgctaaagaacatgcgcgacctgaaaggcccgcagttcctgcatatcatgaccaaaaaaggtcgtggttatgaaccggcagaaaaagacccgatcactntccacgccgtgcctaaatttgatccctccagcggttgtttgccgaanagtagcggcggtttgccgagctattcaaaaatctttggcgactggttgtgcgaaacggcagcgaaagacaacaagctgatggcgattactccggcgatgcgtgaanggtccggcatggtcgagttntcacgtaaattcccggat

SEQ ID NO: 126305 - DNA, 390 bp, Glycine max
  unsure (1)..(390): unsure at all n locations
agcttggaagaagaagaaatggactctactttctcttgatgaactcgtgcaataatgggaaaatgaangtgttccanaatttggagattaaggcttaaagttttcagttgacaagactaaaattgacaacatgaatgactatntgatagccatgcttagcatgccactccataccatctatgggtatttttcttttgaatttttaaccaaaaatagctaaagtagacttaactgaaaatggaaaaaatgctttgctaaaattgataaatcttatcttaatcttctagattagtgtgctaacttttctagaatagtgtgctaactttctagaatatggtactaacctcccttggggatatatatntagagtggaccttacacagagtctac

SEQ ID NO: 126306 - DNA, 448 bp, Glycine max
  unsure (1)..(448): unsure at all n locations
cattttgattaggtcanttatctggtaatcgntttaatgtcttaaatcaaccattcccttttaatttcaaaagattctaatgaaaattgtgactttgtcatttacttaacaaaacgatggccctattctcttaattcgagtagaagccctctaaattttgagttgattcatatggatatttggggaccattttttaaatcatcaattcatggacatagatattntttaactatacttgatgattntagtacatatacttgggtggttttattaaaatcaaaaagtgaagtgaaaacacatgttcaaaattttattaatttgattgaaaatcaatttgaaacaaaaattaaatgcattcgattcgataatgggtcctgaatttttcttaaagattntttttcttcaaagggtataattcaccanactagttgtgtgtatacccctcaac

SEQ ID NO: 126307 - DNA, 382 bp, Glycine max
  unsure (1)..(382): unsure at all n locations
tctaattatatgggccattaagtctatcatgtgtngacaagaattgattagcccgtgaatntcctctggggctgaacacacttcggtgatggcctttgctttggctagtagtcgcgggaggtcttgacttccatttaaggtcaaggcgaacctatccatccacatggtcgcttcttgatgcaatgcatcaatcatcctccctcttgcttccttctcggcgtatgcttgtgcgaagtcctctactagcttttgttcatgggtcaaagaatggtttaactcttctttgtactgccctattatagctagcatgctttgctccgtggcttctaagtgttggggcaaactcctcttggatcttgagcaagcagctaactcctccttt

SEQ ID NO: 126308 - DNA, 428 bp, Glycine max
  unsure (1)..(428): unsure at all n locations
tttctataaatagcgggagaagtgaagtatacagggtttattcccttaggcacttctctctctttcgaatttgcttagaaaaattgtttccgtgaagaaaatccaagccgaggcgcttccgtaacgtttccgtaacgtttccgtgagtgatttagcgaaggtgttttccttgctacctctatgcaaagtatcaaacacggggcagcccaaattcaaataaaaactctcacaagcaagtcctaattttcatgctnttctaattctaaaaccaaattttggattcctagccatgactatgtcttcttgcattgaagctaaaaagtntgggttcctaagcttaaaattgcatctgggcacctattttgactctcctatgctntctctgcatatataaaatagtccgaccatcccaattnntgcaaatcata

SEQ ID NO: 126309 - DNA, 398 bp, Glycine max
  unsure (1)..(398): unsure at all n locations
atacctaatgccatacctaggaataataaaactaatggctgagtgtaaactgaaatgtggcaaccaaaagtcacccncaacagccaacaagttagccaccatttggtctcccaaaaagggtgatgcctaggttggcaactgggcccttattacaacttgaactaaacctaactaaagcccttntagtttattaacccaaaacatatttttggtcagccaactntacaagaattgggccattatttagacaaactaaacactctanaattgagacaaagtggtgtcatttagtcctcctccatttgggccatgatacaactcacaaccttggacttttctccttgaaactngngcttgtattcaaatagtatggacagcacttgttgaagagcttccat

SEQ ID NO: 126310 - DNA, 426 bp, Glycine max
  unsure (1)..(426): unsure at all n locations
acttctggatatgttntatgttattgggagatgttctagcatcttaaatacagcatatccacaaagttgttaatcttgtgaccttgttaagagcctgtactttgaggatcattatagttgtagtttatttagtttgatagcaactataggatacttgggaattgtttaattgtgctcatttacgttgggggtggttctttttaatttttgggatttaagtgtttttgatttgcttaacttcgaggttgaagtggtaggatgtccttgtgcaatgtcaaaagcaaatatttacacgtctgatatgtatatcacacgctgatgtatgtctcaaaatccaggttcttgacaaggaggcgtttcaaaagtagatgttggagaagcttatattggatttgttcgttatgctttgtggagcacgacatggag

SEQ ID NO: 126311 - DNA, 336 bp, Glycine max
acttaagtcaccgcagctgcagctggaatcattgatcactaaatgtttttttgaaatatataaagaatttgagcatgaaaataaaaacattgtttctagcccatacacggtgagtctaaactggtggacactgatgggtatggggctgtcttggaccattctaataagtccagttcatccaggacaagagagctaaaactatgccagatatcatgaagttggaaatcataagggggagatgcacttcagaattggtgcctctgcttctgaataattgaaccatgtcctctattctgtgctgagataactaattttgtgatgttacatcattcctac

SEQ ID NO: 126312 - DNA, 314 bp, Glycine max
caatgctcaacataaaaggagttccaagtctcacagctgaaccgtatgtgatgagaatttccctcttcccccattcaaaaactaggttgaccatggtttcactaatatagtatggattggcttattttaaattacatttgaatctaagttatacaatactgggtctaaataaatgtcactaacatctgataccttaaattactcttagtctcctacatcatcatccagtaaaaggaaatcagccaacaacaaccactcatgtctttttcagaggaataattctaaaatgaggaactaaatcataagaagtatta

SEQ ID NO: 126313 - DNA, 377 bp, Glycine max
  unsure (1)..(377): unsure at all n locations
agctntatgtgttctttacatcatgatcttgatgtaatctcatgtggagcttgtangcctttgaatcttcttcatcaatgatgttctttgcttcttgaagatcaatgacaacagaatggagaatgacgagcggtgattgaaaacctcccttcaaaagaatattagtcaagaagaaactcaccacaatatgaagtcatggataagagcttgaaggtacgagaagatgagtgaagggagatggaaagaaagagcacgacattttatgcctcaaatgacgcctaacctttgagtttaattctaaatgatcaaagttgaaaatatgccacacagacctctattatagccaagtggtacccaaaatacaggagaattgaatt

SEQ ID NO: 126314 - DNA, 317 bp, Glycine max
  unsure (1)..(317): unsure at all n locations
acctgcggcatgcaagcttccatcactaggcttagcacctgatctacactgngtatcttagtataccattgacgcttagcgcacagacgtgtttagcgtctgcaacgttttggttcaacagccaagatgaacgtgcttagtgcgacatggtccacttagcgcgatcattagaaatctgaaaaatttaacagttgcgatgaataggctaagcgcaataggcgcgcttagcgcattcatcgcgtatcccagaaagatacacnaggggtttcacccctttntaaccacattgcccctaatgggcttctaaactacctaaa

SEQ ID NO: 126315 - DNA, 440 bp, Glycine max
  unsure (1)..(440): unsure at all n locations
ttttgaagcttatattgtttacttaattatgaangggggaaattgatgatttaagaatgcttccaaattacacactggaattttggcataccccaaaaattgaaataatagattatcaatggtgacactaagtgtctaaaaataataanaagttcaggggtagcaattaaagggtgtgcattcaagtttgaacccaagttctttgtcagagaagcaagattttggttctaaaagaactactgatatagcgctgtaagaaaataccaaacaccaaaccaaataagctgctttttgattatcaaaacaagttttaaagagcaattaaaccgagttgaacaaatactaagacgagagactntagtatagctacacataaatgaagctatnagtatatgtctaatacgacctaccaataattacatttcaacacaaagttaaag

SEQ ID NO: 126316 - DNA, 448 bp, Glycine max
  unsure (1)..(448): unsure at all n locations
agctntctattctaatntagaaatccattattgtatcctaatgtttgaaatctatgggattaagatggtcattgaccaatccctattttatgatttaagaaaattgcctagtgaaggtgtgccttttgagggtgcactgattgatgattggaaattcgatttttctgtgcatgatgcctgccagttggtttgcaccaaccaagcggatatgactggaaggcttcttgccggttcattggcttttgagagccacatcctccattaccttattgnttgcatcttactccctagatctttaaaccttgctcangtttcggaagaagatctcattgtcatgtgggcctttcattaatggttacaaattgattgggcacaccttgttagatatcgcatgcataaggcattgcgaatgaatgccctattgccttatcctcatcttgtacccttt

SEQ ID NO: 126317 - DNA, 408 bp, Glycine max
  unsure (1)..(408): unsure at all n locations
tctacttgtagacatagacttgcttgaaagcatgctactcttctncttaagaaaccttccaaaggcaaaagctgctctcacagctgcaagaacagctgcaaatgctatttatgttcctccagctcaacaaggtgccatagatctacagagtgggattcttcacgcagaggagaaggattacaaaactgcatatagttatttctttgaagcttttgagtctttcaatgctcttgatgaccccaaggctgtatttagcctgaaatacatgttgttatgcaagattatggtgagtcaagctgatgatgtggctggaatcatatcttctaaagctggcgtgcaatatcttgggcctgcattggatgctatgaaagccatngcagatgctcattctaagcgatctctgaagta

SEQ ID NO: 126318 - DNA, 443 bp, Glycine max
  unsure (1)..(443): unsure at all n locations
agctacataaccctcatcttaaactaattctaacaaatcatataaaccctanaaatctaaagctacagttaaagtcttctaccctaaagttaagacaagaaaaagagaaaaaggatcaaggaacttacttggacggtgtatgattgatgcttcaaagtcgaaaatgcacaaagagagtacaaatgcaaaatgtgaaaanttttttagagagagaatgcagaggcgaggtttctataatctggaaaatgtgagtgtcactgctgttacactcacttaagcattntcgatactttcacttaacggaccgttgcgctaagcgagcaagagagacgtttggtttctcaactaggctcgcttagcgaacgtgcgcttagccgacgtttcaaatttgaaattttttttgaatagaaactcggcttatcgtgagagtaagtctgcttaac

SEQ ID NO: 126319 - DNA, 448 bp, Glycine max
  unsure (1)..(448): unsure at all n locations
tttcttgttttctaaacctttgacacttgtgctatttattcttttcatctcttctctctttgccaaaaagaattctccaaggactaactgcatgaattctttttgtgtctctcttctcccttttccaaaagaaagaaggactaacagcttaaattcttttgtgtctcccttctcccttgtcaaagaattcaaaacgacacagtctgagaattcttttgattcttccctatcccatatgcaaaagatttcaaaggactaaccgcctgagaattcttttgtatccccattcacaaagtttcaaaggtttaaccgcctgagatctttgtcttaacacattggagggtacatcctttgtggtacaagtagagggtacatctacttgggtttgactgagaacaagagagggtacatctcttgtggatcagttctagtggagggtacatncact

SEQ ID NO: 126320 - DNA, 403 bp, Glycine max
  unsure (1)..(403): unsure at all n locations
agcttcaaactcgaaggtagaggattcatgaacgaaaattcaattcatggngctccgaaaaatgttgaaaatggataattgcacatagcaatcactacgcatagctccaaactcgaaggtggaggacacatgaataaaacgcaattatgggctccgaaaaagggttgagaatggagaattgcactaagcaatcactacgcatggctccacactcgaaggtggaggacacatgaacgaaaacgcaattcatggtgctccgaaaaaggggttgagaatggaaaattgcactaagcaatcactacgcatggctccatactcgaagggggaggacgcatgaacgacaactcaatttatggcgctccgaaaaagggtgagagtggagaatngcactaagcaatcacta

SEQ ID NO: 126321 - DNA, 386 bp, Glycine max
  unsure (1)..(386): unsure at all n locations
tactcagcttatatangatccatggcagatgactcacgatatatttttctatgaaatgaccatttcagatgacgattgagcaactttgatgccaacgaatacttgaggggcccaagtccttagtctaaaaagtgactatgaaggtgaggattgacgggtatgatacctgctgactcatcgccagtgatgacgatgttatcaacatatacaatgagatagaggcatagtctatacttagaatgaaggagaaatactgagtgatcagcttcacattgagtcataccaaactcaagtagagtagagctgaactatgaccaaaccangaacggggagatcgcttcaagccatagatngagcggcgaagcttatagataaggcgggagtca

SEQ ID NO: 126322 - DNA, 390 bp, Glycine max
  unsure (1)..(390): unsure at all n locations
agctntctagctttccattggtgtatttttatcttcttttggagctctaaattgtgggaatgtgctcatatatggggggcaattttggatttgtttctttgcttattgggttgaattgagggtttgtatgagatggacataggcctattatgcattttgaagcaatggggcatgtcacattgtccccgtctttcgcttttatgcctaaaacgcgcccaccagtgttggtgaaatgcctaaggcatttgcgcatgttttataagaaacaactatggacaattggttgcgatgtttctatttttgacatatgtcagtttcggaggcttaataatacccacattccctaggctagtacccaagtgtttgatcaaaaaccaaaatggtgatatg

SEQ ID NO: 126323 - DNA, 317 bp, Glycine max
  unsure (1)..(317): unsure at all n locations
catctcaagctaagcgcatattgtatataatttatcgcgaagcggaaagcgctaagtgtagctctgtctcgctaagcccacatgcttacgggattatacatcttcattagggcttaatgtgatgcaaagctaacgcgctagtgtattataaatatatatgacatcgttgcgcacggctgatgctcagcttgagcgctaaacacgccatacgaatctaagttcttaaatattgattggcaatgctctagggtcgctatctttgcacccatacctctgcactctnttaaacctgagaatagcttatactatctgctacg

SEQ ID NO: 126324 - DNA, 416 bp, Glycine max
  unsure (1)..(416): unsure at all n locations
agcttatacaaggcttagacttaggaaggaataaattatgacatatcacaaattgatacaaatgtccttgttaggagtcaaagtaattcgaatgatgcatttgccccccttggagtttcccttaagtgtagaactcatgaaccatataacttagtgtctcttttaaggagatcccagaancttttaatgaaggagaaattaaactcatttcatcctagactgttgttgcctcactatcccacacccctagctcccttatntccttttctacaaaggtggttctaacattgattctcatggttaatgtattgaacaaaatccaccaacacaaagattatcacattctcttgatctctcataagagaatttacttctacttgacagatggatcttcatcancttcatcttaatagcat

SEQ ID NO: 126325 - DNA, 486 bp, Glycine max
  unsure (1)..(486): unsure at all n locations
ggacctataaaactcaagctgctgattacatctccctctttctcaagcaaattcttcttgatatcatcaaaatcttcatgatttacagtatttggctatattattatgacatttgaacaaattagtatttcttttatttgcatagtatgattgaacaattatgaattatgttatatgactatgtggttttttatatgacttgtgtatgattagtcatttgtatatgttttatatttgttacacactctggcttctttttttatgccaaagggggagagaaaataaggattaaatcaagaaactcacataataaaataacttaatttcaagtgaagcttaaactcaaaaacaaagggggagaatatggagaattaagtgagtgatcgactacgaaaaagtatgtgtatgtgtttcttgatttcanggttgcatcatcaaaaggggcagattgagaagtaacttcatgatgatgaatcaagatgattc

SEQ ID NO: 126326 - DNA, 391 bp, Glycine max
  unsure (1)..(391): unsure at all n locations
agcttgatagnnggcattgccatctgatacttgctttactcaaaacaaatttctcccctttaccaagaaacattattaattgttttttttacttcttgggaagaccagttggctaataagctgggattgcagccgtggcaggtgtttctgtggtttcagaacctcagggctcaagaagaaccaggtgtgcctgatatttattntatgtcatgatttatgaaatctatatccttccaatatctcatgaggtgttttagtttagccttatttaaattggaacattcaactgataactgatgactaatggtgatgaccttagggcacttgttggctgcgccattaataaaaaggtttacaaggggccagtaaaataatagtgaagaaatagaaa

SEQ ID NO: 126327 - DNA, 471 bp, Glycine max
  unsure (1)..(471): unsure at all n locations
ttgataagatattatagtggatttaaatagtttatcactttattngcattatgtaactggacaaaatattctctcttactgttttttagcgaatgcacatataggcagataataatgaaaattaagtaacgtgctagcggagttatgtattgtttaggcatcggtataaatttgagttggcttcaagagagttattttagaatatccactaaaaaaagtcattttagaatggagttctttgagaggttgtaaaaaaaaactaaaattaacaataaaaagaggagcattaaacacatgcttatagtgcactggttctattatatgtgttaggtcacctgctcaagcaatggaatttatacttaaaatacaaagtttaaatgtagcttttttaatgatctttttatgtttattaatctaaaaaaaaatcacctcaatactctacatgtatgtgttnggaaataggtttctatg

SEQ ID NO: 126328 - DNA, 408 bp, Glycine max
  unsure (1)..(408): unsure at all n locations
agctttactntagttgacctaatgcaaacttaaatgttgtactctttttcctactcaagtcttttgtgctaaaaagagaaaaatcagggttttggctcgaaaggttttaataaggcacatttgcaataacaaagggatattgtacttaatcaaatacattgaataaaaattctacatcccttctctttcattaattttttatcaagacaggtacatccacagtcgtagctccaaagctcttaaaacccaagcaccgcattggtgagccctcgttctagcactaagtctccagtacgtgtcacccacagcgagtgacacacatgctagagcacgtcattatgtctccagtatgtgccacccacagcgagtgaaatgtatgcaagaatatgacaccaagccttcagtatg

SEQ ID NO: 126329 - DNA, 452 bp, Glycine max
  unsure (1)..(452): unsure at all n locations
tgtaagtggctttcanagtctactctgtatcctacaaatatcgttaatctgctaatggattcaatctcccctcaggatatcactatcacagttgctattggattctgtctatatagatatctatgctcgtggtatggccttgaactgttattaaatgttattaagttatttgaggcatgcatgtactgtatctatctgtgattaaactatcctggattttttcttgtcataggaggacatttcttgagtttattaactgtttaaaattagctaatcagatgatgatcattggagaaagttgatggttcttgctttcttganaattgttagatggtgcatgggaaaagaaatggactntaaatttcaactattcgagactgccacactttttatcattgtgttagtagttgcatttatgatgcaggtatgttatttcttacttgcccctataa

SEQ ID NO: 126330 - DNA, 323 bp, Glycine max
  unsure (1)..(323): unsure at all n locations
gctacaaaggagagagccagaaatggagagcccatggttgatacatgggcggaaatgaaaaggatcatgangaagcggtatgtgcggctagtactcaagggatttgaaattcaagctctaaaaactaacccaaggcaacaagggggttgaggagtatttcaaggaaatggatgtgctcatgattcaagcaaagattgaagaagatgaggaggtaactatggctcgatttcttaatggtttgactaatgatattcgtgatattgttgagctgcatgagtttgttgaaatggatgaattgcttcacaaagcaatccaagtagagc

SEQ ID NO: 126331 - DNA, 469 bp, Glycine max
gcattgaattggaagaccaaatgttgatgaaatcaaatggatcatcatccaatggatctgtttccctttgaagatttcctacattcatagtgggagattcttcaatagtagctacaaccaaatcaaagaagagttaaatttggttattagaataaaaaatagactactaacaatctcgatggttacatactctgatcaattagaggctcattggtttcaacaaccgagatagggacaaaaacattagcagaatctccaaaagtgtcattggtttcgatgaggaggattcagtatggctttgagcatcctcttgttctttctaatcttctaccgctccaacattattggcatctgttgcaaaattggtatctctaaatattctggagaagaaaacatattaaataatgttgatttttgacatcgaaacgaaagtagtagaaaataattaggaatcaaaatatttaccaag

SEQ ID NO: 126332 - DNA, 461 bp, Glycine max
  unsure (1)..(461): unsure at all n locations
tcttaagtcaccgcggctgcagcttttatcagctatctgggggaatctctctccatgcttatccctagtggatggcgcctnctctcacctcttctnctttgtcttccactgcatctccatggtggaaaatcaccattaaaggacctcattgaagctcaaagatccagcctccatagaagccccacaagcaagcttccatcatccctcttgattctgaaccctatgttccaatcaagagatccttccttataggcacttcagtcatagcatcctttggttatcaaaaggagcatgatggctcttgggtgaagaagggtgctcgacatgttggtgaagaaggacatgatggagaagattcatctcttctttcanagactntggacaggtttgatggcctttcaaacctttgtgatgaaagggttgacacctttggaatacaagtagatatgcacttcaatgag

SEQ ID NO: 126333 - DNA, 399 bp, Glycine max
  unsure (1)..(399): unsure at all n locations
tactcagcttagtcaacagaagctgcagatggcctaaagatatgttttacctggcaaggatacgacataaacaggtattcattttacacaanagcacaagatgacaaaagtacaatgcagaacagcgggatcaccctaagggctgaatctcaacactttgcaagtgtcaatgacgccaatccctgtgtagcgtccatcccttactttgggttcattgatgaaatttgggagcttaattatgtgaaatttacagtatgtgttttcaaatgtaaatgggttgatagcaacaccggtgtgcgcaccgatgatataggatntaccctgatagatctaaagaaacttggttaccacaatgaccctttcatcatggcagaacaagctagacaagtattttacgtg

SEQ ID NO: 126334 - DNA, 366 bp, Glycine max
  unsure (1)..(366): unsure at all n locations
agcttagggatggaacacttacttgttggtgatgaacaaaagcgcaaaacggaatcaaaaaaatgccaaaaatgatgaccctagggctgcaaactcgtcaatcccgtgggtatggcttttgaaaggggggaaaagaagtttttgaatgcaaaaacgtcccccctttcgtcattcttattaattggtgcaggggtggctcgcccaggcgagctaacctgcatttttttttttttgaggggaacattaaccatgtccccttctttcttatggattagcgtcttgcctaacttgaacttacttaagttagaattaggccgtgattacttatttttactttntaaaaccaaacaatagtaaaagaaaact

SEQ ID NO: 126335 - DNA, 240 bp, Glycine max
gaattgcgcttagcgactagaggtgcgctaagcgagccctattgcagagggggctgcactaagcctaaattcttatgctaagcgcaagaagtggacttcggcttagcgcgacaggctcgctaagcgaaatctgcaacttataaatgcgttctcagtgtgaaaaacatgatttttcactctcttcttctccaaaacaccacccaaaccctaaaacctcatttttccaccacccaagaccat

SEQ ID NO: 126336 - DNA, 420 bp, Glycine max
  unsure (1)..(420): unsure at all n locations
agcttgctaacccatggaagctcctaatacctcctaaccttggcccatgggctcagaaatctaccctgaggtttgtgagaaccctagggccttcttcagcagctctagcccaatcctcttggagcctcttgctcatgcctctagtgactggtcccttcctagggaggattgcatcactagaattgagtttaatcatcttctaagtgtgagagtgaatctcctttcttaattgagtgattcaagaaattggtttatcaaggaacaccaccttgggtgggacaccaatntcggaggagtgattcttcccaccaccttcttcaatctcctcttcatcatctaacactcatccactaaacaaccaaaaattgtttttcccaccacgcacataaattacctaactcaattatagtcttatttttc

SEQ ID NO: 126337 - DNA, 464 bp, Glycine max
tttcttactagtcacacctagcttatcttggtattgcattatactttcttcttgcttatcacacttatcttgagttcttttggaaccataacttttacctttttttaaaaccccccaacaagaaagaaccaccacttaggaacccacatgagtcatcattcatctagtgttaattgcgagggtactagtcataaggaccctttatctagaatcttagatgagttgagttccctcaagttatggaaagaaaaactagaaagaaaacaaaaaggaaaagagaagggtaaaataaatcaagatgacagggaacaaataagggaagaagaaagaaggaaaatactaaaagaattaagaaaagaaaaacatgtctcctatagtagtcataactcttggcagagcgtaagtgaagaacttcgtgactattatgaaggaagacataggtcacatcttagacctcattccca

SEQ ID NO: 126338 - DNA, 161 bp, Glycine max
  unsure (1)..(161): unsure at all n locations
agctntgaaagcgaagctcaaaagaacgataatgttcaaggataagctaaagacggcagtcactatggtcaggaaagaatgtgatgagctgagagatgtcaacgtgactacaatcaaagaattagagtgagaaaaaaaaagggcccgaagggaagaatgga

SEQ ID NO: 126339 - DNA, 444 bp, Glycine max
  unsure (1)..(444): unsure at all n locations
tctctgagaaaacttccttgagaagctagagtttagctacacaatcccatctaaaaactaagctcacctccttgagaagcttccttgagaagctagagcttaactacacacacccatctaaaaactaagctcacctccttgagaagcttccttgagaagctagagcttagctacacacccctataatagctaagctcacccccatgacaaaaaaacatgaaaatacaaaaaaaatcctactacaaagactactcaaaatgccctgaaatacaaggttaaaaccctatactactagaatggccaaaatacaaggcccaaaagaagaaaacaacctattctactatttacaaagaagagtggacccaaccttggcccatgggctcaaaaatctaccccaaggttcatgagaaccctaaggccttctntatcaactctagcccaatc

SEQ ID NO: 126340 - DNA, 425 bp, Glycine max
  unsure (1)..(425): unsure at all n locations
agcttgaagagaatgtcaaaactttattcttgacctccatgatcttctcaattaaaatctgaattgcagcaaaaagattgaggaaacaattaccttacagattacttacacatagaatcgcttgatgaatatatattcatattttggagataagcaaagagcagatgggagtacatattttgacttcagtagcctcacccatgaacataaaaagaaaaaacagaaatgaggcaccgatttaaggtgacactgttatgggaaacctcttttggaggacgtgctttacttcgaatgtgtacatagattgctctagacttggttatatataccttgaattaattcccataatgtgaaaaccaagggtatcaaactcagagnttatgcagattcgtgagagtntcatagactcgactcgtagactcaac

SEQ ID NO: 126341 - DNA, 465 bp, Glycine max
  unsure (1)..(465): unsure at all n locations
tgtgaatgtccctggggttggttagtactccagtctctttaagaatgctcgnttcaagaatggcaaagccagaggttgttgcttcttacacgagttatgacttgatgaaacccatgtgtcatgaagcaataggaacaattagacaattgatgaagttcaaagtgcattccactgggaattttgattagtgttaaggtttctttcttcgtttaaccgattaattttgtcgacacctatgtttttttttttttaattcaagttgttgacaccaaattggtaatatattaatagttttgttccataaaaccggtaatacgatattatgaggagattgttgataataaactctaatttgggtgcttgtagtttgctgtgtcatgggatgattatagtctatatgcttcacaataaggaagtataagtgttgccttgtgggttaaacagggtgtgcctaagtattataaa

SEQ ID NO: 126342 - DNA, 357 bp, Glycine max
  unsure (1)..(357): unsure at all n locations
agctntgtgtctnttggttttgaatttatattacaaggatctttcttcatctattcctacgtctctacccattctcatccatttgcatgtttacttctttatttctgaaatggcagatccgatgacgagtcccccgaatgactaatacctgtgacccgtctatcaactccgagcaagaaatgaatcatactgactatgaatgaaacgacgatatgggacttcccccagaattagaaagaatggtcgcccatgaggaccataaaatggggcctcatcaagaagaaacagaactagtagacttgggaattggcagtggaaaaagggaagtaaagataggcacaggtattaccgcaccta

SEQ ID NO: 126343 - DNA, 366 bp, Glycine max
  unsure (1)..(366): unsure at all n locations
ntataagcgcgggtctggtggacgaagctttatatgtttttctttgtgttaggctttggatatttcggttttttaatttataatacaaggatctttcttcatctgttcctacgtctctacccattctcatccatttgcatgtttacttctttatttctgaaacggcagatccgatgacgagtcccccgaaggtactaatacctgngacccgcctatcaacttcgagcaagaaacgaatcaaacggaagatgaagggaacgaggatgtatgacttcccccaaaattagaaaggatggtcgcccatgaggaccaagaaatggggtctcatcaagaagaaacagaactagtagacttgggaattggcag

SEQ ID NO: 126344 - DNA, 396 bp, Glycine max
  unsure (1)..(396): unsure at all n locations
agctnggtgccaaaaaggttggtctgaatccattggtgaagttttttctttttggtctgaatcataagtattttcactggaggcaattttgttcgagctgggtagcacctctatgggaggcaaagttcttccttcaagtatttaacgtagtattatatccatgactcaaatttaaaacctctagttaagctgaaataatcaagttagttaagcaacttttgaagtttattccataagagtgaaatataaggaatatngcataatagcaatagcactaggtaaattgtagcttaatgaaaacgtctattcaatctcaaaatattttcccatttggtcttgcttgcacacttatagaagaaagcttcatttatatttcacaatcacatttaacaactc

SEQ ID NO: 126345 - DNA, 464 bp, Glycine max
  unsure (1)..(464): unsure at all n locations
tttttctttttttttccttttttttttcaaactttcatccttngttctaacagtgatggtgatgacaacacagtaatgacgctatggtcgtctaaaagtattaactttattgtttcactcaacgtggtagatttgttgtcagtcattttggttgtgatggattctcaaactacaagtgctacaaacttaatgtgtttggagtgcaaacttggcaaaagagcattggatgtgtttggggttctagtcactcaaaacaaccttttattgtcatatatatagctacttttgcttgacgtattagttattaattaagaagtatttggggataaattaatgtaacttgacaaaccaattgtattgacagataggaatgctntgtatgttatttgtgggactgggacatgtgtaaatgttaaaaatcatatgtaaagtgatttctatagactgatgttaaaaatcatata

SEQ ID NO: 126346 - DNA, 423 bp, Glycine max
  unsure (1)..(423): unsure at all n locations
agcttgcttctacaatctctccctttttgatgatgacaaccctaaaatcaagaaacacatacacattctttttcctagtcgatcactcacttaactctccatattctcccccttttttttttgagtttaagcttcacttgaaattaagttatttaattatgtgagttcttaatttaatccttattttctctccccctttggcatcaacaaaaagcccaagtgcgtaagaaatataaaacatacattaatgacttatcataccagagaatagaaaaccaatcaaccagaatacttaaccctttatcaaatttagaaagggtagaaatataaaagccctacattaattgccttccaaagaatagaaaaaccattcaaccagaatacttaaccatttatcaatcttagaaagatnatacttcatag

SEQ ID NO: 126347 - DNA, 353 bp, Glycine max
  unsure (1)..(353): unsure at all n locations
cttctcgtagtacaataccggtaacatgcctactatcattggtatcatctccttctccgtcatttgaggcactacttgagcttgcagatccatccaccgttgggcatattctttgaaagattcatgctcttttttacacatgatctgtagttgcatcctatccggagccatattagaattgtactgatactacttaatgaaggcaaacattaggtctttccaagaatggactcgggaaggttacaaatcagtataccaggtgacggctgccccagtaagactttcctagaagaaatgcatcagcaatttttcatctttcgagtatgcccncattgtcataccataatttcgtc

SEQ ID NO: 126348 - DNA, 215 bp, Glycine max
  unsure (1)..(215): unsure at all n locations
agcttgttgctcgagccatcaaatgtgttttccttggatattctagattacataaaggttaccgatgttactctcctattcacaatcgttattatatctctacagatgttacattttttttttgaagaanatccatactttgctccttccatggttgagtccaatattcttcaagaagtttttcctattccctatcttggtccatcaccttcttt

SEQ ID NO: 126349 - DNA, 497 bp, Glycine max
  unsure (1)..(497): unsure at all n locations
tacggacctatgaaactaagctaataaagtccttagtgatccatatcatgtgtgtgtgattgcattgaataagatgatgtgcaaagttggggattataacttcaatcgacttaaatgaaatacaaataaccgaaacacttatgtgcttgagagaaacactagccttgtgaggagtgaaacatagttgatctttctgtgacacatgtcgtacttgctaacctacttcaatctctgagtgcattctttgcatgattccatcatgaaaaccatggcaagtgtgaacttgagggttggaagctaaaattgtttgaaaagtatgcaattatcttacttgttgtgattggttacatcctgaacattgccattgatataacttagtgtagtattagttcacttttgcttgaggacaagcaaaacttntaaatttggggagtttgataattgatatgcttaccgtaattaaatatttaaatcatatnagcaatatctaattttcc

SEQ ID NO: 126350 - DNA, 434 bp, Glycine max
  unsure (1)..(434): unsure at all n locations
agcttggaatctnttgtttctngaccaatggagtgaacttgtatggcgatgatgtcaatgatgaggctccaatggacaagaaacctgatagggaagaagagtttggtgcagaaaaagaagaggggaggcaataggagaaggcattgccatattttttggacaattgaccaagcatggagatnttgtcattggctagacctatgatacctgatgaccttccaaacaagccttgattgtcttgaccacaaccatacacaaaacctgatgatggtgcctctgaaggggttaaggttagcacatcttgactcacatatccaattgagaaagaagtgtcaccatagcttgctttgtagacacaagcaccagttgcatttgagcaacctggagcattcagtgtgtgagctttgagagaggaacactgagatgatgagcat

SEQ ID NO: 126351 - DNA, 444 bp, Glycine max
gaccttgaaactcagcttgttatctcttcgggatgatcaacactgttctgcatatgttccctcaactgtggcctgtgcaaagagcttaacacattagctcaactaacaatttaaatccactagcttaaactttacaagcttagaacagaaacttattacccaaattccttgttaaggctgtttgcacgagctgtggccgcctttccaccaccatattttgacacatattcatctttgacacgctctagaaaagccatgggtaactgtcttccaatagattcatatgcaacaacacactatgctgcaaattaccgaaagttcgatatttcagaacactaccgaactcaagatagatttacggatcacctctacaaaagcagtatcagttgcataaattatgacttaacagagaaccaatcaatacttagttatctatcttagata

SEQ ID NO: 126352 - DNA, 416 bp, Glycine max
  unsure (1)..(416): unsure at all n locations
ttttaccaatacctactcctcatcagaaaagttattagttgcattcaaaaaatggcatacctacccaatggaccgggttgatggtggcattgaaatcttcctcccatctttatttttgaagttaatccaacttccttattcaaacaaagacaattggttagcgactntgacgtatagatattctcgagcttctcccacaaggccttcaatgttgtctccttcaacacgttattgaatcgtgctcacgaccctcctttggatcgtagtccacttagtttcatttatagaaacagacctttcatcttctaatgcctaatcaagactttgttgcaccaaaaggtcttgaataatactttgtcanatcantaaaattaattttccatcanacaacagtatctcgaatctttgtgtgctcc

SEQ ID NO: 126353 - DNA, 358 bp, Glycine max
  unsure (1)..(358): unsure at all n locations
actcaaaaaaaaattccggtaccccagaatttgaaagggcaaccttctggagaatggtgggcatttcaaaaatatccaacctcgctgtccacaatcaccataataacccttttgaccacggagtgaaaaagaaataagctggactttcttgcttataggtggccccaagtccatcanaaccttctcatgtagaaaaagtatatattattagttcacattaatgactgaggcaaaatatcagtttagcagcagctgcagcacaacaagcatacctttctagaactaatgaagggtcgntcatcctgatatatanttgtctggtaaacctcatctccaagcaagggctaaatttcttgat

SEQ ID NO: 126354 - DNA, 452 bp, Glycine max
  unsure (1)..(452): unsure at all n locations
atcttaagtcacctgcggcatgcaagcntcttatccaaggctcatcttggtggtgtttctccttcatccatggcttattccctagtggatggcgcctcctctcacctcttctcctttgtcttccactgcatctccatggtggaaaatcaccattaaaggacctcattgaagctcaaagatccagcctccatagaagccccacaagcaagcttccatcatccctcttgattctgaaccctatgttccaatcaagagatccttccttataggcacttcagtcatagcatcctttggttatcaaaaggagcatgatggctcttgggtgaagaagggtgctcgacatgttggtgatgaaagacatgatggagaagattcatctcttctttcaaagactttggacaggtttgatggccttcaaacctcttgtgatgaaaggttgacaccttggatta

SEQ ID NO: 126355 - DNA, 396 bp, Glycine max
tactaagcttagtcacagaagctacaatagcctaaagaatgttataccttgccaggatacgacataaacaggtattcattttacacaaaagcacaagatgacaaaagtacaatgcagaacagcgggatcaccctaagggctgaatctcaacactttgcaagtgtcaatgacgccaatccctgtgtagcgtccatcccttactttgggttcattgatgaaatttgggagcttaattatgtgaaatttacagtatgtgttttcaaatgtaaatgggttgatagcaacaccggtgtgcgcaccgatgatataggatttaccctgatagatctaaagaaacttggttaccacaatgaccctttcatcatggcagaacaagctagacaagtattttacgtg

SEQ ID NO: 126356 - DNA, 309 bp, Glycine max
  unsure (1)..(309): unsure at all n locations
agctntagttattaaccttgttcaatggattgttctttcanaacctctaacattaaaagnggaaaattattgcatacttgtgaagctttactttgtgttgcatcactacatgaatacacaatgttagataacaatatatacccttcaatgtattacaaaatactgaatatgtttctcacctactcataatcccttctattggttataggtaatactattcaagatgcattggaagttaacacacatttatcttggtgttgcctcaatgaagataccttcataccatttttaaacctacaacaccgccct

SEQ ID NO: 126357 - DNA, 287 bp, Glycine max
  unsure (1)..(287): unsure at all n locations
ccctcttttttttgcaaaaaaaaatcaatgctgccaaacatgggtggaagtccttaaaaaatcaatatctcagaaaacatggagaaatcacatttacaagcacaactacctatctttcagaggcctttggtntaatttgtcttgtctccttatgtggtggaggtttgtttaataatcttatacttcttgccttccaaaaaaaaacttatcactaatccctttttcattaatccaattttgtatgttattgaataaaagatcatgggttctccacctgcctgcactac

SEQ ID NO: 126358 - DNA, 381 bp, Glycine max
  unsure (1)..(381): unsure at all n locations
gcttagaccacaacaacacagaatgctgtgttttaaaacccctcaatttaatggactttcaaggtttgagaaccgaaattgacaatggggtaaatttggagtcaaacctcacctcacacaagtctataacatcaatttaaacttgctcaactggatttacacctaaaatatcaccgaatcaaaatttgacttctcaacacccaatattaccctaaaaaaggcctcttcgtccctttggccatttgttttctctcttgcacagcccaaactttcttataaggcctaaatgaccattcaaactaggattaacttccctttacctccaaatccactaaatccaaantggccgtccaactttcaaggctaacttttttacactca

SEQ ID NO: 126359 - DNA, 177 bp, Glycine max
gaaattggcgagtgggaagaaccgcccccacatttacgcaacgagcataatgtaacctttcggtttaaagcttatagtgggctagcttaagttttctttgtaagcttggcctttgttgattataaacagatttttcattgtctgtcttccatctatcattgagtactcttgttgaac

SEQ ID NO: 126360 - DNA, 106 bp, Glycine max
  unsure (1)..(106): unsure at all n locations
atccttcagtcacctgccgcatgcaagcttcattctggtctggtggcaacacccttcttattangaaattctcgcaaaggggcatctagtttgattccttcttctc

SEQ ID NO: 126361 - DNA, 327 bp, Glycine max
  unsure (1)..(327): unsure at all n locations
atcaaagataatttattgaataatcgtgtaataatattaatattgcatattaaactcttagaatataataaatatattatattatcatttaattaccaatggccatacatgataagtntaataatatataactgtctgtttatcttaaaaggcatattaaacatgacttcaaattggttgagagagtggaaaaaaaaattagtgacagttcatattcattcagttctcttattacaatataaaaatataataattttaattaaactcgtgtaactgatatgcatagtgtaagacagcacanaagcatacatgtatgactgtgtatgt

SEQ ID NO: 126362 - DNA, 422 bp, Glycine max
  unsure (1)..(422): unsure at all n locations
agcttgcttctacaatctccncttaatgatatgacaaccctaaaatcaagaaagacatacacattctttttcctagtcgatcactcacttaatcctacatattctccccctttgtttatgagtttaagctttactgggaagtaagttatttaattatgcgagctcttgatttaatccctattttctcttcccctttggcatcaacaaaaagccaaagtgcataacagatataaaacatacatgaatgactaatcatacacaagacattcattgaaaaaatctaaaccaatcatgaagcaataacatgaataacccaaattcaaatataaaccacatagtcgtataacatagatcaataatggtcagtcatactaagccaaatagctaaagaaatactataatgttcaaatggtctgaaaata

SEQ ID NO: 126363 - DNA, 386 bp, Glycine max
  unsure (1)..(386): unsure at all n locations
tcacgtttgtgtttttaggggaaaacaccataactaaacgcgccgcaagggatccctatcgcaccagatccaaatctaaaacgatgggtgatcaagaggagacgcacgaacagatgaaagccgacatgtctgctctgaaagaacaaatggcctccatgatggaggccatgttaggtatgaaacagctcatggagaagaacgcggccactgccgccgctgtcagttcggctgccgaagcagacccgactctcttggcactacgcaccatcctccctcaaacatagtaggacggggaagggacacactggggcacgatggcagccctcacctgggatacaaccgagcggcttacncttattgattgccgccaactatcaccacccatc

SEQ ID NO: 126364 - DNA, 432 bp, Glycine max
  unsure (1)..(432): unsure at all n locations
agctntntggagtagcaacatgggaccattctattttatttcaaaaagaaagttttatctagtcaaggtctgagagaccatacaagtttcctaacgatttctaattatgtgggccattaagtctatcatatgctgacaatagccgagaagcccatgaatctcttcgggggcggagtaggtgtctgccatcgccttggccttggctaacaagcggggaagttcctgactcccgtttaaggtaagagcaaaccgatccatccacatggttgcctcttggtgtaagagtcgacacccttcctctagcctctttttcgcgtgtcgaacctacccttcggcgggaggggacgcatgactcgcgtgatgcgtatcccacagaggaatacgcgcggagtcgccaccaaccgtttattgaggaatacgtcggaaaaccgg

SEQ ID NO: 126365 - DNA, 448 bp, Glycine max
  unsure (1)..(448): unsure at all n locations
tcttatccagggcaattcttggtggtgaagcttcttctttcttggcttattccctagtggatggtgccttccctatcctcttctcctttgccttccactgcatctccatggggaaaaatcaccattgaaggacctcattgaagctcaaagatccagcctccataaaagctccacaagcaagcttccatcaagtggtatcagagcacaagagcttcaagtaggtgctccttaaacctcgattaagttttttttctttaccttctcttccattgatttttcttcatttttctccatgtatgtcctcacatgtcttgttctaaatgctgttaacatgattctttagagtttccaccgattaaacttgctatagaaactaaaattgattntctatggttcaaaattctcgttcttgttcttgaaccatgaaatngnnngttgagttaagttc

SEQ ID NO: 126366 - DNA, 238 bp, Glycine max
agctttgatctaacactatggtcacctatctaaaggtagctagggatacacttgactcagttttagatctaatatagacttctttgcctgaaacttaaccagcgttcatctctataggtcattctagtacttagcttcccttatttctcactagtaccttgtgcaaaattcacaacatctctatcgattctaatctcataccattcaagcacatgcagttgtccctactcatggtgca

SEQ ID NO: 126367 - DNA, 322 bp, Glycine max
  unsure (1)..(322): unsure at all n locations
agctngatgaataaacacagggaagaattttacaaagtgaagaaaccaaagttcttataataaacacaagcacctacagtgcaaggtctgttcctaacaaatttgcaaaaatactcacaatacaaattaacaaaatcaaacaatgagtacccacaatacaaaactaatgaaatcaatcaactaaataaaaaattaattacaaattaacgaaaaaaaatgaacacacccgggcacaacgaaaatgggggtccaaaatccaagggaatgagactattggtcgagatccgagttcttggaacctctgaaaaaaaaaaatcccccc

SEQ ID NO: 126368 - DNA, 367 bp, Glycine max
  unsure (1)..(367): unsure at all n locations
agctntaataagctgtgaaatgatctacttatatgacacataaatcaccccaaccaatttattaatcatcctattgtaattttaacatttaacaatgcatttgctaacacattcacatcttanataaggaactaagaaaaattatttcatgatgaatgaagaatcacctgaacttcttcattatggaaatgtctcttgatcattttcaatatatggtcagcatgtgaacacaatgttgaataaaattcagtttctgaactagatgttgcttcttcacttgaatactttcaatcaaagacggaacttattaaattggcttcttctcagcatgtcttgataaaagaaactttcatctactgctgaaaat

SEQ ID NO: 126369 - DNA, 335 bp, Glycine max
  unsure (1)..(335): unsure at all n locations
agtaaaatatgcacttccttcggaatgaaaaaaattgatctactctaatttgggattttgtcttaaaatctttaactcccttgtactcaatttttggaaagctagaanaataattaacttaaaactagaagaaccatgcccaatnaaaacaaagaaatgcagacatgcatgcaaagntatgcctttcagcaattntatccaaattcttaagaaatgtgagtttaattaatttattactaaatgaacttaactgctttaatcagatcttcgcatggaaaaatcaaaattccactccaacaattttcaatctcaaatcacaaccattaaaataagat

SEQ ID NO: 126370 - DNA, 287 bp, Glycine max
  unsure (1)..(287): unsure at all n locations
agcttttattgaacctttttattcaatanagcacnttgatnnctgaggttgttgggataaaaatggtcattgaccaatcccttttccataacttaacccaattgtccagtgacggtgcaccatttgaaggtacactgaatgacgattggaaatttgatttctctgcatatgatgcccgccagttggtttgcaccaaccatgcatacatgactagacgccttcttaccggttcattggcttttgaaagccgcatccttcattatctcattgtgtgtattttgcttcca

SEQ ID NO: 126371 - DNA, 433 bp, Glycine max
  unsure (1)..(433): unsure at all n locations
ttgaagaacaagaatatgaaccttatgcgcatttattcaactttctataaaaaaaacttgtacattcttgtaaagtatagaaaagctctcataacactttgagcatattgagagaaaagactacatgttgattgtatatccttcggtaagatgatcatagaattagtcattgtgcaaaaaaaaaaacaaattttttctgatttgtatagagccattagtggcttggtaagacaaagaataatgagttgtatcaagcttggatagagctttatttgtagagctagaagtggcagtgcataatacttgtaataatttgtgataagttagtggaacttggtgaatttcccagaattagatgtaatctcggggttgaaacgaaccaatataatntcccctgtcttatttggggcctatctctttcaagttttatatc

SEQ ID NO: 126372 - DNA, 392 bp, Glycine max
  unsure (1)..(392): unsure at all n locations
agctntagtcttcatgttatccatgtggttccccttatctctgacaaagtagactcataaacttgtaagagttagtgacttaactcaagagtttgataaccatgaccccagccatagtgcttcggcaactcaaatggactcaagtagtgcccaaagttgaagaattgggagggtaagtttccaatatgctttaggcaatactaatgtagatcaagcanagggtagaacaacttgggataaggtcaaaaagaaaagggagaaagagtcagganaacttcgtgtgacagcttcctcagagtataaagaatggagaaagctcagaggagttcccactccaatccttgcagaaaccccatgtggggatagttcatcctatgaatctgtccaaatga

SEQ ID NO: 126373 - DNA, 465 bp, Glycine max
ggacctataaaactcagctgtaggtaagtctacaatgcacgtcttattttctatgcagcccgggctatacgagacatctcgccaaacaaagtcaagatagccgatactcgcctgtgctttttcgtctatgctatatgtagcaaagtcattgatcctgtcaagtttgatgagttggaaaatgaggccacaattatactgtgccagttggagatgtattttccccctgctttctttgacatcatgattcacttgattatgcatctggtcagagaaatcaaatgttgtggtcctgtttatctacagtggatgtacccggttgagcgatacatgaagatcttaaaagggtatacaaataatctatatcgtccagacgcatctattgttgagaggtacattgcacaagaagcattgaattttgttcgaatacttagagaaagctaacctgttgccttctcaatctcggat

SEQ ID NO: 126374 - DNA, 137 bp, Glycine max
tagcatatcccatactcatctaggtttgtaggtctattctattaatttcacctcagcaactgcaactaaggacagacacagacctacacactaggtcctagaggcatatgtcccctcagtcacactatgttttatat

SEQ ID NO: 126375 - DNA, 395 bp, Glycine max
  unsure (1)..(395): unsure at all n locations
tcttatggccaccttgccaattcctttaaccattacttacctgccatcaccaaatttgatgcttcttttcactgtttcatcaatttcacagaaccaatctttatgtcctgtcatatggtttaaatagtcagtgtccaaatatcaccattcctcattgtgtgtttcactgttaacaatggccattaacatttcttcttcatcaacagagtcacgcacgagttgtgcttcttcacccctctttctaggcactntangattactacactcgtctgcataatgaccatacttttgatagttatagcacttgatgtgcttctttgaatttctctatccctttccattgttcctcttctttcttttaatctcactttaaaccatgtttctcgtctgtatac

SEQ ID NO: 126376 - DNA, 441 bp, Glycine max
  unsure (1)..(441): unsure at all n locations
agctntaaaactctntanaatgagaatatttttttaagattcaggaacttgggataagactgattttgatctttccttgggataaaatgatattacactgaatacatttttttatccatanaaattaaatacaatatcaaaaaatttacaatattcacatatcttatctaaccaactaagttagactctcttagtatacaataaatacatgatttccttataagatattatctattgtaaataattttactccattttctttccttgttaatttgtcgtttttttagcaccaccacattattttagccaaacacgtcagtctttctttcctcatagatgcaacaactctttaggtaaaaattagacttgactgattctcttcatttttgttgatggttatttacatnattgaccccattatttctaaagctattaagtatg

SEQ ID NO: 126377 - DNA, 401 bp, Glycine max
  unsure (1)..(401): unsure at all n locations
tttacggaaaaattcatttatttcttaattaccttaatggtatataattcaacggccatattcttaacaaactattaaattccaatattagaccatttagaatactttaagtttctcttcctctatagaaataacataaatgttatacataacgtccatgttttacgaaagtacaaaatttaaataataaaactttatttgctcttctcttaaaattattagtttaaaaattcttttatatggattaattattttgtgttgctagaantttatatttgatggtattccatttaatgagagagaatggattaaagaatgtagattttaactcaaaaattaaacttgaatatatttgtcatacaatatagccaattttgtnttatntgatatttggtttgttt

SEQ ID NO: 126378 - DNA, 364 bp, Glycine max
  unsure (1)..(364): unsure at all n locations
agctngcattaccatacctattaaaaattctcttttataatactatagatgttatatatcaatggttgatggagaaatggagatcaatatgatcccattttaattaaactcttataatacaagtgataatgaattttcttgttggaccacagattataaaatttttcacataaacaaacttaagactggagcaaattaatcagtttatccctcagtagatgaccagcatatgcaatagttcttaaatccttaccacttggctgatttgcagtcagcaacatgaaaggtagttctccttgaaccaagacgcctaggtccccccatttgagtctttgacccttatgattgaagataccaagtttta

SEQ ID NO: 126379 - DNA, 354 bp, Glycine max
aaatgccaatgtcttaaatctcattattgggtattaaaaattctatctatatggcttcatcctccttggaaacctaattcgtcggggaccatcatttggcaacatttggattcttgccaacccgaattgagttgcttacacccgttgtcgggcaatctgtaatgtttttaacgtttcagaaaagaatgaggaaaatacccaaaaaggagggcaaaagggtcattttgggactattttagacccctggctcacccaggctagcctctgactcgcctgggccactagaagacttatgagtgaagtaaccagctcgcctgggcaagcagagctcacttgagaaagcaaggttacctc

SEQ ID NO: 126380 - DNA, 322 bp, Glycine max
  unsure (1)..(322): unsure at all n locations
cttcgaacgtaaatttttgtaagatgaatcttattctctaaaactataccaactttcggtggcaaaaactcagcttcttttctagcaaagtttgctggcagcttctttttggtgacaactactactaaccctttaccaagggtgaatttactggattgagcaacccaaatatccattagcatcactcagagaataacacctttgaggctgattcttggtaacgttgctggatttagcggagtggacctgactganaaacacatgaaattgcgctagtgtatgtacacaagtccttgtacatgcacatttatgggtttatttt

SEQ ID NO: 126381 - DNA, 408 bp, Glycine max
gagcattatccatacccaaaaccaaatcaaagtcagactcaaacccaaaaactaagccttttccatggaaccctcattggtgtcctaggtgtagaagcaagcttcatgatgatgaatcaagttgattcaagtagttttgatgatgacaaaaagctcaagagaatgatttcaagattgagtcaacaagttcaagatcaagattaaatcaagaagattcaagattcaatagaagtttgatttcaagattcaagagaagaaatcaagaagaccttcacagggaagtattgaaaagaattttcaaataacaaacatagcacagttttgtttttcaaaagagtttttctcaatatttctaagttaccagaagttttactctctggtaatcgattaccattttcctgtaatcga

SEQ ID NO: 126382 - DNA, 374 bp, Glycine max
tctggaggaatcttctggaaggcccaagagggcctggttgctatttgcacccctatatttactaaacacaccccctgccctttatgttggtgattcttttttcgtaaagttactgaaacttacgacttttgtaacgatacttgttttctttccgtaatgttacggaaccttgcggattacataatcatcccctttttgacttacggaatgttacgaaacctcactatttgtgcaacgatgcttccttgtgatttccggtgtgtcacggaaccttacagattgtgcatcaatactttcttttgatttccggcacgtcacggaatttcacaaattggctaatgatgggtgccaagcacctcataatcaccaaacac

SEQ ID NO: 126383 - DNA, 422 bp, Glycine max
  unsure (1)..(422): unsure at all n locations
agcttggttcgaggtacttacccgttgattatcgaagaacgatgaagaacgaatgaagaacgtcgaagaacggttgaaacctttgcaagattcctcacggaaaacgttacggaaacgtttcggaagcgcctcggcttagattttcttcacggaaataatttttccaagcaaattcgaaagagagagaagtgccaaaggggctgaacccttttcttcttcacttcctcccctatttatagcaaaataggggaggtggttgccgcccaaagacttaatcaagaagatttctaagcgcacccgaattactaagttcaccccccttttcgtattttacggaaaagttacggaagccttacggaactggtntcgannattgatttcatcttttttctcttccctttcaccaatgttaagtggaatat

SEQ ID NO: 126384 - DNA, 341 bp, Glycine max
  unsure (1)..(341): unsure at all n locations
tatgacagtcaccgctttatgagcgctgtacaccagcagcgcttcgaggccatcaaaggatggtcgtttctccgggagcgacgcgtccagctcagggacgacgagtatactgatttccaagaggaaataaggtgccggcggtgggcatcactgtgtactcccatggccaagtttgatccacaaatagtccttgagttttatgccaatagctggccaacagaggagggcgtgcgtgacatgagatcctgngtaatgggtcagtggatcccgtttgatgccgacgctatcggncaactcctangatatccgtttgtgttggaagagggccaggaatgtgagta

SEQ ID NO: 126385 - DNA, 347 bp, Glycine max
  unsure (1)..(347): unsure at all n locations
agctntgaacatgttgcaagcaatcttgttcaacatcatgtactctcacaaagtaccattctttgcctatcaactccaccagacccgatctagacaaggtaagcagaacttctggacttggattggatattgcaatctgcaagaaaaataagctcaagttggttggtggggacatttgtaacctgtagcgattatttcaagaattctaaccggaggtgaaacttcacaatcttattctacctgaatggcccggaatttgtactcctgatccagtctttcaagcctggacagcctaaaatctatgtatgtacaactggagtcttaagaagcagaatattatcatatcc

SEQ ID NO: 126386 - DNA, 446 bp, Glycine max
  unsure (1)..(446): unsure at all n locations
tgaagttcattntggataataaatggactactgttattcatcatacgtggctggcgaaattaatggagtttgattcttcaattgagtataagcagggacatgataatgtagttgctgatgccttgtcgcgagtggaaccagttgcttgtcaagctctcgcagttcatcaggtggtttctgaattggtgataaagattaaagcctcttgngattcagatcctgcagttcagaggttgattttagaattacaagcaaactctggttttcacaaacattattcttggaaggatagagggttaatgaggaaagaaagactagtattgggtagagatgatgctttaagacaagatanttcttctgcatttcatgcttctgccgctgctggtcactcangaagaaatgcaaccttagaaaggctcaaatctatggtttatttgaaagggatg

SEQ ID NO: 126387 - DNA, 326 bp, Glycine max
  unsure (1)..(326): unsure at all n locations
agcttgatacaagnaacaacacatgaaattanagaacattatgctcatctncataacaaaaataggagagccagtctcaccagcaatgacaagtttcctccctaaacactgctgaacacaataccctaataagacctaaattatccaagaactagaagaatagccaaatctgatgcagaaaaccggaagaataattgaatctgaaattaatataacccaaaaacttgccatgtcttcagcccatagccagcacttacactagggctttcacccgtctaatcaccctcaccattggcagttccattcatccaccatgccacagacac

SEQ ID NO: 126388 - DNA, 439 bp, Glycine max
  unsure (1)..(439): unsure at all n locations
ntactggcaagctcatgaatcattagatnagtgctgaattgctgaccgagtaagtgcttaattaagctacttacccaaacaaacctcgattattatataacgaatgtaataaataaatacaaatcatataattttcctgattactacctttgcatgacatactgaactctggcactaagactgaactcagacataatgatacacatttcgaatacaagtcataactgataatataatgatttacttggaacagtcatatcaaaaggctttacaagtggatcctttatacaaagcagctgctgagtgccttgccattggttaacggatattggtccaacataaagcttgcacgaaatactcaggaatgaattcaaaatactttgaagctctaaaatagatcacactatgctgaatcccgctcatttcttcattaccttta

SEQ ID NO: 126389 - DNA, 414 bp, Glycine max
  unsure (1)..(414): unsure at all n locations
ttacctttttaaatatattagtttaatcaataattttaaagttgggtcttgattacgcataacaagagagcatttaattcatgtacccaagagtaatatatatattttcgatgaaaacattttttttaaggagtcatgaaaacatttcanagcaacaaataaggtaatgtttatttttatttttggagcaagtgatttcttatgagttattacctttttatatctgtatatnctttgatgttttagcttactactttcgcggttttaaaataagtgttggtgaaagttgtttatatatataaagaacaattgataaataaatgaaagtgaataataattttataaaactaacctttatattaatattatattaaaaaactaaagtgtcacttatttttgagtattaatgagaaa

SEQ ID NO: 126390 - DNA, 409 bp, Glycine max
  unsure (1)..(409): unsure at all n locations
cgcttgtgtagatggctngacaaccttgctcacatgtgtangctgntatgccactcttgaactgactgctgctaattctctgccctctttccctttcttcctatggtaagcctgccttacnaggcggttcctaacacactcttaaccatgcagcacccattactggttgacaaggatgatacatatttaataagcataatgagcatcctatcctatataattggatattaataattacgtaacttctctgccgtcatttatccaaacctcaatgttagaaaataaaatctcggagacctactcagattataatacacagcagccacattataaaatatgtttaccatttctatacatgccatgtcantccctaccatatcacaaaaaagatattgataacacatggaat

SEQ ID NO: 126391 - DNA, 435 bp, Glycine max
  unsure (1)..(435): unsure at all n locations
agcttgcccactgaaacatttatgctttattatttgcagaccttggtactatccaaatggcaatttcttattccattggcacaaccgaatagaaatctgggtaattttgcgtcacctttgacccttaatgcacttaatttgccagagatgccagcacaaatctgcagactacaagatcttcgtactttgacagttnntattgttggaagacaagatggactaagtgttagagatttaaggaattttccttatctgcagggtaggctttccattttgaacttgcacaatgttgttaatcctgtggatgcatctcgtgccaatttaaagaacanagagaagaatgaggagcttatgctgaaatggggcagtgaactacaaaatcagcagattgaaaaagatgtacttgacaacttgcaaccatcaacttaattaaag

SEQ ID NO: 126392 - DNA, 263 bp, Glycine max
  unsure (1)..(263): unsure at all n locations
gtctccttaatcctactgcatggaaaaatttgtcagcatggatttggaagagtttgtgtacctgtgtatacctcaagcttaaatacttcaagtggattaaattgcccaaattttctggaacatgagataatccactatattcaaatcaatatcaagaccttcagtgcatgtaattgcaggattccctgatgagtttcngataaactctttctctgaaatagaatgacgacgtgtgacttcatacttcataaatcatgaatcgt

SEQ ID NO: 126393 - DNA, 436 bp, Glycine max
gacctcgatcggtcatatttcctgaccgatgtctatttgtcatttttcgatcaatatccgtgaataatatttttttttgccgagatgggctaatattttcctggccgaataaatgggaacatgccagtttctgcccaaacaaaagatacggtgacctcgcacaaaataacctagccgaccttcattgtataatttttatgcaacaccaaaacaagaaaacttcctctgccgtataataaaacattatcggccagcgagcgtctttttttaaaataattgctcaatgtctgctgataaatatcaaacgggggctacttcacgacggatgtcggctattgagtttctaatccaatccgggaacgaaattcgctgatgtcgattggaaatgtcgatccgatatcttgtgaacttctttttagacctcgatcgtctgttt

SEQ ID NO: 126394 - DNA, 365 bp, Glycine max
  unsure (1)..(365): unsure at all n locations
accgccgctgcagcttncataatgctttattaaaattcctataatttctaaattaacatattncacttaatatgggtgagaatgaagagaanaaagaataaagtccaattctatatgcttccgtaaactttcataacttttctgataaaataccgaaagaagggggggtgaacttattcaaaaggggtgcaaatatcaattttcaaattttcgactcgcttggacgagctgggcggcaacctcctccccatttttcctataaataggtaaaagggggctattccaaatatccctaatccccattgctatgcatttcacctattatgggtgaaaaaaattgtttccgagaataaaatccaaggcga

SEQ ID NO: 126395 - DNA, 443 bp, Glycine max
  unsure (1)..(443): unsure at all n locations
cctcttttttattattttattcaagctctgccacatgttcctaattgattggagcaaaagggcccactttttctttttgactgtgacccatactcagtcacaaaaagtgaaaaataatctgacctttgaaacgctaaaatcctgcctcggtttgcgtgccatttctctggttccagtttctcgcgtttctctgcgttcgtcggggccagttttcgaaagcaagcaatatatatatcacaacgctcagaataaaaccccgagcgtggttcagaggttggtttcgtcaaattccaagttgcacgcaaaacgatgatntttaactaattaattaagaattaacccataacctcccagttatggatntctcttccttaattagtccaacccgcgtatcttgccccactattnctatttctaccaagaacatataagcatatacactg

SEQ ID NO: 126396 - DNA, 329 bp, Glycine max
  unsure (1)..(329): unsure at all n locations
agcttctgagcatcatcaaaataggcattcttattgtgctcatgtnataattttaantccaaggaaggtggctgaacagtggaagggcaaaggaagggtgacaggtggtggaaagagaaatagaaggatcttgaccctgcacctgcatcacaatcagaattgcagaagaaatctctacacatatattacatacagtagtagactcataagaatcatcacaagtacgatcaaaagaactaagatcaaagtcataaaaatcagaaagtaaatctgtacaaatatccacactatctattgcatcatcantgatatctataagggaaacatat

SEQ ID NO: 126397 - DNA, 464 bp, Glycine max
  unsure (1)..(464): unsure at all n locations
cttatacaagaatgaagctctgataccacttgttagacaagtgggtctcagatatcttaaagaggggggggttgagtaaagatatcacaaactatntcccccaattaaattttatttcactttctattcaagtataaatcccttcaaaaatgaatttccttaaatattgatcanaatagagcaantttgaatatgaatataaaacaatantaaataaagggagttaacggaagagagaatgcanactcagatntatactggttcagtcacacccttgtgcctacgtccagtccccaagcaacccgcttgagagttccactatcttgtaaaagcctattacaagatctgaaccacacaaggacaatccttcctttgtgtttagatttctttacaacaagagaccctcggtctcttaattctntnttctgaataaagaagaangtatctctcttgaaagagataga

SEQ ID NO: 126398 - DNA, 256 bp, Glycine max
  unsure (1)..(256): unsure at all n locations
agcttagccctagaggggatggaccttntagtgttttgtataggatcaatagcaatgcctataggttggacctcccagaagagtatggagtcagcaccacttttaacatttctgacttaattccttctgcaggtggagttgatattgaggaggaggaactaacagatttgaggtcaaatccctttcaaggggaaggggatgatgcaatccttcctaggaaaggactagtcactagagccatgaaccaaaagcttca

SEQ ID NO: 126399 - DNA, 467 bp, Glycine max
  unsure (1)..(467): unsure at all n locations
tgcgtagcccaccatctnttcatagtagagtatcgattatgtgtctaccatcacgatcatcgtctccctttccatcattgggggtaccacctatgccgccagatccctccaccttttgggcgtgttctttgaaagatccgtccccctttttgcaaatgttctgtagttgcatcctatccggaaccatatcaaaattgtactgatactgnctaacaaaggcaaccattatgtccttccaagaatggactcgggaagattccaagttagtgtaccaggtaacagctaccccagtaagactttcttggaaggaatgtattagcaattcctcatcttttgcgtattcccccatcttctgacaatacatctttagatgggtcttgtgacaagtagtccncttgtacttgtcaaggtccagcaccttgaacttgggaggggtgatgatatntnggtctacgaacaaactcttt

SEQ ID NO: 126400 - DNA, 306 bp, Glycine max
  unsure (1)..(306): unsure at all n locations
agcttctagccaaattgacttaccttgaattaattcctttgatagcccttttgagccttgttccctttccttggttgaagctcactacaagccttaagtgaaaaccatgatattacctatcttaagaatttggacttggattgttggaataatgtgggggttttgttcattgacaacttgttntgttggctatgctttatgagtgatattgggccatacctgatgtacatngtatattggntaaaatgtggacatgctgaatgaaatgttgttttcaaagggaaaaaaaattctgaaaaaaaaaaa

SEQ ID NO: 126401 - DNA, 443 bp, Glycine max
  unsure (1)..(443): unsure at all n locations
ntaganaatgatttctatacaaaagtttgttgtattatgtttctaacaaggatgaagctttaagtgtgattcctttctttttcttatcattctcctcatgttgattcagtctcattagttccatttcgtgttcctataactttccaaataaagttgcaagagacatgttagaaagatcccttgattctgtaatagttgttacctttggttgtcattccctacttaaacatcttagaactttattaataagatcctcattgggaaatatctttcctaatgatgcaagatgatgtactatgtgtgtgaatctcttttgcatatcatgtatagnttcatttggattcattctaaacaattcatattcatgggttaaggtatntattctagacctttttacatctatggttccttcatgggttacttgtagggtatccacatatctt

SEQ ID NO: 126402 - DNA, 387 bp, Glycine max
  unsure (1)..(387): unsure at all n locations
agcttgaaaactattatgaggtttatattgcattgtagcagnttntatgctattatgtttgtattgtaaacatcataagtggtgatatcatttggtgcttaacaaagctttttacatcggtcgtaaaaggaccgttgtagtacacgtgactaactacatcggttgtaaaatgaccgtcgcagaacacgtgacaaacaaagtcatttttgagccaaggcacgactttgtttgtcacgtgtttctaagacggtccttttaccaccgatggagaaacatccaccctctactacgacattagctttaaagacatgtgtccactgtcgtagaaatgccattccaccgatgtagaccctctttttctagcggggatcatgctctcataccaat

SEQ ID NO: 126403 - DNA, 475 bp, Glycine max
  unsure (1)..(475): unsure at all n locations
tactcagcttgaggggtaaagtctcacgattgtcacgtgctcatgcttaantgttagcccgggctatacgagacatcttgccaaacaaaagcaggttagcgataactcgcttgtgctttttcttccatgctatatgtagcaaagtcattgatccagtcatgtttgatgagttggaaaatgaggcagcaattatactgtgccagttggagatgtattttccccctactttctttgacatcatgattcacttgattgtgcatctggtcagagaaatcaaatgttgtggtcctatttatctacggtggatgtacccggttgagcgatacatgaagatcttaaaagggtatacaaagaatctatatcgtccanaagcatctattggtgagaggtacatngctgaagaagtcattgaatnntgntcagaatacttagagaaggctaaaccctgggggcttcctgagtctcggcatgatga

SEQ ID NO: 126404 - DNA, 148 bp, Glycine max
gaatctatcacctttcacaataggtggcatgttgggtgaacaatctttcatccaaattttttctagaactttattaatataggccttttgaggcaagccgagaatcccttgagatccagttctatggatctctatgctaatgacatat

SEQ ID NO: 126405 - DNA, 305 bp, Glycine max
  unsure (1)..(305): unsure at all n locations
agctntgagggtgcgtagcccaccattttttatagtagagtatcgataatgggctaacaatacgaataatcggctcctttccaataatggggggaccaacctgggccgccagatccctccaccttttgggcggggtctttgaaagatccgtcccctttttgcacatgttctgtagttgcatcctatccgaaaccatatcaaaattgtactgatactgtctaacanaggcaaccattaggtccttccaagaatggactcgggaaggttccaagttagtgtaccaggtaacaactatccccagtaag

SEQ ID NO: 126406 - DNA, 291 bp, Glycine max
  unsure (1)..(291): unsure at all n locations
agcttataatttcgatcatagaagtaatatttagtagtatgtctttggattcatgtgtagatcatctaaaatttcgttgaaatatcacgctaacatgattttaggcaaatattcacgtttggttgccatggtaagaaaattaattttgcgtccaaaatttgatttaaatttgaaataaccntaaaatagtttttgcatcagaccaattaattgatataaagtttactattgactaattttagaataaagccttaaatataattactatattttaaaattagttaacccaaa

SEQ ID NO: 126407 - DNA, 453 bp, Glycine max
  unsure (1)..(453): unsure at all n locations
tagattgaaaagttataatatttagctatggtcgagttatgtgctctctaatttcgaatgcttctatcacgaggagttgattgtattgcttanctatcattgggtccattctcagatgaattaccatggttttataattctgcattcttatcatgaggattgcattaattatcatgttgaaacttcagatttctgaattctgcattattttgattngcagggcttcatacgaaatgatatgttcaatacattcttaattattaatattaattcaaatcttggttggcgctagtatggctctagacacactcaacattaattatcatgttgaaacttcagatttctgaattctgcattattttgatttgcanggcttcatacgaaatgatatgttcaatacatttttaattattaatattaattcanatcttgggtggtgttagttatggctct

SEQ ID NO: 126408 - DNA, 223 bp, Glycine max
agacaacatcaatctaatgcgtcagcacatttttgaaaaattaccgtcttctaattgcagccagcgaaatacatctcttaagaagctaataggtggtagatactgaatcatccctttgacaaatacttaccttagcaggtttcacatccattagttaatcaacgtatttttggttgaaaagaaggaccaaaatatccacacatatattgttgatagaaaaaaa

SEQ ID NO: 126409 - DNA, 470 bp, Glycine max
  unsure (1)..(470): unsure at all n locations
tgtaaaaaaggggaagcaaatcaagaacttttttcatagtataaacgttatttctacttcaaaatcccttgaactacttcacattgatttatttggtacctctagaactatgagtttcggtggtaattactatggctgagttatagtggatgattacttaaggttcacatggactttgtttttgaaaaccaaaaatgaaaaaggtcttaacattgtttcacttagaagtgatcatggaggtgaatntcaaaatgagtcttttgaaatcttttgtgaagaaaatggaattcaccacaattttttcgtctcaagaacacctcaacataatggtgttatggagaggaaaaatagctcccttgaaaaaggtgtagaacccttctaaatgaaacaaagttacttaagtactttntngttgacgttgtacacactatttgttacaccttgaacanagtacttatttagaatattct

SEQ ID NO: 126410 - DNA, 325 bp, Glycine max
  unsure (1)..(325): unsure at all n locations
agcctattgtgcttgaatgataaagggcttataatctgtatctacgcgtttacccactcagcttggtgtgcttgaatggataagggccccagaatcggatttaacccgttacccactcaacttggcaatccttgaggataaagggcccatatctaatgtgcacattacccactcagcttgtatcatgctttgagtctagagatagcaaaagaagtttatacggataacccactcggtatcttcgcctgtcacgtgacaccagtgtcagtatgacggatnttgtctacgctgaagatgacgtaaatctccgcgtgtcaacgggctt

SEQ ID NO: 126411 - DNA, 435 bp, Glycine max
  unsure (1)..(435): unsure at all n locations
agctnngnncaataacgtgtttagcgacttttactntatcataagnaataaatatatatacatatgttaaatatctttaattatctaagaataataatctttttataatatacatttttagtatttttatttgtttttctctccatgatcttatatctttaaaaaaataaaaatgtgtattcccagcaaacattacaaagaagcatgcgtcacatcaccccgttctcacttttacaagtcaagaaaattaaaaattaatgttaaccagtaattttgagacataagaataaaaaataataattattttttttattaagaacttaaaaatttattggaaatattttttcaagtttttatgatttctacggtgaaagctctttttctttttaaatccttaatcaatatcttcaccctaatttaaaagaacataagtaa

SEQ ID NO: 126412 - DNA, 427 bp, Glycine max
  unsure (1)..(427): unsure at all n locations
tagcacaacgggtgtgcttagcctatatccactaattttcaaacagagggagatttgagcttagcgcggcaaggcgcgcttagctcaacctcacaaaaacatagcacaggcttagcgaccaggttcgctaagactntntccacaaataggaaaaacagagacaaaattgcacttagcctagtagccaggcttagcgctgaacaaaantttgaaacttttctaagtgtcaaaaacactattctcgcatagcgcacagacgcgcttagtgagttcaccattgatgctcaacagagaagatgaacgcgcttagcacgacagggccacgcttagcatgttcatctggaagatagaaatcttcatcagaagtgatgaactcgcttagcgcagcatggcgcttagtgtggtcatcgcgatttcaagaaaaaac

SEQ ID NO: 126413 - DNA, 377 bp, Glycine max
agcttacaaagatgaattaaatacaacatttatttctattgtatctaaataactatgggaactaaataactttattcaactgtggttagcccgaatcaagtgtgcaggagcgatctccatggataaaaaaaaattaagcatgacatcacaaaaaaagaaaaaaaaaaacaaatcaactttttgtaaagaaaaccataacaaagaaacatacaaaaaacatcactaaagtgaggagatatcccacttatttatgataaaccatttaattatatcctatcatttaattaaaaatattaaaaaaataaatatatagtaaattgttgtatatttagttaaaaatagtatgcatgactaggaattataatgaaatccatatg

SEQ ID NO: 126414 - DNA, 460 bp, Glycine max
  unsure (1)..(460): unsure at all n locations
agcttgcagactagtattacttatagatattgtgtcttttgttaataatngaatatctgcccacgatataacgagatcgcagtatattcaaataataagagggttagagataacatgttcattgagtgcctgactgctgaggaatggatgtctatgctcctatgccaggactgacatatacttatgagtgttaggtagcatgccgagtgtattttgtggaccctagacattacaataatatatctttttttctatttcaaaaaaaaatattgtcaattctcacggataataaaaaaatataattaaggttgcatgaggggggatgattatcatgtttgtttccaactactctcccacgtgttcttgactagtcttcatgtgtgtggcgattgaactntgacttctaatgctaattaacaacaacgaaacataaggactaccaatacaatgcaattgatgt

SEQ ID NO: 126415 - DNA, 454 bp, Glycine max
  unsure (1)..(454): unsure at all n locations
agcttgaacgaatgtaagacacatcttctttatccttgttgtttcttgactccatctcattgaagcacatgcccacttgtaattccaaagtgtcaaacctttcaccaacaaaggtttgaagaccatcaaacctatccaaaatctttgaaagaagagatgaatcttctccatcatgtccttcttcaccaacatgtcgagcatcctttttaacccaagagccatcatgctctttttgataaccaaaggatgctatgactgaagcacctataaggaaggatctcttgattggaacatagggttcagaatcaagagggatgttaaagtgttgaaggaaaagggttactanatgaggataaggcaatgaagcattcaatcgcaattccatatgcatgcgatatctaacaagaatatacctatcaattcgtagacctttatgaaaggcccgcataacaat

SEQ ID NO: 126416 - DNA, 415 bp, Glycine max
  unsure (1)..(415): unsure at all n locations
cttccacatacttgatagccatactacattttcagtantctaggaggagcgaaaccagaataacctccgctgtcaagggagaccaaattggagagattcccaacctgagatggaatcttcccctggaaccgagaataacagatgtcgaagtgagtcaaggatgtcattgcacacacgaaagatagaattgccatacctttcccaagtaaataattgccgctcaagtccagatattgaagctcaaagagattccccatctgagaggggactgttccgttggcacacatttctcatgtcaagatacaccatactcgagagaatccctatctgaggaagaatcgttccatacaatccactattggatagactgatgagagtccatgatgtccttgcccaaggaaagaggaatgcatac

SEQ ID NO: 126417 - DNA, 436 bp, Glycine max
  unsure (1)..(436): unsure at all n locations
agcttcaacattcaatatcgagcgtctcgatatattacgagtctcaatcanacatcagagaaaaacgttattgtcgtttgaatttgctcagagcttcaacattcaatttcgagcatctcgatatgtgacgggactcaatcagacatccgagaaaaaagttattggtcgttggaattagctcagaagttcaacattcaatttcgagcgtctcgatttgttacgggactcaatcatacatccgagaaaaaagttattgtcgtttgaattggctcagacgttcaacattcaatttcgagcgtctcgatatgttacggggctcattcagacatccgagtaaaaagttattgcggtttgaatgtgcttaaaaattcaacattccatttcgagcgcttcgatattgtacgggactcaatcaaacatccgaganaaaagttat

SEQ ID NO: 126418 - DNA, 417 bp, Glycine max
  unsure (1)..(417): unsure at all n locations
agcnttgtaattgtactagatgtgatantttgacttccttcaaaaagatgatgaaactcacaaaccaagaggggggtggtggtgaattggtttctaaatcanaatacacttttaaaaacccagagtaaaccaaaactttctgttccaaatgatcgtatcacaaaaattttgataaaccaatatttaatcaatcaccctttacacaaaatcctttgtaaagtttgtcataccctaatttcgccctgggacctttgcttgatgacatgcgacctttctttggtccttgtgaggtgcttggtacccatcattaggcaatgtgtgngattccaagacatgccgaaaaacacaataaaatattgatgcacattccgtaagtgttcgtgacacaccggaaatcacatggaagcatcattacct

SEQ ID NO: 126419 - DNA, 433 bp, Glycine max
agcttctaaactttatacaagattgattattgataccacttgttggacaagtggcctcagatatcttaagaagggggggggggggaataacacggttatacacaccatgttcattgtaagcctcgatgctgatgaatgtatgtctattctcacatgccatgactgacatatacttacgatagtacgtaacatgccaacagtattttgtataccctatacattacaataatatatcattttctctatttcaaaaaatacaatcgccaactctcactgtaattaacaaatttacctaacgtcgcatgagggggcaatactatcattgtttgctccaactacaactccacgtgctcttgactacattctcttgctagatgctaattgaactctgacttcatatgctaattaacaacaacgaatcataacgactacc

SEQ ID NO: 126420 - DNA, 416 bp, Glycine max
  unsure (1)..(416): unsure at all n locations
agctngtagggacaaggnnggttctgcacatatttaactaaaggnactctggactacatccatgctgatttatggggcccttctccaactccatctcacttaagtgctaggtattctctttcaatggttgatgactattccaggaagatatggattttcattttgtagactaaagatgaggtggatgattgttttgaaaactggaaaacattgatagaaaactcatcaagaaaaaagataaaagattcgagacacatattggacttgaattctgttcagattctttcactaactattcgatgaaggctggaatagcaagacacaagacggtatctaaaacacctcaatacaatggtttggctaatcagattaacagaatcattcttgagagagcgaggagtatcttactgagtgct

SEQ ID NO: 126421 - DNA, 445 bp, Glycine max
  unsure (1)..(445): unsure at all n locations
agcttcggtttaggtgaatttggtcttcttgatgtataaggaggagctgtacatttttgtctgcctcaatctaattcataatttcaggggtcaaaatggagcatcaatgttgctaccctgcaccttgaattttctgattttgattttttatctttattttgtaattagcgacccaattaggttttttaatatgtttttagggatttaatgtaagtcttcagttgtattaatggagcccacgttttttttactattttccttgtaataaaactaaaacactattgtagtgacacccactaaattacacttttagaattttaaatttgagattaggttttttttttctcttctccttcttctcctatcacctctcttctaatntcttattgaagctcttaatgaaggttttcatggagggctaattactttttcaatccaacggtcg

SEQ ID NO: 126422 - DNA, 415 bp, Glycine max
cgcttgcatacaagatactccttgtctgacacttcaaaacctcacggtaggagcatatagatgtctgcctctaaatccgcatgcaagaatgcagttctaacatctaactgctccaagtgaacattctctgctactactatgctcagaataactctgagggtagtcatctgtaccactggagagaagatctctgtgaaactcattccttgtttctgttgacaccctttccccacaagactcgccttgtatcttcttctatcgtcagaatcttcctttagcctatagacccacctattcttgatacccttctttcctttaggcaactaacatatagaccacgccttatatttctgacaggaggtcatctcatctttcatccatagctcccactcaaaggaggcattcctctgtgtag

SEQ ID NO: 126423 - DNA, 386 bp, Glycine max
  unsure (1)..(386): unsure at all n locations
agcttgtttccagaaatttttgatctatattgggaagaccttttgatattactaatgttntttcccggcgtgcagttgagattaaaaatgaagttatcagtaaagtcttcagagtgaacggtcaccaactcaagctttttcatgagagcccccaagtggaggaggaatttgtggcggacctctctttggccttgccaattttatgtgatgatgtgccttgaatggcactngaggagtttccttcccttttcttttgcatgttgtctcttttttttgcatttcattacatgctcacattgaggacaatgtgcatttcaagtgtggggggagggttacgacaattatgcatggtcactatttcctattttttgttttttgtatctcta

SEQ ID NO: 126424 - DNA, 411 bp, Glycine max
agcgtttcaattcattctatgtaccttgtttggtccacaactggtttcatgtatttttattctcgctccattcaatttttattccccctttagacgagcttaagccattttatttaagtcatttctcgcttaacctaaaaataaaataaatttccaccgatcttttgaattctattatccgttaactttggttgaaatgaattccaaccgatcggtcgtgccgcaaccgcgttggaaaccaaaaaaagaggttaatgttaatataataataaaacataaatgaatacctctctagtaaaatacagcgaaagatcaatcggacgttgtctctttgggatttctcattcttaatcgacttgactaataactatggtgaaactaatgctaaaatcaactcgcctaggcaagctc

SEQ ID NO: 126425 - DNA, 488 bp, Glycine max
  unsure (1)..(488): unsure at all n locations
gatccttaagtcacctgcngcatgcaagcttgtagaatggctagacatgatacatgttatggtttggtttggttcaaggataaaagggatgccccacattatttccatgacacaaaaatgcaaaaatgatgatttggaaactttatgcaaaactggtcatgcatgcacctatgcggacactcaagtgtcaaatttttatggtcatgtgatgctagggctcaggattcatttcctctattttaatcaacccaatgtttccaaaatatgttcttttatcaatttgtgcattcatccgagtccatttcgggcgtccgggaaaatcttcacagcattcacccttcaggtgtatacacattgtttcaaaagctagttacgatcagtgaatttttccaaagaaaagttggaaatcgtctcttttcaaaagcatgttggtctttcaacttgacaacttatattttcctatttctacctttttccttacttacccc

SEQ ID NO: 126426 - DNA, 434 bp, Glycine max
  unsure (1)..(434): unsure at all n locations
agcttctattctcaattacgagcgactcgatantatttttgtattcaagcggacatccgagttaaaagatatcgtcatttgattttcctgagagcttcagttttcaatttcgagcatctcgatatactacaggacacaatcggacattcgagtcaaaagttattgacgtttgatttttcttagagctttagttatcaatttcgagcgtcttgatatactacgggatacaatcggacatccaagtcaaaagttattgttgtttgaattttgtcagagcttctgttttcaattacgagcgtgtccatatattgcgggactcaatcggacatccgagtaaaaagttatcgtctgtcgattttcttacagcttcagatttaatttcgagcgtctcgaatactacgggacacaatcggacatccaaggcaaagagtatt

SEQ ID NO: 126427 - DNA, 451 bp, Glycine max
ccaagcgacgcagctgcagcttttctggtttctcccatgcgatatcacattttttttgagcactacattgagaggtgctgccaaggtgctaaaatccttcacacactcgtctatagagacatgctaagccatgataattcctccactcggtcacggacttatgtgtagaccattcttgaatagccctaaccttctcctcatccacttgcactccttgtgaactcacagcacaaccaagaaacactacatggttagtacaaaagatgcagttttcaagattggcatacaatttgttcttctctaagcacagtcaagacagattttaaatgatcaatatgcaaatcaagtgaagtgctctagatacgaatatgttcaagtacaccacaacgaacttttctatgaactctctcaagatatggtcattaggctcatgacagtgctatgaccgtta

SEQ ID NO: 126428 - DNA, 452 bp, Glycine max
agcttgtaggccttgggtcttcttcatcattgttgttcttgcttctcgaagatcaatgttagtggaatggagaaggaagaaacgtgattggagacaccactccaaggacaagatgagtcaagaacaaactcaccaccataggaagccatggataagagcttaaagttaggagaagatgagtgaagggagaaagagagaaggagcacgaaattttatgcctcaaatgaggtctgaactttgaagtctaatttcaaatgatcaaagttgaaaaatttcacacacaaggcctctatttatagcttcaatgtcacacaaagattggagagaaatttgaatttctattcaaatttcacttgaatttgaatttgaatttgtggagccaaatttggagccaaaaatttcactaattatgagtagggaatttcagctatagtttagcccactaatccaag

SEQ ID NO: 126429 - DNA, 456 bp, Glycine max
  unsure (1)..(456): unsure at all n locations
agcttcatttgtgagttgattntagccttattttcactttggttattagtcaattcaattaaggaaaatcccanagaaaaacatccaattgatttttttaattattttattcaaagatactttgattattttattattattttgcctcttttggttttaaacatggttacggcatgaaagatcggatggattttattttaatagagtttaaacgatattacaactcaaatgataagtgaaaattcattttattgtttattaggcgagaaaacggcttaaatgaatggttaaagcacgtcaaaagggggtacggaaaacaaacgaaatataaataaaagcacgcgaaacaagtgtggaccactaagggtgcatagaatgaattcaaagatttgatttcgggaacttaccggctgaagaccgaagaatgacgaaaacgatgaagaacggtgaagaatc

SEQ ID NO: 126430 - DNA, 356 bp, Glycine max
cgacctgagacctaacagacgacctgcggcatgcagcttggagtaccagcgctttttttttctttttgccagcctctttgacttcattcataggggctttccttcaggtccgcatctgggatgtcccagcttgatgacagctctcagttctgcttccactgatttgaggaaggccccatcttgctttccgtattcatagtggtccatccaaattggggtctgtcactggcctcctttttctcatgtcatcagaattatctcctagatctcactcatgacttcaggcctgctctgtaccaatgaatctgaacgggacaagtcgtcagatgccacatcccttcaacagcgatatattt

SEQ ID NO: 126431 - DNA, 446 bp, Glycine max
  unsure (1)..(446): unsure at all n locations
agcttctcaaggaagctacctattctataattataaacatgngnaacacttgctgtaactgtgatgaatgaaagtcttatgagacacacttcaaaggtccacttctctccctcttttattccttcaatttcgtgctccccccttctctctttcttttcctccattagagaatcctcttcaagcttcttatgcaaggcaattcttgggggtgaagctccttcttccttggcttattccctagtggatggtgcctcccctctcctgttctcctatgccttccgctgcatctccatggtgtaaaatcaccattgaagaacctcattgaagctcaaagatccagcctccatagaggctccacaagcaagcttccatcaagtggtaatcagagcacatgagcttcaaggaggagatccttaaacctccattaattttgttgctttaccttc

SEQ ID NO: 126432 - DNA, 239 bp, Glycine max
agctcgtagaggaggctttgttggtttctattaccgagaggaagcaaaggagatgcgggcactcgaactatagagaaaactgaggcagatgacgagggatctaattagggataaacccacgttatgacttcaatgcctctacaggcgcgtcccctgtcactatatctaggctatgtctcagccaataacaacccttctgataacatactgtcgtgatactcatactggccatccctaac

SEQ ID NO: 126433 - DNA, 408 bp, Glycine max
agcttcatgatgttgaatttagattgattcttgtcgttttgatgataacaagagatgatgactcaaagcccaatagaatgatttcaagattgagtcaacaattcaagaatcatgagaagttaattattacaagattgagtcctcatttcaagaatcatgagaagtctgatgtccagattcaagaaaagatgaattcaagtttcacgagaagaaatcaagaagacttcacacgggaagtattgaaatgatttttcaaaatacaaacatagcacagttttgttttttaaaagagtttctctcacaattttttaagttaccagagttcttactctctggtaatcgtctaccagttttctgtaatctgattaccagtgacaaagtatgttgtcaaagctttaactgatttac

SEQ ID NO: 126434 - DNA, 457 bp, Glycine max
agctttgcagatttggtcttcgccagtgaattgatcaaagcgggtctgaaaagaggcaaatttaatcatcccactcggacgaatgagaaaactggggcaaatgaagagggagagaataagggagaagcccatgttatgactgccattcctgtacggccaagtttcccatcaacccaacaatgtcattactcagccaataacaaaccttctccttacctactgccattttatccacaaaggccatccctaaaatcaaccacaaagcctacctaccgcacttccaatgacaaacaccacctttagcacaaaccaaaaacaccaaccaagaagtgtaatttgcagcgagaaagcctgtagaattcaccccaattccagtgtcctatgctgacttgctcccatatctacttgataattcaatggtagccataaccctagccgaggttcatcaaccttcatt

SEQ ID NO: 126435 - DNA, 443 bp, Glycine max
  unsure (1)..(443): unsure at all n locations
agctngtagatatggtcattgngaagttgttcttactcttctgctcttcagatgcaatgtgagtatgagttctccatttatggaaggaattcattctcttcactgctcttttttctctccctctatttgtcttgtagttatatttgaactgttggatggagaccataggttacagccttacagggttggttgttgaaagttgaaactgtgtcggatgggtgggaaaggaattgtcgccttcaagtgtattatcctattcacatggttaaagtttctttacaagaataactagactatatctaatttgataacaggttgtgaaagcagattatctcagcggtaggacagctcttcactttgcagccatcaatgggcatgcaagatgcattatgcttgtcttggcaaatttgctcaagtgctccttttgaacttacatgctccat

SEQ ID NO: 126436 - DNA, 360 bp, Glycine max
agcttcaaatcccccttcatttccacaccatattgcaagataatagtcgcttcggagactaagagcctacctctacctcatgggaccttcaatttcatgtaagggtggacttctcctcactcgaaatctgtgggtgttgagatcttgagagctataatgggtaaccctactacgttattgctttagggcagttgtttgtgaacgatattgttgtaattatgctaaacatgacatgtgtaatgtaagcaaaactgcctatgttgatataaggctcaataaagatgtgttgagatataagagtgcctcaaatgtacatagaaaattggcatagaggatggtgagagttatcttacagattaa

SEQ ID NO: 126437 - DNA, 375 bp, Glycine max
agcttgagactgcttcattgcataagtatgtatgttgtttcttacaacgttagtttggatttaccattccaccaatccaaacactctgaactagttaattgatatatgaggagaagcattggagatctaatctcacattggtaagtgtaaaactaagttaaagagtataccagcatgaacatcttgaatgcatactgcctaggcattcttagaaaaacaagtcgcttaattatgctaagaccactaaaaccttctcatactcttgagtaaggataacacacatatttcaataaacaacatgatataatgaaaacgatttttttcaatagttaaactaagctggatctttctcagaaataaaatgtaaaacacatt

SEQ ID NO: 126438 - DNA, 231 bp, Glycine max
cgctgcagctcagtataagagatatttccctttttttccattggggaagtgtcaaaggcggcatctgttgccataatggaatggggacgtgttctctgagactcccagccctagtgttgagatcatgggcctgccattttactaacattttatgatgcctacgcgccctctattgattggaagcattttgtattggagaatttgcgcgggaccctacgggatttgttggac

SEQ ID NO: 126439 - DNA, 405 bp, Glycine max
agctttgtcttgatactagaattctcttttcttgattctcgaatcttgagtcttgaaccttcatctcttgaatcatgaatcttgagtcttgaatgcaacattcctcttgaatcttgaagtggtcttgattatatcttgaacatcctgaactcattctctgattgaccttcgagctgtttgtcatcacactagtcatcatcttttgatataatctctgttatcatcaaaacgtctttgaatcactcttgattcaccatgaagctttgcttttacaggaccgagtcgatctcatggattggaatgcatctcctaataacctgggcactgcacaacttccacaaataggggccatcccaaatatcatgcttatcatcgctcttaattgtatcattattagctttagat

SEQ ID NO: 126440 - DNA, 447 bp, Glycine max
agcttcattaagaggctgactttatatgttttattaagaggctactagcacactccagacattctatctaagatcccaacggtcagatcatggacaattgtcttgtgaagtttaaaaccaaatctcaagaagatccaacggctaatgaaggctgggcagcgctcttaccgaggcagctgcatgtagctttctctagaagcttcattaagaggcttcctctagaagcctcctcgtggcttctttgagaagctttctcaacaggcttttttgagaagtgcgatccttatctatccacacccctctattaactaaggcaactccctctaaaataatgacggatgaacgaaatgcaccaaagaatcaaacatcaaacatacgtactaataatatatacatatatatatcatggtgtcaccccctcgccgcggagctctcggaccactcctc

SEQ ID NO: 126441 - DNA, 382 bp, Glycine max
agcttgagatgaggaagcgcatattggtgtttctccctgctcttattcgatgaccacagagtggtacctggagatatgtcgcgggggtcaggagaccttgaggacgtaatgtggggtgctattgccccaaaccaatctttaccaatcccgacccaacccgggcataattagtcaccgagaacctgtgatgtacctaaacaggcgagctcctggcagttcacagataaaaggaacaaagaccaccatgcaatgaggcgtgtggtggttggccacctgtgaatttcgtgtgatatatgtggtgtggcctctggtaatcgattaccaagggtgtgtactcgattaccaagcgtaaaaatgacaatacgaggcttagatggtctct

SEQ ID NO: 126442 - DNA, 470 bp, Glycine max
ggatcttcagcaccgcggctgcagcttgaatgaacactgttacattctttactggaatatcctttcggagagaaatgtgaagctttatcatactgagtttgacgagtttaaggtggagttggagaggcgtaatctgcacaaatgcctcgccaatctccagaatggaagcatagacgtggctctagttaaggaattttatgctcgtttatacaccatagaggaacaagctccaaagcaagcccctaatgataatgagattacaaaacctggtatctctacaaaagctgctcctctagctgcctctaaagctctttccccgaaataggcattatggtgtgctcttgaatgttgtacaaatctgtttcaggctattgtgtaccctaattctacacaagacaggctttaaataggctctgaatttgtgacgttgcgcttatagccacccttgcgcttagtgcgagtaagtgaat

SEQ ID NO: 126443 - DNA, 424 bp, Glycine max
  unsure (1)..(424): unsure at all n locations
agcttgcatagcanatgtttgcttttattgttttaccctcccatcggtccatccatcgcccctgtttgactaaactcccacctaacaatagttgtggtcacacactttgatgccaatccttaacccaaagagctccttaatgtcagagaatatcctaaaccaactccttttagaggctagagcaacagttccttgaccatggctaccgtctcctgactatgcccactggctgctgatcttacctaaagcctacacaacttacccattgagagtatactggacttcaaaacccatattcactgatagatcaccgttgttacattagctgtcgttagaaactcgcactaagccgtacaactcatctcttcatacaagcctcacaccatagtgtataatagtccatactcatggcttgttacaactg

SEQ ID NO: 126444 - DNA, 339 bp, Glycine max
  unsure (1)..(339): unsure at all n locations
agcttctacttatgtggcatggcgggctttcttcactttcttgtccacaacgcgagctctgaccactgctcttccttcccgcgatgcttctgttcatatccgtctgagtgggcttatagcctaaaccatacttcccacgatttcctttggcatttatcaagctagtcaatgccgccgttgtctttgcctaaaccccatttttgggtcataacacggtccccaacataactcgngccatcattactgctgcatcggacaaacaagtcgtccctttatacttgtcgaaagcccggtactttgaacgttgggggaatatcaacattaagtactaaacaaaga

SEQ ID NO: 126445 - DNA, 453 bp, Glycine max
agcttgtggcagataatgttggggtgaattccgagcatgttagatggctgccaagcgaacgggtctgtgttcctgtgtaagacatcaacgatgtgtcaatgctcatggctggtgaggttcttgctgagctgtgtgcattacccgggtttatgtctaagctgcagcttgacaagttcttcgataggctttgggcatatatcaaaagtgttgtcgtgcaaatctacattgtccaggcttgcctggtacgctatcggggctcatattggagaccctttgaccataatcatgacttgagtggtaccatttgttgtggggtgaagcttggcaagctccctggtgggaggatagggtgccactttcaagctttccatgtagcacttccatgtatcactatcgtgcctgctattgatctgcctagacaattacgagctctcctgtcagggtggagaactt

SEQ ID NO: 126446 - DNA, 444 bp, Glycine max
  unsure (1)..(444): unsure at all n locations
agcttatggattacttaatccgngtggnttatattaattntttatctttttaaataaaaataaatattaaataaaaattatatgtctatttgaaatataattcatattattgctttaaatgtttttaaaaaatgtagattgataattaatttgtaattactttctatatttttaaaatggtatgacttgtaagataatttatagttgtaatttatggataatttatttgagtttgtggtctaaaattgattgttctatgtactaataattttcagaattacaattaagttgaatcaaataatttatttgactacatatgctgcagttataattcttttatgtattatatggttatgaattgtaagtataaaaagttgatgttatacgtctttaatatatacggttattaattttaatgtttataaaatggccggcaccacaaaa

SEQ ID NO: 126447 - DNA, 403 bp, Glycine max
agcttactaacgaatgcattagcggcttctctaacatttacaccattatcaattacagagagcacatttccagacataaagcaaatgtgttgtgatgccgtctccacactactcattttgtctctctcgacaaaaaatagggcttatttgtcacgaggtatggagaagatgaaacccgactaaggtggtgacgacagaacattctattgcgacgaatacgaggcataacgaagaggatgtgcaaggagttacctgctgacgaacttacctactaatggtgccaacacgatccagatgtgaacaggctcgaggaggtgaataggcacgacgaggtgaatatgcacgaggaggcgattagacaataacatgacgcagaagagtgcgagcgagagataatatgact

SEQ ID NO: 126448 - DNA, 456 bp, Glycine max
  unsure (1)..(456): unsure at all n locations
agcttccatttctagggtagtggcttcaatttctatgccactttgctggggtttggnttcataagcacatgtagcagcagatgaaacagattcatcgtgaatattgcaagccattagtactacgtaatagtaattggagctagggcttgtgagtgaatggacaatttgtaacagatgaagccaagccacatatatagatttattttgcagaaatttaacacgtgtttcatattttaatacgtgttgtaaccaaaaaaaaagaatatattaattattttaatacgtgtttcgtgtatatatagattatattgtaagaatttaatacatacggttgcagattatgtacagagtaacaagtgaggtagggaaagagagggtgatgtttggaccacaaatcatgttattgcatttaaatggttgctgtacggtggagcctttgagtgtcatgtgtgcacc

SEQ ID NO: 126449 - DNA, 433 bp, Glycine max
agcttcataagtgactcagatcttacaaattttattaactggtggatacatctatcttaaaattagaattctttaaattaaaatatatgattaaagataaatttagacgtgtgagccctgttaatactttaatactttaaataaaagcctatgcttaagagataaaaaagtaaaccctaatcctcaaaatatttttttataacaagggttgaaagtaattaaaaagaattagatttcatctttaatcattttgtaatctacaaaataataatcaaggaataattctaaaatataattaatgagaagatgacatataatttgattgatgaaaaaattaataatatcaaaatctctaaaattttcaggaatatcataatctctctcatattttatatatatatatatatgtatatatatatatatatatatatat

SEQ ID NO: 126450 - DNA, 443 bp, Glycine max
agcttgtaagattatggggtacccatcacatgtgtgactaggtggcggtcgggcgatggagcacaacaaagtttccacattcacaaatcacgtataaacccaccatcctctgttgcccacctccaactgagctcacgtactcccacgtagcccatattctcgtttctctcaacaccgggtccccatcaatcctcccaagcttccccaacatccaggtaattcaacatccgaatcatcacaaactaacaaaccaagccaaacagggcaaaggcagaatactctgcccaaaactcaaaccaaaatcacagctttttctcacttaaagaccccagtaacatttccttcgttccaattcgttcaccgttggatcgactcaataatgttactggaagactctagtacataacgctacattttgaccgttgggatctgcttcaaacatc

SEQ ID NO: 126451 - DNA, 378 bp, Glycine max
agcttgcagatgtcactcatgctactgatgttcttccctcaaaagatcacgatgatttgatattgagggcttattattatttaactcttgacctatgtgaaaaaagctatctttgtttatatagcacaaccatctggttatattacattacaacctcatgaaatatgatgctctatctgtatgactaacatgatatatttatttttaaaatgctcatgttacagtctatcggatttaatattcctcgtgggacccaacttcttcaaggacgcttgccactatcccctgtttcatccctaatgtgagttgggttagtgaagaaagccaattgtgctcatacgattctaaggtattaatcgtgttcgagatactgtacta

SEQ ID NO: 126452 - DNA, 356 bp, Glycine max
agctagcctcaaagagatctatgactgattatgcgggtgaaggagcccagtctgctccctattatgacatccccctggttaggatcgctggacacatcattggatggtcgtttctctgggagctactcatccagttggtggatgactatggtatcatcttttcactagagatagttctgcggctgtgggcatcactggctacccccatgggccatttcgtcccacacatacatcttgaattttatgctaatgctgggactacacaggaagggctgctagatattgtattctgagtgaggggacagtggatcccgttcgatgcggatgatattattcaattgctgtgatacccttta

SEQ ID NO: 126453 - DNA, 437 bp, Glycine max
  unsure (1)..(437): unsure at all n locations
agcttgtaaaaattaccccaattccagtgttctatgctgacttgctcccatatctacttgataattcaatggtagccataaccctagccaaggttcatcaacctccatttctccgagaatacgactctaaacgcaacgtgtgcttgtcacggaggagccccggggcattccattgagcattgtatgaccccgaagcataaagtgtgaagtctaattgatacgggccggctgaaatttgaggagaatcgcttgttgaatcctaacattgacaagcaacaccatacatggngcaattctggaagctgttgttatgactcatcatgattttcaaggttatgccattattataaaccacagttgcaatgctaaatgatatggataanaaggacatccttgtctctctcatcctctcatgaacacatctttgctgattcaac

SEQ ID NO: 126454 - DNA, 457 bp, Glycine max
  unsure (1)..(457): unsure at all n locations
agctnttcctctagttcatctgttagggtttccaaacattacagaaagggagaagggattgaagcctcaatatttgcaaatcccaatggtgaggatgtgaggaaatgcattctgaacctggtgttcaaatttcatagtgatctaatggttaacaagtctgggatcgtagttttactagaacaagttttgtgtatgaggaaaaaaagagctacgtccgaaggacatttctctcaccatagacattatgtcacaaatcctaacggtgagaatttgcagaaaatgctttttgcacttgatgttcaaatttcacgacgatccaacgactaacgagtccaggatcatagttttattgagatatgtttgggtgtacgcgagaaaaaaagagctacgtgcgagagacattnttctcaccagagacattattntgcatatcccaatggtaaggatatgagaaaat

SEQ ID NO: 126455 - DNA, 417 bp, Glycine max
accttaagtcacctgcggcatgcaagcttgtcaagatacgtgatcttgaggatttggattatcttactaacaaagaagtgaagtagaggggtgatggcttgaaggcattatctccttggccaaatgttgatatccctaatgaagaattagaatcatggtgtaaaccatggaagggctatgcggatgtccatgtcctaagaaacaaactatgggtcaaaatcatcgaatttaagataaaaaaattgcgctcatgcgaaaaagattcgaattgtcgacactcgatggtttctttctggtgcaatttcctctattcaatattataaacatgctttgtatgagggcccttggatggcggcggatcattacatggtggtgtagagatggcgaccaaccttcattaataattcaaacatcatg

SEQ ID NO: 126456 - DNA, 297 bp, Glycine max
agcttcaacagtgagccttcttagcctgttggattgtctactcctccttgacgcaacctaccggacgaatatctgaatgtgaagggaccatgggggtgtcgccatgactatgcgcctataaaacgaaagtgagtaggacatagcgagtaatataactacatataagcattaagttgcaatatccaataactaaacgtcttacaattatgaaagacgtatgttatatacattactttgtcttacccgtccataggaaagtctcctaaccctcatcatgacttatgatgtgctggcatc

SEQ ID NO: 126457 - DNA, 399 bp, Glycine max
  unsure (1)..(399): unsure at all n locations
agcttggttcgaggtacttacccgttgaagatcgaatattgatgaagaacgaatgaagaacgtcgaagaacggttgaaacctttgcgagattcctcacggaaaacgttacagaaacgtttcggaagcgcctcggcttagattttcttcacggaaacaatttttccaagcaaattcgaatgagagagaagtgcctcaggggctgaaccccttccttcttgccttcctcccctatttatagcaaaataagggaggtggttgccgcccatctcgcccaggcgagcagggttgcttcctccacaagcaaccgccttctggtggaatattccggagggcccaaatgggcctgggggctatntgcacccccattttactacgtacaccggctctgctggattttg

SEQ ID NO: 126458 - DNA, 372 bp, Glycine max
cgcttgtgagtcgtgagtggtagaactgattatacccttcccataccccctttccccttatcacaaactgtgtggaatactattgctacttcacaacaatgatatttaattaatctacactctaaggtaatcccatcatctaattaccttgcataccctaatatcagagaatactgagtttgttgtacctccatatgatgcacatgctcatctaccgtacatgtctcagcttgcagtataacatggtggagttgcagcgttgatcacagaagatagtgatctaatagcatatggctgtccacctgtagaactcctccaatactgtgattttgtgcatggacgttacatgcttctcgaaatcttgattattta

SEQ ID NO: 126459 - DNA, 224 bp, Glycine max
aggggccactcctgaatgacctctaatcacttaggggtcgagggaatgccttgatcactgattctgatgttaaaataagatatgcaccaaaaggtacacttgtcaggaatcgcatgttgactattaccaccaaaagagtatgcggaaacaaagagtcctatatgagtgacctagttctgattgaaacataatgaacaaatccctacctaatgagtccctatgtg

SEQ ID NO: 126460 - DNA, 439 bp, Glycine max
  unsure (1)..(439): unsure at all n locations
gacctgcagcatgcaagcttagatgatatggacgatattgacgatatgatcaaagcgagactagaaagaggcaaattcgagcatcatacattgataaacgccaaaaaaaaaactagggctaatgaagagggtgagaatgagggacaagcccatgctgcgactgccattcctatacagccaagtntgccatatacccagcaatgtcattactcagccaataactaaccttgtccttacccaccgcccagttatacacaaaggcaatccctaaatcaaccacaaagtctgtctaccgcacttccaatgatgaacaccacctttagcacaaaccaaaaacaccaaccaagaatagaattttgcagcgagacagcatgtaaaattcaccccaattccagagtcctatgctgacttgctcccatatctatatgataattcaatg

SEQ ID NO: 126461 - DNA, 358 bp, Glycine max
agcatgatagcttgaacataatcagtcttattctataatgacgcgtaacttgaatcacaaaccatatgcatacccacaagaatggcccaaagctcaacctccagaataatacagtgactcacgcctcctgacaacactcttaccgaatcaacttttgcatttggatctcaacaccacaagcggctagagccgctgaggcacggtaacctgcctcacaactaatattcctatgaccctaccaaaggcttgcttcacctttcataaacatcacgagtgctagtatcatccttaggtgctcacatctcatgaatgaacttgcttctacttacaaccagtacaccacgccaatctctcacac

SEQ ID NO: 126462 - DNA, 437 bp, Glycine max
agcttgaaccttgaatcttgattcttgaattctaatttcctcttgaaccttgaagtgttcttgattcaatcttgaacatcttgaactcattctttgattctttgagatcatcatctttgttatcatgaagtgttcttgacctttgagctttttgtaatcacctttgttatcatcaaaactcctttgaatcaatcttgattcatcatgaagcttgcttctacagatgatacccaaactggggtcgtgagactatgttagtgaaaaggatagattttgtatgtataaggtcatggtgggagaaaaggtgaatctacctaaagtcatcttctattactggatgcagggcttcaaagaaagattcaaccctaaagtgaagaagaatcttgtcccttttaggatgctattcactcagatcatgaggaatgtttggtcaactc

SEQ ID NO: 126463 - DNA, 397 bp, Glycine max
agctttgataatatattatagcgaattatttgcaaataggaagggatcggttcaactcccatgtatggttaggtgattggaaaggaaatgagcatttctacaagtatacacataagagctccattacataggtgctagaaacctctatctatttaaccaaaatgtaagggaaaataatggatcaacatgtctagctaactggttcagctttagatcaaagtggcagaaatgataatgttattatggttgagtaaccacacacgatatgacatgatacccaatgattgtctatgaggagagattggtgtagcaccaatttacgaaaagataacacaaaatccattcatatgcgttagagtttatacatatactaagaatgtcgcaagaggcactactg

SEQ ID NO: 126464 - DNA, 285 bp, Glycine max
tgcttaacgaagtggctatctctggttctttatagtgaacccagggcgctccagatgctacagggagaatgcaagttatggttcataacatttactatgctatgtgcgcttcaaatgcgaattggagctagaaggttatggttcaaaacacagtgactaggctatgtgcttcatatggacagtacttgagaagtggatggaagaccaaaaaaattattatctatattaatctatcttgatttacaaacgttttttttaatagacactatcattaaccttataaca

SEQ ID NO: 126465 - DNA, 457 bp, Glycine max
  unsure (1)..(457): unsure at all n locations
agcttcaggttntgatgtgtgagatgcatgttatgcttattctataaaatcaagtagtccagcttgacgagatgcttgtaactcaggatcctttccctccaaatactagaaaacaaaagttaataaataaaggaaaacaggcactttaaaaaattaactaaagcaatttaaaaatcaaaagactactatccataaattatgaaggggaaatgcatacatttacactgtaaataattcttagaaaaaggaacttttggttaaacaactagttaggaaaaaggattggttggacgattgtccataaaagttagtgatttatatttctgataaaacaaaaacaaagaccatatgcaagcatcaaccagaaaaggacaaagaanagctcagcaataactcgaagtctcatacgaatacaacagcaggaatcactagtttttccagataaatatttattcac

SEQ ID NO: 126466 - DNA, 449 bp, Glycine max
  unsure (1)..(449): unsure at all n locations
agctantcccatctggccaataatagccatttctatatttttcatgtcgcatgagtaaagctctagagtgtctctgtgtgacaaagagctatgagtaagcatgcatgcaagtatgaatataatgatattaacacacccacacgtgtgtggccacacacatatatatagaaatagaacctgaaaggaagagggagttgtggaaataagtgtggaatactcgagtgagttggaagggttgttatatataacatatcgccccaatcaagtttctgggcttaactcactaaatatgcttgtccaaatccctcaatatgtggtggagtcagacaaaactgtttcttctctgacattggaaggttgaagaagtcctgaatctccaacttcagtttctttagcaaggaagggcttactccatgggttataagctacacaatatatataaaacttac

SEQ ID NO: 126467 - DNA, 439 bp, Glycine max
agcttgccacccagctcgcccaggcgagcttggttgcttcctccagaagcaacagccttctggaggaatcttctggagggcccaagtgggcctggttgctatttgcacccccatttttactaaatacacccctgcctttttttggtgattcttctttcgtaaagttacggaaacttacgaatttcgtaacgatacttattttctttccgtaatgttacggaaccttgtggattacataatcatcctctttttgacttacggaatattacggaacctcactaattgtgcaatgatgcttccatttgatttccggtgtgacacggaaccttacggattgtgtatcaatattttcttttgctttccgacatgtactgtaatttcacaaattgtctaatgatgggtgccaagcacctcacaaggaccaaacaaaagttgcatg

SEQ ID NO: 126468 - DNA, 441 bp, Glycine max
  unsure (1)..(441): unsure at all n locations
agctngaataggctgtagtgcaaagggatatatatgtatatgtaaagactgttgttgctgaagtcaaaaatcacaaatgtgattgaactttctaaagcgtaacagtcactgacctaaaaggtttattcgcggtgtcccacgcaaacctttcaagatacaacaggaacgtcttagtgaagctaaggttacagaatttgtcaagctatatgaaccagaaactcttggtgtgtgatagggctctaccaatcacaagacaccctcatagcctttgttggtatcgctgtgttgcactactagaccatgcgcgtgccttgtattcataagtgctctacagatcttggcaagagcttatgcatgcgacctcactttgacctcatagttgtgattcatcaagtcatgcgcgagttcatacccaccataagggatagaaaatatttaaac

SEQ ID NO: 126469 - DNA, 406 bp, Glycine max
  unsure (1)..(406): unsure at all n locations
cgccagctntagcgagccattcatcaacagcacttattttattatatgatgattcacttcagttgctttttcaaatggttgccaagggatctttgattgttttctctcgttataaggaaggacttgttccattacacaacatacaactttgcatacatgctatgcaggtaaactatggtacatttgtctgcagtgaaagtactatcgaaaatgatgtaaatattgcatatgataattagcttgagctgatattattcttctgatggttgaatatttatatttttgctacttataattctagatacttggtcttcttttggtaaatgacaatggaagcacaaccaaatatatccacacgcatcatttggtatgtaacttaactttcaaatcttaatacttcttgttt

SEQ ID NO: 126470 - DNA, 348 bp, Glycine max
ccgcaacctcctatgcctcttatagtcccacctcacgcaattccacacaaaaaaatggaagaagtggaaaagagagatttggagacctttatgaaagtataggtgaacatacctctactatatgccatctagcagattccaggatatggcatgtttttaaggagctgtgcacccacaaaatgaagctcataggcaatgaaaggattacggtgggccgaaatgtgggaacattgatagagtaacttgttactcacattcctgtgaaatgaaaggacctaggtcctcttgtatacctatgcattattgggaacaataaacttcagaatgccatgctagattcaggagcat

SEQ ID NO: 126471 - DNA, 174 bp, Glycine max
  unsure (1)..(174): unsure at all n locations
gacccggaccactaagtgaccgcagcatgcaacctggacctcgacagattaaattctactaccacccacacggngggagaaaagagcataaatgggctctaacctacctatcaaagctgaagccgaggaacgacaacgatgaccaggagccaacgtcgtactacccaggatccc

SEQ ID NO: 126472 - DNA, 440 bp, Glycine max
  unsure (1)..(440): unsure at all n locations
agcttaatacattntattaataatcaaagttttctaaatacaagaaagcatgcttataagaaatgggacaagcatgagatatggcagcccttattagagtatgagctactgtattaacttgtcgcctaataaactcgacactaaagttgttgtaaatatttaaaactataaaagctgatatacataacacaactaatttaaataatatttaaaagtataaatttaaaatatgtttaaaactgtaaataaaatttacattattgatttaaagaaatgtaaatataatatgaaaaattaaacaaactcaaattatcaagtatcaatatcattctataggtgtataaaaaaaagtatcactctctaaggaaaaatagtattaatatgtgtaattacattcgtgaaacagtttcaatttacatacgtcatggattaacgaaatt

SEQ ID NO: 126473 - DNA, 453 bp, Glycine max
agcttcaggttgctcattgactccaaattgttggaatgtaagacaaagatctgtatggtgatctgcagaagaacatagacttcagacgcttgcaacaggtgtaaatttatgattcatggcaagctgagttactaggttgaccaaggcatcaagttttccctcaagtttttgattttcagtagatgaagatgaatccatggccacctcatggactcctctaaggacaatagcatcatttcttgcactgaattattgggagttggaagccatcttctcaatcaaattcctagcctcagcaggggtcatatcaccaagagctccaccattggcagcatcaatcatactcctctccatgttgctaagtccctcatagaaatattgaagaaggagttgctcggaaatctggtggtgagggcagcttgcacacaatttcttgaatctttcccagtactc

SEQ ID NO: 126474 - DNA, 451 bp, Glycine max
  unsure (1)..(451): unsure at all n locations
agcttaatagtgagaaaaattaagaactattttaatttctaagtaacttttattattgatttattacagtatgggtaaacaatgattaatataaaagtaggatggaacaaaaatgaaaaggcttaccgactactgcttataatgaaataaatacacaacatacaaagagtgaaatgagcatatattccatatgattacaatgacaaataaaacttattcatcagtcatcaccaaatgagcataatcacataaataaatggtcggaaattgtttttaaattgaaaaggaagactgggaggggccacgatcactgccagctgttgggaatgattaaattcacccattcattcattgatgaaggtgaaagctcanagaaactgaatgaccaatgtctctccattatgacacacgtaatgtctcatctctcacgcatcaacccacactctgacac

SEQ ID NO: 126475 - DNA, 441 bp, Glycine max
  unsure (1)..(441): unsure at all n locations
agctntagaaactngttttaaagatgtaccctcttctggttgtttcctcttctaagagggaattggatccttgtatgactgactctntgtccttgccatctacaaattacaacataagaaagatatgcaatttctatctcgttagcaaagaaggagcattgaaaaanaaatctagaggagtggaagaatgacatattctgcatcaaatgggtaggtctcaccatggcaaaattgagccctgaaactcattgaagcttctggaagtgcatttgccatggagatttggacccatgtagttgagatagcctctggaggtcatttcactttgcaaatgataacctcattgtagctgaatagatcttgaaacacaagaatatctntggaagtcctttcgccttggcaagatgaatttttgccatgatgaaaagtacccgtagagaa

SEQ ID NO: 126476 - DNA, 438 bp, Glycine max
agcttgccatttgtccgcatgcaaaaccgtgtttacatatatataaaaaagaacatgggagatgaatgacgcatagttgtcagagaagatatggacaaactccctaatgccaacttcatcagagaagtcaaatattccaccctgcttctccaacttcgtcatggacaaaaaggccaacgaaaaatggcaaacgtgtaccgactatactaatctgaatagggcgtgtcccacagatgcataccctttgcccaacatcaacaggctagtcaatggagcgtctgattaccacgtgctaagcattttggacgcttactccaaaacaaccagattatgatgcacactccaaatgacgagtaaatgatattcattactcgagatgtcaactttcttacagggcatgcccttcacctaaaaatgtagcgctcatacagagatgat

SEQ ID NO: 126477 - DNA, 388 bp, Glycine max
  unsure (1)..(388): unsure at all n locations
agcttagccctagaggggatggtctcttttatattntggagaggatcaataacaatgcctataggttggacctcccagaagagtatggaatcagcaccacttttaacatttctgatttaattccttttgcatatgaagctgatattgaggaggaggaactaacaaatttgaggtcaaatccttttcaaggggaaggggatgatgccatcctccctagacagggaccagtcactataaccatgagcaggaggctccaaaaagattatgctatagctgctgaagaatgccctagggttctcatgaacctcagggtagatatctgagcccatgggccatggttgggtccaattatctttgtacatattagactaggatgacattatatttg

SEQ ID NO: 126478 - DNA, 381 bp, Glycine max
agcttggcctgtgcactaagtgagttgtatttcctacttctttccaggatttatctttcagtttttgcatcaatttccctctaaatcacttgaaatattcttcttttactttgctgctaaaaaattgcacgtatattaattccttcattatttcattaaaaacaacagtaaagtaaagaaattgccatcattcttagcctaaattgaccatcaaattaactcaaaatttgcaggtatcacctatactaattgaaaggaagcttgtgtgtggcctagactcatacataaatgaaagacacactacgcattcatgatgatgcttcccccactaataccttgcgatattcttcttctattaagacctatggttgggtcaccctt

SEQ ID NO: 126479 - DNA, 441 bp, Glycine max
  unsure (1)..(441): unsure at all n locations
agcttatggatcaagttgatccacatgcnttttgtggatcaagntaatccgcatgaagcttgcagatcaacttgatccgtattcagcttcaatcaatcctacaaattgcggagcatctacaacctacacggatcatgtacatccctaccttatgactactgcggatcaagtataaggcatacgcggatcaactaaatgaatgcacggatcaactaaaatgcggatcaactattttctaaacactacacaacaccaccaacaatggaaacacaaacgacagggatggagaagagagcttaccttgacaatgtcgacgagcagaagaagaagatgatgatgaagaagaagatgacacctacagacgtgccgtagaggaagaagaggtcgctaaagaacggagctgctgaagaccaaaacagagctgaagaagaatgcgtgaag

SEQ ID NO: 126480 - DNA, 370 bp, Glycine max
agcttgtgaaatagaatatatgcaatcctctttttgaagagaggttgcagggactatcatcttgcgccctaatggccttctgaacatcttatctgaaactacttgtacttcttctctattggggtccctcatgcactcaacttcacaagatgggtgctccgattcatattgtcacaactctctgttattcatacaattctcaagatgggcacgccctaacactgatctgatagaaaactttattatccattcgcttgctcactgtggattgattatgaaagcaggaaccatttgatttacacaacacatggtggtgaacatgaatgatacgcctatttttttacaccttcaccatcaatgacagctgctt

SEQ ID NO: 126481 - DNA, 446 bp, Glycine max
  unsure (1)..(446): unsure at all n locations
cagcttgganaatgatttctatacatatattagtcgtacaaagcgactaataaactcccccaaatttacagttttgcttgtcctcaagcaaagaaagaacaattcacttgtcctcaagtaacaaagacagtggccaatcaaaagaaaatggtgtttgattcatcaaggacatcaactgtatgaattgaaaaccatggaatgcttaaatcaattacttctcacaagcatgtagtttttcaaagataggagcacaagtattagagtcatagctgaaataagctagtaagcatgacataaatcaatgaaggatcatcaaccaaaacctcacagtcattgtttcactcaaactcaagtgtgtaggcttattccatcattaacaaccaacacaaattccaacctttgcatttcatctcatatcatacaccaatgaacacacaaaatgaatc

SEQ ID NO: 126482 - DNA, 433 bp, Glycine max
  unsure (1)..(433): unsure at all n locations
agcttgtgccatgtctatttcttactctttatatgagatttcactaacataaccaaccattgctagactagcaaccactggatttcaacaacctgccagtactcccattggactttcatcctaacctcaattagataagcaacaccactggatttcaacttgctagccactgttggacttataactgtaaaggggttctatggtttagactgcatagatacaaattttcaccttccagagggcttccactcaggaagatacaatcttatacttccatactagatctattacatattacaagctcaatacagaagtgagttactcttaacagagagggttgaagcagaaattgcagatttctcacacagaggttagactcatggttttctcattggaatgctttaacttgtcttcaagatactctatanacatg

SEQ ID NO: 126483 - DNA, 403 bp, Glycine max
agcttgcagtttcaattgcaagatattctggtgtcttttattgaatttgacatttaaagacttctttccttagctactattggttctctaattttccttctctttattctccttgtgtgttaaggaaataagtttggcatgaagaacaaacctattatgaagacggacaaagaagactcaactcagggattggagaaaaacttaattaacagtagtgacaaagcaatttacgtgttatttcttttttaagaaaatatcaataaaattataattgcataagtattagagacaagaattatctatagtaacaaaaattttgttagcaatactttaatttcttctaagctgtggacttagaaggcaaaatgcttaatatttgtgttcagaacaatgggaaaacata

SEQ ID NO: 126484 - DNA, 442 bp, Glycine max
agcttgtaatcgattacacacatactgcagtcgattttattagagattttcagaaaaaattctcaatagtcacatctttttgtgtggttcttgaatggctatcaaaggcttatatatatgtgacttgagacacgaatttgacaagagtttttttttaagaacaaaaaggtcttatcctcttataaagcaaaataattttatcctcttacaaattccttggccaaaactcttgtgattcaataaggaattatttgagtgctcaaattgttcaatctatctctttatagagagatttcttcttctcttcttcttcattctgaaaagggattaaaagaccgatggtctcttgttgtgaaaggattctaaacacataggaaggattgttccttgtgtgttagaacttgtaaaaggaatttacaagatagtggaactctcaagcggg

SEQ ID NO: 126485 - DNA, 459 bp, Glycine max
  unsure (1)..(459): unsure at all n locations
agcttgtacgaatataagaaacatcntcttctatcttggtgattctggactccatctcattgaagtgcatgtccacttgtaactccaaagtatcaaacctttcaccaacaaaggtttgaagaccatcgaacctatccaaaatctttagaagaagagatgaatcttctccaccatgtccttcttcatcaacatgtcgagcaccctttttcacccaagagccatcatgctctttntcataaccaaaggatgcaatgacagtagcgcctattagaaaggatctcttgattggaacataaggttcagaatcaagagggatgttaaagtgttgaaggaagagggtgactaggtgtggataaggcaatggagcatttaatcgcaatgtcttatgcatgcgatatcgaactaagtgtgcccaatcaatttgtagacctttatganaagccaacataacaataagat

SEQ ID NO: 126486 - DNA, 459 bp, Glycine max
  unsure (1)..(459): unsure at all n locations
agctntaaggagataaatctactatggaatttaaaatgtatgattctattncaaagggaacttcaagagaaaagtgttaagacctctttatttggaggaatataaccattgagttttgctacattgaaaaagtctggatgactcacatcgatctcttcattgctgcacacaatgaattatgtataaagctcaattttagaaagtgtagatgcaataatagacacaatcacacgactataaaaaacatagagcttgatcaaaactcagaaaaattcatgcaacatccaaaacaatcctctctagtctgagatactaaagttataaagaagccaaagcttatgacactgacaactatagaaaaattatgcttccgggttaggtaaaactacatctaaaagctaatcacaagtcaagtgtagtggcaatgaattantntcatataatgcatataattacata

SEQ ID NO: 126487 - DNA, 445 bp, Glycine max
  unsure (1)..(445): unsure at all n locations
ctgcagcttgaacaagccctattgttgctcaattatcatagcctccaggncttttggttcttcgatgatggcgacaatatattccaattttatatctaacgatctaagaattttctccataatgtttacatcatcaagcttttcaccacttctcttaagatgattggcgattgctaacactctagaaaaatagtcggagatgacttcacctttctctcatatgcaaggtgtgaaacttaactcttacactatgaagacgtaccttcttgatcggatctgctcccttatacgagggttgaagctgctcccaggcttctttcaccgactttgcttctgaaaccttcttgaaagcatcatcatctaatccttgatagattagatagagagccttcttggctctctctcttgagtctctaaactatctctctgaggttgagaaagacta

SEQ ID NO: 126488 - DNA, 389 bp, Glycine max
aataaagaaaatcactacaactactataacctaatactatctgtatcgggatgtggggtgacatgttgagggaggcaactatattaatagtgccctcttgtttcgacttctaccagcttggtcgaatattaaattcatactttgcttctcaacaaaaaagatctgcaatatatactatttcccttttcacgtagttcgtacatcttcttaactcgaacaatgtttaagttaacatcaagatagaaatagagaccaacggcaaatctttttggtcgtttagctacacatacagcaagcctcaagagaacaacatgttgtaacagatctagagaaaaatctaagctttctcttacagagaaacttactattctaaacccccaaaaaaaacc

SEQ ID NO: 126489 - DNA, 243 bp, Glycine max
agcaccgcggctgcagcttgtactcgcctcgcggtcagtgtggttttcctacgaaaatggcatcagagaactcttcagactgacgtgtgatctggtggcggatgcttgagggtgagaagtgtcttactgtgtggatggggacaatgatcagcttgaacatcttccgaatgagaaggctcatactctcaaccaaaagattagtgtatgcaatacaccgtcgtgtgcacgggcttcgcactctag

SEQ ID NO: 126490 - DNA, 445 bp, Glycine max
  unsure (1)..(445): unsure at all n locations
agcttgtcaaaaagggaagtattttttatctcttctcaagtaaaaacgatgtttctacttcaaaaccccttgaactacttcactttgatatatttggcccctctagaactatgacttttggcggtaactactatggcttagtttgagtggtaactacttttgatgctttattcanacttgccaaggtgattcataatgaaaaaggtctcaacattatttcacttagaatagatcatggaggcgaatttcaaaatgagtcttttgaaagcttttgtgaagaaaatggtattcaccacaatttttttccccaataacactcccacatgattggtgttgtggagaggataaatatatcccttgtagagcgtgcaagaacacttctaaatgaaacaaggttacctacgtacttatgggatgatgtttgacatactatttgatacacctt

SEQ ID NO: 126491 - DNA, 444 bp, Glycine max
  unsure (1)..(444): unsure at all n locations
agctnttacaaaagtaagtcactctctatttttattttgaagcaacaatggtagatntctcacacgaggaacttggtttaagtttctctcacttggaaggctgtaacttcacttcatgatgctctttgttgaccttttaaagatccaaatgtgaccattaaagtggagcccactcaactgacagacttctagtggaagagacatatatgacaattctcatgaaagctaataggatcattctaaggttcctatcctaagcaactnttttatgagcattttgaagttacatcacaataaagattctaatgttagctatgaaaggatccatacttgaagtagatcctcttgattaagttcaactgatatgtcattttgaagtagcacaacttcatcaatcataatacatcttcacaacacaaagtattctaaagtagattgcttcat

SEQ ID NO: 126492 - DNA, 455 bp, Glycine max
  unsure (1)..(455): unsure at all n locations
ggctgcagcttaagaaaaaaaatggcctcttctatcttcttatttccagaaagaaattcagtcaataggcctccaatctttaatggagagggttaccactactggaaaacccgaatgcaaatttttattgaggcaatagacttaaatatttgggaagccatagaaataaggccttatatacccaccacaatagatagaattacaatggatggaagcacatcaagtgaaagcataacaatagaaaaatctagagatagatggtctgaagaggataaaagacaagtacaatacaatttaaaagccaaaaatataattacatttgtcctgggaatggatgaatatttcagggtttcaaattgtaagagtgctaaggaaatgtgggacactctacaattaacacatgaaggaacaacagatgttaaaagatctangataaacacattaactcatgaata

SEQ ID NO: 126493 - DNA, 445 bp, Glycine max
  unsure (1)..(445): unsure at all n locations
agcaagctttccattgctatctacggtgtatgtttttgttctattatttnctaatttctttaataccatatgaatgtttttacttcgttatctttttttgaatgtgaaatgctgctttatactgaataggttgcagttggtcgaaggcttggtgttgaagaacctcagctcatgaaaataatgcgagccactctttatactcataatgagtggtttaaacttcaaatgtgcaaagatcgttttgaaggtcttttgaggcttgattccttgaaagaagccaacactcccttccttgcaccagtctctacatccaagtcgtatgctgatagctgcacaaatggatcttctcaggctacagtatcttcaggcaccacgatgtcagacgatggtagccagccaactcatgcatctttcagggatgtcatctgtgacgaaggtgcaatac

SEQ ID NO: 126494 - DNA, 366 bp, Glycine max
  unsure (1)..(366): unsure at all n locations
agcttcatgatgatgaatcaagttgtttcttgtttgtttgatgataacaaatatgttgacatatagcacaagagaatgatttctcgatcgagtcaacaagttcaagagtcaagagaagtttgatttcgagattcaagagaagatgaagtcacgattcatgagaagaaatcaagaagacttccaagggaagtattgaaaagatttttcaaaaacacacatagcacagttttgtttttcaaaaaagttttctcaaaattctctaagttaccatagttnttactctctggtaatcgaatatcagttgcctataatcagataccagcggcacagttgatttccaaagttttcaactgaatttgccacgtt

SEQ ID NO: 126495 - DNA, 440 bp, Glycine max
  unsure (1)..(440): unsure at all n locations
gcttctgcgagccgctctggtgctagaanatccanaaacaaatccctcttattactagctatntcgaattctntagttcctgaatgtacaaccttcaaattgttgctcgttcccctctttgttttctgcaaaaaagaaaatcaatatcaaagaaatcatggatgaagtcctaaggatgccatgtacatgtgtatttctgaagatatagtatttatattccatcaagcatacattgactgttgattacatgtaatagactttntataacatggttgccccaaatcacaattaataagcacaactaccaatctttcggagtcctttggttaatttgtcttgtctccttctgtggtggggtgttgcttaataatattatactttngccttccaaaaaaaacttatggctgatcctcttttcatnaatcctattttgtatgtta

SEQ ID NO: 126496 - DNA, 471 bp, Glycine max
tgcacaacaagtgttgtacataacgaagttcaagtgaagtgaagtgaagtcactaactaactaacactaatatatagagtgttagtaactaactaactcactaactacctaattaaactaattacacaacatagaagcccatactcgcgacctaattgttgaagtgctgaggatgtagcttccaagctcaatttgaccctcgagatggcaaaaatggccatttggagttctcacacgtttcttagctttccatggactactcacacgttccatttggagttctgtagtggtcgctaggccctgcacaaggcaaataggtcaagttagccaaaatctaaaatttagctacaagtctcaattaagctcaatcatttgccttagaccaaaactgatttaatgtgagaaaataggggcaaagagatttaattgagctaagaagaataaaaaaatataaacttcaatgctcatcga

SEQ ID NO: 126497 - DNA, 352 bp, Glycine max
actaagctttacttatgggagggcgggcttccttcaccttcttgtctcaaccgcgagctttgactaccgttcttccttcccgcgatgcttctctttatatctgcctgagtgggcttatagtctaacccatacttcccacgatttcctttggcatttatcaagccagttatgccgccgttatctttgcctaaacccattccgggttcgtaaccgttccccaacataactcgggtcatcattactgctgcatcggataggcaagcttgcccagagaaggagtccacggaggaaatgcttaccacctcaaaagactggaaagcagtttctaatgactcctttgcgggcttcacat

SEQ ID NO: 126498 - DNA, 299 bp, Glycine max
gcggtctctttcttccaacatcacaaaatgaagggaaagaattaaaccttgaataaggactccttgttatcctaaacgatttcagatatccaagttctaaatgagttgtgcacccacaaaaggaagctcaaaggccatgaaaggattatcatgggctgaaatgtgtcaacatagatagggtaatctgtttctcacatttctgagatatgtaatgacccccgaactttatgtataccttgcattattgggacaggtaaatttagaatgccatgctagatctaggagcatcagttagtgtc

SEQ ID NO: 126499 - DNA, 380 bp, Glycine max
ctgtctgattgttctagttctttacaagcttagaacaatatacttgtccttcatttaattttctttgagcttggcgaccacgatcaacaaagtactttcggcacctgctatatgttgacttgaccaacgctgttatgggtatgttgcgacaatccttcaacaccttattcacacattctgagaggttggttgtcatgtgaccatatcttcgctcagatgtatcgtaaaccatgctccatttttcttttgaaatgcgatcaatccatgttgctatggctggactcaattgacgaaatctttctaagtttgatcaaacacttgcttgcaaagagtgtacgctgcatcaagtttgttaccatcaaaagttgtatgtagatatg

SEQ ID NO: 126500 - DNA, 310 bp, Glycine max
  unsure (1)..(310): unsure at all n locations
ctgattgatgaatggaaattcgatntctctgtgcatgaatgcccccggttggtttgcaccaaccaagcggatatgaccggaagacttattgccggttcattggcttttgaaagccgcatcctccattaccttatagttcgcattttgcttcctagatcttcaaacacttcccaggtttctgaagaagatctcattgtcatgtccgcctttcataaaggtttacaaattgattggtcacatcttgttagatatcgcatgcataaggcattgccaatgaatgccccattgtcttattctcaccttgttctct

SEQ ID NO: 126501 - DNA, 471 bp, Glycine max
tgcatcttagagcataaccaccccaccccataggctgataatctaaccaactatacctcactaccttctgaaattgtttgagcattagccatccatcataaaccttataaggtttaaggccccaatcaatgcatttagagtgcatgataataggacagtggtcagagtaattcctctcaaggttaaattggtagctgtcatgccatttggacaacctgccattaaaaacacacactctgtccagtttggtgatgttcttattcacaaaattgagtggagggtagtgatagacaaacatatgacaactaatatcccttttattggtgatgtttgtattcaataatgtattgccatttgcctgttatatctggctatagaaaataaatcttgcgttattagatgacggttattctgggatggtgagacatgataaattatactaagctcttgcaataatttacttctatgctg

SEQ ID NO: 126502 - DNA, 441 bp, Glycine max
  unsure (1)..(441): unsure at all n locations
acaagcctcctgccaatggtatttaatatttcatgaggtcatttcttcatttagctntgaagagaatgtcatggatcactatatataccataaggtcagtgggagtaagaattggttccttgtattatacgtatatgatattctgcttgcgactaatgataagggtatgctatatgaggtgaaacaatttctctcatagaactctgatatgaaggatatgggagaggcatcttatgtcataggcataatgatccatatagaaagatctctacgcattttatgcttgtctcaagaaacctatatccgcaaattgttatagagatttaatatgaaagaatgttcaccaagtgtagctcccattgtgaacggtgacaaacttgctttgaataatgccccaaaatgatttgagcggaaccatgaaaatatccatatcttcagcag

SEQ ID NO: 126503 - DNA, 447 bp, Glycine max
  unsure (1)..(447): unsure at all n locations
ntgactngagtcatcaagagattataaatatgtgaccatggcatgagtttcaagaacaatcaattatcatcatcaatcatctttgaatcatctatctttcaatctttttcaacatcatctctcaagcatctttcaatcaatctttcaatatctttctacagaattttctgattcatttctcttcatctttctaagagttttttatcaacactttctcttccaagaaaagttttttgttcaaaaacttgtgttattcatctttttcattctcttctccctttgccaaaagaacgaaggactaaccgcctgaattcttttgtgtctctcttctcccttacaaaagattcanaggactaaccgcctgagaattcttttgattcttcctttccccttaagcaaaagatttaaaggactaaccgcatgagatatcttttngttcccctcaca

SEQ ID NO: 126504 - DNA, 427 bp, Glycine max
  unsure (1)..(427): unsure at all n locations
ctcagcttcaaccaggcaattcanaatctaggtatctaanacccctcaatctgtgtggatttcaaggtttgagaagtgaaaatgagaatggggtaattttggagtaaactctcatctcaaacaagtctataacattaatttaaacttgctcaaactggttttacggcgaaaactccaccgattcaaaatttgacctctcaacacccaatttaccctataaatggctcttgctttcacctttgtcactcattttttctcatttgctctgtccaagcttacctacaagtcctaattgacattataaactagaatcaactcactttagactccaatttacactaactccaagtttaacttctctataccctcaaatctcacacttttctacctacaacattgtcattctcacatttaaccctcaagtaac

SEQ ID NO: 126505 - DNA, 406 bp, Glycine max
  unsure (1)..(406): unsure at all n locations
tctntntccgtcattaattctcctcctctgattcctaatatgtttcatgcgttttatctttatattactcctctccctatctagataaagcaatgttaactataaaaactntggcaacttttagtaatatgagttgctttgctaactaccagggaagaactagagaaaatgtttgaaggtatgccagcagtattcactggaatgttangaggagataaactgtcccaagcatatgccagtggagatgtatttgtcatgccttcagagtcagagacgcttggttttgtagttttggaggcgatgtcttcanggatacctgtggtggcggcacgtgctggaggtattcctgatataatccctgcagatcaagatggtaaaactagctatctgtatgatccacgagatc

SEQ ID NO: 126506 - DNA, 374 bp, Glycine max
  unsure (1)..(374): unsure at all n locations
ctccggaatatggaaccattctggaggacagaggatcagtggaggacttcaaccagttggtgggagttctcagccaattaacagggtgtctcagtctgtggatagaggtagtggtggtagtggtgctcctgctattgttactacaccactcangtgtgggaagtgtggttggcttgggcatattgctagtgagtgcacaaatagagaggtgacttgctttaactgccaaggtaagggccacctcagtaccagttgcccatatccgaggagggagaagaggagtggaagtctgaataatctgagtggacgaccaaggaccacagggagagtngttgctcttagtggtgctaatgccgcacagtctgatgaactca

SEQ ID NO: 126507 - DNA, 424 bp, Glycine max
tgcttatcgcgtgttgttagacattattctattagagaagtagtgcttgttagttagtgctagctgtaatggtaattatgcctttgtgtaataggctgtagtgctttctgttagcaattttgatgagtaaattgttctagaatctcctgtataagcatatatagacagcttttttatgaaataaagcacgataaattaacacaatcaccttttatctcaatttctggaggccacttaatcctggaatcctaagtctgtttcccatgtacccaccagtcattctctggttcctctaattggataagcatatattttattattgtgtgggggtggtctgacaaatatgttcttcttaccagactattgtgttagactcttatctaatatgctaatttggcccttttatataaaaaaatattgtccc

SEQ ID NO: 126508 - DNA, 393 bp, Glycine max
  unsure (1)..(393): unsure at all n locations
ntganagtggagctcgaaaaatgagagtggtcacgaggcgctaaatatggtagtcactatggtctggaaaaagtgtgatgtgctgagagatgtcaacatgactatggtcgaagccttatagcggaaaaaccaaaatggctcgaaaggaagaatggagcacgaacaagctctgaggggctttatggggcagcagcaacgagctcaagcttataagggccgagaaggacgagtcaaggttggaaagcatggtgttagaagataagttgaaggcttgtcaaagggtgaaaagaattttaacagagcaactaagccaaatggaagagaatatgttgacaattattgatcaatataacgaaaaggtgaacctaactggtaatcattggcaaagctgga

SEQ ID NO: 126509 - DNA, 243 bp, Glycine max
  unsure (1)..(243): unsure at all n locations
ntcagcatattcaaacgacaataactctttactctgatgtctgattaagtcccgtaatacatcgagacgctcgatattgaatgttgaagctctcagcaaattcaaacgacgataactttttactctgatgtctgattgagccccgtaatatatcgagacgctcgaaattgaatgttgaagctctcagtatattcaaacgacaataactttttactcggatgtctgattaaggtcccgtataca

SEQ ID NO: 126510 - DNA, 265 bp, Glycine max
  unsure (1)..(265): unsure at all n locations
ntcagcanattcaaaccacaataactncntactcggatgtctgattaagtcccggaatacatcgagacgctcgaaattgaatgttgaagctctcagcaaattcaaacgacanataacttttactctgatgtctgaatgagtcccgtaatatatcgagacgctcgaaattgaatgttgaagctctcagcatattcaaacgacaataactttttactcggatgtctgaataagtccccgaatacatcgtgacgctcgaaaatgaatg

SEQ ID NO: 126511 - DNA, 334 bp, Glycine max
  unsure (1)..(334): unsure at all n locations
ggcaaactgattatgatgtataagagtgagtgtcttggttagtagcaaaaaaatatgcatcttcttgaaagatgacatttctagaaacctaaatcctatgtaaatgaggatcatagcatataaaaccttttttatgggctgagtaaccaagaaaaacacatttaacaaattgagctatgagnttggtgcattctagttgctaaaggtgaacaaaacaaacacaaccaaaggtgcaaagagtggaataattgggtggcttaccgaatcgccttaagaaaggggaatcattgtttaaggctagagaacgaagtccattaatgaggtggacaacaat

SEQ ID NO: 126512 - DNA, 288 bp, Glycine max
ctaatttaacatcctctgatacttttctacaagaaataacatctcttataatgtggagttgatgtcttttggctctagtaattcctcttatagatgtttatgacaaaattacaggacactctcttgtattggatccttagtcttcactccaaaactaacctatattgagctgacatcagtaaattcctggtggtctttttgtgaataatcatggagcgtttctgaaacctaaggaaaatacttaatgacagaaacataaaatggaaaataaaaactgtcaaacaactt

SEQ ID NO: 126513 - DNA, 442 bp, Glycine max
  unsure (1)..(442): unsure at all n locations
cgtacgtcatgttattntaggtggggcatcgactttaatntgatttggtactcttaatttagttttaagatcgcaaagtcttgactcctttcagtcaacttttagggttatctccccccaaaagagttataatcacaaaagtgtgatgcgattaactcttgaacgatatcgataaaacggataatcagtggaaggaattggttgatactaagtttatgactactctttacatctttttgtcacgcttgattttattaaatatatcatgttacgtttctttattaattcatccagcttgcattcacataagaaaaagcaattaggttttatttcacttttcatttttggtactcccttcctaaccatttatttaacaatgatacacatttttttatgaattgacattttaaatgagaatctactaagagataatatcgtaatg

SEQ ID NO: 126514 - DNA, 428 bp, Glycine max
  unsure (1)..(428): unsure at all n locations
gtcctattaacaacttccgtttgcccatcggtttgtgggtgacaagtggttgaaaataaccaattagtgcccaacttgctccacaaagtcctccaaaaatgcaaatcatcaagcctaggtataggatgcctatatttaatggtgatgttattaagggctctacaatcagaacacatgtgccatgtcccatcctttntagggaccaaaatcactgggagagcacaaggactcatactatctcttacccaacctttgctaatgagttcatccacttgtctntgaatctctttggtttcttgtgcattacttctataggctggcctattgggcaaagaagcttccggaatgagattcaattgatgctcaattcccctcaaaggtggtagtccacttggcacatttggtggaaacatgtcatgaaaatcctg

SEQ ID NO: 126515 - DNA, 478 bp, Glycine max
  unsure (1)..(478): unsure at all n locations
ngaagagcatcagttgtgtggatccaagcagtgccccggttgcggacacaagtttgaagggaagccggtacggaaaaaatatctcaataatattctttccttcactcanaagcctttgacaatatgaacaagaatcatgtcatacacaaaaaaaaaaagtatagggagttttgttattggactctagcttgtgtaattcatttgatggggtttaatttccctttttaattttatgctattgctattgctaaagtttgagcataattctttgttaattaaaggcatctgcttcaccctccttgatatctttttccattgtattattcttcttgttcctcttatctctctgactttagctataatnttggtttttcacttgaatttcaatggagactgcatgactgggtaggcttgcccgcatgagtgaaatttgatcccacagaccaagaactaacagaacatcttgaagcctaagtgg

SEQ ID NO: 126516 - DNA, 330 bp, Glycine max
agctctgataccacttgttagacaagtggcctcagatatcttaagaagggggggggggtgaattaagatattccaaattacttccccaattaaaaatctatttcactgtctattcaagatatgaattcccttatcaatgaacttcttaaatattaattcaaataagaacaattggcatatgaatattgagccataataaacaaaggagtttaagggaagacaaagtgcagggtcacatttattctggttcggacacacccttgtgcctacgtgcagtccccaagcaaggtcgatgagagattcactatcttgtaaattgcttttacaagt

SEQ ID NO: 126517 - DNA, 358 bp, Glycine max
tatctgataatggtagctatcggtgagtggattttttaataatttcacacaatatattggtggtcttacattccactagcagttgaatatattgtggtaagtcaacttatcaagatagtgtgagcgtggaagcgacgctcatctgatggataccccaaaagataatttgggagatagtgctcagccatgaatcatgggaacatgtgcaattctggactgaatggaaggcagtgtttaagcaaaatgaattgatatggacccttaacccatccaaaaaattaaaggtctgtgcttcaagaggcataacctactgactctattggactttcttcctgatataataatgtctaaatttcgg

SEQ ID NO: 126518 - DNA, 369 bp, Glycine max
  unsure (1)..(369): unsure at all n locations
actgagtatgtgaaccctatatttagaagatggaaagtagagcaatggaatagccaaatacaatgtatagaatgagtgagtgaccatgcgaaacgttgtctttagaagaatgaaaatagaacatctgaaaaatcggatatggtgcgtttagcagtgcccctttagccccttttttaatcattcaagcttttcaaacttttcaatttctttgataagaatggtaaaaacaatggtaaaagaaaattgaatggtgcaattcatatcaatgatatgaatagttgggtagtcatatcacatccgaatggtgttattcgaaatgtgaatagtaagattctaataataattatagntcaaaacataatcttgaat

SEQ ID NO: 126519 - DNA, 466 bp, Glycine max
  unsure (1)..(466): unsure at all n locations
ggcatgatttacattctccctctttctcaagcaaattcttcttgacatcatcaaaatcttcatgatttagattctccccctttttgatgatgacaaccacctataggttaggagctacaacaaaaaaaatatctatttgcatatagtttactcccccttggttntgcaatgtttgcttatatgagacagctgaagatttcatatttttcatatataaaaagatgtctcataaagaatagataatttttcttactattttatcttttatctttctctccccctgtgtcaacatcaaaaacaaattatgaatagagaggagaaaagtttttaccacttgttgcaatgtatgagaatcaagtgataccaatagacatttaaagaatcattcaatattaatcaaagcaaaacaagtacagtaacacattaatcaaaaaaacaatcaatcaaatatacaatcacaagcgat

SEQ ID NO: 126520 - DNA, 366 bp, Glycine max
  unsure (1)..(366): unsure at all n locations
caccaactcattcatatgttgatatgaatcaactaatattcagtgagcgatgtccatatgcttatgatgatgcaagtgctgttgacacggaattccccttntttctttctttttatccatctaaactaatgtacattttaatgcctctgattgtaaatttgcagatttgaatgtgtgagctactactgatatgtccatccctgccaggtctattatagccttattaatttgttgaaacgcgcataaagcaaacagtgattttatatcatttgtgccaattattcaatgacaaaagatgtccatataataattgagactcttgctaattctctttttcaatcatacaagttagtgatcgtgtatttc

SEQ ID NO: 126521 - DNA, 363 bp, Glycine max
tctaaatacaataatgtcagaatgcacagctacagaaacatatggaacttcgttaagttcaactagacaaggcattttatatattaagaactaactagtcaaattgttccaaaaatgaagtggatgtagaaaagaatgcataatacttaagttctggagctataccttccaagtaaatgagtgccaggaaaattggacaaagacaaaaccagttgagggatagaagggaacaagtggcccaacttatgtcattaaggtctattaggcaagaacttctacaatagattgttggaaataagttaatctaacccgtgaatatataaaaggaactaaaatcttatttcgctaaaaaaatggtattaa

SEQ ID NO: 126522 - DNA, 436 bp, Glycine max
actcagcttgatgacttacacttcatgtatgctatcctattgtaatgcctcagcacatgcaagaaaaaatatctttgccctctcccctcataaataaaataagattgtacgagttacaattagacatcatcaactgtgaaagtctttctagacataacacaaagagatagtgtaatggatgatctctccaagaattattttccctaaccatatgagagaacgcaaacatccaatttatgaatacaacaccagagaagttgtgcgacttccatatatgagagaatactcaattaaaaagtgactatcacaatatataaacaatgtccaatacaggtgataattgctggtttctttaaacttgctgacaggtatttaattttctgtgcgtatgaagatatagaactcactttaataatttctctgttattatttcgac

SEQ ID NO: 126523 - DNA, 378 bp, Glycine max
  unsure (1)..(378): unsure at all n locations
cttttaattgggatattactttctttttaatttttctagccaatagtataagtatgcctcanaactaagataaaatttcatattggatggtaaactttaataaggatttcttataaatatgatatcttcccctaaaaaggatatggggatatgcatggattaatattattaattagggtggggtttttattccaacactttcctatgtgtagttcaagccaaacacgtatattctcaattagagtaaatctatattttttaccgaaatactaaatgtctaaatacacgaatggtttatggcttgggtggggccacacgggaagaaagcttcttgtttattagtatagactggataaataaggcgaaatttacttttaa

SEQ ID NO: 126524 - DNA, 468 bp, Glycine max
ctctacaattgcatcacctctcaatgagctggtgaagaagaatgtggcatttacctgtggtgaaaaacaagagcaagcctttgctttgctcaaagaaaagcttactaaggcacctgttctagctcttcctgacttttctaaaacttctgagctagaatgtgatgcctctggagtgggagttggagctgtattgttacaaggtgggcaccctattgcttattttagtgaaaaacttcatagtgccaccctcaactaccccacctatgataaagagctttatgccttaataagagccctccaaacttgggaacattaccttgtttccaagggaattgtcattcatagtgatcatcaatcacttaagtacattaaaggacaaagcaagttaaacaagaggcatgcaaaatgggtagagtacctagagcaatttccatatgttatcaaatacaaaaagggaaaaacatatgt

SEQ ID NO: 126525 - DNA, 441 bp, Glycine max
cgaccttaaaactcagctaagctcttcactgccaaggctcttaatatttgaagagctatcattgggaaccttcacccgacgaagacactaacaaatacttttcttctccttcttggacaaagtatggcaggctgggggtaagtaaatattcttcccatcagaccttggatacaactgtgatcatatacccatatcaactagatcttgacgggtattcaagtcatccttcgtcttgccttgaatgttaaggagcgtctcaatcacactgtcacaaacattttttcttcttttagttatattgtgtttaaggaaattagatgggttgctgaatttgttgtattaccaaactgtcagaccctttaattgttataagatgaagtggattaagtgggctgctattagaaagcttaatttaaagtataaagtggatcttgtatgcct

SEQ ID NO: 126526 - DNA, 301 bp, Glycine max
  unsure (1)..(301): unsure at all n locations
tttgtatcatcttacatcacaccgagtatcaatcctgcatgtcagtcttgctacagatgctacaggagcaaggacacctgacctttaacagccagactccccaataaatatgttatctntaacctactaatatntaaatgtatttaaatatcttatctattgacaaataattaataatctataacgtcacattttatccacacggtacgattatcttctacttttaatctataaacgaatatttatctctaacattatctataagttcttggttattatctattaagccgaaattatttac

SEQ ID NO: 126527 - DNA, 421 bp, Glycine max
  unsure (1)..(421): unsure at all n locations
ctcagcttcctcgggccatntcctgcgaaggcaaacatttggaaagttagttntaccagtgggacactactcttaaaacaaaaatggcatacaacctcctcccataaatacaaacatcaatgtaaatttagagcaagcttatgcgcatatntccttacgaacgttcacttgcacaagacattctatttaactaagaaaagtgcacccatatacagtcaaggcagcttcgttacctagattatttacatgtacttccaaggtgtatttgttacttacatcatacacacctccttggctgaagttacatacatgcatactcaaagcattntggggtaccaaanattgtacatgtgcacatcttggtatttctaatacctatacatacacaaacttcatgatgaatcctgactacctacacaat

SEQ ID NO: 126528 - DNA, 473 bp, Glycine max
  unsure (1)..(473): unsure at all n locations
ngaagcctgaatctngattcttgattcttgaaatcatgtttcctcttgaaccttgaaatgctcttgattcaatcttgaacatcttgatctcattctttgatttcttgagatcatcatctttgttatcatgaagtgttcttgacctttgagctttntgtcatcacctttgttatcatcaaaacttctttgaatcaatcttgattcatcatgaagcttgcttctacatatatatgttntaatttgatcatttttttgttatcaaatagttggtggtcaagaggaacaagtggcacggattggtgctgtgggtcttttttgtctatatatcatgaatcaatgacaaaggaagcatctcaaatgagaaaataaattattgaaatctatactttctaggaattcggatttctctaataattctaaaaatctgcactttcatattagttttaaatttcctcattttttgggtttggggg

SEQ ID NO: 126529 - DNA, 379 bp, Glycine max
  unsure (1)..(379): unsure at all n locations
gtctangcaccttgaaatggtcttgatggatggaagggtatgatgtgatttaactttttctttgtttcctaatgtgataaagtttatgctgtatttttcttgttatgctaaagggatagaatccagcccattgttaagaaagaggatttggaaagttaagaagctgaacttaaggaagggaaaacatattatatgtataacgttagggttgctgtgaatgatggctagtataaagtntgtgcacatccattcaagctttatttcactaatggtacaactttgaggcaagtggatttttttgaaatatctctttaatcatatgaggttaagagttttgaagacatcgctaatggcaattatgatcctactatgctgattg

SEQ ID NO: 126530 - DNA, 79 bp, Glycine max
cgtccaccaatcccttatggcgatacatcatggcgcgttacacgctgactggaaacctgcgtacccactaatcgcttga

SEQ ID NO: 126531 - DNA, 370 bp, Glycine max
  unsure (1)..(370): unsure at all n locations
tcccatattttatgagtnttgaaaaatattcctgactaatggttattcttaagaaaataattatatcacgaattaagtcattcttattctcatgatgagagggtgaaaagctatatatattttcatgaaaatgtggaaagttatgtcctaactcaattataactctcatatttcactcttattttctttatttcaattattctaaaaatattcttggaaattgtaaaatctaactaaacgcatttttaaatgttctgaggaataacatntctggttataatcattttgggatgtgattcttgagaatacaagatcacttcataaaataaacgcatcctaagtaaatgacacgtagaaactttagaatttt

SEQ ID NO: 126532 - DNA, 373 bp, Glycine max
  unsure (1)..(373): unsure at all n locations
taaaatgttattttagtatcatatttatgacagaacatacatgctatggaattaatagaatggtggaaagccaccttaattgcatcacccctagccttgcttaattgtgattggtagagttggttgtcaatgtggggatatctattaactagagaaaggctaagtcaagcattgtgtaatgtgcatccattcaaacgtcaactcttgggagttatgatcccacatgaaccaaatataaggcctaaatagtgcttatacaacttgngcagccctcaccttataagctnatgtgtgaccacaaaggctaagtgaagcataatagtgtacaaccattaggaggtcagctcttaatgcgttgaaagggtacatcaac

SEQ ID NO: 126533 - DNA, 387 bp, Glycine max
  unsure (1)..(387): unsure at all n locations
ttgaggaagaaaagggagagaagttgaactttgaattgtgtctcacaagactctcattcatcaaattacaacaagtgttacatatgcttctatttatagacaaggtagcttgcttgagaagctctcttgagaaaatttccttgagaagcttctntgggaaaacttccttgagaagctagagcttagctacatacaccctcttataactaagctcacctccttgagaaacttgcttaagaagattcctaaagaagttatatcttatctacacacaccctctctaatagctaagtgcaccttcctgagatgaaaagctagagcttagctatacaccccctataatagctaagctcaccctatgccaaaaacatgaaaaggaaaaaaaat

SEQ ID NO: 126534 - DNA, 465 bp, Glycine max
  unsure (1)..(465): unsure at all n locations
tctattntagacctcgatcggtcatgtttgctggccgatgtcgactgtcatttttttcgatcaatatcggtgaataatattnttttctccgtgaagggctaattgtttgctggccgaataaatgggaacatgccagtttcggcccgaacaaaaggacggttgagatcgcacaaaaaaacctagccgacctacattgtaaatttcttatgccccaccaaaataagaaaactttctctgccgtaaaaaaacaattatctgccagcgagacttttttaaaaaaattgctcaatgtcagctgaaaaatatcagtcggggctatttcacgaccgatgtcggctattgagttttaaatttatccgtgaccgaaatttgcatgatgttggttatgaaaagctcgatcagcatcatcttgtgaagctgtctttatagacctcgatctgtaatgtttcctggccaatttcgact

SEQ ID NO: 126535 - DNA, 460 bp, Glycine max
tctctctgggttccttatcaagctaattctggacttataacggtgaatccctgtggcatctacccctgacttatcttccatctctgaaagtggcatcattcgatttcgtgacctgtaccaagtgatccgtccctaataaaaatcacatcactgacataggcctctccttgtgagtttgaacagccaataaacactcttcatcaaacttaaacacttcacccttgttcagcaggttgcttaatggcttgacaattttggagaattcttttatgaaccttcgataaaagttggcatgcccgagaaaacttcggatgcctttcacattcacaggtggaggcaacttctcaataacatcaatttttgccttggtcacttcaatcacttgggatgagatatatggggctaaggcaatccctttttaaacattgaaggaatttctcttagttaacacccaaatggt

SEQ ID NO: 126536 - DNA, 310 bp, Glycine max
tcagcctgatctctaagcgacagtttatccttggctaagcgtgacctattgtcgccaagctaaattccttgcagctagaactggggttcatgaagctaagtgccagtcttggcggctaagctgaattccttgcaacaatgtgagcgctaagcgagtctttatcagctaagcgcatgctcctctgtacttaagatgcattatttaagctaagctggccagagcctggcttagcgagagttgtagcttttctgatctgcaaccaagctaagcggacttactcgcatgctaagccaagcctatgtgttaaaat

SEQ ID NO: 126537 - DNA, 403 bp, Glycine max
  unsure (1)..(403): unsure at all n locations
ctgatccctgagcgagaagacacgctagtctattttgcacgttanactagttgtcccaaaccttcaacttttctttacgtttttgtatcaattntcctccaaaacacttattcttcttttgaatcttattggtcaaaaattaacataatattaaatttctcattatttcattaaaaacaaacattataataaacacattataattaattntagtcaaaattgactatcaattaaacctaaatntttctgttatcacttgtatttttggtttattttgtttatttgatacttctataaccttgatgtgggttgaacattccctanaagatataatngccaggaaggaaagaatatgtgaaaaataaaatggatggaaataagggaggatcgagtagtttgtcat

SEQ ID NO: 126538 - DNA, 292 bp, Glycine max
cacagtgacgactgattgtatctgatataacctaacatgtgatggctctggtcatcacggtcgctgatcctgatgtggcgctgctatgcctgaataggcttaaatacatttatgacagagcatctatggatgctggtatgaccatgggacgtgaagacattacttctgttgctgagacgagaccgactctctagaccatctcgactggagactccatcttgactgcatatcccctgataaaacatgcaagccgtccgatattggtgctgaacttatcatctcactcatgcat

SEQ ID NO: 126539 - DNA, 426 bp, Glycine max
cattattctattagagaagtagtgctcgttagttattgcttgctgtagaggtaattatgcctttgtgtaatacgctgtagtgctttctgttagcaatattgctgagtaaattgttctagaatctcctgtataagcatatatagacagcttttttatgaaataaagcaagataaattaacacaatcaccttttatctcaatttctggaggccacttaatcctggaatcctaagtctgtttcccatgtacccaccagtcattctctggttcctctaattggataagcatatattttattcttgtgtgggggtgttttgaccaatatgttcttcttaccagaatattgtgttagactcttatctaatatgctagttgggccttattatataaaaaatattgctcatataacaataaagatattcgacta

SEQ ID NO: 126540 - DNA, 314 bp, Glycine max
ggactaggcgagttgatttagcctcagtttcactctagttattaatcaattcggtttaagaatgaaaaatcccaaagagaaaacgtccgattgactttccgctttattttactataaggcatatttttttattattatattatttttctacctctttttcgatttccaacgtggttacggcacgaccaaacggtcggaatttatttaaccgaagttacggatatacaattcaacgtcggggaattatttattttagtaagcgaaaagctagtaaaggctagccgcaaggggttaaagtagaaacaaataaatcc

SEQ ID NO: 126541 - DNA, 153 bp, Glycine max
gtatctcaagccatctcagagttaagaaagatcaccaaccgatttcgaaggccctcgtgtcacgcgcttaagactccgggagtgccctccttatgcgacctggagcgagaatgagcaccaaaagctcgcgccttgttggtcaacactggtgga

SEQ ID NO: 126542 - DNA, 141 bp, Glycine max
  unsure (1)..(141): unsure at all n locations
tgcttattgctccgctctccgttctcgctcctcttcttcttcttcgttcgtgttagttggtggtgtctcgcgagtattgaaatcttggaagacgcanagagagatgtggtgcgcgagcgcgagagagagagaacacacaca

SEQ ID NO: 126543 - DNA, 476 bp, Glycine max
  unsure (1)..(476): unsure at all n locations
gctcctgttatctcctacactntntgtggtgagccattcttggatggccttgagtntctcatggtccacttggaccccatttctaccaactacaaatcttaagaaaactatattatctacacaaaaggtacacttctttatattgtgatagagagtgtttttcctataaactgaaagaacttgtcttagatgtcctaaatgatcatctaggatcctactatacactaaaatatcatcaaaataaacaactacaaatatacctatgaaatcccttaagataagatgcataagcctcataaaggggctcggtgtattagtgagcccgaaaggcatcactatccaatcatacaaaccaaacttggtcttgaaagcactatttttcactcaacaccctctttcatcctgaattggtgataaccacttttaagacaaattttgaaaacatgtgtgcaccatgaaacttattcaagcaatca

SEQ ID NO: 126544 - DNA, 287 bp, Glycine max
cgtgatatcttttgatgtcaccctgatgcaatgaagttagtcaacgtatgtaatattgtgcttttgattgacaacacctacaaaacataccggtacagactcccactgctcgattttattggggtgacaccgactgggatgacattctctgccacgtttgtatatgtggaggatgaacgcgttaataatttaatcggagctttacaacgcttctgaggcctttttttaaagcgtgatgccctccctggaggtattgtcaataacagagaccaacctttgatgaatgc

SEQ ID NO: 126545 - DNA, 310 bp, Glycine max
  unsure (1)..(310): unsure at all n locations
ctcatcgaccttaacactattagaatgccaaattacaaagcaatattgtgagaaaatacanaatacagtaaggtaaagttgattaacctgattaaatatgtcacatttcattccaaggttggattgtttttcaaaaaaatcacaaaaccatataattgacacaaaatcttgaaattgggtttgggacagttttcccttttttataagttcaaactttgggcaattgaatactatatctnctatttttttttataaaaagtttcaacctatcncctttatcttccttctctttttacttctcccttttttt

SEQ ID NO: 126546 - DNA, 408 bp, Glycine max
  unsure (1)..(408): unsure at all n locations
taacatgccagtggatactgactgggcacatatgatgagtacattgaaccaaaggtgaaaagttattcttcccagaaccagcaacaactgatgccaaatgtggtgtatctggactgtgtaaccacacagaaaggaaatatatgagtgcacaacttagtagctaaaaggaattcacagtacactgagtggtggaaacctactctacacaagtccctgactgagatgagttactttggcagccacatgcacatgttatgcagggaacaagggatcattatgaaagatanagtggacacacatagggagtnttgagccaaaatggagatgtcatgtaattcatgtatgcataacagaggatgtatggattagaatgcaaattctatgtatatacactganactcatgttaa

SEQ ID NO: 126547 - DNA, 378 bp, Glycine max
  unsure (1)..(378): unsure at all n locations
actcagctatgatgccacatntataatagacccgctcagcagcataaccaacaacagcagaataattaggacctttcaagcgatatatacaatccaagttggaggaatcatccaaatctgagatgggcaagtcctccacaacaacaacagtctatccctcctttccagaatgctgttgatccaagcaggccatatgttcctcctccaatgcagctgcagtagcaacaacatctacgaagacaacaaaaaactgaggtccctcctcaaccttccttataagagttagtgaggcaaatgaccatccagaatatgcaatttcagcaagagacaagagcctgcatttagaggctgacaaatcaaatggggcagatggctact

SEQ ID NO: 126548 - DNA, 312 bp, Glycine max
  unsure (1)..(312): unsure at all n locations
tgtcttacaaataatcatcacacagcagaaccctagcaagattacccatcatatctcccaaaaccccatacccacgaaatttaagagagaaagaagtccacccaaacctgaattttcgaagtcccactcgtagccacgcacttcacgactccgggaatgccctccttttgcgatttggagcggaaatgagcaccaaaggttggagctttgttgggcaacaatggtggatgggagaaaagaagaataaggctgcgtgagatagagggagagctgtctgaaatnttgtggcgctgattgaatagagagagagag

SEQ ID NO: 126549 - DNA, 369 bp, Glycine max
tctcagctaagctccttcactgcacaaggctcttaatatttgaagagtatccttgtgaaaccatcacttgacgaagacactgacaaaaacttatcttctccttcttggacaaagtatggcaggctgggggcaagtaaattttcttcccatcagaccttggatgcaactgtgatcttatacccatatcagctagatcttgacgggtattcaagccatccttcgtcttgccttgaatgttaaagagcgtcccaatcacactgtcacaaacatttttctccacatgcataacatcaatacaatgtctaacgtcaagatcacaccagtacggaagatcaaagaaaatggacctcttcttccatatgcaactct

SEQ ID NO: 126550 - DNA, 411 bp, Glycine max
gtatcacttattctgaacatgctaaaccttatactttcaaccaaggttttaaataacagtgtacgaccatgaatttgaccacaatgtcaagggttttgcagtctccgcattcacaattgcggctgcatcaactgcatttgtccataactttctgcaatatcaacgactgagacacagtcacaattaccaaccgcagatttaaaaatctttgttttcaataggctggcaatagaagagtgcaaatcattcacaaaatcttagtcaacattgatgaaaatatttatgcaaatatcaacggtccctgtaaccttatagtcagtacttgtgagttgtgacgatgatgataagagaaacttacagacaagcccagtgttgtcaatgttgtatctgttacatatctcaaaatcactg

SEQ ID NO: 126551 - DNA, 332 bp, Glycine max
  unsure (1)..(332): unsure at all n locations
accaaactcatgcttttacaaaaaggttcatcaagtcaagttgaaatatggaagtaaccgtcctgcgaaattggggcaaaagatgaattgagtcacatcactgcttcgtctactgccaaacatatttaggattattgatgtccttattaacttccatttcaccttgacaaagatgtcatggaccatgttgaaaatctaaattgattcaaccccatatcctgcttaaaaattcacaatacttcgactgtacatcattcgcatgcatccatgctnttcatggttgcattgctcaatgattctttcttgtaggataaataaatataataaatgac

SEQ ID NO: 126552 - DNA, 305 bp, Glycine max
gcgtcgcgagatattgtgcgcctgaagtcgacatccgagtgaaaaggtattaccatttcaatctgttgagagcttctggtgtttaatatctggggactctatatgtgatgtacctgaagcggacctccgagtgaaaaggtattaccatttgaaatggttgagagcttccggtgcttaatatctagcgacgctagatatgaagcgcctgaatccctcctccgagtgcaatggtctgaccatatgaatttgtagagagcttccgtggctcaattttgagcgacttcatatattatgcgcctgaatct

SEQ ID NO: 126553 - DNA, 430 bp, Glycine max
  unsure (1)..(430): unsure at all n locations
aaattagagggtaaattttcatttaagcctaattaatattccttagttatattatattttgagagattcttatgtggcgctaatggtcaaggttcagaacaaatttaaaaaaacgtacatttcagaactatatattttgtgtctggaaggacgactcaacaagttgtcttactttttgtcttttcatcttcaaatatattaaaatctagagtctcatgtttaagcaattcagattccttccactctgacaatttatgtttgtctctttaaattaatttggggtacatatagaaatgaattgtgaggttgatagatgggccaaaaaacccaagtatgaatgaatggatgagtgtacctctgggtctttggacttaaagtcaacgggggtggccaagtggaaaacacctgtgcacnctttaatggcttcatc

SEQ ID NO: 126554 - DNA, 414 bp, Glycine max
  unsure (1)..(414): unsure at all n locations
atgcctaactctcttgagtgatacttgtattggttgttatcttggttggtgcatcttagtacatttgatatttgtattacattatgcatcatcatggttagtgtgaagaaaagtttcaaagttagaaattttttttcaaaggcaaaaattctctgctttaatcaattacagggtcatcgtaatcaattacaacaagctatttggagcttgtagagttgagtctcgatcagtttaattgattacaactatctcataatcgattacactgttgtttgggacaatgactgatntattcaggagtctttactttaatcgattaccaagtggattaatcaattacttctttctcgtttagttggttagaagtgaacaaaaacactttaatcgattacttagagcatctaatcgattatg

SEQ ID NO: 126555 - DNA, 473 bp, Glycine max
  unsure (1)..(473): unsure at all n locations
tatgctgcaacanataagggttcagtatgtttctatagaaatgattgacatatagataagacagaaacatcanatnttccaatcataggaacctttgaactagaatggaataaacaagtgaataaggacgtagccaagtttttgagtgcggatccaataacatgattctgcatgagattatggttgtgtttcccccctagtattgcccttgggatggacaagtntttttgggcccttatgagtgatgggagattctatacaaagtctacttatgatcttttagctggtcctaatgtccagagtgacccctctttgaggaattgtctgtggaaaatccctggtagacctacaactaagggattgcctaagaataagtattgccatattcgaggaatggctgagcataatgattggccctcgtgtgaccttgagcctgattttgagtnacatcttagggccaatgggtttaatat

SEQ ID NO: 126556 - DNA, 373 bp, Glycine max
  unsure (1)..(373): unsure at all n locations
taagtgcgtacaanattatggcgtgcatataaaattaccaagtgggtacaaaattaccacacgtacaaaattcatcatggctatgattctttaacttttgcctgttttgaatcctttttccttaaaacacttcatgatcacccgtctaacctaactaatagtaaactatgagttcagtcaacaaaatatattataaaatgcatgtaataggcctagacctacacataaaaaaggttatcaaaatctagcttatcaaatttgtttttgtctccagtcatatgcctagagcatccattgttcaagaattgcatctttntcctcttgttgtggtacaaacattccttttccttgtcataatatgccatgagacata

SEQ ID NO: 126557 - DNA, 403 bp, Glycine max
  unsure (1)..(403): unsure at all n locations
ngctaacccatggaagctcctaatatctcccacactctttgtggtgggccattctttgatgacctacactttcttagggtcaacttggaccccatttctaccaactacaaaccccatttctacacagaaggtacacttctctatattgtcatagagggtgtctttcctaaggactaaaagaacttgcctgagatgtcctaagtgaacatttatgctcttattgtacactaaaatattatcaaaataaacaactacaaatctacctatgaaatcccttataagatgatacataagcctcacaaagatgcttggtgcattagtgagctcanaaggcatcactagccattcatacaaaccaaacttgatcttgaagaaagttccactcatcaccctctttcatact

SEQ ID NO: 126558 - DNA, 262 bp, Glycine max
acttaaaactaagcttatcaaacttgatattctcaagaacacctgtgatgataataacaatggcttatgtggaagcctaagagcatctatacaacaacgatgtgaatgaaggtccactctcatgaagtgctatatataacatgttgaggggagcacattaataaatggccctaatgtgcttgcatggtcaaggatgacaggcaagcacacttattgtcaatgatccatgctcaaatccttcggagaaaaacgataaagcaca

SEQ ID NO: 126559 - DNA, 345 bp, Glycine max
actttgcgacactctgggctacaatatccaaaacaaatccctcttattactagctatattgaattctttagttcctgaatgtacaactctcatattgttggtcgttcccctctttgttttatgcacaaaatgaaatcaatatcaaacaaaacatgcatacaattgtcatcgttattgctacttgaaccataaggaataacatctaaagaaggactctacaacgttatttatttttttggtatttttgaattacaaatttacttaatatctaattttaatgactacgtggagatgtgacaaaaagagaagataaattttaacaaatatgagtgacatttttctaca

SEQ ID NO: 126560 - DNA, 379 bp, Glycine max
  unsure (1)..(379): unsure at all n locations
actacctaagttattaaaaatatatgtcaacgaaaataaaataaagatcataacttgtgatctttnttcctgatattgcaaaatatccagattaatctgaatcatgcgggtcctaagtaagagaacacataacaagggattgagttaatttagcattaaatacttatttattcaattatatttttaaaaatttctttgagttaatcattttaaaacacaaggaataaagttataaataaaaacacatacatataaaaattgttcaaataagaaataattgcttctataggtgaaacaatcttttttatatagaagaaatcaataattttcaatacaatctataacatatttcttattatatctttaaaaaaataattac

SEQ ID NO: 126561 - DNA, 127 bp, Glycine max
aaagaatagggtttaggaaaaagagggaagaatagagggggaaaaagaacgaggaaaaaagggaggggagagagagaaggaagggaggaagaaggggaaaaaaaggaaaaagggggggaagaaggga

SEQ ID NO: 126562 - DNA, 266 bp, Glycine max
  unsure (1)..(266): unsure at all n locations
atctatacgatntcaggtcaaaagaggctaaagtcttgaagagctaaaaggagcagtcgcgctaaatggaacctgtgggctcagtacgcatctaccgctaagcgcagcttcaacgtgcttagcatgatgagagaatctggaagagcataagaatcaggtcgcacattaagagtgagatcagcttgctaagcgagacgttcgtctcttgccaggctcaacgcacgactaagcgcgatattgtgatttcagagcctatttaaagcctg

SEQ ID NO: 126563 - DNA, 206 bp, Glycine max
tttttcgaagattctactatgaagaagaaaatgcaaagtgacctttttttcctttccccattatgaaaataggaaagttgcgccactcgccagcgagcaagtgcttcttatgggctggtgtattgcccccctttctgatgccccctctatttttgtgaattcttttcgtacgttccaacttgcgaattcggacgaacctttttctt

SEQ ID NO: 126564 - DNA, 397 bp, Glycine max
actatgatctcagcttgaagcaagctaaaagacaaagtggtgaagaaagctgacacgacattactacggtcaggagagagtgtgatgagctaaatgatatcaacatgaccatggttgaagcgttagagtgggaaacaaaaagggccgcgaatgaagaatggagcaagataaagtttcgaggggctttgtggggcagcacgtaccagttcaagcttataaaggccgatagggacgaatcatggatggaaagcatggtgttagaggataagttaaaggcttgtcatacgccgaagagaagtttgacggaatagttgagaaacatagaagagaatatgttgataatcattgatcaatataaggagaaggtgaacttggttgctagtcatgcacaaatgct

SEQ ID NO: 126565 - DNA, 328 bp, Glycine max
  unsure (1)..(328): unsure at all n locations
gaagagcacagttgatcctaaggacatctgcaattactacaaagaaccangtcattggaagcgaaactgtctagagaaagcaaagaaagattcttttgctactcttgttcagaatgactctttgttggaaagtgatttggttctggttgttggcgaacaactacaataacattttgaacaatgggaattagactcgggttgttcttatcatatgtgtctgcacagacattggtttgtgacatataagaaaaaagtttgtggtaacatcctcatgggtaacgatgctcctttgtagtcacttggtataggttctatgcaaatcagaatg

SEQ ID NO: 126566 - DNA, 167 bp, Glycine max
acttaactaactaactttttttagttgaaaataacactttctttgtttttccaccttctgtgttattttctactcttttgaacatattctcatatagtattatttataattgatctcatcacatatgtgaacagtatatatatatatatatatatatctatggcttt

SEQ ID NO: 126567 - DNA, 432 bp, Glycine max
ttatgatgatgaatgcccagtttgcttatcgggttttgaagaaggggaagaagtgaggaagctgccacggtgcaagcactggttccacgcaccatgcatagacatgtggctctactcccatttcgattgtccaatttgtcgaacacctgttgggcaattctaccaccgtttccattctggtccggagttgctggaatccggtggtggcgtctccgtatgaatgtgatttatgggagatgtgggacctacggttgcgtggaattgcgaccactcagtccttcacaactttctccataacgaacagaatgagtgagtgagagagagagatatagagctaaagcagccaactttggatacccttgttctgatgttacgtaacaaaagaagtcactcctcactttaaatttttgtactgctaaattattcattcat

SEQ ID NO: 126568 - DNA, 110 bp, Glycine max
gccttatcactctatgcacgtctttatactattatagatgtgttgtattatatatatatattattgattattatgatgatatgaataatctctactcaagtgttaagaac

SEQ ID NO: 126569 - DNA, 383 bp, Glycine max
  unsure (1)..(383): unsure at all n locations
ctgtctcagggcttggaggccacactcaacanagtactttcgacacctactgtacgttgatttgaccaatgctgttatgggaatgttgcgacaatcctttaaaaccttattgatgcattctgagaggttcgttgtcatgtggccatatcaacgtccttctctatcgtatagccatcgaccattttccttagaaatgcgatcaatccatgttgctatggctagactcagttcatgaaattnttctaaattntgataaaaaaatatgcttgcaaggagtgtaggctacataaaattaggtatgaataacaattntaagtataaatgaaagtaaaataaacgtgaccatcaaatatgaaatcttacccaatttcttcaacatttct

SEQ ID NO: 126570 - DNA, 310 bp, Glycine max
  unsure (1)..(310): unsure at all n locations
caacctacaaaaaggaggcatagatcatctggtttcacactcagggagatggaacaggcaacattttcattcagtgatgataatctgcttggaaaaggaggatatggcagggtctacaggggcactttgaagtcaggagagggtaatgtgtttggatataacttatttataacccaaaagaagtcatcatatataattnttataaaattgtgtaacataaaagttgtagctttcataaacaaatgatgcttcttatatttacttgcaatataatcactggaatcaaatagcacacagaatgagtcatatc

SEQ ID NO: 126571 - DNA, 496 bp, Glycine max
  unsure (1)..(496): unsure at all n locations
tcttaagtcacctgcggcatgcaagcttctcccccaattgtctataaataggttatatatttgaagtgaaaaagggttcaaccccttaggcacttctctctctttcgaatttgtggaanaattgtttccgtgaagaatatctaagccgaggcgctttcgaaatgtttccgtaaggaatttcacgaagatttcgaccgttcttcgacgttcttcattcgttcttcatcngtcttcgatcttcaacgggtaagtacctcgaactaagcttttcgattcattctatgtacccgcggtggtccacattgtgtttcgtgtatttttattctcgtttcatttactttttatacccccttntgacgtgcttaaaccatnttatttaagtcatatctcgcttaacctacaaataaaataaatttccaccgatcgtttgaattgtattatccggtaacttcgggtaaaatgaaattcgaccgttcggtcgtgccgtaaccacgtt

SEQ ID NO: 126572 - DNA, 419 bp, Glycine max
  unsure (1)..(419): unsure at all n locations
aacttataactatttatagaagctctctataattgtttattgagaaatntatgtgaagctatactttattacttttcctccctaaacagttgaacaagttgaccgtgtatatcatcctgtggccattgcctcatcttagacaattaaccagataaatagcattcaatccaggtttaaaaaacataaacataactaaaatgaagcgtctccaaactaatgaatcgccaataagaagaagcttgatgaggtaatggtaatcggcacgtgccctcgcaggtgctgctgccatcggtgactgatcacacaacacacgcaaacgaactccgaaagattctctctctgttgagaaaacgaacaaggtacgtggtataattgcgggtttgtatcaatgtattctgaatgtgaaataattaagattt

SEQ ID NO: 126573 - DNA, 408 bp, Glycine max
gcacctgaggcatgcaagcttaaacctccataatcgaatcacatttctatatctttttcttcttaacactaatttcttgcaattcatatgctgagtcatttcaaagactacaatatctccaatgagttcaacaaatagaaaactttgtatcccaacataagcactgaagcaacctaaaaattgtgtatgttcattctttaaaattcatacacaagtctaggggtgggtaggcaggctcgagtccatgtactagcttatggggaccgcggtcctcgcaggtaacagaccaattttcttaaacaatccatggttatgcagtattttgggcccgccccgcttaacaccagggttgtgcgggtttggtctacaggttggcccgtaagcccacttactaagtccacatatata

SEQ ID NO: 126574 - DNA, 379 bp, Glycine max
  unsure (1)..(379): unsure at all n locations
gcttgaattgaaaacggaagccctcataaatattatgtgtcataacttgncacacggaagtccgattaacgcgcagactatatcgagacgctcgaaattgagcaacgaatgctctcgagaaattcatatggccataacttttgaaacggaagtctgattccggcgcataatatatctagaagcttgaaattgaaaaacgaaaaccctcgagaaattcaaatggtcataacttgtcacacggaagttcgattaacgcgcagactatatcgagacgcttanattgagcacgaatgtctcgagaattatatggcatacttgtaacggtgtcgatatgcgctaatatcgatctcgaactacacggtgctctcaaataatggat

SEQ ID NO: 126575 - DNA, 437 bp, Glycine max
  unsure (1)..(437): unsure at all n locations
gtattggcgatcagaactgccattccttggattacggngtagaaccaagctcacgcctttacaaaaaggttcatcaagttcagtagaaatatggaagtaaccgtcttgctaaattggggcaaaagatgaatccagtcacatcactgctttatctactgccaaacatatttaggagtattgatggccttgatgcttccagtttcaccttgacacagatgtcatggaccatgttgaaaatctaaattgattcaacctcatatctggcgtaaaaattcgtaatagcttaactgtacatcattcgcatgcatccatgcttttcattggttgcaatgcttctagcatcctttccttgaaaaataaaataaacgaacttaatctttgttatataaaaaaaagggacacgttttacgactcccttaccgaacttgtgctggagc

SEQ ID NO: 126576 - DNA, 459 bp, Glycine max
  unsure (1)..(459): unsure at all n locations
ngcttagcacaactctccttggttacatacttgcagctaatacttggatatccggggcctcataagggggtgagtgttgcgatgcaatttgtatatccggtgccatctcgtgaggcctgtccaaagtattggttgattgcgacaccaatccccgcgactcgtactcaacctggatgctcgggtcggccaatatcaatgttcaatatgtcatgacaaccatgcacaacaaatgaaccctacatcatttgttcttctaaagagtcctgtgagcaacaaaacatggatggagggtccatggtcattgatgaattttcaagaaactcaacttggtgttcccgtgttagaataacattacctccacgatacattaagtgggggcacgaatagatatttgaatatcttgggctttttaccaatcccttataaaaatattaataattacacaaagaggcatctaaa

SEQ ID NO: 126577 - DNA, 467 bp, Glycine max
  unsure (1)..(467): unsure at all n locations
gatccttaagtcacctgcggcatgcaagcttactcttacggatcgttaatccgtatgtttattatcagaggtacntttggaatttacaataatttgctgagtgcacaagaaaaatgttaggtgcacgaagcaattaccttcattgtgtaacttatgcatccaccactttccaatatgaccttagtgtaacatatgcagtaatgattgattgaaacccaataagaatcaatcaaggcctaatatcactttagtgtaattgaaatccaataagacctagtatatgactttagtgtaacatattcatatgcactaatgatggcccaatcaaggctcagtatcacttaagtgtaacatatgcactaatgattgattgaaacctaatttatgtccaatatatgacattatggtaacatatgtactaatgattgattgaaactcaataaggcccaatcaaggcctaatatatg

SEQ ID NO: 126578 - DNA, 392 bp, Glycine max
  unsure (1)..(392): unsure at all n locations
ncagcttgtctcagcgtttatgcgatacggatactatcatgctagctatcatcgctaagtaccaagaagagttgggtctagccacggcccacgagcatagaatcgcggacgagtatgctcaagtgtacgcggaaaaagaggctagaggaagggtgatcgactctttacaccaagaggcaaccatgtggatggaccggtttgctcttaccttgaacgggagtcaagaacttccccgcttattatccaaggccaaggcgatggcagacacctactccacccccgaagagattcatgggcttctcggctattgtcagcatatgatagacttaatggcccacataattagaaatcattaggaaacttggatggtctctgagacccttgctagatat

SEQ ID NO: 126579 - DNA, 67 bp, Glycine max
aagcgatgacttattccctctagggggaaaaccaaatgacgactcttcataatacaccctcacaccc

SEQ ID NO: 126580 - DNA, 392 bp, Glycine max
  unsure (1)..(392): unsure at all n locations
ggaccttagcaccgcggctgcagctgatattaaattttctttttgtttcagcgaatagaacttgncatcaagttgcacaaacttcgaaggttcgtctggaatccgcaaatatccttacgattccttactgaagcggattgtgatgcaggaattgagaatcctgcatacgaggcatgggaacagcaagaccaggttcttcttgcctggtngcaatcaactctatccacatagatcttatctcggatcattggatgcattcattcctacgaagcttgggaacagatccatgattatttccacagacagacgcaagccagatgattcttgaagataagtcgatgcgcgagtttctgcttaggaatcaagctatttctgatgcacttgcttttgtg

SEQ ID NO: 126581 - DNA, 388 bp, Glycine max
  unsure (1)..(388): unsure at all n locations
acatcttgaactcattatttgattgacctttgagctttttggcatcacctttgttatcatcaaaacacctttgaatcattcttgattcatcatgaagctttgcttctacataaaatctgattattttacaattattattttattttcaaggattcaattacttcaaatgacatgttattgtatcacattcacatttgcactttccgccactagatgcctatgcaagatttttccctgtaaattaagaaattgggtgtccagaactgtcgcatgactntggttgtcattttcaaaacaaaagccaacataaacaaatactaccttggttgtcattttctctctaaaattatgaaaaagaattaaaatatcaccagggtgcttcattcct

SEQ ID NO: 126582 - DNA, 460 bp, Glycine max
  unsure (1)..(460): unsure at all n locations
cttaagcacctgangctgcagcttgtgggtcagtttcaataagcgttcgtgtcatcccatggattgagcgaaaaggctcgggttatcaaatactacacatcttttaaagcacanagcgaggatcggaacctcaattgcccctaggggaaaccaagaagaacatacaaaaataaaaaatgcagcgatttcctccattgccccagatcttaagcgtagtatcacttgacaacgtcggatttcacggatgaaggtaacttctcatcatccatgttggctagcaccaaggcccctccggagaaagccctttntacaacgaaaggcccttcgtagtttggggcccactttcctctattgtcttttagaggtggggagactttcttcagcaccaagtccctttcgctgaacctgcgcgagcgtaccttcttgtaaaagcgntcttcactcacttctgatataaaca

SEQ ID NO: 126583 - DNA, 489 bp, Glycine max
  unsure (1)..(489): unsure at all n locations
cttaagcaccgcggctgcagcttttatccaggcacattcttggtggtgaatctccttcttccatggnttattcccttgtggatggtgcctcccctctcctcttttcctttgccttccgctgcatctccatggtggaaaatcaccattaaaagacctcattgaagctcaaagatccagcctccatagaagctccacaagcaagcttccatcatacctccatgtgggatgaggatgaaattattatagatacctccctctgggatgaggaagagattttggatacctccatttatgatgaggaaggagtgggatgccattgcatgaaatatgaactcctagaccttttgaagaatttgagatccaccttggttttgggaaccatagaattgagtcttgtaattccaggaaccactaagttgtgtctgttatatttatttggatgcgttgaggtattgtcatttatttaaatattttatttattcataattc

SEQ ID NO: 126584 - DNA, 352 bp, Glycine max
ctcatgcacgccactaaagactatggcatcatttctggcgctaaacagcttggagttggaagccatcttctcaattaaatttctcggcttcacaagagtcatgctccaaggctcacactggcacatcttcatactctccccatactggccttctaaaaattgagaaatactgtctaaattgatgggggggcaactgcacaatttctaattctccagaccaacaactctcttatgattgctatacctgagaatcctcctgaagctgtgtcctggaaacaagaaaatttttctcagaaaactcttatagcatcctatcttctattgaccttggaccaggtaaacagacatactt

SEQ ID NO: 126585 - DNA, 370 bp, Glycine max
atctaatctcttcctagctgtctctggtcccaacctagagctaaaccttgtgacgttctattaacatttcaagggaaagggctggttaaaaagccagtttaacgagcaacgtattataagtatggttttgtattatcaaacaataaaagccgatttttgttatgaagactcttaaataattatatattataaaaatcatacatttatcatacataataatttataattagatgaccgtgaatagattaccacttactcaagattaagaataatataaatctatggagaccgtcgatacaaatggaatgatggagaaatgcaattgtaataaactcctttactcacatatattatttttggcttattacgg

SEQ ID NO: 126586 - DNA, 465 bp, Glycine max
  unsure (1)..(465): unsure at all n locations
ccgacccgaggcatgcaagcttataattatcggagggagaatangttctttctattcaattgtacctatcgaggaacgataaattctttctgcggcttctagatcacgagatgtaggagcctccgtaaagcgactctcagctcccaccgcatatagaatatcgggccttgtattggttagatacctaaaactccccacaagactctcgaagacccgggagtctaccttctctccttcatcaaactgtgataacttcaagccaccttccatatgagtgttcacgggatcgcaatcaagcatattaaatttcttcagcacttcttttgtgtaggtctcttgtgagacaaagataccattctccggttgcttcactttcattcccaagtaatattacctgaaacccgattctggcatatctaattcacaagacatggtctcctcgatgtcttcaaacaaatttgggtt

SEQ ID NO: 126587 - DNA, 400 bp, Glycine max
  unsure (1)..(400): unsure at all n locations
caatccctagtggatggcgcctctctcaccttttcctttgcttccgctgcatcttcatggtggaaaatcaccattaaaggacctcattgaagctcanagatccagcctccatagaagccccacaagcaagcttccatcaactttagacaaattcttccggttatcccaagaggatgtcgttcagacataatcaatgcaaaaatcaattcatcatacccttggggcaatattgtcatgtgttaaggctcacaagaaatatgtgtctacaaaatggtccacacaatgatagtgaaacaaagctcatagaatnttctcaatggcttttagatctgggtgatggaataacttatccaaatgatggttatgcatcaatacaaattcctaaatccactttgacaac

SEQ ID NO: 126588 - DNA, 230 bp, Glycine max
acggggcacttctgtgagcacgacagccatctctgtctacctaggcataggagcacagactccattgcccttatcaaccagactactgggccgataagatatctttgatacctcatatacttgactattcatgataatgtgtgaactcctttgtcaggtgacagagacctaatcatcctaacccccaattgatctgctaacattaacaatatccataattatattgagcg

SEQ ID NO: 126589 - DNA, 420 bp, Glycine max
  unsure (1)..(420): unsure at all n locations
catatcactcctgcatcatattcatgcattgcatatgcataaatcaccgcattatcatacccctttcatttaacatgcttttgttctacaaactacatacattttattttcattagtcgcactcatgcatgatccttgcattttcctctgcaaaaanaaaaaaaaaaataatcataacgggaacaaaaagaaagtcacaccacattcttagttatatgtgtcgggtaccatgataatggctataaaccaaccatgatgggaatatacttttatttctctaacaaaataattgaaaatcatgtgaatgtggtacctaatgcatggtaaactaagaaaatgaatggttctttggcactttaatcctctaattacattttccatgcatataatgagcatactccactcattcatctttatgat

SEQ ID NO: 126590 - DNA, 160 bp, Glycine max
ggaccttaagtcacctgcggcatgcagcttacaataaatgtcgattgtctctgtatttacgggtctctatcacatatgcgagttaaaaggtactgtcgtctgaattagctatgaggttcataattcaacttaccagcgactcattcactcacggtaccca

SEQ ID NO: 126591 - DNA, 411 bp, Glycine max
  unsure (1)..(411): unsure at all n locations
caagcacccgggctgcaagcaggcanccagttttttccttctttaccaaagccccttcactctcacaggcctgattcgcttattgttgaaaagaacaactgattgatgatttgctttccaactgattgttgtaccaaacaaagtaaacacatatcctgtcaaggatttccttgtgtctacatttcctgcaaaatctgcatctacatagcctgtgattgctgcctcatgtgctgtcttcttgtaccttaatccagcttttagagatccatttanataccttagtgtccacattacaactttccaatgtgcactgccaagatcttccatgaatctgcttataatacttacaacatgagcccaatcaggtctgctggaaaccataccatacactatggcttcaacaccactgac

SEQ ID NO: 126592 - DNA, 490 bp, Glycine max
  unsure (1)..(490): unsure at all n locations
ttaagtcacctgcggcatgcaagctntctcgctgcaaantctcttcttgtttggtgnnnnnggnnngagctaaaggtggtgttcgtcattggaagtgccgtagacagactttgtggtaaatctagggatggcctttgtggataactgggtagtggggtaaggaggaggtttgttattggctgagtaatgacattgttggtgtggtgggaaacttatccatacctaggaatggcaagtcaacagcatggagtttctccctcattctcacccttcttatttgccccagctttctcagtctgcctagtaagatgatcaaatntgcctcttttcggatccacttcgatctttttgctggcgaagaccataatctgttaaacttgaaggtgtcgtacccaacattttttcatagtagaacaccgggcacgtgtctactatcatcgtgataatctctttctggttatgggggtgctacttgagtttccaagctctc

SEQ ID NO: 126593 - DNA, 282 bp, Glycine max
  unsure (1)..(282): unsure at all n locations
gacangnngagaaggaggtcagcacccgaaatcgaactattcaattcattcattgtaccctcagtggcccccacctgttttgcatgcctttatttacatatcattactattcgtaccccttttgacggctcatcattttttagcatttcttcctataaaaatatatatttcccctcacattttacacttattctgtaataattcaccgcgttgcgtccctttaaaaatgagaatttttattcaaatttttaaataaaacatgctttttaatctttatatgtt

SEQ ID NO: 126594 - DNA, 338 bp, Glycine max
cacaagaaggatgctatgcttcacctccattaagagcactcaggtgaagttcatagttctttggagaatataacttcccgggtagaaaacataaagactaggcttactcttagaaacctcctaaaccctgatgaggatgaagcatagctgtgttttagcgcttgtttctggcattcagctgtcctttctgagttttattaatcttgtctttattactctagccaactttgatgttcgactaagacgttatgatcttttaagttgtaatggttattgattagaaggaaatgctgtgatattttcctacattacatcatatatttggatgtttttactct

SEQ ID NO: 126595 - DNA, 412 bp, Glycine max
  unsure (1)..(412): unsure at all n locations
acagcaccgcngctgcagctttcaaaagccacagaagctttggtgtactttttgactcaagaactctgactgctcgaaaacgcttccatctttgtaaccgttggatcttctccaaattggtcttcaacttcacaggacagatttgcatgatcttaccgttggatcttcttaaaagttggtcttcaacttcacaggacaattntacatgatcttaccgttgggatctttgagaatatttctggagtgcgccagaagtctcttaatgaacctgttaaaggaagcctcttaatgaagctcttagagaaaactacattatgctgccgttggagaaacgctgatcaaccttcagtgacacggtggatcttctcaagattggtttccatcttcgcaagataccttttcatgatcttga

SEQ ID NO: 126596 - DNA, 262 bp, Glycine max
ctaaatggtcggctaattttttctttaccattgggcattgcaacttggagtgagtcctgcgataatttgggatcctgcatacccattcatattttagggagcctataggtgttaccctaaatgatgttggtggagcctctatcaaatattgagccacctgacaatggaccatataagttattatggctgcataaaacttaattaatgctgtatgacacttgtcttgtactattgcctttttaaggccctgtagctacataat

SEQ ID NO: 126597 - DNA, 394 bp, Glycine max
actcggtgaaacagttttttctcattaatatggcaatatcactccccccatacatataatcaacaattttaatattatgcaacttcaacatgattttttgctccacctagatatcccaccaacttatggatgcatgtacatatttcccttataacctcactatcaaattgcatttgatgattgtgattgaactctgcattctaaaacttgacaaccacatgtaataggtgatgaagttggatattccatccttgatcaatgatttcgaacacacaagtgtgtgtgcttatttgattagtctacatatgagaaagttcttaaagtcctaaagtgacctaaccatgccttcaatgattttaatacccacttaaccacgctttcaacttattgggca

SEQ ID NO: 126598 - DNA, 423 bp, Glycine max
  unsure (1)..(423): unsure at all n locations
tataaatatgatcaaaccaaaacatagttgacatttggatcaggaaatttgaagactctttccatgccagtcgtgaagctcagggctttgganaaatctcttcatctagatctaanttttgctatcttttgccagtcattttaaataatgtggcattcgacacagtcttctataatcaaatgatggagacctttatttttcataaagtaatacatactacttggaacaccctgacataaccaataacttagtttgagataacagatcataaaaaaaattgacagataaaggcgcttctgaattaattaagtatatagctaagtaacttaccaagttgttgcacatgaccttgtattcattcagaagcancctgaanatcattgaaatcggcacttgatggtataatgagtgtcattttggaaa

SEQ ID NO: 126599 - DNA, 324 bp, Glycine max
  unsure (1)..(324): unsure at all n locations
gcaccgcgctcactggctgaaggccgtgttttgtgggncgagctaggagttgtttgaatcttgttgattaaagttttatatcgctcagtaacttgatgattaagttgtgatagtttcatatctatgaaatgctatggctctttctcttcaaatatcttattgttgtattgattctatgtatacctatttgcccttgttaatgccaacagggggagaaaaaacatcatcatatgacattgcattagcttttgttcgggagaatatactgcattagcattggcgtcatactataatatatatatatccatatgtatattatacacc

SEQ ID NO: 126600 - DNA, 224 bp, Glycine max
agcttgacatgctgcagagcgacgtatatatatatatatatagaccagctgaatagaacaagattggatcttaccgattactttagtcactgcatttaatcagtaacctcaactacctgcgtaagagacagactatatgacgagtcctacaggaaatctaaataaataattactaaactggtgtggttgactccaaagaattgagtgactttcgcccaccatga

SEQ ID NO: 126601 - DNA, 150 bp, Glycine max
  unsure (1)..(150): unsure at all n locations
agcttatgaaattgtgtttcttcaaanatttataatatggaagttgggctctcataaaaggtgaaactattataaagctaccccgattttactatccgaggaagaaagtccaacaaaatgcttgagatacataagtaatctaactaccta

SEQ ID NO: 126602 - DNA, 382 bp, Glycine max
ctggccatgaataaaaaatctgcacttgttgccagactcttgtggttatgctcctatgctgaccaccacacagacctttgccctcctatgcatcaatctaaagtaattgaacagcctgaaacttatgctgcaaacatctacaatagacctcctcaacctcagtagcaaaatcagccacaacagaacaattatgacctctccagcaacaagtgcaatcctgggtggaggaatcatcccaaccttagatggtcgagtccttcacaacaacatcaacaataagattagccttattttcaaaatgctgctggcccaagcagaccatacgttcctccaccaatccggcagcaacaacaacaacagccccagaaacaacaaacaattg

SEQ ID NO: 126603 - DNA, 470 bp, Glycine max
  unsure (1)..(470): unsure at all n locations
agcaccgcggctgcagcttttaatcgtgtaagggganattgctatcttaaagcgtcgatgccaagggtatactattttgctctcatgtttcatttgtacatagcttttgtattcttcacagatagggcatgcatgatgactcttaacattgtatccagtcaaattcctgtatgctggaaagttgttaatggtacaaaatagaatttcacacaacttgaatgtttcattttgatacccatcgaacacaataacctcctcaccccgcaactttgtcaagtcttcaatcaagggactgagataaacatcaatttcatttcctggttgtcttgggcccgatatcatcatagacaacatcaccccgcaactttgtcaagtcttcaatcaagggactgagataaacatcaacttcatttcctggntgtcctgggcccgatatcatcatagacaacatcatgtggttttggttcatg

SEQ ID NO: 126604 - DNA, 416 bp, Glycine max
  unsure (1)..(416): unsure at all n locations
tatagcataggagcctctccatataatatctccattngaccaatggttgtgaaaacctctgcagctcctataaggaagtactgaggcacttgccagaagattgacaagggaacggtttcaagatcatagcagttgttttttctgataatatcaaggcgaacaacctctaaaatgccagcaacaatcatggagatgatggagatgacaaggccgatgcctatgcgttgaagctgtgtgaatccttgttcatggccaatgaactttcttgcaaatgggacaatcatgcgatcatacactggggcccagaagatgacactaagggtgtcaaaaaaggagatggatgctgaaggaattggaagtgctgaccaatgtgttggtccttttgttgcctcgtaacacaaacatgtgctcatttg

SEQ ID NO: 126605 - DNA, 216 bp, Glycine max
aatgtaaacaattatgccggaatatatgaacccgctagacctgtccatgccatgtaatccacctactatgacattgtgagctgattgttaaaaaaattatgaacgacaaaagtaattgataggaaaaatagatagcatgacatgattgtcccgacctttctttgtggatgtatttaagaacagccagaagcttataccctgcaatattctcctcag

SEQ ID NO: 126606 - DNA, 463 bp, Glycine max
  unsure (1)..(463): unsure at all n locations
tagctgcctcatagaggtccaggaaggattatgcggccgaatgaactatttccgttcctgagtatgatagtcaccgctttaggagcgccgtacaccaacagcttctttgaggccatcaagggatggtcatttctccgggagtgacgcgtccagctcaagacgttaaagaagcgctactaagaggcaacctagtaacttttaaatttctgcctgctatttgatcaccttctgtttctcaagtcatattggacgcacctagttgctcatgatcctgggaatttaaataaaacaagcgcaagctctgaaggtagtcatacctcacaaaatatatatatgtatgttnatgtagggaaaataccttacatatgcatgtttgtaacaaaaaaacccttcacaaatatatatatgtttgttaggtaagaagatactctaaattgcttgttgtaacaaaacattcttccaa

SEQ ID NO: 126607 - DNA, 431 bp, Glycine max
atccctacattgcagaggtacgcaaaggaccttataatttcatgccatactgagacaaggatccacaaacgtgatgtcaatagtacctcaacctgcgttcataatagattaagacggtgacagcattgttgtctataaactctatgacgaacaagtagatgctatatctgaaaacatagaaaagagttgtcaatgtccattgttctatatacaacaaatgtttcgccctatggtaaggtctcacaatgaatctatgcacttgttcatgtgtaaagaagtcatcattcaatgagaatccagtacaaagctcaactttatcattgtttcaaggagcaagccgactagacttgaatctaaatatattataccatatttctagagtataataaaatgcgccgcccgacaaagagtcttcacgcgttaatcaataa

SEQ ID NO: 126608 - DNA, 301 bp, Glycine max
actatctgagggatcaagcgaacacagtaaagctgaaagtgtaatactgatgtgcatttgaccaacctgttgatattttcaccacacccctcaatagggagacgtttaaaatgttcagggaacatccttgtcttgaagaacctaggagatcagaattaatggagggtgtgagagtccaaatctgtttggcgccgtgtacacttgattgtctatatcaaatgtcatgctataagcgcctaacctaattgtgaaggttgttgtcttgttttgattgtataaaaggacataaacacatcctaat

SEQ ID NO: 126609 - DNA, 308 bp, Glycine max
actgaattgatctaatcacattagtcggcgaccaacaggccacagctaaaaatatttagtctcaggtgttaaaacccacgcggttcaacccaactatataatacactattatgcttgttcacgcccatgacatttataggtgtcacaacatttaccacattccccagcagtacaatatgatatccctactcagtcttcatatcatatagacaggtgattcatctagaatcgagtccttctagatagcattctgtctgaaaaagttgttatgtttttagacagtcaattttcatcgtttagttccccga

SEQ ID NO: 126610 - DNA, 404 bp, Glycine max
aagcacctgggctgcagctttaggacggatttgcgagatgcctatatgtctttataccaaattaggctggtatccaaccaggcctatatagttcgattgaacacctgtacgacaagacaggatctgtggattcaagtaaaatgaccatatttcgttcacttcttcttcattggccggatcgacagcatgaaaatattcagtgaaccaggccgggccaacctctcgactaatgaatggagcatgttggggaagaaacttgtcaaagctcagaaaaatcctcatgtactttatgaacagcttttgtgagttttgaattaaggtcttgggggttaatcaaaagtgctctttggtctttgatcgagcgattagcaacttcctcagcataatcctgagggattattaat

SEQ ID NO: 126611 - DNA, 387 bp, Glycine max
agctataagctcaatattctcttcacattttgcccctcatagagaacgacctggtgctgtcaagacgttcaaaggtatgggctggagcattaacattattagtgaaagcctgccacttatggcatttcctcacatggaagcaacaatcgctctccatagagagccaataataccccgctctcataatatttaagccatggcatgtacattggcatgtgttccaaaggatccctcatgtaccttcaccaacatttgctcaccttctggatccacacattaacagaccacgcatggttctctgatggatttcactaagaaaaccgtctcacttccacgtctttgcgtataaggctctgcgtttctatctcatgtttgtattcaggacaa

SEQ ID NO: 126612 - DNA, 426 bp, Glycine max
  unsure (1)..(426): unsure at all n locations
attaatgctaactaccttaaaaactatatttctttctataacccaccttagtgttttgcaaaatacaaatatgaanatataacataatttccaccttagaaaaaaaaagcttaattattgtttcatgcttgtatgcaaaatataactctgcatttttacatataggttatatgagaataactgtcatcatctacttgcattaggatagctctaaaagaaaatttagaaattagtatgttaacaatagagtcagctaagccgatgctaagaaaaatgattaaatatattaaacctagtgttggctaagntggcgcacaataaaaagaatattaaactattaaacatgttgaacttggctaagccgactctaaatgggaaaaaaatatttttaaaacttatccaagatagtgtgggattctaactgtg

SEQ ID NO: 126613 - DNA, 349 bp, Glycine max
  unsure (1)..(349): unsure at all n locations
taagtcactcccgcatttattcttagcattgcttnngatgtggacacgactttgtcacgggaagccggaggtccatttacctttttattgtacacatggggcactgtgccccctaatgcgcaagtaagaagagataattttccgggcttctcgtgtttcgcaaatatgcactttatatcatgcatcgcataagcatcttttcattacatcataatggacatatcctgcatttgtccggtatcatattccagcctcacattttgcatgagtcatggcatcatcatgcatatgcgttcaacaaactttatgatctgcaaaattgcataccatttgttttcatgtttgctca

SEQ ID NO: 126614 - DNA, 442 bp, Glycine max
aactctatcactggtattcttttacaggaaactggtaatcgattaccagagagtaaatactctggtcacttataaaattgtgagaaaactctgttgataaacaaaacagtgctatgtttggtttttgaaaaatccttttcatacttccttgtaaggcttcttgatttcttctcttgaatcttgaatacatcttctcttgaatcttgaaatcaacttctcttgaatcttgaatcttcttgatttcttctaatgaatcttgaaattaatcttgatcttgaacttgttgactcaatcttgaaatcattcttttgggcgttttgtcatcatcaaaactacttgattcatacttgaatcatcatcatgaaacttgcttctacctattgcctgataaatgctttgctcacttctcaatggggtctctaaggttttgcatatccctgta

SEQ ID NO: 126615 - DNA, 343 bp, Glycine max
  unsure (1)..(343): unsure at all n locations
aaaaaaccatatcaactatgagtacttacttgagagcgctactcgtgaatatcacactttcaacatgcgaccggggataagacacaaacagcatcattcactgtgagtgcaactcttggtntcgaacctttggatgctacaaaacgcctcatccaagcctcgtcgagaataatgtatatccctcgataaactatagacatgatgttcatggaatgattaggataatccatgaaatctttgttaacgtgccctggaaggatatttttcctgatacatatatcctccaggcacttcgaaaggttctacgaaaacacacaccattatcattaggacatggatcgag

SEQ ID NO: 126616 - DNA, 301 bp, Glycine max
ggcatgcatgggttgcataacacccttttatgtggaactttgttcattcctttttggtcggaatgaacgacggaagaaatgttcatgtgctggatcttctaatctctttttctttattcattctcaccactttcctcacactcagactgtgataataatgatatactttaaggctggttggttggtaactttggtgtctaatatatacccatcgtttacgcttaatatacaactccgttaagtaagtactaattacattgccacgtgcgataatcttaaaccctgttaattgcgggtaatt

SEQ ID NO: 126617 - DNA, 405 bp, Glycine max
ctacaatcacattctaactgaatctagaatattccagatcctctaacagaagaggttatttgctccctacttccatgcatgaatcttcctgcttcacacgcctcacacgtagtcctccatgtacgttggagcctttgttttctttttgggcctctcttcacgctggtgttcttttacttcctgcaacccctcttccctattcgtaatactcccctccccttcaaacaacaccttgtcctcaaggtggtgcgaggttttaaagctggaccattcttccaacgaagcttgctcgagtggcaagtctttccattggactaagaccatgcgtttaggtcccattttttaacgaatcagttcggacaccacgatggcgtaccaaatgacgactgggtcaatatccatagc

SEQ ID NO: 126618 - DNA, 209 bp, Glycine max
tttataggtgtctacctatatacatatatgccttactcacgaaagttaagcttggtgtgattgctagagtatctgcagctctagtcttgctactggtgacaaggtttcatcaaagtcaattccttctttgttgattgtacccatgagcaactagtctagccttattcctaaccacttctcctttttcattgagcttgttttttgaatac

SEQ ID NO: 126619 - DNA, 367 bp, Glycine max
  unsure (1)..(367): unsure at all n locations
ttaagccctgagcttgcagctaagctaaattcacctaatatcttttactgatggtcatactaaatggaccaatcagtngatggaggaccttatatgagcctgtgtataggaacataggagagtcgggatagttcgttctctcatcaattttacccataacaatagaatgtattctatcattggcactgactctctacaaatctatgagtggcttaacgtgctacacaaccctgtgttagctagcatttgaagagaaccactccttgtgacttgaagtgtaacaccataccactattaatgtgatgttctttctaaataggatgaggacaacttataactcgtggaagaggttttattgattacaaga

SEQ ID NO: 126620 - DNA, 376 bp, Glycine max
atgcactcctctaatgactatagcatcattctggcgcaaactgttgggagttgaaagccatcttctcaattaaattcctggcttcagcaggagtcatgtctccaagggctccaccactggcagcatctatcatacttctctccatattactgagtccttcataaaaatattggagaagaagctgctccaaaatctgatggtgagggcaactggcacatagttatttaaatcgctcccaatactcatacaggctctttccactgagttgtctaatacctgatatatctttcctgatggctgtggttctggaaacatataaatatttttctaagaatactctctttggtcataccagctcgtgaaggaccttggaacc

SEQ ID NO: 126621 - DNA, 256 bp, Glycine max
agcttagtattggagggagaatactctctcttgcctatagctgaagtcaatatgtgacctgtgagacttcagaggtgtttttggagaaataatttcctgatgatgtacgaataataacgagatggagttctggagctcagacagaaacaaggtgtgactgataccaccatgttaaactatgagtcctccctctaagagaagggaaatctaggaaatttaaactggctgatgacagagatccatggtgtatcccttg

SEQ ID NO: 126622 - DNA, 338 bp, Glycine max
  unsure (1)..(338): unsure at all n locations
cgacccggacctctaancacctgaggatgctgcatgcaacaaatctgtatgttgatttcttggatcttggcggtaggccataaaactatatagagagacttccttggagaaaggcacttgtgaaattcaattgtatgcacttgtcccacaatttgttgaaaagccagtgtgagtattaatctatatcagttgcagggcttacaacctagtgtgaagggctatttgaaatttacacttaaagccttgagtgaacctttctgccacaagaactgccttgatttatcaaagaaccatctaactttggtaataagaaatctattgctgcatgaatatgagct

SEQ ID NO: 126623 - DNA, 482 bp, Glycine max
  unsure (1)..(482): unsure at all n locations
gacccggatccttaagtcacctgcggcatgcaagcttgataatgatttcttataatgatatattaacattatatataggggtgcacgctattttgaagaataaatggtatatgtacgaacaataattntttttatatgttgttatttaatcagaaatgattatacataataaatctattaatatttataataattaaataaaaagttatattaatattttttttattaatgctatatatgtaaattttgacactaataatacatgtatattaaactcattttgaaatcttgaacgcttactcattctagttataatgtcacactgaatgtttggagtaacaagaggtgaaatccaagacaaaagttttatgagagggaggaaaattaggtatagagacctatatttaagaattatgatcaatagtaactcctaaattattggtattgaatatatcaagttttttttaacgtaatagtagcat

SEQ ID NO: 126624 - DNA, 295 bp, Glycine max
  unsure (1)..(295): unsure at all n locations
cgaatatatcgagacgctctatattgaatgttgaagctctgaccaaatgcaaacgacgataactttttactcagacttctgattgagtcctgtaatatatcgagacgcttgaaattgaaagttgaagctttatccaattcaaacgacaataacttttttactcagatggtggattgagacccgnaannnnnncgagaccatcgaaatggaagtttgaagctctgagctaatccgaacgacaaaaacttttagctcggatgactgacagagctcccgaatcaattgaaaccttcta

SEQ ID NO: 126625 - DNA, 346 bp, Glycine max
  unsure (1)..(346): unsure at all n locations
aagagagggctgatacaaggagaccctctagctccactgctcttttttgtgggctatttaggctatttaggagtgtagtccatggtggaatatntaaaccatgtagggtggataatgacatatttttctctcttctacaatatgctgatgattccattgttatgggagaagcggaacctttgggctattatattaaggccatctttcgcagctttgagctcctcttggggttggctgttaaacttcataacagttctatgtattggatcaacgtggatactctattctcccaaactgcagaaatacttttcttatgcaaagttagatcggaccatataagttcctt

SEQ ID NO: 126626 - DNA, 418 bp, Glycine max
  unsure (1)..(418): unsure at all n locations
gctgacactctaatattttttttttatnntttgatctannatttgtaaccagatttagggcttgcattgctttaatcctttcatctccttcgtattcattctagaggaaattctagatttcatgtgctaatttgatggccatgattctagtgaaaatttattttgagacaacaacaaacaaagtagctcttgcctttgactttcttgctttcctttctttttgattttttatctgagccattggtggattagttggtaaggaaagaatttcgtagtcttcctcaatagcttcccagagatcatttgtctccaaatgtgcttccattcttgctgcccagatctgataattgtcacttgcaaacataagtggtgctattgctgtgtatggtggttcaaaatccatttaccagatgcattg

SEQ ID NO: 126627 - DNA, 345 bp, Glycine max
  unsure (1)..(345): unsure at all n locations
ctctaagcaccgcaggctgcagcttgactccaacgacacgttatttatcactccacaagtcgagcataggagagctacatccctataacacaacgaggctgacaatagagggcagtataactgaatgatgcgtgttgtcaatgcggaaggcatattgtccttcactatccatgtccacacaataatngcacctttgaggttacgtgatcgtgaactactactaatctataacatgtgcttatacaaaccatcacataaacactactgactccgcaccatggccggcactagggaaggaaacggctattcctctctgttgaagacgcatggactattatccttgac

SEQ ID NO: 126628 - DNA, 359 bp, Glycine max
  unsure (1)..(359): unsure at all n locations
agcaaccaccttctggaggaatnttctagaaggcccaagtgggctctggtgctattngcacccacatttttactaagtacacccccatgccttttttggtgattctttttccgtaacgttacgaaactttacgaaatgtcgaacgatgcttattttctttccgtaatgttatgaaaccttacggactacgtaatcaaaccccttttggtttccgggatgtcacggaatattacggattgcgcactaacacttacttttaatttccggcatgtcacgaaactttaccaattgcctaatgatgggtgccaagtaccttcgagtggtcaaacgagggtcgtattcctaccaacggtgggccc

SEQ ID NO: 126629 - DNA, 296 bp, Glycine max
  unsure (1)..(296): unsure at all n locations
agcttgcttactggagcacccacggacgttttacctttgttcgccaangagggccgtaaagggtgatttttcaccactgtagatgcaccgaaatgctaatgtgacaaagacaggggaggcaccatcctctcaggatttatccacagtagaagagctttaccccaagaaattgcatggatacaagcttgagaggatgcattatggaggagataatcaataatgcggaccccaattgattgattcctacgtaaaagcgacctctgtgttatctctcaactattccctaaaggacaaac

SEQ ID NO: 126630 - DNA, 375 bp, Glycine max
  unsure (1)..(375): unsure at all n locations
caagtcacctgaggcatgcacgctaacaacataattantttttatcctttctttnatggcgtgcctccaaactatacaccacncaatgttgtacacgctcttgatgagaatgatgacaacttcgcacctatacccattgagatccaacaaccctcatctgtgtcatgcacaggtccctcatcccatgggggagacacttgaagtacctcgagaccacactctatctgactttgagccttgcctcggatatgccactaaagggcctgcgtttggtggcatacccttgccaaacactatggggggccctcaatattatccactaccactacccttacatattgcgggggaaagactgtcttcttgccctggcggaaa

SEQ ID NO: 126631 - DNA, 378 bp, Glycine max
  unsure (1)..(378): unsure at all n locations
gaagaccaaggtgaattaaggggtgtacctaactgggtcgctctcctacaaattgatgaagatgctttgggactaacttgaagaatcactttgggaagcccaaattacaagacaagaaccatccattcccgagttgatcaattttggcgaactattaatattgggttgattagataataattaagtccaacatgctcataaattttagccaccggtttagaataagatttatttttcgtttttaattgtantttgggcctatgtttggacttgtaatggactggctaccttttattgttatttttaagccttctaaatatcaaattanttattacgcctcgggtctaatttaggagtntataatagactccttaaaca

SEQ ID NO: 126632 - DNA, 397 bp, Glycine max
  unsure (1)..(397): unsure at all n locations
atgaggtaaatttggagcaaactctcacctcacacaagtctataacatcaatctaaacttgctcaaactggattacacctaaatgtccaccgaatcaaaatttgactcctcaacacccaattttgccctagaaatggctcttggttcactttggtcatttgtttttctctctagctcagcctaacctttctcacatgtcctaaatgacatttcaagctattattaactcactttaacctccatttaccacagaattcagacttagccttccaactcttaaagtctcactctttttccactcataacatcacattctcactttctaaccttgggttagttctaccctttgtctctaacagatntccatcagcnaattcagcatattaacatcacaaac

SEQ ID NO: 126633 - DNA, 213 bp, Glycine max
ctctaaatagagggagcgtgctcaaatatatggcgcaatttccgtttgttttcttggttgattaagttgaattacgggttggtatgggatggccctaagcctataatgctttttgaaacaatgagacatgccacaatgtccccgtcctcctgctattgacgcctaaacacgcccccaccaagtgttctgcgaactgcctcaatggcactcgct

SEQ ID NO: 126634 - DNA, 483 bp, Glycine max
  unsure (1)..(483): unsure at all n locations
ttaagcaccgcggctgcagcttataagcgcgggtctgggagacatttgttatgtgttctcaatatgcgaagatgatgttccgagtacattgaatttggtacgaccatgccctcctgatttccagttgggaaattggcgagtggaggaacgccccggcatttacgcgacgagcataatgtaaacctttacggttttaaaagctctatagttgggcctaggctttagagtttttccttttgttaaggctttgtgtcttttgttgttgattttataatacaaggatctttcttcatctgttcctacgtctctacccattctcattcattggcatgtttacttctttntctgaaacgacagatccgatgacgagtccctcgaaggtactaatacctgtgacccgcctatcgacttcgagcaagaaatgaatcaaacggaagatgaatgaaatgatgatgtgggactttccccacaactataaagaat

SEQ ID NO: 126635 - DNA, 440 bp, Glycine max
  unsure (1)..(440): unsure at all n locations
gctntaaagcgcgggttcggagacattagctagttttcgcgatatgcgaagaagatattccgagaactttggatttggtaccaccatgccctcctgatttccagctgggaaattggcgagtggaggaacgccccggcatttacgcaacaagcataatgtaaacctttacggttttaaaagctctatagttgggcctaggctttatagttattccttttgttaaggctctgtgtcttttgcttttgaattgataatacaaggatctttcttcatctgttcctggtctctacccattctcattcatttgcatgtntacttctttttctgaaacggcagatccgatgacgagtcccccgaaggtactaatacctgtgacccgcctatcatcttcgagccagaaatgaatcaaaccgaagatgaacgaaatgatgatgttggac

SEQ ID NO: 126636 - DNA, 91 bp, Glycine max
cggttgaaacctttgcgaaattcttcacggataacgttacggaaacgtttctgaagcgcctctgctaaaatttcttcacggaaacaatttt

SEQ ID NO: 126637 - DNA, 418 bp, Glycine max
  unsure (1)..(418): unsure at all n locations
agctntggacctgtctcgtgggaatttcctgcatctatcgcactatcatatctccattctcaagcagaccacaaattcattgctatacttagaaagaaaaaccaccaagggaaagtactgatttcacagcgaaacatcgaactttatccaataatcaagagaaatggaactgctttgggcaacatgcgaggggttggaagcaacacacagaacactgtccactcatccaataacaaaaatcactcattatgatggagaatcataagagtttcgtgtaagaaagaatagtgactgatcttatccgaaagtattctacggaagaagataacaagcaattatttttctcaaatttaaaacgccaggggtgccatagaagagtgaggatgacatgcaaaccttgagatgccccggagtggct

SEQ ID NO: 126638 - DNA, 309 bp, Glycine max
  unsure (1)..(309): unsure at all n locations
atactctntgaatttctcgagaatgaacaatggaacatctcgagtaattcaaatggtcataacagttgaatcgaatctccgattctagcacgttatatattgagacacttgacaatgaacatgaaagctctcggcaaattcaaatggccataacttttgactatatgattgaggcccatgatattttcagacgctcaaaagtgaacaacggaaagctttgagaaattcagatggtcataacatttcactgggatgtccgattcaagcgcataatatagcgagacgcttgaaatagaacacaagggctct

SEQ ID NO: 126639 - DNA, 379 bp, Glycine max
atgaaaataataatcaaattcaaacataaactgagatgtattcataaaattttgatatatcatttaatatgcctgctcttttttaatacttaccctttggcatggcattgggaaccatatatttcgttttgattttgaatatcgttatcttctttcatatcacttactttggcaatgaagtattctgtgtttaatttgaaacaagacagatatcgatgaagagccaaaaattattctataagaatactacaatttgcttaaacgaccgatgtgtctatattctgcatacccctagatatcggaattcaatttttgacctcatatttaaagaggaaaataatgtatcaattattatacgaaagaatgatttttcaatcca

SEQ ID NO: 126640 - DNA, 419 bp, Glycine max
  unsure (1)..(419): unsure at all n locations
cctcagagtcacctgcaggctgcagctnatattttagcagatgattatgattctgtgtgtctcctcatggactcctctaaggacaatagcatcatttcttgcactgaattgttgggagttggaagccatcttctcaatcaaattcctagcctcaacaggagtcatatcaccaagagctccaccactggcagcatcaatcatactcctctccatgctgttaagtccctcatagaaatattgcagaagaagttgctcaaaaatctagtggtgaggacagcttgcacacaatttcttgaatctttccctgtactcatacaagctctctcaaacaagaacttatccaagaacaccctcttaaggtcatcccacctggaaatggacctgggagcaaggtaantcagccaatctttcgctactcc

SEQ ID NO: 126641 - DNA, 377 bp, Glycine max
gcttctcaaggaagctacctagtctataagcctcgctaagtgcaccttcggggtcaagtcaaggaaattactgtgtttcatcgtaagccagaaagggataaaggtggatcctgataaagtgaaagccatccttgaaatgccagaaccgcgtaccgagaggcaggtccggggtttcctgaggcgtttcaactacattgccagattcatatcacagctcaccgctatctgtgagccattgttcaagctcttacgcaaaaacaaatccatctgctggaacgaggactgtcaagaggcatttggaaggatcaaacagtgcctcatgaaccctcccgtgcttatgcctccggggcccggaagacctcttatcttgtatatga

SEQ ID NO: 126642 - DNA, 322 bp, Glycine max
tcctcactcatggcttctctatcaagaagcctacctttcacatcaactatgtaagcatcgactatattatcggctgcgaggccatgtttacgcagcaagaatccatagccgccgccaccaaattgccctccaactcctacagtggtgaagacacccgctggaaaccctagtgttttgcttttctcactaatgctatagtaaagttcaccaacagtggccccggattgaacccaagcaacccttttgttacatctacatcaatccttctatagtttatgaggtcaatgactacaaatggagcttcagcaacataggagagacc

SEQ ID NO: 126643 - DNA, 420 bp, Glycine max
  unsure (1)..(420): unsure at all n locations
cagccttaacaagggataaatgtaattctgcatacacaaagtaatacatcaaacatggagaataaaaggtaaagaaatctttctgggtttgctaagcaaattttgtgatgtgacgatttaattctaatacgattttatccaaaaaaattagatgaacaaatccggggaagaaaaatagaagatgcaagcaaattgctatgtgttcttatcgaatntggtagaacttcctcatgacggtattccttcatgagcttctcctcccacggtagtgagacgtacctgttaagacactcatgcacttaagttagaggtgcagagatattcaagtattaaaacataagttggaataaagttagtttacatgaactttgataatcccttttataatgtgaaattggatgatatgattctcatttccct

SEQ ID NO: 126644 - DNA, 428 bp, Glycine max
aacatcctcttctgaagctaccatgtgcaaacattaaaatactgtagttatgggctttttcagtcctagctttttcattgctagcttcacgacaatcataaatggaaaccatgtggtagcttcatgagtgctaaacactatagttgtcggctttttcattgctgcgcatggactgaacaacacactacatcaaacaagctgtcatgtaaaatcaaaatggtgcagttatattcagcattttgcagcactataactacatgctaataactaatgttgctgcattaaacgggcgaaaagatcactgcattctgcaatgaatacacgcgaaatggttaaccaaacagctgcgaattgaaacttgttgaagtccaaaagaaacatacgaattctaaatcatgcctcctcctgtgacttcactattccgatga

SEQ ID NO: 126645 - DNA, 430 bp, Glycine max
  unsure (1)..(430): unsure at all n locations
acttggataataatatgcatggaattatgttttggctgatggccatgccaaatatttgcccaccttttatctgtaaaaagtttgttatctcttattctatcgnatgagtacatggaaatttatagaagtttagtgattcagtccttttaattaaatttcttttgctactcttgaacaaaatatatgtcattatcaaattggtacaaggtagccaaaagatcctaccttggattggattagaaaggcagagggaacacttaagttgtgtaataatatggacagtatgttcctgtctaaaatacaaaattatatccatacataattttttgtgcataactgcatattacataaataagaattgctactaacatttagtttaaacatacactgaaagaggattaggtcacactcacatatgacttatataagt

SEQ ID NO: 126646 - DNA, 388 bp, Glycine max
aaattggcgagaagattagttaactttatattccatcccatgttaggctatctcatatttaatgtgaatgtttgcgagaaagatacatatatacatcgtatattgaggagagagagacggtgccacgaatttaattaatataggtgtcgctattagattacaaatgtgggattattattatgtggaactattaaggctaacgtatattgcattctttttttgtttacattaagaaatggatcctactttattaatttatatgtactctcacaatacagatcttgtccaaatatcttcttgcaaaagtagagactgggtcttttttcccctttctacttcattatatatacacctaccctaatgtcttggggggattatggctcttttt

SEQ ID NO: 126647 - DNA, 321 bp, Glycine max
  unsure (1)..(321): unsure at all n locations
agcttgaaggtgtgtaacccaccattttatanttattgttgtgggangggggcgaaaaaaaaggccctccanagtgctttacatgggtataccaccaattgcttgcccttcaatggcgtatccgaggcaaggctcgaagtcggctatattgtggtggggaatttcatgtgtcacccccacggttagagagacatgtgcatgatcagcttgaggatgttggctttcaatgactacgggagcggagttatcgacatcctcactgggagtgtatgccacattgggtggtgtatagtggggaggcaaaccatatggtgggaaagc

SEQ ID NO: 126648 - DNA, 418 bp, Glycine max
cgttgcttatgcccgctacaatctcaaactatgatgtatgcgacttctataatagttatcttaaaaatcataggaagatttctggttagttcgtagtataaaaatcttttcacttgaagtattaggaaattaaactgatcaaattattttcacaagttcttctaaaaggccacttaatgcaaaagacaccaattttgtcttttttatcaattacaaaaaaagaaaaaacaaagaaatctcaatatatcatgtgactaactgcattccctttacttttctcttattcttgcttctagagtaggcacaatacttgaaaaagatactaagagagacatactcttatcctactgtagaagggattataatgctctttggtccagctcaaagtggtttcaacggcacgacttttactgatgag

SEQ ID NO: 126649 - DNA, 481 bp, Glycine max
  unsure (1)..(481): unsure at all n locations
agcacctgcggctgcagctgcttacgccatctagatgatgtctctatcttaaccttgtttaaactcacccaaagcggtatggttcaacattgttaccttcctcgccaaaatcgcctcccatacctatcaaaaggttgtcaccggaagagatagccattcgtcgtgattgagggccatgctttaattgtgatgagaagttaagttgagggcataaatgtccctccaagttcttcctcctcatcgccgatacagatgactaactagaaggtgatctctcttccgatatgctggtttcaatggaaccgcaacaggctcagataagcatacatgccctgtctggtcatttggcgcctgagaccttacgattgttgggacgtatcgcggactagaccatggtgattctaattgatggaggaaatacacataattntatgcaggaccatctggtccgttcctcaagtctttctgccatactaacatc

SEQ ID NO: 126650 - DNA, 61 bp, Glycine max
ccaaaattgcttggttaaaacttgaaatgatgcttaatggcgaaaacaaaatagaatgggg

SEQ ID NO: 126651 - DNA, 305 bp, Glycine max
  unsure (1)..(305): unsure at all n locations
agcttgttngaaacaaaatatataccactgtttacaccacctctttttacacatggaactctcttgttttgggcctaccccaattntggtaagtcacaaaataaaaaccattatttaaacacccctcttttacacatgcaccttatctcgttttaggcctagccctttgtacacatgcaccatctttcattataggccttaccctcttgggcctagcccatttctggtaagtctgaaacaaataaatattgctagtctagttctctcaattacacatacacctacctttctttgggcctagacca

SEQ ID NO: 126652 - DNA, 430 bp, Glycine max
atctagccttagatgattatgcattagaaaagacttctgatgcaacatccgctacggaggcatgggataagctttaaatctctcacaaaggagaatgtcataccctaatttcgtccagggaccttcatttgctaacattttgattcttgctagccgaattgagctgcttaatgccagttgccgtgcaatccgtaaggttttcgacgttttaaaaaagaatggggaaaatactcaaaagggaggacaaaagggtcatttttacactttgtcagatccctagcttgcccaggctagcctctggctcgcctggaccaccaaaataacttcatggtgaagtaaccagctcacttgggcgagcaaggttgcttcagaatgaagtaatcgcacgcttgggtaagctgtcttcatcctaaatgccttggtttgctat

SEQ ID NO: 126653 - DNA, 493 bp, Glycine max
  unsure (1)..(493): unsure at all n locations
ctaagcttgcggattggtcttaccggcaaaggatcgaagtgggtctgataatatgcaatattggtcatcctgctttgatgaaaactggggcaagtgaagatggtgagaatgagggagaaacccatgcagtgactgccattcctatatggccaagtttcccaccaacccaacaatgtcattactcagccaataacaacccatctccttacccaccacccgattattcacaaagttcattcctgaatcaaaccacagaacccacctaccacacgaccaatgctaaacaccacttttagcacgaaccgaagcaccaaccaaaagggaattttgcagcaaaaagcctgtagaattcaccccaaattccggtgtcatatgctaaacttcctctcatatctactcgataattcaatggtagccataacccctgctaggttttctcaacctccattnttccgaggatacgacttgaatgcaacatgtgcatatcatggag

SEQ ID NO: 126654 - DNA, 490 bp, Glycine max
  unsure (1)..(490): unsure at all n locations
ttaagtcacctgcngcatgcaagctngcttagctcagcggatgccacaaccaaactcgcttggctcanggaagctcggcttatcgcgcgactatcaacaaaaaaaatttgattaagttacctgngcttagcgattcagcctcgcttagccacaggtaattcagcaaaaggatgagtgttcatcctcaaaagatgaactcgcttagcgcggtaagcgcgcttagcgagttcttcagagaaacacttacatacaatgagtattgatgaaatcgcttagcgtagcatgcttgcttagcgagttcatcacgttttccagaaaatgcagaaaacacggctcgttttcttgtacttttcaagcctctaaaaggcatatcagacatgcaatgtgtgcctcatactcaattcaatatacaagcatgtatagccctaatcttaaactaattctaacaaaacataaaaaccccaaaaatctaaagctacagttaaagtct

SEQ ID NO: 126655 - DNA, 462 bp, Glycine max
  unsure (1)..(462): unsure at all n locations
tctntgagaaaacttccttcagaagctagagcttagctacactcacccatctaaaaactaagctcacctccttgagaagctagagcttagcttcacacacccctctaataactaaattcacctccttgagaagagaagctagagcttagctacacacccctataatagctaagctcacccccatgacaaaatacatgaaaatacaaaaaaaaaggtccatactacaaagactactgaaaattccttgaaatacaaggctaaaaccctatgctactagaatggacaaaatacaaggcccaaaagaagaagaaaaaacctattctaatatttacaaagaaaagtggacccaaccttggcccatgggctcaaaaatctaccctaaggttcatgagaaccctaaggccttctttatcagctctagcctaatcctcttggagcctcttgctcatggctctagtaact

SEQ ID NO: 126656 - DNA, 375 bp, Glycine max
  unsure (1)..(375): unsure at all n locations
ctttaaatctaacttcaggttcatgtccatgtgggcaaagcacccacagattgtgagaggttaatttctaatgtttggaagcaaccaatccaagtttcctcatgcaaatccttaagaaaaggctgaagaatgtcaagttagcccttaacaagtggaatgacattgcccttgggaaagtccatctacactcctctttagcacttcaaaaagtcgaggaaatccaaaatcgtatctagcaacaaggcttttctactaaccttggcaagttaaagtctaaagctctggttgagtggcatcaagctcttgcgtttgaggaatcttattagagagagaagtcattgtgtaaatggctcacccanagggatataaacatga

SEQ ID NO: 126657 - DNA, 382 bp, Glycine max
  unsure (1)..(382): unsure at all n locations
tctatttctttttgtactgcatccttcatttgtttgccgattttggtgcattgatgtgactcccttccaatttggaaagattcaatgtcttctataagtggtggtcgtcgatcttcaaaatttgatcaaggatcaagatcctccaaagtggtgataattgcatttatactggagattggtgcattttctttctatattgctatcgccatgttgtacaactcaactntgcaacttttcacatagcattcatgagcatcggcctaatcagccttgatagtgacaatttcccctatggaagagggaaacttcattgctaaatgaggtgtagaaataatggcttctagcttggtcaaagtaggtctgctgagtaggacattatgtg

SEQ ID NO: 126658 - DNA, 441 bp, Glycine max
  unsure (1)..(441): unsure at all n locations
agcttccatcaagtggtaattagagcacaagagcttcaagtaggtgctccttaaacctccattaattntttgctttaccttctcttccattgttgnttcttcattttttctccatgtatctcctcacatgtcttgtgctaaatgttgttaacatgagtctttatagtttccaccgattaaacttgctatagaagctagatntgattttctatggttcaaatttcttgttcttgttcttgaaccatgaattgtgttgagtctaggttcctttgagatttgtcttgttattttttgtggctgaaacctaaaccataaaattcttacaaaaatattaaagtataagaaaacctcaaaaatctagagtgacttgttcacctattgtagttttgtcatagaagtcatgtctagtcatgaaacttgtcacataagaattcttatgtt

SEQ ID NO: 126659 - DNA, 465 bp, Glycine max
ttacggacactatgaaactaagctttagccaatgtacttaccttgaattaattcctttgatagcccttttgagccttgtttccctttccttgttttgaagctcactacaagccttaagtgaaaaaccatgatattaccatatccttaaggaattttggagctttggaattgttttgggaataagtgtggggggtttttgtttcattggacaacttgttttgttggctatgcttcacgatgtattttgggccatacttgatgtacatggtatattggttaaatgttggacatgctgaatgaaatgttgtttctcataggctaaaaaaaaaaaaagataagcaataaagttgagtgaataagatcttaaatggcacaagaatgatgaaactcttggttctactcttcatgtataaattttatctttacttctttttattgtcttacttgttcttagtatgcacttat

SEQ ID NO: 126660 - DNA, 469 bp, Glycine max
  unsure (1)..(469): unsure at all n locations
agcttaaagtaattntaagctaanataatagtccaaataaatagccttacaattaaatattactataacttaattacccagccacttgaccgtcaacaaaccatgcacgccatttgtcacgtatgctcgtgttgaatgaattgatccaatattgtgtacccaggtgtggtacattcatatcaagatcagcactggcattaatcacccgcaaaggaattactagtttgatcagataaactttaactgcaacataattaatgttttagtgtatgtaattcgatcggttggaacaatgtcaaaagagaaatgacgtcaacaagctggctcaaaactaaaaaaataattagcagttcaaagttaataacttgatcgttgtaagctaatttatatattataagtattttataaaattaattgtgtttgaagtaactaataaagataaaacaacaaaagtaggtacgtttatatg

SEQ ID NO: 126661 - DNA, 449 bp, Glycine max
  unsure (1)..(449): unsure at all n locations
tgcgtattttaatactcagcgtggttttcactgtagnntatgagatgcaagaagttatctatttatgcccgtgcacactgtcaccatcaccaacacaacatgagcaacagcactatctagaagaaattgaaaaaatcccacaacaacaacttctaagattagcaaggccacacaaaccgaatccaaagtacacaaatgttggaatatttgcttgtgaaccttcaaagtttgaggaagcatcgaaaaaagaagtttggagaaaatccatggatgaggaaatcaaaatgatagacaaaaatcatacatgggagctcatgtccaaaccagaagaccaagagatcattggcttgaaatgggtttacaaaattaaatataatgaggatggaacaatccagaaacacaaagtacgacttgtcaccaaaggctattcacaactgccaggagttgat

SEQ ID NO: 126662 - DNA, 352 bp, Glycine max
atttgcacccccatttttactaaatatacccccttgctcttttttggtgattttttttcccgaacgttacgaaattttacgaaattcgtaacgatgcttgttttcttttcgtaatgttacaaaaccttacggattacgtaatcatcccttttttccttctggaacgttacggaactttacggattgcgcactaacacttccttttaatttccggcatgtcacggaacttcacggattgtgctacaatgccttcttttgacttccggcatgtcacggaacttcacgaattgcctaacgatgggtgccaagtacctcgaactggtcaaacaagagtcgcattccaacaacggat

SEQ ID NO: 126663 - DNA, 441 bp, Glycine max
  unsure (1)..(441): unsure at all n locations
ctggagctgaggacctatataatagcaccaggggtntagtttattgaggctctttcgaagaggagaataattctagggttttagaattccagtttttactgttcacgtagaataaaatttgttttctacaatttcgtttctgcttcaatctacaatttcgttttctactgattaatggaagactaactctccaatgttgttttcacttgaggatcaagcacaactctctttgaggttttgttattactattgaattctgatcagtttttcctcttcaccaattactctgtatttgctgctattaatccatgcatgcttagtgcttgattaattatctctgcgcttaatttacgttcatacttaatgatcacgatcgttcatgactaattggtgtatgtgtggcttaatcacataatgacagctttatgttaatcttcactt

SEQ ID NO: 126664 - DNA, 447 bp, Glycine max
agcttctgttttcaatttcgagcgtctctattattccaggactcaatccggcatccgagtaaaacgttattgtcgtttgaatttgctaggagcttctgttttcaatttcgagcgtatcgatatattaggggactcaatcggacatccgagtaaaaagttattgtcgtttgaatttgatattggattccgttttcaatttcgagcatgtcgatatattacaagacataatcggagtaccgagtaagaagttattgttgtttgcaataggtacgagcttccgttttcaattttgagtatctcgatatattacgggaatcaatcggacatccgagaaagaagttattgttgtttgcattgtgttcgagcttccgttttcaatttcgagcgtttcgatatatctcgggactcagttggacatccgagtaaaatgttattgccgtttgaatt

SEQ ID NO: 126665 - DNA, 444 bp, Glycine max
  unsure (1)..(444): unsure at all n locations
tacggacctatgaaactcagcttctatataagctgaaccatttatcaataaacacaagttgagttntattcagaaaattagagtttatctcttttatcttagtgagagtgattctcctaaattcttgagtgattcaagaacaccctggctgtatcaaaggactttcacaacctttgtgtgttgccctcgctggaaagagtgattctttccttcctatcatctccacccttgttctttcaaaccacaattccagaaaatccacctctgcccaaaattatcttgtgaccataactcccattttacacactcaaattaagtgattcttgagcctaaattgaatttcaaaacgagacctttcacctcgttttggaatcacctcatttggagccctgtagcttccgttattgccatttctatatttctgtccagccaccacttaaccta

SEQ ID NO: 126666 - DNA, 462 bp, Glycine max
  unsure (1)..(462): unsure at all n locations
agctnggttcccaatgctatgatcatactctcttaaattctaaaagggaatctaggatctctatcatacattatgctagatggcacaccatgtaatataaaaatctcactaacatacagggagctcaacttctctaaggaaaacctaatattaatgaggatagaatgagcagatttggttagtatggcaataataacctatataaaattgagacctctggaggtcctaagtagtcctacaacgaaatccatagagatattgtcctacttccactgaggtatctctaagggttgcaacttacctaagggtctctgatgtnttatcttatccttttgacagactaaacatgcatacacaaactcactaacctctctctgtatttgtggcaaccaaaacatcatcttgagatcctaatacatcttggtagcaccaggatggatgctcaagtttctcttatgcact

SEQ ID NO: 126667 - DNA, 438 bp, Glycine max
agcttgaataaacaaacatttaatattatcattttggttagagagagagagtaatctgaatctgaaaaattaatactgttatgaattattggcagaaacataaaaagtgccaataaactcacgaggattcttattttcagtgcgtatttagccaaggattcataagctatatcaaaatttattggagttaagatgtcattttcatgactttaaaagaatacatgaaaatgattgactctccggctttttttcttttttcttttcaacaattagtagtattatgtatatataataactcaacccattgcttaaaaataaaagctcaacccaaacatccattccgatatttgtcggcagctgacctggtaggcagatggtatattaatatgtatatactattaagctctttattaattttataccttagcctcacatacc

SEQ ID NO: 126668 - DNA, 476 bp, Glycine max
  unsure (1)..(476): unsure at all n locations
tatccatntctcaacgtagtttcttatgaattgacgagttaattatagacaagttttgagatattttagaattagacaaaatatctgcttattttttccttataatgactttcttacaaaagtatacagtgtaatatttttgaaccttaatggatgtaatataagaagggtatcacactgtcagtgtaatattttttaaataattaggagatgtttgtatagagataaaaagcaaaaatattttgtttaatttgacaaaatctcacgagatatcaatataatttcatctatttgtattttttctatttatactaatcaaagacaggtaataaaggatatcaatatgattttctctaattaataaaacttttatttacttcaacaaatctatatgatcctgtgtgaatcttaaagtgtccatagatgacggggattaaaatgaagaatttcatgtttaataatgaatttaaattaaa

SEQ ID NO: 126669 - DNA, 486 bp, Glycine max
  unsure (1)..(486): unsure at all n locations
ttaagtcacctgcggcatgcaagcttggtggagttcaaagagaatcgtatattgttcgggctangatataagcctacacgcaccgacatgaagagaaacaccctagaaaggagaggcagaagtgtgggccagcagcaaggattgcaagtaaaaggaactcccttatgtcacatcaacaagagttttgtcagcgcacgctggatgtgtgaggggtgggttgccatgatccatgatgaagtccctcaagagcaatcaaactgggtgcggccatgccctcctatgttcgagttgggaaattggcaaattatcaaacaacccaaaatttttgtggcaaacataatggtaattgttaatccaaaccctatagctgagcctcggcttgtcttttgctattagatatatataaaatataatctgtcttcattntttcttgcactttcatccctanttgggcttgtcttttgctattagatatatataaaatat

SEQ ID NO: 126670 - DNA, 424 bp, Glycine max
tccttaagaagattcgtaaagaagctagagcttagctactctatcctctctaatagctaagctcacctccttgagatgagaagctagagcttagctacacaccccctataatagctaagctcacccccatgacaaaaaacatgaaaataaaaaaaagtccttattacagagacaactcagaatgccccgaaatacaaggctaaaaccctatactactagaatggccaaaatacaaggccttgacgaaggaaaaacctattctaatatttacaaagataagcgggctcatacttagcccatgggctcgaaatctaccctaaggctcatgagaaccctaggggctttccttggatctctagcccaatctacttggagtcttctaaccaatgcccttgtggggtagggatgcatctgatgagaatca

SEQ ID NO: 126671 - DNA, 451 bp, Glycine max
  unsure (1)..(451): unsure at all n locations
agctngacttanataccatgtttgtctattntttttcatttgcaaaatgaaattgcagtgtgggattgtttgattctcatgcttgtaaagggaaagagtggaaggccatcttaaaagaatggttaaatttgttgaagctgatgaataatcccaagtcattttactgtggccagtttcttaaggatgttctgcagcatacgttgatgtgcaattcaattatgtatcttatactgcaatgtttctttcacatggtcttctattttaaacatactnttttttcctttctgtttntgggtatttggcaggcttttagaagaaaatgatactgaaatacagatgagagttttggattgcctgttaatctggaaggatgattatantttaccatatgttgaacatttaagacacttgattagttcaaaaacattaatggaggaactgacaacatgga

SEQ ID NO: 126672 - DNA, 470 bp, Glycine max
  unsure (1)..(470): unsure at all n locations
agctttcacacaaggcttgatatcatctctcagctacgggtgttctcaaaaagaacatcttataccccggcatcaacacaactacatccttctaaaaatactaacagatgaaacctctaagataggggttggctgaaaaacaacgacaaaaaatcatgcataaaacctcatcaaagaagaaagggagatacatatgagaaatgaaaacatgcaaaggttcatcgaaatgaaactcgtgcaaaaacaaggatgatgaactttttaaatgcaacaatgaaactttaacaaacctttcaacatccatgttataaccaaagaaagatggaaaaacatattttgatcaagggtaaggtctaagaaagacatcaccacttttggaaaaacaaaaggtcaaagggacaagcttttgcttttaagaacaactntgaaaccaatttcatagttgagaaaacgaaatctcanaactatag

SEQ ID NO: 126673 - DNA, 387 bp, Glycine max
  unsure (1)..(387): unsure at all n locations
tagcgacagttgcaggtattttgatatgtagaactcgctaagtggtccatctgcgtgctaagccaagccctntttatgctaaaaaaaaatatattttggaatttcaaacgtgggctaagcgcgcagtttcgctaagcgacccgctttgagaaaccaaacgtctctctagctcgcttagcgctgcggttcgctaagcgagagggtcaaaaattgtttaagtgagtgtaacatcagttacactcacatttgcctacaattttcagaattgcctgcatcttctctctcgcactcatcttcctgcattttcactntcttctacatcttcacgcatcaccagctaacaaggatcccaagaagttccctatttcttttttctcttctattcca

SEQ ID NO: 126674 - DNA, 472 bp, Glycine max
  unsure (1)..(472): unsure at all n locations
agcttctcagctcacgccggngactccttgaactcatcacccatacaagctagggcgcctgcacccatccagagggataccccccaagctacggctccaacctcgactcgcccggcaggcaatgcccactttggcgccggttctaatgcgataagaaactttcccccgaggccaacattcacctcgatcccaatgacgtatgaagacctcttgccatccctcgttgccaaccagatggctgtgatatctcctggaaggatctaccagcctcctctctgaaagtggtataaccctgacgcaacctgcgcataccatgggaaaaccccgggccactccaccgaatagtgcctggcctttaaacacaaggtccaaagtttgatagaagccagatggctgacgtttcaagaggaccgatccaacgtaaaaacaaacccgcttgccaatcatggaggaggagcggttaatgtcgtca

SEQ ID NO: 126675 - DNA, 463 bp, Glycine max
  unsure (1)..(463): unsure at all n locations
tctgtgccatatagattacttaaagttggtcatttcttaacaacaaactgtggaaattcttaagaaatatctgcaatgttgatgaatatcaataagtataaagtaagttacatgatggatctccatctaaattatcctactggattataacatataaattaatcatttaagatgaaacaaatttaaaaagttgccatggaaaaaatgagtaggattaacaagtctgaactaaagtagacacattaaataaacatatagacaaaaatattaagccatatactatctacacacaattggattggaaggttttcaataatagtagttttctttccttgatttcttcttgagtttttctattgatgcagatcaacacatgcagatgaacattcangttattaaaaaatattgtggatattcngataaaatcagatgtagagtgaaacatattccttcaaatacaact

SEQ ID NO: 126676 - DNA, 427 bp, Glycine max
  unsure (1)..(427): unsure at all n locations
gctatataacaatagagaattctcggtgacactttctataacacattntactgaactcattattattgagtaaaatttattaaaaattacaaaattttataattgtataggtataatttcctatttgagctccacttataattntacaatttctgataaattttaattaaaaaataaacagtgtgttaaaaaaagttcgtaaagagtggcttactgatacttgtgtcctctcaatataataagttgtaacatggacatgtgacaccttgttatgggagtggtttctcaatatatggtctctcattgtaaatgagatctatgtttttcgtattcaactattcattgttaaatagaattgtctagactaacgtggaccgctaacatggcacaacaggtttagtgctatattggttaatttaaaaattga

SEQ ID NO: 126677 - DNA, 399 bp, Glycine max
tactcagcttatatacacgttaatatataaaaatatatcacattggtttatttatctatttgagtcctataatttcatcatttttactttctagttcttataatgttgaagtgactttttagtccctataagttggttacatcttaattctcttctagtcctataatttgaaaataatgcctttattttttataattgatatcttaattctctattagtccttataatttgaaagtagcttttctagctcatatacttgatatgctaatttccttttagtccttatcgagtaatattagccatcatagttaactacaacaaagatattagtaaatcatgtggaactaatttattgaagataatttgtagtaacaaaataattgataatttataactaat

SEQ ID NO: 126678 - DNA, 426 bp, Glycine max
gctttgaaaaaagacacgtgttctatattgctactcataccaataagtcttagaatatgtagcaaactattgcataagatatgataagtaaaattttaaggaactgtaaattgccatatgcacactgcaaacattagctgagaatttgatgtgaaacccatgtgataggctcaatcacactgggaacagatagaagttctctctaacatttgcatacaaaagtcattttaataagccatagtccatagacaacgatttatacttacgccatatcaatgacacgttccttctcttgaggagccaaagccataacaggcagaaaagagcttgcactttgcagctacaaacagttaaagaactagttgtaagtgcatcatacaatattaaatgaaatgcaatagtaaaaagcccgcctaccatgtagaa

SEQ ID NO: 126679 - DNA, 469 bp, Glycine max
  unsure (1)..(469): unsure at all n locations
ctggctgagttctccaattggcttggtattgagcctgagatagagttctgatgcaagtacaggttctgcaactcactgcaattgccaatttcttctggaatggggcctgacaataaagttgtgtatatggctatggtcttgatatttttcagcattttgattgaataaggaaggcttcctgaaatgctggtttctgcaaggcctagcatgaccaagttggtgcagcttccaatctcccatgggatctcacccttgagattcttgtttccacctgctctgaagacttggagctttcttaaggagccaatgctctttggaatttcaccactgaggtggttgtcatagagtgtcaagttcacaaggcttgttatattgccaatgttggaaggaatgttgccttggaggacagttgtatggagagacaaactctgcagtttccttaggctgcanatttcttctgggatttcac

SEQ ID NO: 126680 - DNA, 348 bp, Glycine max
agcttcaacctataggagacggacctttctctgtgttggagaagatcaacgacaatgcgtacaagattgacttgcctagtgagtataatgtaagtgccactttcaatgtgtctgatctatctctttttgatgcagatggaggagccttggatttgaggacaaatccttttcaaaaaagagggagtgatgatgacataaccaagggcaaggaccatgaaccacttgaaggtcccatgaccagaggcagacttaaacaagcccaacacgtcatagagacaaggctggtcatttgtatagctgtcattgatgatgattgaaagcccaagtggagaaagatgagggcccgtc

SEQ ID NO: 126681 - DNA, 429 bp, Glycine max
  unsure (1)..(429): unsure at all n locations
tgtagaaggagagcaactngatgttctatgcttcttgtgtgtggcattccatgacgaatctccttggaaaagacatctttaaattcctgcaataagggttgaacactaggagaaacataaatagttaactgattagaattatcactctctctcttttgtgtatcactcttttcctcgggtgtatcactcttctttttcatattcctttgtggagcctcactattttctttctctcggtctctcttttctctcattctgattagggcatcacatgcttctctaggggatagaggtttaagagtaaacgacgaagatttgactattcgtctgtagggctcttctatgtacggttcaacaaacgttgcatttgtatagtccacgcgtccagaaataagcgctgagaatcgacaggtgatgatatacaccacc

SEQ ID NO: 126682 - DNA, 389 bp, Glycine max
  unsure (1)..(389): unsure at all n locations
gcgntgaaaaagcataacaaaactttntgtgattggtttaaagatacaatctttgcagatgagaatgctttagaaacattataaaactagcagagggcctaaagaaatgtataacctgacaaggatacgacatanacaggtattcattntacacaaaagcacaagatgacaaaagtgcaatgcaaaacagtggggtcaccctaagggctgaatctcaacactttgcaagtgtcaatgacgcccatccctgtggagcttccatcccttactttgggttcattgatgagatctgggagcttgattatgtgagatttacagtctgtgttttcaaatgtaagtgggttgacagcaacaccggtgtgcgcaccgatgatatangaattacccta

SEQ ID NO: 126683 - DNA, 372 bp, Glycine max
gagagccagaaatgaagaaccaatggctgatacctggacggagatgaaaaagatcatgaggaagcggtatgtgccggctaattactcaagggacttgaaattcaagctccaaaactaacccaaggcaacaagggggttgaggagtatttcaaggaaatggatgtgctcatgattcaagcaaatattgaagaagatgaggaggtaactatggctcgatttcttaatggtttgactaatgatatccgtgatattgttgagttgcaggagtttgttgaaatggatgaattgcttcacaaagcaatccaagtggagcaacaattaaaaaggaacggagtggctaagagggagtttaccaactttggttcttctagt

SEQ ID NO: 126684 - DNA, 379 bp, Glycine max
tctcgatatattatgcacctgaatcagacttccgtttgtttatgttatgaccatttgaatgtctcgacagattccgttgttcaatttcgagcgtctcgggatattatgcgccagaatcggacttccgtgtgacaagttacgaccatttgaatttctcgagagcttccgtggttcattttcaagcgtctagatttattatgcgccttgagcaaacttccgtgggataagctatgaccatttgaatttctcgagagcttacattgtttaaactcaagcttctcgatatattatgcacctgaatcagacttgcgatggaaaagatatgaccatttgaatttctcgagagcttctggagttcaatttaagcagctcgatatat

SEQ ID NO: 126685 - DNA, 470 bp, Glycine max
  unsure (1)..(470): unsure at all n locations
agcttagtatcttgtatcatgtgcggatattatattcacattntacaatntataagaataaatttttttatattattttgatgaatttatatgaatatttaaatactctttctggactaagtaaaaaagtaatcttgtatgttgaacttaaatataagcaaatctaattaaatttatcttctttaatggtatcattcctaaaaatctcttcatttaattctaattttattttcaatgactcctttntattcacgatagcaagttccaataaaagacattttagaaaaaaagttatttcttacgtgagattaattaatatgaaattatttatttttgtttatatatgagtccagaaagagtccatttttatatacatacatactccataaagtttttattattaagagtattgtcctaggtaggatctcctttaatgatatcttgcatactcactctntactttcttctga

SEQ ID NO: 126686 - DNA, 426 bp, Glycine max
  unsure (1)..(426): unsure at all n locations
cgcatntggaattgcgaaagccccactccatcattatgattattacctgacatctcaaacaaacaaatcaaacgtaacaagacaattatagttgctgtttgaatacctcacccactcaagtgtatcacacaatgatggcttttctctaatgaaacactctttccttttaccactctaattccccttgagttcttaggcaattcaagagattatggccacaacagagaacaattcaccaatatgtgtaaggtaaggctagagagacaaggaaaaggttaaccaagaaaaggctaacaatgtttntaggcacaaatgaaggaaataaaattcagaatctaggaattcaagtaacaaatcctccatgctacccaatatataccttaaagagatttttttaaagtcttcagcatgaaccatcacccaatt

SEQ ID NO: 126687 - DNA, 432 bp, Glycine max
  unsure (1)..(432): unsure at all n locations
agcttcatgatgattcaagattgattcattgagtnttgatgataacaaagatgatgacaaaaagctcaaaagtcaagattacttcatgataaccaagatgatgaccttccagaatgagttccagattgagtcaagaacacttcaaggatcaagaggaaatttgatttccagaatcaagaatcacgattcaagattcaagactcacagattcaagaatcaagagaagacttaatcaagataagtattaaaaagtttttcaaaacattgagtaacacagaaagttttcacaaaatcattaccaaagagttttactctctggtaatcgattaccagattatagtaatcgattaccagtggttttaaaacattaagaatttcaaaattcaaaatgaagagtcacatatgttgatgtgtaatcgattacacctttat

SEQ ID NO: 126688 - DNA, 459 bp, Glycine max
  unsure (1)..(459): unsure at all n locations
ctcagctaaacaatgagtgcanatcttatgtagtagattagagtattatttgaaccagtaaaatctttattggttaatcttaaccttaaaatattaaccacatcaaatccattttctataatatccataaatattatattctgtttaaatattgaacctaaatattatatatactgtaacaccctgaaatttcgttgattgtaaatcaatgtttaaatgtatttctcgtgttatttgattatgcgaatgatttggatgagttgaggtattgtgtgaattaaccatgtgtgatttacatgatgtgaatgttgagttatgtagagctttattgacttaagtctaaattatgagatttcgagatttacctaaatctgttccggtaaaatcacaatcccagacttgttaaccattggatcaccttccaattcggactgtagcttcataactcatgtcttcaca

SEQ ID NO: 126689 - DNA, 432 bp, Glycine max
  unsure (1)..(432): unsure at all n locations
agctttgagcanatcanacgacaataactttttactcggatgtctggatgagtcccgtaatatatcgagacgctcgaaattgaatgttgaaactctgagccaattcaaacgacaataactttttactcggatgtccgattgaatgacgtaatatatcgggacgctcgaaattgaatgttgaacctctgagccaattcanacgacaataactttttactcggatgtccgattgagtgacgtaatatatcgagacgctcgaaattgaatgttgaacctatgagccaattcaaacgacaataactttttactcggatgtctgattgagtcccgtaatatatcgagacgctcgaaattgaatggtgaacctatgagccaattcaaacgacaataactttttactcggatgtctgatngagtcccgtaatatatcga

SEQ ID NO: 126690 - DNA, 431 bp, Glycine max
  unsure (1)..(431): unsure at all n locations
taaacattcaactntgagcgtctcgatatattacgggactctatctacatccgagtaaaaatctattgccgtttgaattggctcacaggttcaaaattcaatttcgagcgtctcgatattttacgggactcaatcagacatccgagtaaaaagttattgccgcttgaattggctcatagcttcaacattcaattttgagcgcgtcgatatattatgggactccatcgaacatgcgagtaaaaagttattatcgtttgaattggctcagagcttaaacattcaatttcgagcgtctcgatatattactggactcaatcaaacatacgagaaagaagttatcgtcgcttgaatttgctctgaggttcaacattcaatttctagcgtctcgatatattactggactcagtcggacgttcgagtagaaagtattg

SEQ ID NO: 126691 - DNA, 438 bp, Glycine max
  unsure (1)..(438): unsure at all n locations
agctttnggcattatcaattgcttctgatttatcattgngcagngtttgttgctgtatgaattgatcagggtcacattggacaattgcaggtgtgggcaagtttggctggacttcttcctctgtcagacctatcattatacatgtgagatgtttttatagctataagaattctttgttttagtgaatctcacatcttttcttgaggattgaaatggaagcctaaagtttctctggtcaaaatgaaactaagtaaaaattactaaaaattcatgaattttgagcacatactttttgttgcagtgtttagttactggcactttgttgcttctacaatcgcttttgcttcctcttgattgaattttccatcatcctcaatccctagtttctccttggcaagagacactggaaagtcttcttgttcctctgtatcattagtg

SEQ ID NO: 126692 - DNA, 445 bp, Glycine max
  unsure (1)..(445): unsure at all n locations
cggagaggatgcttcaatgaagggaaagaaagagggagtattatagagaggggggagcacgaaattgaaggaagaaaaagggagagaagttgaactttgagttgtctcacaagactctcattcatcaaaggtacaacaagtgttacacatgcttctatntatagactacgtagcttccttgagaagctttcttgagaaaacttccttaagaagattttttgagaaaacttctttgagaagctagagcttagctgcacacacccctctcataactaagctcacctctntgagaagcttccttaagaagattcctaaagaagctagagcttagctacacatacctctctaatagctaagctcacctccttgagatgagaagctagagcttagctacaccccccctataatagctaagctcatccncatgacanaatacatgagaata

SEQ ID NO: 126693 - DNA, 370 bp, Glycine max
  unsure (1)..(370): unsure at all n locations
ggtgaggcctccgcaacccaagagcctatgccagaggaggacaagcccatccctcctaaaccattcatttaagagacagtcgcaaagattgctcatgangangcaacatcaccagagcttgttcctcagtctcacccatcaccagctccagtccttgaagacccagagtcatctacactagcaccagtgcctgaccagcctgttgctcaagaccctccaattgcaccggtgttggatctgaacgagcatgcagaggatcatttgaaggatgattcatatgatctttattttcttgcattntgaacaagtttattatcactttgtctttagtacattttatgtttatgttntcaattttaatttccagttc

SEQ ID NO: 126694 - DNA, 487 bp, Glycine max
  unsure (1)..(487): unsure at all n locations
tctaaactntatacaagaatgaagctctgataccacttgtttaacaagtggcctcagatatcttaagaagggggggttgaattaagatattacaaactatttccccaattaaaattctatttcactttctattcaagttacaaattcccttaacaatgaacttcttaaataatgattcaaatagaacaatctgaatataaatataaaacaataataaataaaagagtttaagggaagagaaagtgcaaactcggatttatactggttcggccacacccttgtgcctacgtccagtccccaagcaacccgcttgagagttccactatcttgtaaaatccttttacaagttctgaacacaaaaggacaacccttccttggtgttcagaattcttttacaacaagagaccctcggtctcttaatcccttagagaattagaaagaagagaagaatgaatctctcttgaaagagatagattttacaatctgg

SEQ ID NO: 126695 - DNA, 373 bp, Glycine max
  unsure (1)..(373): unsure at all n locations
agcttgctntggatggacttctctccatgtataatttgtttangtngaacgtgtnttccaattgctgagaatctttctgtgtttgttatgcattaaggtttgaaaattgagaaaaagaaaaaaaaaaaagagattagctcagaattcaaactatgtgtctctttaagttgacaccattgaaaaacagtacatgtgtgaggataggaaccccattttggaattggataaaaaatggtatatgaacatgttttcgttcaagcaacccgcagtcccaaataatcaatctatcccaaacaagcataaggttttggcctttgggtgcaatgatatgcccggaggaggacaaaggttggaactctggagtctgactata

SEQ ID NO: 126696 - DNA, 469 bp, Glycine max
  unsure (1)..(469): unsure at all n locations
tcacgcgttccatcatcttgatctgcaagcatgcgcacatgggctccaaggcattagcttgcaaaatgcagaatgaagactcaactgagcaggtgcctaagtgtgctggacaaccagtttctttggctacaaggcagcatttgaaaatgctaggcttctttattggctcgctcaagcgatatgaactttctgaaaactgcttgattgaaatggctgcattntgttttgtaaagggtgttccggaatgcagcaactgcaccagcactgggattatgccttctaatgccactctcttctgccactccaaatttgttgagacagtaaaacgacaaagagcttgaacagaattctctatgacttgttctttgtgtgagacatgcttatgttggtcggtaagacaagtcaaaatagttntaagtgccccagaatctataagccactgagtcatgtgagactcctgtggtagttt

SEQ ID NO: 126697 - DNA, 478 bp, Glycine max
tgcaagcttgcagaattggtcttcgccagtgaaaggatcaatgtgggtccgaaaagaggcaaatttgatcatcctactatgacgactgagaaaaactggggcaaataaagagggtgaggatgagggagaaacccatgctgtgactgccattcctgtacggccaaatttcccaccaacccaacaatatctttactcagccaataacaaactttctccttacccaccacccagttatccacaaaggccatccctaaatctaccacaaagtctgtctaccgcacttccaatgacgaacaccacctttagcacaaaccaaaaacaccaaccaagaagtgaattttgcagcgagaaagcctgtagaattcaccccaattccagtgtcctatgctgacttgctcccatatctacttgataattcaatggtagccataaccctagccaaggttcatcaacctccatttctccgagaatacaactc

SEQ ID NO: 126698 - DNA, 430 bp, Glycine max
  unsure (1)..(430): unsure at all n locations
tagttccacanaatcatgcgcanatgtcatgaggcatnttatcaacacttggtgggcacatgtttaagcatganaatcaagggaatggngacaatgtggcatgccccattacctcagaatgcaccatangcctanggccatcccctacaacccctcaattcataaaaaacaagcaacaatccaaggataaatccctcacgtttttgagcaaatacatgcaanttagagcaccaaaatacatcattggaaagctaaagagcccaagaatgaggtacttacttgttggagatgaataatagagcaaaacggaatcaaaaacgtgaaaaatggttacctaagggctgcaaaatccatgagtcccgtgagctcttggttnnttgaatgaggggggagagtttttggtgcnnnaaccttccccctcccccttttt

SEQ ID NO: 126699 - DNA, 456 bp, Glycine max
  unsure (1)..(456): unsure at all n locations
agcttcaagaataatggcctcaacaaacttcttattcctataaggaaattcaataaataggcctcctatttttaatggagagggttactgtagaagcaaagcttcatggtgaatcaagagtgattcaaagatgttttgatgataacaatgatgataaccaaagatgatgacaaagttgatgacaaanagctcaaagggtaatcaaagaatgagttcaagatattcaagatagaatcaagaacacttcaagattcaagaggaaagttgaattcaagaatcaagaatcaagattcaagagatcaagattcaagactcatgattcaagaatcaagagaaggcttaatcaagacaagtatgaaaaggttttctcaaaaattgagtagcacatggtttttctcacaacatgtttaccacagagnttttactctttgtgttatcgataccagtagcanaatg

SEQ ID NO: 126700 - DNA, 418 bp, Glycine max
  unsure (1)..(418): unsure at all n locations
ngagaggattgatggngacccggtgttgagagaaacgangatattggctacgtgggagtacgtgagctcagctggaggtgggcaacaggggatggtgggtttatgcgcacattgtggatgtggaaaacttgttgtgcaccatcgcccgaccgccacctagtaccacatgtgatgggtaccccataatcctacaagcttgcgatgaggaagtgtcgaaaggagaaacttcctgcccttattgttgaccacatagaggtacctggagatatgtctcgggggtcaggagaccttgtggacgtcaagtggggtgctattgtccaaaaacaagcttgaccaataccgacccattttgggcatagtcgatcagagagaacctgtgatgtacctaatcaggcgagctcctggcagtctacagata

SEQ ID NO: 126701 - DNA, 448 bp, Glycine max
agcttagacacacacacacacattttttttggtttcgaacaaaacgtcgtaaagtaagtacgacagagaaccaacaaacggtaaatcgcgacacgtaacaaaataacacgacgaacagtaacacctaaacgcaacgtcaaagcgactgaaagcagtaattacagggacaacttgaaagtaaagtcagcacataataacaatgaaagtagtaacgtgaataacaataaatgaaaatagataataatggaaaagaaatcacgagtccggtgatcctgatctcatggatctgcctcctcccaagaagtcaaataggtcagccatatcttcatcttcttgggcttcgtcctcagctccgggggcccctgcgggtcctgcccccgtctgagcatcaagccagtctgcaggccatgcgatcgtagctccgaactgctctggggtagggcatata

SEQ ID NO: 126702 - DNA, 187 bp, Glycine max
gggttcgaggtacttacccgttgaagatcgaagaactattattatcgaatgaagaacgtctaaaaacgggtgaaatctttgcgatattcctcacggaaaacgttactgaaacgcttttgaagcgccttggcttagattttcttcacggaaacaagtttttctagcaatattgtaagagagagaagtg

SEQ ID NO: 126703 - DNA, 466 bp, Glycine max
  unsure (1)..(466): unsure at all n locations
agcttgtatactgaatagagtatggcgcacacattgcaagtctaatatgccatttagaggcttgaaaagtgcgagaaaatgagttgtgttttctgcgttttctggaaaacgcgatgaactcgctaaacgcgcttaccgcgctaagcgagttcattntttgaggatgaacactcatcctctcgttgaactacctatggctaagcgaggctgaatcgctaagcccaagtaacttaaatcaatttttttgttgatggccgcgcgctaagccaagctttcctgggccaagcgcgattggttgcggcatcctctgagctaagtgagcttcgccaacacttagtagaatttttgaagagttgttgccgctaagcgcaaccttcaaggagcttagtgcaaatccttgtagcacatgttgtgacatcctagaatntctacccgngaatttgtagcgttacatttaattctactt

SEQ ID NO: 126704 - DNA, 417 bp, Glycine max
  unsure (1)..(417): unsure at all n locations
gaccttataatactcagcttctgatgggcctanatgggcccgatgctgaaaggctcttctctaattggtcagatcaccctcattttgagtgttttgctcatatactgttgaaacgtcacacaatcttacagattgcgtgacaattggctttaagcaattcaatgtgaccagcgaacattcacatgtcgacaaacaattgtccccgaacgaaattaaggtatgacacatggtatgaagtgtgccatcttagagaacctgtccaccaccacaaagatggaatccttggcattccttgtctgatgaaatcctacaacaaagtccaaagacaagtcatatccatggaaactctggaatacgcaaaggagaataaagcccatgagacattaccttatacttcttacaaacaattcattgttc

SEQ ID NO: 126705 - DNA, 297 bp, Glycine max
gccactgcactacgtaattcaatatcatgctccacaagatcgagctggagaaatatgtcgcgggtaaatgagtgacccttgatcgagaccccaacctggagggacacggtatcacactgacaggtatagccattgcctaccattacttttacggcggcggttgcggcctatgttcttgcgaggaatccggctacgcccgaggggatgacattgtgggtgctaccgccgttgtcgaggatgaccacctgacagcgccaacatttccgcagaccaaatgctcgtggcgtaagagtgcct

SEQ ID NO: 126706 - DNA, 402 bp, Glycine max
acttgatgccttggtcaacctagtaactcatgtttgccatgaatcacaaatctgcacctgtagcaagagtctgaggtctatgttcttctgcagatcaccatacagatctctgtccttctttacaggaatctggagtcaatgagcaacctaatgcttatgctgcaaacatttataagatacctcctcagtagctaaaccaacaacagtagaataattatgacctttcaagccacatatacaatccaggttggaggaatcatccaaatctgagatggacaagtactccacaacaacaacagtctgtccctcctttcgagaatgctgctggtgcaagcaagccatatgttcctcctctaatgcagcaacagcagctgcagtcgcaacgtagataacaagcaactg

SEQ ID NO: 126707 - DNA, 376 bp, Glycine max
  unsure (1)..(376): unsure at all n locations
agcttgtctatattcagcgacatttgctttttgctcgttggaccattgagatccatcatataggcagaggggtgcgagagaaaatataagctctgaccagaatgtaaacacgatagcaatttgcccggacgccctgctgtgtgtgcanataatgccagacggctccactgctgatgtgtatgcgatggtaaaatcaaacgacggcatcgtgcgtgacagaggctgcaatgaagccagtcgtaggtctaaacactcctttgtgggcactcgctgccttggagaaatgctaactagagtaggccttgaggatagtgcctgaacaagcaactttctagagcgagacacgcgatattgaaagcaggagctctatccgcac

SEQ ID NO: 126708 - DNA, 337 bp, Glycine max
  unsure (1)..(337): unsure at all n locations
gctattacgtgacctatgaaactcagcttgcacnagtcgaattgcgatagtcggactctgtcttttattgcgtgccctaacataatgattgcggcacataacacatcttgacgcgctggcatgctctctgcgtcttctggtacatacactgcggggcgacttttgacactgatcctccactgaagcccgaaacctatccgacattctctagatggtaggcgcatactatatggaaaatcgctcttccctatccgtgcacgttcctttcaataatctagaagaggcacacgatatctggagcacatgctaaccgcttaactatcggcacggttgaaca

SEQ ID NO: 126709 - DNA, 430 bp, Glycine max
tagcttggaggcttacattgcacagtggtttatttgtgcaatacagttgctgcttgggttttgaagagctttgtatttcgtatcaaataataatactccccttccctgcttgcttggattcaattaaggttgcatccgatatgccagttttggtgaaggagcttccatggaagaaggagcaagcataaaaccgaaaatcagtatggttcatgcaagcagaaagcgaaaatcaatagggttcaaacacaaaggtctaggattcaaagcagacaacgaaggagcaagcacaaaggtctagggttcaaagcagcgcaatctctaaagctagcagatacgtgcacacccgtgaggcagatttccttatttgttttacgactacgacggctcttttctaaaaaccggcttagattgtatataacataacattcta

SEQ ID NO: 126710 - DNA, 407 bp, Glycine max
  unsure (1)..(407): unsure at all n locations
acgcactctgtccagagggttaaatatttttaaaaaaactcaatttatctttcctatggttntcattagacatttttcaaaactaagcaaaaaaaataaaagctgatttcatgtaactttcatcgattcatgtcacatttatcaagctttcattcttcctttatttttttcctctcacttttccttctattcatacacttaacattgtaactctatccatttataacttttgtgtgatttattttccgaataactcttgttgtgggtttttattttgacgtttgacaactctacccatatgtaaagaaataacacaaaattactggcccttttgtcccaaaattatttacaacggtgaagagaatctccatattgtcatatgtctaaaagaatttaaaagaaactgg

SEQ ID NO: 126711 - DNA, 466 bp, Glycine max
  unsure (1)..(466): unsure at all n locations
agctngntcttgaattttcctcagttctttaacaagctttgaacaatatacttgtccttcatttaattgtctttgggcttggcgaccacgctcaacaaagtacttttgacacctactgtacgttgatttcaccaatgctgttatgggaatgttgcgacaatcctttaaaaccttatngatacattatgagaaggtggttgtcatgtggtcatatcgacgtccttctctatcataagccatcgtccatttttcctttgaaatgcgatcaatccatgttgctatggctggactcagttgacgaaatttttctaaattttgataaaaaatgtgcttgcaaggagtgtaggctgcataaaagtagttatgaataacaattttaagtatatatganagttaaataaacgtgaccatcaaatatgaaatcttacccaatttcttcaacatttctttttgtatggcattattg

SEQ ID NO: 126712 - DNA, 473 bp, Glycine max
  unsure (1)..(473): unsure at all n locations
cttctcatctcaaggaggtgagcttagctattacatatgtgtgtgtagctgagctctagcttctttaggaatcttcttaaggaagcttctcaaggaggtgagattagttatgagaggggtgtgtgtagctaagctctagcttctcaaggaagttntctcaaagaagcttctcaaggaagttttctcaagaaagcttctcaaggaagctacctagtctataaatagaagcatgtgtaacacttgttgtaactttgatgaatgagagtcttgtgagacatacttcaaagttccacttctctccctcttttattccttcaatttcgtgctcccccctatctctttctctccctctttcttttcctccattgaagcatccttccaagcttcttatccaaagctcatcttggtggngaagctccttcttgcatggcttattccctagtggatggcacctactctcaccgcttcttctt

SEQ ID NO: 126713 - DNA, 458 bp, Glycine max
  unsure (1)..(458): unsure at all n locations
agcttgcttatgatagtaagaaagctactgttatccaaaggaaaccgttccttttgctttgcattgccatgttactatccttataccgttcaagaaaaccagacttaggtattgcactgttgaaagactattgcataagtttaagacttaagagatggtttgtcttgcatttggatgcgtgtaanttgtcttaactagcatctccacgagacaatattgcttcaacactatggattccgtgagcctttacacttagcaatcacaactgtgtccatgcaatccaatgagagtgaaaagacagatgcattagcattaacaaagtccacatttctcgggttgtgttatatgctgtgatgtgtgaacatattgatccttttatttaattatttcttgtttgggctacccatgagctaatgtgccaaaccagcagcaaaattagattcgtgaattatttaaca

SEQ ID NO: 126714 - DNA, 475 bp, Glycine max
  unsure (1)..(475): unsure at all n locations
ngtaacgganaatgtntgtgttgaggaaaatatcaactgctgttaccaaacaactgcagagccattttgtatttgtgatgatagcttgtccgaggaaccaaaactcggtaatgtgtaaattactgttcttgaaagcaagaatatttatacttttgcaaaaaagtacgttttaccggaaatgtctagaatttggccaagcagtatgtgctcaaggtttaatgtggtggtgacgaagctcgtatactaccgaaaaggtcttcaacattttatgagtcaaggttgttaccatgaagaaatagagtattttggcaccagctttttaagttttttcatgataaatattttatcaggagttttttgttaatagtcatacgcatgaacgtgcattttttttctcttctgaatatctccaaagggaaatttaaagtctaagaattataaatacttcaattgannatcttttattttcaaaatt

SEQ ID NO: 126715 - DNA, 398 bp, Glycine max
cgcatgaatagtcccatgtcaatggatatgggaattaactcatgacacgtccaaacagagatacaaccaggtccacttagctgaaagttcatatagaataattcaagaagagactcactagtgatcatcacattaatcactgatcaattttgaaagtaaaaaatcaacagggagacgttccaaaaactatcttgcttataaatcttacatggttggcaatggacacaatatgaaccccaacagagagtggagactatctattttaggcttaggcatgggataaatcccgctatggtttcatatccgatcccaagctcaggtaaagaagaagagtggtgttaatgcgtctgcaactaacataaaacttaccagttgtaattgttccgaaccgctcctga

SEQ ID NO: 126716 - DNA, 457 bp, Glycine max
tacgcgacacttagatactaagcttctcccacacgcgatgttcccatgcatagctgccagcattatgcgagtctgaagcattcacaaaacaataaagggttagcaaaaatatcattttttttaaaatgggaaaaacataggtagagttagtaacctgtttgtggcgatttaaaacatctgggttgagagatccatctaagagcttagacagaatctggaagaaagaaaagagaaatgttaaaaaaagaaaagggggggggggggggggttgttcttatgaacctgattaacctccatgaagcatttttacgagaataattcctcacaggggatattttccaatttgattatttttcattgtaccatttattagacttttaattatcgaaaactcattataaacttatcatttccttttatttaagccattctctaatttcaccaaattatttgcaat

SEQ ID NO: 126717 - DNA, 430 bp, Glycine max
  unsure (1)..(430): unsure at all n locations
attggctacatatggttatatcatattctaacctccttccctaaactataattcacttaacctcacacttgttaccaagtattaaaatgtctcaacatctttaatgatctcaaatatgtaggacatatgcaggtataagtgagctcacttgaagttgcattaatgtaggtttttatgcctccaccttcatttttccaactaccattgatggcttttatggtgtagttctggtaggggcttaataattggtattagagcttcttcagtgttgttaaatggtggcgctacggctaccatggctgaatggcnatcatggttttttgtcaaccaccatatgaaatttgtgaagggaggccagctatggtggctcctattagacaatggcatctttatatggtagaaatgtgaccctctgccgctgataacactg

SEQ ID NO: 126718 - DNA, 369 bp, Glycine max
  unsure (1)..(369): unsure at all n locations
ctatgatactggttaatgttntcttactaattatgggtatttgtattttatattaatttctcttatgataaactcacccctcgcaatttttgtattgtgtggntggttcttgtgatgatcgcgaactcttgttcgtgagagtagaatgacaaaagtagagtacgagaagtgagattcttttgtggagccgccgagctgacgtgatgacgttgggattattttgggagagagttgtgtttgtttacaatataaaaaggactctccaaaattcatctcaaatcaaaatctaggtatatcgggtcactaaatgaattatttttgggtcataacaaacctaaagctccaaaatgagttatgtaagtccgatga

SEQ ID NO: 126719 - DNA, 170 bp, Glycine max
gacataaaccaactcaaccatactacgggaggcatagggcatttttttctaagaaagttatcgaaagaacccaaagcccgccgatctgacgcggcaaataacaacctcgacagagggataaacaataaatacgcagcggctacaccatggaactggggaattcatataac

SEQ ID NO: 126720 - DNA, 382 bp, Glycine max
  unsure (1)..(382): unsure at all n locations
cttctggcttcaatccatcagtgggctttccttctgtgtccagcatcttgggatgttcccagcctttgatgacagctttccaggttctgctatccagtgatttgaggaaggccaccatccttgctttccagtattcattagtggttccatccacaattggtggtctgttcactggtcctccttctttctccatgttcatcagaatttatctccctagatctcactcagtgatttcgagtgcctgctctgataccaattgaaattctgataccaatgccagatgtcgtaccggatgtcacgacatcacgcttcagaacatgcagattatatttgagagtatgaacagattaaacaagtnaataacacaagagaattgttaacc

SEQ ID NO: 126721 - DNA, 415 bp, Glycine max
tactcacgcttctctatctatttgtatctatgtatagatgtatatatatatatatatatatgccttcggcggatcagaataggtaaaaaatattttgagccttgtggacgagatactagatggtgatatgtagaaaaccatcattgtgcacagttagaacattgggtgctagagacctgattatttggtctcaccacgttcgctagagcagacttggcttttactttttcagacagctgcggagtaatgccatttttcattatcaaattgatatgaagcacatgatcaaatctttcagtttttattatagtacagagattagtttcacatgaatggatgttctttttaatataaccaatgatgtttattagatatatgtttcacagttttaattaaaaaaatcaacatgtcgtta

SEQ ID NO: 126722 - DNA, 461 bp, Glycine max
  unsure (1)..(461): unsure at all n locations
agctntaaacaaagatgacgaagtaaatgctatttaagtatataaatatatggtggaagaatcatattgtggaagtaaatgctatttaagtagataaagatattagtgcaagttattggcagaaattaggaaaattgcatattattaaatgtgcgtattattaccaccaatcacgtagatttgttttaacaaccaaagatttcgaattgaagtataaaaaatgtgtgtattgttttattaggacaacttctattatttagtgtgcttaaatcttaaattttaatgttctgtcgaaatggttttaaaaaattaaattgtgggtttctctcaagatacaatttagaatataaagtgttcagttaaaaaaatatacttgaattacttcaagttgttttaactatcctttagctctcctgtaacttccgtattctcataaactttaatnntctttaaatcgacta

SEQ ID NO: 126723 - DNA, 431 bp, Glycine max
  unsure (1)..(431): unsure at all n locations
ngagtcaatggctcatgttgcatataaacaattgatatatattatttaataatattgtatcataacaagaggctgtgtgtagtanggaataatgatgcatacagaaaaaagaaacctactatgatttttttgtgaccaggattaagcaattaattttttgtggatagtttaacttgaattttttgtgaccaggactagataattgaatgtgttacaggaagaaacatttttttttatatacatgacaaaagaggaacaggaagaaacatacaatgatgcataaagaaaaagaagaaagcttagtaggggataatatatccactttgatttatatatacatgttagtactttaattagacatttaattcaagttgaatctccttatcagactttatattttccgntctaattttagtccattccttctcact

SEQ ID NO: 126724 - DNA, 456 bp, Glycine max
  unsure (1)..(456): unsure at all n locations
agcttactgggacacctgtctgtaatatgtatatcctgttcttcagggacttgtccacatgaccattatttttatagattgttgtttattggatgaagattatttatgcttctttgcttttgtcatcgtgcagacaacttacgagaacttccgaaatcaatatgataagaaggggaacccattcaataggggatcatgcagaaatctgaaagaaacactttgttccagtattccccattcgaagaataatttccgatcatttgttgtggaggatgaacagatgatggttgggtctctgactccaaatactggggatggaattttgaccccaaaggagaaaattgatcttgaaatgggatctatgcgtgcagaagatggtcgtaggcctgttcctgaacttcttgcgaaatttgattntgataattttgatagtgacatgaagtttgcagatgatga

SEQ ID NO: 126725 - DNA, 459 bp, Glycine max
  unsure (1)..(459): unsure at all n locations
tcttggctaacaagaagaacaagaagaagaatcagatttgttggagcaaaaaatggacatgttggattccttgtgttgcgagttgcgacgtgtgtgtgcttgctttgtttacaacattgccaattcaaaatagtcttctatagacgagtttagttcccatgacttcaaatttttatgaaacagagggtacatggacgtggntacttatttattggttaaatatgttttttttatatatanttttttcagnttattacttaaataatattttgttttattttactatttaatatttttaacattttacgttcgttagtttaaattttttaagtgatgatgtaaaattctggtaatttattaaaccatcacttaattaatgatgtgacattatgttagtttgatatgtcattntttaacggattaaaacaaataactgatgttaaagaataaattagaaat

SEQ ID NO: 126726 - DNA, 419 bp, Glycine max
agcttagttccaacatcttagatgataaattatactagccaactactttcaaaaccccaagatgaagttaacagaacaatcttggagatgccagcatttattttggatcaaaacgataaaatgttttcaatgttcaattctagtaatgagctggttgaagatccattggcagttgagagagaaggagctatgatcaaccgttggacattagaggagagaaatattttctccgagacattggcagcctttgaaaaagattttaaaaaaattgcttccttccttgaccacaagacaactgctgactgtgttgaactctactacaaagatcataagaccaattgtttagagaaagataagaagaaaaagaataagaagatgggttgtaaaagtcagaagtcaaaaacatccacaactaccgt

SEQ ID NO: 126727 - DNA, 352 bp, Glycine max
  unsure (1)..(352): unsure at all n locations
ngacctgaagctcaacattctcacttcagttcaggttctattttctattnttttaaaaataatttcgattgttaaaagtataattattggttgttgacattggtttgttctgcacgttgctacaaaacttgtcattctaaaattatattatgtagaaatttaggctatattgtgttagcttgcactaaagatttcagggacaagcgctagttacactttttccctcttgtgtgtgagaatgcgattggaaatgggacacaattttgattttgatcagtagaagctgttgaaattgctacagatttctagaatattctaaatttactatattcgaaaatggtacaatatccta

SEQ ID NO: 126728 - DNA, 461 bp, Glycine max
  unsure (1)..(461): unsure at all n locations
agcttaatatgttaaatttcaaaacttcatattgactattaaaaaagcaaacaacaaagtaaaactaagcgacattttatcatcggatgacaagataaaaattctttatatacagtgtgactgcatgaactataattaaaaaaaataaaatattttatcaaaactgttagcagatctaataaatgtaagaaaccaataataatccaacaataacaatccaaccacagtactgatgcatgcttattaccataacacttgctcaatgactctaagctaatagaaaaaaaaataacagaattttaatagaaatttgctcaatagctaaaaattgaaggcttttatganaacccaggagaaaacactggggatgaagcagaataaaaaagttaggacttacgaagagaacatctngaagtaagggtggagccatgggtgaaattttgagcgtttttcttgaaccc

SEQ ID NO: 126729 - DNA, 353 bp, Glycine max
  unsure (1)..(353): unsure at all n locations
tgagtaaaaatatttgcattntctgagtatcattatgggtttatagggccacaaaaagccaccaatgaaggaagaaattgatactgtgattcgaagcatatttttttattgaagataatccggacaaaacctttgcacttttcctcacctttttaaattaattactattagaattactattttttattatctaatattatacgagattacgagcttataattactattggctcaaactattgtcaagttatttttttaatccacatttgatattatcttatatatatggttcaactcttaaaaaaaaaaatgtgtgtactcaactcttgcatatagagagttaggatttcaca

SEQ ID NO: 126730 - DNA, 414 bp, Glycine max
agatcaataatggagaaacaaaaactattccttgttgtaacaccttgctgaagaaactggatcagcttattgagaagcaatggtcccgcaaaaccaatacaatcattaatcacctggaccgaattcaaacacattttagatgaagaaaataaaataaaacatgataaaataaagcatagttagactaaaattttggtttatttatggacaaagacttggtactttaatattgacatttatatacttcataaaaggcatacaaacaagggcaggataagaattcaatatcatttggaaacatcctgttttctcccttgtaaactaataattatatatgtcaattgtcaaggtgtcaatgccattaaaatttatgtaataatcctacttaagtgatcttaattttaagttgacatg

SEQ ID NO: 126731 - DNA, 431 bp, Glycine max
tccttcacggcaaacatgatagcactggcatgttctgtttcattgcctacaattggaagcaggatgacagaaataaaagccactgacatattcaatgactcagatgctccctgcacgagaccagatacacaatgtcaatgaatgaacttatgatgcagaatttatggataataggaatattgtgaatgtatgaatacagagttttgatgatgtcgaagtaaaatcaaacattgttgtttcaacaaacattattgctgtaagattaattcaaggtcgaacaaataagatcaagaaaaagataaggtctcaaataatctcactggttgattgatttttgccttagaacaaattgtttccaagagatcaaaggctctagtattcgattactatgcaatgtaatcgattaccaggagacaagtttacaaatcaac

SEQ ID NO: 126732 - DNA, 85 bp, Glycine max
agcttgagaccttcattcccaacagttatcttgcaaattaccagtaatttcgacagacccatttcacaaaacattgaaaaacata

SEQ ID NO: 126733 - DNA, 101 bp, Glycine max
  unsure (1)..(101): unsure at all n locations
acactataaaactaagctatgttnttaatgttttggaaatgggtctgtcttaattatctggtaatttgcaagataactgttgggaatgaaggtctcaagct

SEQ ID NO: 126734 - DNA, 361 bp, Glycine max
tctgtatctacgcgtttacccactcaacttgtcattcctgaatgaataaaggcacaatatctatttgtgcacatttacccactcagcttgctatcatgctttgagtcttagagatagcaaaaagaaagttatacggataaccactcgggtatctccgcctgtcacgtgacaccagtgtcagtatgacggaatttgtctacgctgaagatgacgtaaatctccgcgtgtcaacgggcttgttggccgcgattgacaaaaggtgcagaagacgacgttagtctctgtgtgctatcatgctttgagtcttagagatagcaaaagaaagttatacggaaaccactcgggaactccgctgcacgtg

SEQ ID NO: 126735 - DNA, 422 bp, Glycine max
  unsure (1)..(422): unsure at all n locations
gcgaagaacgctcacgaagaatgtttatgtgcgcttagcgcgaatcctgcgctaagggcgtgatcactaccatacttgttaagcccaaaaggtccgcttaataccaggtcgcctgagctaacttaggcctataagaggagtangaagcaaaggaaaaagacacaccgcgactaaaagtatctaatgaatacatcctangtctgagtatctcaaataggaaaaatctttgttttatgtttatcattcccttctcttcctttatccatctattctcttcttctattcacatcaactcttatagtataaagcatgaccatgagaggctaaaccccattgttgggagcctaacaggtcaattcttgtaatgtaactttctttctaatatctatctaatgcaatgcagtttgtattgctcatatact

SEQ ID NO: 126736 - DNA, 460 bp, Glycine max
  unsure (1)..(460): unsure at all n locations
cagaagagagagtttcttcaacatcgacatgcattttactccccttgccacccaaactctgtataataattttcatgggtccttgtgttggcaatttcccttgttctttgacagccacctcattgtcatggggataccatagtgcttttggccggtgaaaatttgcaatatctttactgcaaaagagttggtaagattataatgacaganaatctagaatgcacatgtagacaatactcacaatagatattaaagtgccagataaaattaaagcaatggcatggctcacttatacacaaatcaataaaggttttgcaagaacttgatatatggcataagagatccaaacactgttgtagataactaacagatcaatgaacgaactagtctaatggtgactgattatgagcaagcaatggaatcctttattaacaatgaagaccttcagtacagntcacat

SEQ ID NO: 126737 - DNA, 445 bp, Glycine max
  unsure (1)..(445): unsure at all n locations
gcttcaatggaggaagagaatgagatagagatatagagagaaagagagaaagcggtgtgggaatgaaggaaagagagggagagaagttgaattttgaagtgtgtctcacaagactctctcattcatcgaagttaccacaagtgttacacatgcttctatttatagcctacgtagcttccttgagaagctcncttgggaagctagtgttacacccctccaatagctaagctccctcatgccaaaatacacgaaggaataaggctttcttgagaagcttccttgggaagaaagtgttacatccctccaatagctaagctcaccccatggaaacacacacccctccagtagctaagctcaccccccccncccccccaaaaaaaaaaaatacttgagaatacaanaaagtccctactacaacgactactcaaaatgtcctgcaatacaa

SEQ ID NO: 126738 - DNA, 497 bp, Glycine max
  unsure (1)..(497): unsure at all n locations
cgcgacacttagaaactcagcttgtggttcacttaattaagcgctcggngcatcctatgtactgagcgaaaaggctcangtcatcaaatactacacatcttttaaagcacaaagcgaggatcggaacctcaaccctacgttcttttgaaagactacgatgagaaaattacagaggacatgaatccctgtgggaaaccaagaagaacacacagaaataaaaacacgcaacgacttccttaattgccccagatcttaagcgtagtatcgcttgacaacgtcggagttcacgggtgagggtagctcctcgacatccatgttggcgagcaccacggtccctccggagaaatccctttttacaacgaaaggcccttcgtagttcggggcccactttcctctattgtctttcagagcttgggagacttntttcaacaccaagtnctcttcactgaacctgcgcgagcgtaccttcttgtcaaaagcattcttcactcgtttct

SEQ ID NO: 126739 - DNA, 474 bp, Glycine max
  unsure (1)..(474): unsure at all n locations
agctntgatgatatggtcttcaccaacgaaaggatcaaagtgggtctaaaaagaggcaaatctgatcatcatgctttgataaatgccaaaaaaaaactagggcaaatgaagagggtgagaatgagggagaagcccatgctgtgactgccattcctatacagccaagtttcccacaaacccaacaatgtcattactcagccaataaccaaccttctccttacccaccgcccagttatccacaaaggccatccctaaaacaaccacaaagtctgtctaccgcacttccaatgacgaacatcacctttagcacaatccaaaaacaccaaccaagaaatgaattttgcagcgagaaagcctgtagaattcaccccaattccggtgtcctatgctgacttgctcccatatctacttgataattcaatggtagccataaccccaaccaaggttcgtcaacctccatttctccgagaatac

SEQ ID NO: 126740 - DNA, 461 bp, Glycine max
  unsure (1)..(461): unsure at all n locations
ngagaatgaggaagtgtgaagggtgaaacttcctgcttttattgttgaccacagagtggtacctggagatatgtcgcgggggtcaggagaccttggggacgtcaggtggggtgctattgcccaaaaccaagcttgaccaatcccgacccaacccaggcatagtcggtcagtgagaacctgtgatgtacctaaacaggcgagctcctggcagtcaacagataaaaggaacaaagaccacaaagcaaggaggcttgtggtggctggccagctgtgaactttgattgatatgtgggttatggcctctggtaatcgattaccaagggtgggtaatcgattacaaggcttaaaaatgaggacaggaggctaagatggtctctggtaatcgattaccacggngtgtaatcgattaccangcttgataacgaggtcaggaagctagggaagcctctggtaatcgatta

SEQ ID NO: 126741 - DNA, 488 bp, Glycine max
actaagcttgaatgattcttgtatcatcaatagctccaatcatatcttatctctgagacatctcctacaacaaaactttaataaacaatatgatcacaaaatgccacttcaaacacaacaatagtaacataccttcttcattcaacatgtcacttcaaacacaacaacactaacataccttcttcattcaacatgtcatatggaccatgaaaaaaaattcatttaacaatcatgtcacgctaaacactacaaaacaacaaaagacaacctaaaatcccaaaaagtaaacctaaaacccattctctgaattgactaaccaaatccccaaaaattacacttgaatattgtgaatcaaaacattaaaaattaatctaaattagtagacaccattagaccctataaataagacccgaaacctaaaccctatacatgtaacttccaactccggaatctagagacctaactcccaaaaatcaaagctagtaccc

SEQ ID NO: 126742 - DNA, 343 bp, Glycine max
aacaatatattctcgctctcacatgctgagcaaagcaactacacttgtgcttctttgaacaccaaaagattggtgatgctcctaatttaaatcataaccagtaatgctttttgtatcattcttatcacccccccatctgaatgactatatccaaacaattctccttatatattcttctgactgtaaggatataaaacgccaagatccaatgatcctttcacatacctcaaaaatctatttgcttgcaagaagcgaggtgactgtgatttcttcatacacctgcttatcaggccaacacaatatgcaatataacgtctgaggcacatatggacctcaatgagcc

SEQ ID NO: 126743 - DNA, 260 bp, Glycine max
ctcttcatgccattcaccgtacgtgcctatatccaaataccttgtaattgcaataacaggtttgcctatggcccgcttgaatatctgtcacacctgcttatttcacgccacatctgattttccaaccaatatatgaacataaaaccttgtaatcatacctgactcaaatcaagccttattagcatcattccataagaatcaactcttcgaattaatatactcatccaacatagttttccccaaatctattttgttgaaaa

SEQ ID NO: 126744 - DNA, 56 bp, Glycine max
atggtcagatgcggttcactccttatcgccacgtgtatttttgctatgggttgtgt

SEQ ID NO: 126745 - DNA, 438 bp, Glycine max
tatgcgtttaatttagcccatttaaatataagtatgagctacctttctttttcagaagccaagcttgaacttcaagtgttcaacttggctagatagacttgtttgcacctttactgataaatgactaatcagaaaattaaattcacatagaggaatacaatcattatactaatgtataggtgacagacacaccttacttctgcatttaaccttgtagactgcctctctgaatgatgagacaaagctgttattaattctgatctgccaataaaaaggcaggggaaataaaaagtattagctgtgaaatatagaggtgagaataagaacagaaccaacctgtgcatgatgaagatctggctcaatgtgtttcctaaataatggaaaaatgctatcaataaggtaatccagtgaacaagaatctccaatgtcatagcgaac

SEQ ID NO: 126746 - DNA, 451 bp, Glycine max
  unsure (1)..(451): unsure at all n locations
agcttaaaggtgtgtaacccaccattttttatattagaacaccggnnacatgtctactatcattggtatcatctccctttctgtcattggaggcgccacttgagctgccagatccctccacctttgggcgtattctttgaaagattcatgctcctttctgcatatgttttgtagctgcattctattcggagccatatcagaattgtactaatactgcctaacaaaggcaaccatttggtccttccaagaatggactcgggaaggttccatattagtgtaccaggtgatggctacgcagtaagactatcttggaaaaaatgcatcaacaatttttcatcttgcgcatatgctcccattatcctgcagtacacctttaggtgattcttggggcaagtagtccccttgtacttatcgaattctggcaccttgaacttcagagggatgacgatgt

SEQ ID NO: 126747 - DNA, 444 bp, Glycine max
gtgcacgacggaccttagatactccgcttgtaagggatgtatgaagatatgtgtgtaagattttatatatgtccaacaaagccttgctgttatagactcttcatgtgtgggagagaagaccgttcacaagaggtgtgacttttacaaaaacttaaaaccgatttgaacaagtcaaaaccttgctgaagagttacatgttatgattttatgagaaacagtcacgtggaatcggtcacccaataagtgtaatggactacacaaagcctttgagggagaggatgtgactcttcacattgaaatctgaatttcaacggtcaggggcactgataggcgattaccaacacatggggggcgattacagcctttgtgaaataattgggacggtggaattcaattgtgaaactatttcaactcattgtgtactgtaatcgactacaacatatg

SEQ ID NO: 126748 - DNA, 447 bp, Glycine max
agcttaatgaaggcgttatcagatatgtactataatccgtcgatagccaacaaagtatacttgatgcgtctgttgttcaaccttaagatgggagaaggtatctctataactaatcatattaatgaatttaatactattcttgcccagttgaagtcggtgcagatcacatttgaggatgaggtgaatgcattgattctattgtcatcactatcggatagttgggttgcaactgttactgcggttagtatttctacaagagagaacacattaaagcttattgacattcgtgacttgatcttaagtgaagatgttcgcacgagagatttaagagaatcttctagtcatgtttccaatttagcattgaatactgaaggcagaggaaagactacccacaatggtcagaatggtcgagctagatcaaagtcaacagggacagggtcagacaaa

SEQ ID NO: 126749 - DNA, 292 bp, Glycine max
gtgatggcacgcatagactaatgtcgtcttctgcgctctttgtttatcgcggacaacaagcccgttgacacgtggagatgtacgtaatcttccacgctcacaagatctgtgctactgacttttgagtctcgctgacaggcggaaatacccgaatggatatccggataaacattttgctggctgtaacacaaaaagcctgatatctcgcatagactgatgtaatggtctgcgaccttctatcatcgcggcttgcaaacccgtggacaccctgaaatttacttgatatttcggg

SEQ ID NO: 126750 - DNA, 423 bp, Glycine max
  unsure (1)..(423): unsure at all n locations
agcttcttcacaatttctctcaagttgtcacttctatctttgtgactttggagttttcttcagtttttcctttcctttttcgattgcaacttcactccaggtatgcccattttccatactatgtctactatttctgattctacgttgggcataagaggaagtgactctgggggttccattcancaacccatggtagagcgggaagtggttctcataggagattctttgtcggaggaggttcctcgcaaggtctttgataatgggtcttcctttttttgagaggttgatgaacttcaaaaatgtgggtgagggtagcttcgagccacgcgctgggataaaatctcccctggcttctatggaggatcaatcttcccttgttacgacaatcatgtgcctgcccccttgggagaatccagtgactga

SEQ ID NO: 126751 - DNA, 445 bp, Glycine max
tgtatgtctttttaatttctttacaagtgattggtgaattataaaagacaaattctagtaacacacgcattgaaattggtttaaatttatagaaaataagaaaaattgtaggactcgcatcatatttaattagtctctcatgatttgtaattattctctcatgatttgctgaatagtgtgactcttattgatgatatgaaattgcaccaattcattcattgtaccacaagattcaaagttacttgttaataatcttatgatatgaatcaaaaggtgataaatcaaattatattgaattgtaggattactttatagcccaatagtaagattccaatatgtcgtacagtagaactactttattgctaaatttcctttatgcccctaattaattgagaagtctattaatgatatgcactcattaccccatgaaagtaggtgcatttat

SEQ ID NO: 126752 - DNA, 147 bp, Glycine max
  unsure (1)..(147): unsure at all n locations
tggaaagtagtttacaagaaatataacaatcattacaaacaagggccaaacaacacttcttatggccccgagtgtcaacatgcactntataaaataatcatattgtggtcgngctattttatgacacatacgtatttgcacacaaaa

SEQ ID NO: 126753 - DNA, 466 bp, Glycine max
  unsure (1)..(466): unsure at all n locations
tgttgatggttatcgaattgtttggaagcaaattggattcactcttatggctgatgggcggactgattgttgtangagaactttcattaattttctagtttattgtcctacaggaactgttttcttaaggtatgtagatgcttctcatgtttccaaatctgctgaaatgttgcataagctttttagggagaaggtgttattagttgggcctgagaatgttgttcacatagtgacaaatagtgctgaaaattatgttgctgctggtagattattggaagttgacttttctaagttatattggtctccatgtgctacacagtgcattaatttgatgttggatgacatatggaaattagaggaagtaagtgagatcgtgacactcgcttcaaaaattaccaagtatacttacaatcattgttattcattatacttgatgaanaaatatacaggtggaagagatatactt

SEQ ID NO: 126754 - DNA, 456 bp, Glycine max
cgctgcagcttcttcctggccctaatactgaaatagctctccattcatcaagttgctatgttccaaatttgctatgtcattgttattgaaggatgaatgattccccctctcaatctcacaaataacaaacctacaaactgggcactggcccttacttgttaagcatggtactagacgatcctcatgaaacatgtggttgcatggagcgagcatcacctcttcactgggatcaaaatcttctaaacaaatagcacagctcttgctatcttcatcattttctctctgcttctctttcaaaggctttgcaacattgtttctgtagtataagctcaccctcctagcatacctctttgggggagggtcatagactactttcttaagcttgctcacagctggtgattaggtaatttctaccactgggagagcttgtgtagcttgttggaatgtggatctttg

SEQ ID NO: 126755 - DNA, 419 bp, Glycine max
ggacactatgaaactaagcttatactgctttaaatattataaattgagtcagatatattttattcaaggttccaataaactatttgcaaatgtcgaacagaatattgcaggcaatatggccaggtttcagaattttggtaatttatgtctgcaaagaaactaaaagtgtaaccataacctgtattttgactgaagcaccttgcattcctccaagtgaatttctttttggaaacaactaaatttttttgcagatatataaatagactcaccctcccagagagtatctggtcggaatatctggtttgctgcttcttggctgcttctagtacgggtaacaacgtctggatcatcatatattaatctacgttgtcaaactatattacatcaaaatatattaaagtgcatccgataacaagttc

SEQ ID NO: 126756 - DNA, 222 bp, Glycine max
  unsure (1)..(222): unsure at all n locations
cggggtttggttcttgtcccccatgtgtngtgnttntatgctcctctttcgggtgatatatttccaatgtgtagtaagtgattgttagttgcttaggtgccaacatagttgggattaaagtaactaatgtgaggcatcttgcttgtggtttggttaaaaaaggataggttaaatggtgattttagcccccctattttttcaaaaccatgattttaatcccct

SEQ ID NO: 126757 - DNA, 470 bp, Glycine max
  unsure (1)..(470): unsure at all n locations
ctctttggtatagccccaacanaaagatttggaagttgattctctaccctgtgtacaccacgcgtactgatactaacacacttttctataattatatatagattaagaaaatagcgaagcaaattaagaaattgaacttacttgataacatgtttttgagatggtatataaccaatggctttaatctgagaatctcaccagcaattccagcccatccatcaaccattatgtatgtcataaagaaggtagccttcattggaatggaaactccaatcgttctaagaatcctatagccaataataaaattcacaaagaccaatcaagtggaaagtaaaaatgagttttttaactggagagaaaaaaaatcctgagacaatgaanaagaacagaatagatntaccaaatacagtgtaaaattcaataaagtcgcataaaggttattagtattatggcattaaatatatgaaact

SEQ ID NO: 126758 - DNA, 470 bp, Glycine max
gcttcctcttcgcgccgcaataaatactctagatcttcctttctatatcatcccatttgagatcaaaatcaaaaacaccaaatcctctaattcaagtttgcaccaagttttcctgagaaaatgtctggtcgtggaaagggtggaaagggtttgggaaagggatgtgccaatatgcacaagaatgttcttctcgacaacattcatggcattacgaaacctgcgattcgtatgttatcgagaagaggtggcgtgaagaggatcagtggtttgatctacgaggaaaccagaggggttctgaagatattcttggagaacgtgattcgcgatgctgtgacttataccgagcacgctatgaggaagacggctactgccatggatgtttgttatgctctcaagagacaaggaaggaccctctatggctctggaggctaaagaagtgtatttcttgttgcccatgtgctcattttctt

SEQ ID NO: 126759 - DNA, 400 bp, Glycine max
  unsure (1)..(400): unsure at all n locations
tgatgtgccatcattntcttctatttcttacaccctttgtgcaccattttaattattgattagacttaattgtcaaattaattaggcagctttattatttgggctcatttagctaatttgatgtttttaatctaatttcaagaattaattatgcattgggcttaatccggattttggttgtggacttgaagagggaaaataaagcagcgcttaccttagttaatttctaattaggagattgcaattttatcttatgtagttcagtgtttatttcgttttgtgccagaataatgtaatagggcccagttactttgagtgactcttttagatagtagccttgcgattcggcaatgctattatgtagactattaatanggcatatggttatgtttaaggtttc

SEQ ID NO: 126760 - DNA, 397 bp, Glycine max
attgctccaaatgaataagaaagcttataaaggaggtttacaattgaattatatgccgtctcctaaacttgctcttcaatgatggatgttgcgcaacttgtgttctaccttgtatatgcacaaattctagcctcaatcgaaaatatgtagtgaattcttgaggaggttgctatgttctcgtattatttaatgctagaatgagtatctgattttcctaaagtgtattttctatagaaattttttacagtaatgctaatatatgacgccaggtactcaaagcaattcatcgtggagactctgcacttttccgtgagcatcctgaattgctggattctatagttagagtatattttcattctacctcagaacaatataacacattggaacgttggggacc

SEQ ID NO: 126761 - DNA, 405 bp, Glycine max
  unsure (1)..(405): unsure at all n locations
atagatactcagctgaactaaatgtgagccgtaatgagacctgaattttttttatatataagctaaactacaattttcgtcgttagttctttaaattgatgatcttagttccctagaatataaatgtgatatttggtctctttaattatataaattgataatcttgatccacttaataagattattcactcaataattcctgactaatagagttattaagtgtactatagatttattaacatgattaattattaacacttcactcccagagtattaataatctgaattctcctcttaatgactaataattgttatttaattggtaattannttaagatctctaataatctatcataggactaaaactattattttataaaactagaggacagagtatctcaattc

SEQ ID NO: 126762 - DNA, 446 bp, Glycine max
  unsure (1)..(446): unsure at all n locations
ttaagtcacctgaggcatgcaagctnggagaggatgcttaatggaggatattaattatggagagaaagagagaagttgaactttgagttgtgtctcacaagactctcattcatcaaagttacaaaaagggttacacatgcttctatttatagactaggtagcttccttgagaagcttctttgagaaaacctccttgggaagctagagcttatctacacacacccctctcataactaagctcacctccttgagaagcttccttaagaagatttctacagaagctagagcttagctacacacacctttcttaaagctaagctcacctccttgagatgagaagctagagcttagctacacaccctctataatagctaagctcacccccgtgacagaatacatgagaatacaaaaaaaaaagtgcctactataaagactactcaaaatgc

SEQ ID NO: 126763 - DNA, 150 bp, Glycine max
tctaaactctatacaagaatgaagctctgataccacttgttatactagtggcctcagatatcttaagaaggggggggggggtggaattaatatatctaaaactatctcttgttaggaattccattttgatttataactccgatcccaaga

SEQ ID NO: 126764 - DNA, 235 bp, Glycine max
acttctctgaccctactcgagtgaagattctagaggaaagttttatgataagtacttgaagaagaggaatgctaagcttcaagaagattggagtatgaacagagctgataaggaagctaggatgatagccatgcaggatatccctgagaggagtagagcttgaatgaatggccagttttcggggtctgccaacagacaaaattcatcatcaggtgcttaccgtgccgagaaactt

SEQ ID NO: 126765 - DNA, 446 bp, Glycine max
  unsure (1)..(446): unsure at all n locations
agctngcatgatttacattctccctctttctcaagcaaattcttaattcttcttttaaacataggacaattgaatctcatgtgcccaagtttatcgcactcagcattntggggctaaagaggaaccttcttctttcttctttcatcatcatcttctttcttctctagttttttttatgtagtttcatttctctcaaccattgtaggaataaatgaatcaaattcaatggcttcccatatctttagatctatggcttctataaagatctacattcgggttttccaataatgataaccctcaccattgaacataagagcctattgatagaattttcctcagaaaatggaaatttggttgaggccatatctattcttgaagtttttaaactttatacaagaatcctgctctgataccacttgttagaccttgtggcctcaataatctta

SEQ ID NO: 126766 - DNA, 432 bp, Glycine max
actcagcttatactacttcttggatggatattctggatacattcagtatgctgtggaccccaaggatcaagagaagacaaccttcacatgcccttttagagtcttttcctacagatggatgccattatggttatgtaatgcacctaccacatttcagaggctcatgttggccatttctacagatatggtggagaaaagtatcgaggtattcatggatgacttctcgctatttgggccctcttttgaatgctacttgaagaacttggagatagtgctacaaagatgcgtggaaacaaacctagttctaaactgggagaagtgccacttcatggttcgagaaagcatggtcttgggccacataattttgacctgagggattgaggtagaccgggccaagattgatgtcattgagaagtttccaccaccatcaat

SEQ ID NO: 126767 - DNA, 486 bp, Glycine max
  unsure (1)..(486): unsure at all n locations
gatccttaagcaccgcggctgcagctatctaataaaaaaggttagattgtattttacgtatttttcaccgtttcagttttgccactttctacacgacgtacaaattacaaataaagagatcaattccttttttttaagttcaaaaaaggcatcacaattaggttgaagcaattattagaatctaaaactatcggaaaataaattattgtcaaatcaaatatatgattggtattttgaaacagtatatctttttataataaattttttgataggagatttatctctgatataaaaatcaaattattcttgaaattaatttatcctcatcttatcttatgtttaattnttaccagtaaatttttcgtctctttaaaaccctcactactctcccatacttttatcataaaaaatctgttcaatcgtctcactactattttctccttgactcgtgttttcaactattaagctntattcctttcatcatca

SEQ ID NO: 126768 - DNA, 464 bp, Glycine max
  unsure (1)..(464): unsure at all n locations
tctaagggattggggttaattacatcaccttcttcattatattcttgtctagcttgagctgaatgtccattttcatataaagtgtcacagctaagtggagtactagctagtgggaagtcgcatgtctctatcactatctcttttctattaattacttatcctaaattntcaacatacttacgctaataataaatgaaaaatatactttccatgtgtntgtagtgagagactagactagagagactagagaatgttgatgacttgattagctaccaaatgatttttaagaagcacaacataagagtatgttactacaaacattgcaatgaaattattactttcaacatatgaaaaatgggatacattgtacatctgcacaggcttcaatgaggagtcttcctatccagttgtgtgcttaaacaggtaatcatactaaccaatttattatatacgaaatttgcata

SEQ ID NO: 126769 - DNA, 444 bp, Glycine max
  unsure (1)..(444): unsure at all n locations
agcttgctctaaatttacattgatgtttgtatttatgggaggaggttgtatgtcatttntgttntaagagtagtgtcccactggtaaaactaactttccaaatgtttgccttcgcaggaaatggccccgaggaagcttgcctcaaagaggtccaggaaggacaaggcagccgaaagaactagttccgctccggagtatgatagtcaccgctttatgagtgctgtacaccagcagcgcttcgaggccatcaagggatggtcgtttctccgggagcgacgcgtccagctcagggacgacgagtatactgatttccangaggaaatatggcgccggcggtgggcatcactggttactcccatggccaagtttgatccacaaatagtccttgagttttatgccaatgcttggccaacagaagagggcgtgcgtgacatgagatcctgg

SEQ ID NO: 126770 - DNA, 370 bp, Glycine max
  unsure (1)..(370): unsure at all n locations
ntgagggtgcgtagcccaccatcttttcatagtaaagtatttataatgtgtctaccatcacgatcatcgtctccctttccatcattgggggtaccacttgggccgccagatccctccaccttttgggcgtgttctttgaaagatccgtccccctttatgcaaatgttctgtagttgcatcctatccagaaccatatcaaaattgtactaatacttgctaacaaaggcaaccattaggtccttccaagaatggactcgggaagatttcaaattagtgtaccacgttacagctaccccacgaagactttctttggaggaatgtatcagccaattctcatcttttgtgtattcccccatcttctgacaataca

SEQ ID NO: 126771 - DNA, 423 bp, Glycine max
agctttcaccccagtgaataaggtgcagaggcatgaatatcaagtgcaaattccttagttcataagtgtattttcactgtagcgaaatatgcttttgctatagcaaaaatcctctgaggcacaaaaatttaatataatcacaactctatttaaagagcttgtaacatcaaacttttggctcatttgtgaattctgagaaacagtatctcgaactctatctctcttgtctctctatttacctccattgttgctcttttgatgtttcgtttggttcatttattatccaaatgagataaatttcaaaattgttgtgtgatttaagtagaattcaagtctgtaatctttgtttgctgatcaattctcataggtaatgtgatcctatttcagttatatgcttaaatgcatggtaggagtgatcaatct

SEQ ID NO: 126772 - DNA, 416 bp, Glycine max
tcgccaagttttaagttcttcctcaaaactgtcctaagcatatttcccaaagtcctattaacaacttccgtttgcccatcgatttgtgggtgacaagtggttgaaaataaaaatttagtgcccaacttgctccacaaactcctccaaaaatggcttatgaacttagagtccctatcactaacaatgctccttggcaaaccatggagtctcacaatctccttgaaaaacaaatcagccacatgggaagcatcatcaatttttttacatggaataaaatgagccattttagaaaacctatcaacaaccacaaaaatggaatctctaccattgcttggttttggccgccccaaaacaaaatccatggataaatcaatccaaggatactccggaattggcaatggagtatacaatccatg

SEQ ID NO: 126773 - DNA, 464 bp, Glycine max
  unsure (1)..(464): unsure at all n locations
agcttgcttgtacataaaaatacttacattgttaaaagtttatcatatatctaaaggagacttgacataattgagtgaatcaatgtaaaacttgtgttcctctagacgatcaatttaaataacttgttgaaaactcttatttgcgaaaaaattttataaatatactattcaatccccatttgattaaactatttttattcaatgttcataattaatagtgtgtaaaatttaaactatttttttatagtataaaaatactaccattgttaaatatttataataatactaaaggagactggacatacctcagattgagtgaatcaatataaaacttgatgtttctttggacgatcaatttaaatagctggttaaaaactcttatttgcgaacacttttataaatatactatntgtagaagcaaggcttcaagaagatgttntgatgatgccaaagaaacacgcttc

SEQ ID NO: 126774 - DNA, 466 bp, Glycine max
  unsure (1)..(466): unsure at all n locations
ntntggagacacttgcacaagaaatcctttgatgcccctgtacttttgttctttgcagttaacactgtatgatactttcttggctctcagatgcatttaacaataccattaaatattatagaaaaccaatccttcatctaaaggtaaacttttcatgtttatcttctagcaaatatttaattacttagtgatgattttaacttgatgattattagtatttactggtagtagactgttctagatttcaatggcaatggtgttggatgtggagtacacctgttaaatggaccattctatttttactattacgcatttttcatgttttgttgaagtcactaagggtgtgcttattgtgaattgctgtatttggctgtaaatttgcatccaaaacactgttgcaattgtcagttgattataaattctatattatgaaccctgatagagtccctagtttggactctgatat

SEQ ID NO: 126775 - DNA, 475 bp, Glycine max
  unsure (1)..(475): unsure at all n locations
atcttaagcgaccgggctgcaacttaactgattttgcatctnttctatttattttaagggtgtgatcgatcacaatatataggtaattgattaccagtgcatctgaacgtcgaaattcagattcaattgagaaaaggcacatcttattataaaatgcattgcgtaattgattgcatgagtatggtaatcgactaccaccgaccacggtttgaataaaacgccaatagatgtaacttatgacatgattttcttaaggtgataactctgccaatggttttcttgaccagatatgaagagtctataaaatcaagaccttgacttacattcaaacagcgatctgataatcttattgaacaatattttgagaaaccttgactacctttacaatactatcctactcagatatcttcttcttctctcgttgtaaaaagcttctaagtttttagttttcaacattgtcttctgcagaaacaaa

SEQ ID NO: 126776 - DNA, 250 bp, Glycine max
  unsure (1)..(250): unsure at all n locations
ntactaggttatcagctgtgctngctttggntaacctattggctcgattcgggcgggagtgacacaaaagcttcacattagcttggtttgttattgaaaaatatgcttcctgaacataacaccttaccgcagagtctcttcgaggcgaaaaagatattatgtccacgaggcttggagtaccaaagaatccatgcctgtccgaatgattgccttctctacagaaatgaggttttggatatgcgattcttgc

SEQ ID NO: 126777 - DNA, 262 bp, Glycine max
  unsure (1)..(262): unsure at all n locations
cgtggctacctcatgcgctcctctaacgacaatagcatcatttctggcactaaattgctgggagttggaagctatcttctcaattaaattcctggcttcaacaggggtcatgtctccaagggttccaccactggcagcatctatcatacttctctccatgttactgagttcgtcataaaaatattggagaagaagctgctcacaaatctagtggtgagggctatnggtgcataactntttaaatctcttccagtattcatat

SEQ ID NO: 126778 - DNA, 447 bp, Glycine max
  unsure (1)..(447): unsure at all n locations
ctcctctttcaaaccatgccatgtgatcgcgactggtccctttcttcccttcgcaacttgagttcactattgctaccccatagagccccgcgaaatttgttccggccatactcttccttgcgagccctctcggtctcttgttcaagggctcttgcggtaattgcattctcttcccgtaacccggcacactccttccgaacgtgtgtagcggccaacttgaacttctccttggcaagttttgcctttcctaactcgcttttgagagcttggacttctttgtcttcttccggtgcttcaaaattctcttcgctgacgacttttaactaggcgagccaatctaaacctcgtatatgaactntcagccattcgtggtacccaccaatgatgccattacgaatgcctctaagctcttgatctttccttaacggngtttcccatgccttatgg

SEQ ID NO: 126779 - DNA, 451 bp, Glycine max
tgcagcttgccacaagactagaagattatgagatgttttctagtaatgcaatagatgatgatggtgaattggttcatctagcattaatgggagaagcaaaacctgtcaccttccaagaagtaattaaaaagtaagtatggttaaaagctatgaaagaagagttgaaagccatagagaggaacaagacatgggagctggctagtctaccaaatggaaaaacaactataaaggtcaaatgggatttcaagaacaagctcaacccagatggaagtattgataaacacaaagccaggctagtggcaaagggctttatgcagaaagaaggctatgattacaaagaagtctttgcaccagtggctaggtttgagactgtgaggttgatagttgctttggcaagttggaaaggatggaaactatgtcaaatggatgtaaagtctaccttcctaaatgg

SEQ ID NO: 126780 - DNA, 453 bp, Glycine max
  unsure (1)..(453): unsure at all n locations
ntgtgtaatcgattataagggattggtaattgattaccagtgacaagttttgaacaaaaatcaaaagatgtaactcttctaatggttttcaggtttttctaaaggttataactcttccaatggttttcttgaccagacttgaagagtctataaaagcaagatcttgatttgcatttgaacaacacttacaaactttacaaacaacttttccacatattcttttgcaacctttgaatctctttgaacatcttcttgaactttntcttcttcttcttctttctttgcaaaagctttctaaagttttttggttttccaaaccttgaaaatagaagtgtgctatatcttttattctcttctccctttgccaaaaagaattcgccaacgactaatcgcctaaattcttttgtgtctctcttctctctttccaaaagaacgaggactaaccgctaaata

SEQ ID NO: 126781 - DNA, 448 bp, Glycine max
  unsure (1)..(448): unsure at all n locations
agctntacanacccatgacgtaaaatcttgtacatttcttgctccataacattcttgatgaacggctatttgacatctataaaatatataatgcattcttatattaattgcaacgaaattcaaaatgaagagtaagaaaacaacaaccaacaaaaacttgccggatagttcaatcttgcagaagaaaaaananagggtttataagcaaatggtttcattgtcagcggtgatctgactgataagtgaggatggtaaggctgaaaaactgtttcggcaaagcagaatggagactgctgagcatggaattgaacaacataagaaagggtgcatataattgtcaaatgtgttagacaaaatgctggagtttcttcttgcttatatcatttcaagatgacattaattagatcgttggttgattgcccaaacagtcattacctcgccactttta

SEQ ID NO: 126782 - DNA, 312 bp, Glycine max
  unsure (1)..(312): unsure at all n locations
ggtttagacatgatggatacatgagttgggacttgtatgaattgatttgggcaagaatggatgagaggaagtgtgattntcgaaatctgcacttatgcagaatttttgctgtgaaaatgcgcagcagaattttgcacaagtgcacaaaaatgcttgtgtgtggctggctgcggaaagtctatcgcagaatgagttctggatgtttgctagtagatcccaacgggcataatgtaggcttatgcactatatacctccagtaaaagtttggagtcgatcccacgggtaccgaattggatcgaaagaattgttact

SEQ ID NO: 126783 - DNA, 410 bp, Glycine max
  unsure (1)..(410): unsure at all n locations
attctggttgttcctggtgcggagatgatggtacagagggtgaaccatgagctgaagtctcttttggtgagttagccatgaaaaagcagagcgtttggaatgatttcttaaatttctgagagctgttggggaatgcatcaaacgagattacacgaatatataantttgagtgaggaatgtagagggacgtgtgaagcaaccgtcgaatttgctctggttcagtagtgaacgtgctattaatgttaagtgattcgtttgggcacgttcacattgcagtagctgctataattgctctagcagacaaatgcccagcttgccccttcgtttttcaaactgatttgcatccaatgcccttgtgaaaatatctgctatttgttcctcagtgtaaacatgcttcagtgtgataactt

SEQ ID NO: 126784 - DNA, 453 bp, Glycine max
tacgcgcctatgatactaagctgttaccctgtgaattgctacaatgagctgttattctccactatggctctttgaagtgatatggtgtaacccactaactcctcttgatcttatgcctaatgattctgattctaagcataaagaaggtcaagcaaaggcggactatgtgaagaatctttctgagaaagtcatagatcaaattgtcaggataaatataagctatgcttaacaagccaacaaacggagaaagaagggcgtcttcgaacccggagattgggtttgggtgcacatgagaaaagataggtttccggaacaaacgagatcatagcttctaccaatgggagatggaccatttcaagtgcttgagagaatcaatgacaatgcttacacaagtgagctgcccggtgagtatatcgtagatccaccttcatgtctctgattatctcttttgat

SEQ ID NO: 126785 - DNA, 365 bp, Glycine max
agcttgagatgagtaagtatagaagggtgaaactttcttcttttattcgttgaccacagagtggtacctggagatatgtcgcgggggtcaagaaaccttggggacgtcaggtggggtgctattgcccaaaaccaagcttgaccaatcccgacccaacccgggcataatctgtcagtgagaacctgtgatgtacctaagcaggcgagctcctggcagtcaacagataaaaggaacaaagaccacaaagcaaggaggcttgtgtggtggctggccagctgtgaatcttgtgtgatatatggattgtggcctctggtaatcgattaccaagggtgggtaagggtaatcgattacaaggcttaaaaatg

SEQ ID NO: 126786 - DNA, 479 bp, Glycine max
  unsure (1)..(479): unsure at all n locations
aaaactacgctgagcgtgtcattatgcttgctgtgccaagagcatatctttttctatcaaattatgagtttcttgtatgaacaagaataagcaaaaaacgcagaacaaggatgaacaaaaacacttcacagaaatgtgattttttactaaagtaaaaacaactttctacaaccacttttatttaaactctgcacatgcctcttgctggatacaatctctctactaatctacgcgatgcataaaaaagaaataaggacactatctcaagtctaactaacttaaccaacttaaaactacctaactgtttaatgttataacagaatatcagaaaaatagaaaaatatctttgttgggaagtctaagagaaactaactaatggttgttaatgaaccaacatacaacaattctcaaccttggntcaataacaataccttaacgagaacaaaaacaatggctgcagatataggagtcaatcaccc

SEQ ID NO: 126787 - DNA, 453 bp, Glycine max
  unsure (1)..(453): unsure at all n locations
agcttcccccagggccatggaagttgtctctatatggaacctgcatcaactggcaggggcaggcacacttccacaccacacccttcaaaatctatcacgcaaatatgggcctctgatgcaccttcaacttggtgaaatttctgcagtggttgagtcatcctctgacatggccaaggagataatgaagactcatgatcttaattttgtgcagaggccagaactcctttgtcctaaaatcatggcctatgattcaacggatattgcctttgctccatacggtgattactggagacagatgaggaaaatatgtacgctagagcttctcagtgccaagagggttcagtctttcttcttcattcgcgaagaagaggtggctaagctcatacaatccattcaattatgtgcatgtgcangttcaccagtcaatgtttctaaaagtgttttctttttgct

SEQ ID NO: 126788 - DNA, 467 bp, Glycine max
gcgacactataaaatactcccgcttaagtcacattaacgagcaatgtggatcaatgtttgtttgtgaatatagcacgaccatgtagataatgatgtgcttcatgagaaaagaatgtgagatatataaccatagcatggctcattactacgtgaccgcactgttatccactgataacgctggagttctcctaaccaatgtctcgataagatatgaaccgctaaacctgatactcgcaccgcttctatcgaagaaagagaacacgacacacggacgggatacctgatctggaaaagtttcctgagaagcgaaagaggagtcgaattcgtcagttatttcataccaacattataagaaacagcctcaagacattaaaagaatctgcgacttgcaaaaaatgctcgaaggtggtcatggacaatgcgtatatatggaacacgaatcattgataattacatgaaaccagtgt

SEQ ID NO: 126789 - DNA, 476 bp, Glycine max
  unsure (1)..(476): unsure at all n locations
agcttagatcaaggaaaggaaatagagtctctcgccttcaaagagcanaagagaaaanaagtagattaagttgcatttccatggaagagtgaaagaggaacaatagaactggaaaagaagaaagattcactcatttttcaaagagtgagaaagaaaaaggtagatctagttgctctccatcaaaagagtgaaataggaatagtagatctgaaaaaagagaaagatttgttcaacttcaaaaagtagacttggggagaaaagaaaaaaataagagataaattgcatagatcaaaataaggaaagagagacacttaccttcaaaaggtagatctagggaaatagagaaaaaatgttcaaaagtaagaacgagagagaatgtttacattatttaatcatgtaaataatcaaagataacattatttttctcacaatgattaaattcaaaggataatatggaaagacaaataactttggag

SEQ ID NO: 126790 - DNA, 430 bp, Glycine max
  unsure (1)..(430): unsure at all n locations
taatatatgatataatagaactagaagaatagatagtcatttgtatataaaaattataataaacacttattccttgtgcattttgagggtccacatactattataataaactaaagcctgaaataagtntttggtccatataaaatagggaggttttgattttagtcctttaaagatttttgttttgaatttgattttggtttaagatttaattcagctttttataaaaaacttcccaccctatgggactgtagcttgaaagtgggtgttttaggtgttgataggtgcattcaggaagatgattttttttcagaaatgggccaactctgaacttgttaacaagttttttaactgacaagtttcactgagtttgggttagccaaccgaaattttttttcattgtatttgtttgagtctgactttgactgag

SEQ ID NO: 126791 - DNA, 412 bp, Glycine max
  unsure (1)..(412): unsure at all n locations
agcttgngattgcatatgggcatctattttgactttcctatgctgtctctacatacataaaacagccccactatcccaattctgcaaaatcatatttatatatcattggggcatttcatcgagcacttggtgggcgcacgtttagacataaattgcaagagaatgggagcaatgtggcatgccccattgctttataatacaacctangcctaaggccttttcattcaaatcctcaattcaagaaaacaagcaccaaagcaaaccaaaactgccttacaaatataagcatgttctcacaatttaaggcaccaaaagatgaagaaagcacatcaatggaaagcaaaaacatcaaggacagaatacttacttgttggagtgaattgaaataccaaaaacgaaagcaaaatgcgat

SEQ ID NO: 126792 - DNA, 417 bp, Glycine max
  unsure (1)..(417): unsure at all n locations
ntgcctttagggcttgtacctcatcactttcttccgaagctttaacctcattgtctctcacaggctttagatttgggagccaatccaatccttgtgtccggactctcagccatttatgatagccgccgatggtcccattactgcttcccctaagctctctgtcctttcttcacaccgcataccatgccttgcgaactccttggagtaccctcacgtttgtggtcactgaaacctcgtgcgatgaaaggcgtgatgctctcgtctgatgacactcctctcatgggacatccttcgcatgaagatagaatcctgattcttccttccttctagcgagggaaccatttaacagacgcccctccatgctagccaagagttggtgcacaacaaacaattcttgcgtcgctctttccacatccc

SEQ ID NO: 126793 - DNA, 400 bp, Glycine max
  unsure (1)..(400): unsure at all n locations
agctntggagtttccaagtgccaattcgttctcttctttagtccagtcttcttctggcttcaattcatcagtgggctttccttctgtgtccagcatcttgggatgttcccagcctttgatgacagctttccaggttctgctatccagtgatttgaggaagaccaccattcttgctttccagtattcatagttgcttccatcaagaattggtggtctgttcactggtcctccttctttctccatgttcatcagaatttatctccccagatctcactctgtgatttcgagtgtttgctctgataccaattgaaattctgataccacgggacagatgtcgtacaggatgtcacgacatcacgcttcataacatgcagattgtatgtgtccgtatgaacagatt

SEQ ID NO: 126794 - DNA, 421 bp, Glycine max
  unsure (1)..(421): unsure at all n locations
ctgagcaaattcanacgacaataactgttgattcggatgttcgattgtgtcccgtattatatcgagatgctcgtaattgaaaatagaagctctgagcaaattcaaacgacaataacttttgactcgggtgtccgattgtgtcccgtagtatatcgagacgctcgaaattgaaaacagaagcactgagcaaattcggacgaccataactttttactcggatgaccgattgagtcccgtaatatatcgagacgctctgaattgaaaacagaagctctgagcaaattcaaacgacaataacttttgactcggatgtccgattgattcccgtaatattatcaagacgctcgttattgaaaacagaagctctgagaaaattgatacgacaattactttttactcggatgtccgattgagttccgta

SEQ ID NO: 126795 - DNA, 89 bp, Glycine max
ttggagctttggaattgttttgggaataagtgtggagggtttttgattatccgacaatttgactgattggtatgcttaagatgattttg

SEQ ID NO: 126796 - DNA, 426 bp, Glycine max
  unsure (1)..(426): unsure at all n locations
actcctgcagaagatcnctagcatgtattctttctttccatacccactcctcacgtttggttgtttatggaaaacaccataactaaacacgccacaaggcatccctatcgcaccagatccaaatctataacgatgggtgatcaagaggagacacaggaacaaatgaaagccaacatgtcagctctgaaagaacagatggcttccatgatggaggccatgttagggatgacgcagctcatggagaaaaatgtggccaccgctgacgttgtagtgtggctgccgaacagacccaactctattggcaaccgtgcgccatcctccctcaaacatagtaggacggngaaggaacactctggggcacgacagcgactctcatctgggatacaaccgagctggctacccttatggattgcaccccactactca

SEQ ID NO: 126797 - DNA, 432 bp, Glycine max
  unsure (1)..(432): unsure at all n locations
agcttacaaatctatattaagtccaagcccataaataaaacaaaatctggacaagataagataagatnggatgaaataaaatctggataagataagattagatcggatgaaataaaatctagatgaaataaaatcaggataagataagatttgataaaataaaattgcctgttctcttcaagtcaagcccaatttcttataattctcctgagattaaattaaaaacacaaaattagtcaagtaagcccaaatgataaaattgcatatattaattgacaattaaggctaatcagtaattaaaatggtgacaaaaaaggttaagatataggagaaaataatgacacatcaaatccccccacacttaaccttttgcactcctgngcaaaatcaaaaagtagagcaaggaacaaatccagagacattaaagagaga

SEQ ID NO: 126798 - DNA, 391 bp, Glycine max
  unsure (1)..(391): unsure at all n locations
ngtangattatggggtacccatcacatgtggtactatgtggcggtcgggcgatggtgcacaacaagtttttccacatccacaatgcgcgcataaacccaccataccctgtagcccacctccaactgagctcacgtactcccacgtagcccatatcctcgttcctctcaacaccgggtccccatcaatcctcccaagcttccccaacatcaaagtattacaacattcataccgcacatactatcacggccaataaaacagagcaaaggcagaaaactctgccaaaacaccaaccaaaatcacagtttttctcacttaaagaccccagaaccagttccttcgatccaattcngtaaccgttggatcgactccgaaattctactgcaagtctat

SEQ ID NO: 126799 - DNA, 369 bp, Glycine max
  unsure (1)..(369): unsure at all n locations
agcttcattagagaatcgcttatctaattatatcactaacatttacacattgatcaatttcagagagcacatttccagacataaagcaaacacgttgcgattccgtcaccacctcacccgtgtntcttcttctcgaaaccaaatagggcttatttgtcgcaaggtttggagaagacaaaacacgactgacgtggtgatgacagaacattggaatgtgaggaagaagaggcacgaggaagatgaacttacctgctaatggaacaaatgcggcggagaggcgcacgagaggcatacagagaggagatgaacagtacagagtatgcgcaagagaaaatatgactcatagaggcattttaaatatttttaaat

SEQ ID NO: 126800 - DNA, 365 bp, Glycine max
  unsure (1)..(365): unsure at all n locations
tgctatgaaatgttcccttcaccctatgccttacaagctatattggntacgcgagaatgtggagctagttgtagatagataagtgttgatatgcttcttcgttggaaaatatgttgatgagatactgtttgatgtagtccctatggagtttcaccatctcttacttggaaagtgttggcaatatgatacggatgttgtccacaacggtgtcacacacaaatcttcatttgtacataaagggcaaaaaggttacccttaaacctttgtctccacatgaggtttgtgaggatcaaatactaatactagtgaaaagagaacacgagagagaagattaaccctctctcattgttgaatagagagagata

SEQ ID NO: 126801 - DNA, 418 bp, Glycine max
aacaccatattctgagtattcatgcattaaggtccctgttccactattttgttttttaagtgtaacggggtgatgatcccatcatggatggctcggggtgcctaacacatgaaactaagaatgtagtttgaaagattatcgcttgtccctttttagtttttgttatgtagaggaaaacgcaatgatgactccacatgaaaacaaatggtatgcagttttgcagatcatatatgttggtgagagcatatgcatgatgatgtcatgacttatgcacaatgtgtggctggaatatgatatcggacaaatgctcgatatgttcattatgatgttctgacgagatgcctatgcgatgcatgatatgaatgcgttctaacggacacgagagcccggataaaacctctctctattgtgcatttgg

SEQ ID NO: 126802 - DNA, 393 bp, Glycine max
agcttaaccttgtgccgagctctagcttttttatgatcagctttcacctcgggaagccaatccaatcacacacgctacatactcatgtgatagtcagtcgatatatgtaagctttgaagatggaagtattggcattcttactgtccctgcgctcaaattaaaagtgtaaatagatcaatctgcttatcctcatcccagcccaaggtgcgtttttattacgattgtaacgaatgatctgttattgaaacttgacagcttctgttatcatatctgacaacattatcttcagacagcttgagagtgcgttctcttgtgattgctgcacatacctccgaacccaatcaatgtgcattatgactcaccgatggtggagtacatgtacttgaaccacta

SEQ ID NO: 126803 - DNA, 444 bp, Glycine max
  unsure (1)..(444): unsure at all n locations
agcttcaaaatccanagatctaatccaaggtaaatgtttcataagtaggattcccttacttgtgctattcaattccggtgcaacccattcttttatatcttgttcgtgtgtagagaaacttaagctttctgtgtcttcttcaaataaagatctggtggtagagaccccaacctagtggtctatgttaacttctatgtgtgttgaattgtctggtggaaatttctggtagaacattcttgattgatatgatttttttgcctttgagccaaattgatgttattttgggtatagaccaattatctttcaaccatgtcttgttaaactantttgataaaactgtggtgtttgatgattctggagtgagtaaggataggatgtttatctctgccaaccaatttgtgacatctttaanagaagatgctcaagtgtacatgatcttgtcta

SEQ ID NO: 126804 - DNA, 428 bp, Glycine max
  unsure (1)..(428): unsure at all n locations
ntacagcagattttagtaatgacccactaacctagaattaatataacttaatgccattaacctagggaattaaaaaaaacttaatggctgagtgtaactgaaattctggcaaccaaaagtcacccccaacagccaacatgtcagccaccatttggtctcccaaaaggctgatgcctatgttgccaattgggcccttattacaacttgaactaaacctaactaaagcccttttaattgattaacccaaaacatatttttggtcagccaactttacaaggattgggccattatttagacaaactaaacactctaaaaattgagacaaagtggtgtcatttagtcctcctccatttgggccatgatacaactcacaaccttggacttttctccttgaaacttgggcttgtattcaaacagtatggacagca

SEQ ID NO: 126805 - DNA, 435 bp, Glycine max
  unsure (1)..(435): unsure at all n locations
gcttgtccctgccattgagggactcgttgttggttacatactaagtcctctgatcgcgtgttcggtagacaccgacgatcagagacttttgtcctcatttgtggagcggnggccccgggagacgtctagtttccatctcccggtgggagagctcacgatcacgctggacgacgtctcctcgcttcttcatctgcccgtggttggcgacttgcactgcctttagcccttgcacgtggacgatgcggttcaaatgctggtggacttattgatggtctttgtaaagtctgccagggttgagacagcctagtgtcgtggaccgtacgtatgcctgcaatgggtatgtgatatataagagtgtcgttgtcaggcaggtcattggacagatgcggcttgcgcatatcttcttcatcttctggattgcactctatttgctaa

SEQ ID NO: 126806 - DNA, 425 bp, Glycine max
ctttaaactaagctctagaagccaacattctctaaagtgcgtatcactatttttcttctgccaaccgccaaacagatggacactcgactgaggagagaacgaattatgggcgactcttgatgcttcggctaatctcttggccttatgcgaccatctccaatatttgttggaacaagaattgaaccccatgccacgaccatgagtgcttggaatatgttgatagatagttttcaagactacaaacattctcttgtggtgactcttgaggccgaattctccaatactaagatggatgatttgccaaatgctccaacatattgggaacatctcacagcccttgctgatcatttgaaaaacgatcgagccctgatgttatagagccactcttgtcattcaactctgtatctggtgtcacaacggcatat

SEQ ID NO: 126807 - DNA, 358 bp, Glycine max
gctgcaactacctaacttgcttgctctatttcctatctctatttagtattccgatggtgtcaaccccaaagaaaggcggtgtggatcctataattaagaaatttgagatatgccgaatattggaaaatgagatgggtacccattcctgctttgaagaatgtgggctacgatgggattcctctatagaccatttcctatcggcaaccatgtggttctggtggaaaatctattaggttagcctaaatctgctctattgagatccattcaaaaaattcagtttgtactgcctgcgctttacaaaataacactctcttatttagcacatattcgcctatgggcggaaaaggcggatggtctt

SEQ ID NO: 126808 - DNA, 457 bp, Glycine max
  unsure (1)..(457): unsure at all n locations
agcttgtaatcgattacacacacactgtaatcgattaacagaggagattttcagaaaatattctcaacaatcacagcttttcatttggttcttgaatggccatcaaaggcctatatatatgtgacttgagacatgaatttgctaagagtttttcagaacaacaagtgtttattctctcaaaaagcaaaatcgctttatcctcttaagaattccttggccaattcaattgcaattcattaaggaatcatttgagtgctcagattgtaaaatctatctctttcaagagagattcattctttntctctttctaattcactaaaggattaagagaccgagggtctcttgttgtaaaagaattctaaacacaaaggaaggattgtccttgtgtgtttagaacttgtgaaagggaattacaggatagtggaactctcaagcgggttgcttgtngactggacgt

SEQ ID NO: 126809 - DNA, 459 bp, Glycine max
  unsure (1)..(459): unsure at all n locations
actcagctgatcactgcttgaaacattagcgtgattgaatttcttttgatgtacttgtaggtgttagggtttcatagtctatattttgaaatttttctaagagaccatgagcagaaagaactccattccatagaccatgcattacacatgaatcactaagggattaaaatatacaatgcctctactcattccacgcgagcaacaatcggagtggggtctttgtgcaagccaatggtagacgcgtagagatttggtgtcatttgttctcatcacatggaccacactcttctctctcaatagtgaataatgaatttcatgtgtgtcatttgttcaacctctctctctctctctctctttctatcatatatggatatatatatatatatatatatagaagaantaattgatccaaatctcaactaaattgtacccttattcgaatctatttgaactcatcat

SEQ ID NO: 126810 - DNA, 466 bp, Glycine max
  unsure (1)..(466): unsure at all n locations
agctggtatcatgcatcgtaatgcatgcttggtcactagttagttacaacggcttaggactgttattctgttatcccagttagttacaggccataacggtgcaataccattgtataaaagtagatcatattcatgaataaagcagagaaaacaattttctagtaatagnttagcgtaggtacttttctctttcctctcgctcatatcacattaccacaaaggcaaagactcaaaccaagaccaatagtaatagcaatagcaataagatccttctcgatcagataagctttatcaagggcatcttgcacaaccagcccaaaccaataatactctagaaagggatatatatatatatatatagagagagagagagagagagagagacaaacaaagttttagaagccatattagaaatctatttgagaatctggtggcaccctccaaacatcattccatggcacccaat

SEQ ID NO: 126811 - DNA, 440 bp, Glycine max
  unsure (1)..(440): unsure at all n locations
acggacactataaatctaagcttatggccgaanattcgaggataagcacgttgagcctctttcttatattggtgccccataaaagaatgaaaataagaatcatcagtgaacgatatatattagatgtaacttatgtttgactaccaaatttacttgttaatgatatttaattagacatattatataattatatgtataccttgccttgccaataactgagatcggtgtggcagattgtggtgaagatgatcttgattcgaacctccattttctgaggaggatgaacaataacacgtttcaccacatatggctattcaggaccatatgctacggctgcttcatcatggtgataattataataatcataataatgatattgagctatgagaatgagaatttgtgctcattctgtacgattgtatgatctgaataaattatat

SEQ ID NO: 126812 - DNA, 383 bp, Glycine max
agcttccttaagaagattcctaaagaagctagagcttatctacacatacctctctaatagctaagctcacctccttgagatgagaagctagagcttagctacacaccccctataatagctaagctcacccccatgacgaaaaacatgaaaatacaaaaaaaaagtccttactacaaagactactcaaaatgccccgaaatacaaggctaaaaccccatactactagaatggccaaaatacaaggcccaaacgaagaaaaaacctattctaatatttacaaagataagcgggctcatgcttagcccatgggctcgaaatctaccctaaggttcatgagaaccctagggccttcccttggatctctagccaatctacttggagtc

SEQ ID NO: 126813 - DNA, 465 bp, Glycine max
ctgtaggcctaggatcttcttcatcaatggattcctttgcttcttggaagataaatggcagcggaatggagaacgaagagagagaggacacgccacttcaaggagaagatgagtctataagaagctcaccaccataggaggccatggataagagcttggaggaagaaggagatgaatgaagggagagggagagaagagcactaaattttgtgctcaaaaggagctctgaaatctgaagttaatattcaaatgatcaaatttgaaaaaaatacacacacatgacctctatttatatcctaagtgtcacacaaaattggagggaaattcaaatttcacttgaatttgtggagccaaactttggagccaaaatttcactaattatgattagtgaattttagttatggttcagcccactaattcaagatcaattccaagattctccactaagtgtgcttatgtgtcatg

SEQ ID NO: 126814 - DNA, 444 bp, Glycine max
  unsure (1)..(444): unsure at all n locations
gtcacctgcngctgcaagcttaaaattgaataaaacgttcaattactgctggtaatcgaataccatatatgtgttatctattacacagtgcatatntttgaattcaatatttaataactgttgtaatcaattgtggccactggtaatcgattacatccttctggaatcgattaccagagagtaaatttcttgaaaaacacgttttaacttaaatttcttggccaaaccttgtgctacttcaaatggaattcctttcctatataatatacccttcctaagactctagaaactgtcttgatcatccatcttgaatatctttaatttctttgtcttgaataaagctatgagaaacatgtgatccttttttagaagcatgtgatcctttggcatcatcaaaacattcagcttgatccttagtctacatatttcacttganataccatg

SEQ ID NO: 126815 - DNA, 442 bp, Glycine max
  unsure (1)..(442): unsure at all n locations
gtcnanacaagttcataatattctactttacaatactctttcaaactcaaattaaatgtacaaacctgctagtgtgcaataacatttgaacataagccattaggtgagtagtatggcatactcacatccttattgagtttattccagatacaaaagctgatcttacgtttcatacaccaaaaaacgaacatacacaatatattaatttgttgaacataagacactaagttttggtggctgtggttttcatgacatggattttctccacttgtgagtattattcttactagtacctttagcattgaccaatctagttttaaggtccacaggcatgtacattccatttccttcaagctcttgttccattttgtcatgcgcactcttgcctaatatttacttgcacttgaagaagcctttcttctcttcaccaccattgtctcca

SEQ ID NO: 126816 - DNA, 464 bp, Glycine max
  unsure (1)..(464): unsure at all n locations
agcttgccacctagctcgccctggcgagctatcccgacgtatggaggagacttctggaacgccgcaaggggcctggttgctatttgcactcccctgtttactaaatacaccctctgccttgttttgctgattctttgtccgtaacgttacggaactttacgaatgctgccacgatacttgctttcttgtcgaattgctacggaaccttacggattacgtaatcatcctttttttggcttttggaatgttacggaacctcacggattgtgcaataatgcttccttttgatttccagcatgttacagaacttcacggattgtgcaacactgctntcttttgacttgcggcctgtcacggaacttcacggattgcctaacgataggtgccaagctcctcgaagcggagaagcaaaggtagcatgctatcaaacaatggtcccgcgacgaaatcgtggatgacaattg

SEQ ID NO: 126817 - DNA, 367 bp, Glycine max
  unsure (1)..(367): unsure at all n locations
gtttacgtgcatgtccacaccatattggctattctttcttcttttgatgcnatctacctgatcgaggagagagactatattnatgcgactaacgcatcaacaactaataaacatataacataaggcactgcgtaagccgtgcattgtaatgagatttgaagcgcaggattactattatgcgtcacagagagaatgacaatcaagcctttgcgtgcatagcactgccaaacattgaaggaatacatgtattgtctaaccgaccaacgtgacacagtatttatctttgtgtacatgctcacaagtatcacacatatgttggaacatggaggaacactctgacctcatgcgccacacattgcacacacta

SEQ ID NO: 126818 - DNA, 171 bp, Glycine max
ctcaacgttaagatcttcaagtttaacctagccatgattataaattcattgacataatactgcgctctcgaacagaagaatgggtgactcagatctcatagcatgtaacatcctccagatgttcctaatcataatgattgtctcttggtgaccactttgagggcgatacac

SEQ ID NO: 126819 - DNA, 276 bp, Glycine max
cgcaattttttttttcattcacgaactcccgccgataatccaacgttaatagcaacccaactccttatgcctgccagagactctcctgcacacacaaaatcaacatttgcgcacataacacacaggacagtgtgaaaacacctcaggacaagagcccaaaggaccgaagggatgagctgcacacttgaccagcaagacttgaccaagatgaatggacgagccagcattggacaacaagcaatgtactgacagagagaacatatcagacgtacaaac

SEQ ID NO: 126820 - DNA, 308 bp, Glycine max
  unsure (1)..(308): unsure at all n locations
cacccgagctgcagcttcttctatctacaactcaattaatttttataaaacncagagcggcaccgttaggaggcatgggataagcttaaactccacaaatgagaagccataccctaattacgtcaggaccttatttgtatcatttgattcttgctaccgaatgagctgttaatgccagtgccggcaaccgaaggttttctacgatcaaatagaaggggaaaaactctcagggtgactatgggtcttttacctttataaatctagttgccagctaccttggtcgctgaccaccaaaaacttatgggaaa

SEQ ID NO: 126821 - DNA, 484 bp, Glycine max
  unsure (1)..(484): unsure at all n locations
cttgccgagttggtcttcaccggcaaaatgatcgaagtgtgtctgtttatatgcaaatntggncatcctcgcttgatgaaaactgaggcaagtgaagagggtgacaatgagggataaacccatgcagtgactgccattcctatatggccaagtatcccaccaacccaacaatgtcattactcagtcaataacaacccatctgcttacccaccacccaattatccacaaagttcattcctaaatcaaaccacaaaacccacctaccacacgaccaatgctaaacaccacttttatcacgaaccgaagcaccaaccaaaagggaattttgcttcatatagcctgtctaattcaccccaaattccggagtcctatgctatacctactctcatatctactcgataattcaatggtagccataacccctcgtacgtntgctcagcctccattttttcgaagatacgacttgaatgccacatgtgcatat

SEQ ID NO: 126822 - DNA, 384 bp, Glycine max
  unsure (1)..(384): unsure at all n locations
agctngtatattatcaaatcttagactcactttttcattattgtaaggcaaagaatatcataagatgcaaaatcctactgtagaaacaaatgatcatccacatgcccctgcagattctaatatttacacccaaccagaagatgtgagttctgattctgcagcaagagaactaagaccaccaaaaatgggatactgtaaaatttgtgaggttcatctaccctattgcaaaacattggatatgctaacccaaaaaatagtcatcaaagaatgttgaaactatatgatgaaatacagagactaaaaacttcaggttccagtactaacacccaaactacagatggatgttctatagctgaacaaagatagatattctcacccataatc

SEQ ID NO: 126823 - DNA, 270 bp, Glycine max
  unsure (1)..(270): unsure at all n locations
ctcaagctctgaatcccagnccaaactcctcacataaactgatttcatgctnattttggtggcctagcccgcgctcgcgcgcttagcgcacgtatggaccacttaccgcatattaccgattattggcttagcgcacctttctcgcttagcggatgaaatgaagcgatgcgcttagtgagatgaagaggtgcgcttagcgaacctgtacaactcatcttctttcagagtcttcctcgtgcttagcccaggagtgttgtgcttagcggatgc

SEQ ID NO: 126824 - DNA, 479 bp, Glycine max
  unsure (1)..(479): unsure at all n locations
agcttccatcaagtggtaattagagcacaagtatcttatgtggtgctccttaaacctccattaattgtttgctttaccttctcttccattggtgtttcttcattttttctccatgtatctcctcacatgtcttgtgctaaatgttgttaacatgagtctttatagtttccaccgattaaacttgctatagaagctagatttgattttctatggttcaaatttcttgttcttgttcttgaaccatgaattgtgttgagtctaggttcctttgagatttgtcttgttattttttgtggctgaaacctaaaccataaaattcttacaaaaatattaaagtataagaaaacctcaaaaatctagagtgacttgttcacctatngtagtttcgtcatagaagtcatgtctagtcatgaaacttgtcacataagaattcttatgttgtgctgaatatcttnttcttggttctttgtctaactcat

SEQ ID NO: 126825 - DNA, 462 bp, Glycine max
tctagccaaatgtacttaccttgaattaattcctttgattgtccttttgagccttgtttccctttccttgttttgaagctcactacaagccttaagtgaaaaaccatgatattaccatatccttaaggaattttggagctttggaattgttttgggaataagtgtggggggtttttgtttcattggacaacttgttttgttggctatgcttcacgatgtattttgggccatacttgatgtacatggtatattggttaaatgttggacatgctgaatgaaatgttgtttctcaaaggctaaaaaaaaaaaaagaaaagcaataaagttgagtgaataagatcttaaatggcacaagaatgatgaaactcttggttctactcttcatgtttaatttttatctttacttctttgtattatcttattgcttcttaatatgcacttattcccctttgctcctctatt

SEQ ID NO: 126826 - DNA, 470 bp, Glycine max
  unsure (1)..(470): unsure at all n locations
cgcctaaacattcaattncnagcgtcgcgaatattattgtactttatcgacatccgagnataaagttattgtcgtttgaattggctcataggttcaaaatacaatttctaacgtctcgatatatttcgggactcaatcagacattcgagtaaaaagttattgtctcttgagttggctcataggttcaacattcaatgtcgagcgtcccgatatattacgccactgaatcggacattcgagtaaaaagttattgtcgttcgaatttgctctgagcttcaacattcaatttcgagcgtctcgatatattacgggactcaatcagacatccgagacaaaagttattgtcgtctgaattggatcataggttcaacattcaatttcgagcgtctcgatatatgacgggactcactcagacatccgagtaaaagtgttgccgtttgattggctagaggtcaacatcaatttgagcg

SEQ ID NO: 126827 - DNA, 310 bp, Glycine max
  unsure (1)..(310): unsure at all n locations
agcttgccaacatctaggcaattttagatatgtatcttcacacactaacaaacgactcctggaggagtatacgtggaaagcctctgccgcacccgcaaactaatagcaccgctatttctaattaatagacccccgtgccatttcctggngaccaattcgtcaacccgtggatagactctacaaatttactggaagtgcctagtacataattctatagtttgaccatcgggatgactaccaaacatccataactcatctctgtgctacgtttctgacaattacagaatgcacaccatcactctcgcactat

SEQ ID NO: 126828 - DNA, 389 bp, Glycine max
tctataactactgctacatgttctataaaaaatgaattcgtcatttcaatagtgcattattacctcctaacatttatttctgctacttacgcagactaattctacattgatgttatcaattgaggatcgctcacatactttcttcgttgtatagattttccaattaaatattatccggtattgtctatacacaccacactaccgtatttgttgatattaaatcacgcatgattactgcttgaatattgagcacaagtataaatatgggtgaatacttaacgatgggcaacgtagaagactctaaaggcgttgagttgattgaacacatactgacatcttacatgggagagcatcttgacaatcttcctagcaggagcaatactcttcat

SEQ ID NO: 126829 - DNA, 342 bp, Glycine max
  unsure (1)..(342): unsure at all n locations
agctnttttcagtcgactataaggttgattgtttgttataaagcggcgatgcctactgtagactgtttttctcccatgtttaagttgtatgtagcttgtgttttcttcacagatggggcatgcatgatgacccttaacactgtaactgctgagattcccatatgctggaaagtcattaatggtacaaaaaagcattgcacgcattatgaacgtctccttgcgaaacgcatcaaacactacaaccccctcgtcccataactttctcagatcttcaaccaacggacttagataagcatcaatttcatttcctggctgtcttggcccgatatcatcatagacaac

SEQ ID NO: 126830 - DNA, 288 bp, Glycine max
tcgtattcagccatgttattggtgcagtcgaaaccaagtttggttgtgaaaggtatgcattgattgttcggagagaccaattccgccccaacaccatggcccagaacgttagatgctccatcgaaccacacgatccacttgtccctgtccttttctagcttctcttcaaataaggccatgatgtcctcatctgggaactcgggatgcatgggttgataatcattgagaggctgctgagccaaatagtccgccaaggcgcttccctttatcgctttttgggttacgtag

SEQ ID NO: 126831 - DNA, 319 bp, Glycine max
  unsure (1)..(319): unsure at all n locations
tccgcttattagtgcacaactccttcaagaatntggcatattcttgttattngctttattgcatccaacagaggtatgtttacctctacttttctaaacgtttccaagatctctttctctgcctcttccatttttttgttggaaactgctcttggacggaatgtaagacggggaatgtgctgcttctgcaaatcagaattacctgtggaagaagattcacctgcacagatattgttaggtaaatgtttgtcatcacctttttctggaatagagagaagtttggcaggttccatttgcagattgagaaagtgctcacggt

SEQ ID NO: 126832 - DNA, 462 bp, Glycine max
  unsure (1)..(462): unsure at all n locations
agctttgtggtgtngagaagatttatatgtttgtcatcatcaaaaagggggagaatgtgaatgtatgtatacatgatcttgatgatgccaaagaagaatcaaacaaggttgttacatttgcttaaagattaatacaagattgcttcaacaaacaaagcctttattcaagatcaagccttgcctcataacaaagggtttcatagtcatgcaaggctctagtaatcgattaccaggaagtgtaattgattactagaagggaagttcgagaaatagatgttgaaaagggttttgaatttgaattttgaacatgtaatcgattaccatatgtctgtaatcgattaccagcaacgaaactcctaaaattcaaacttcaaagtcatgatcctataaaaaataactgtgtaatcgataccagacacctgtatcaataccagtgaaaattcataaaaactcttgaaaaca

SEQ ID NO: 126833 - DNA, 474 bp, Glycine max
tcatgtagactagtccaatattgtgaagtaaacttctgattcctgtcagatacaatactggaaggaattccatgcaaccttaccacttccttgatgtacaactctactagcttctccattctatacttcatattcactgggataaaatgagcagatttggtgagtcgatcaactatgacccacacagcatcatgcccacgactagtcttgggtaaactagttacaaaatccatggatatgctctcccatttccattccggaattcccaatggcttcaattctcccgatggtcgttggtgttcagccttatccttttgacacgtcagacatcttgctacatattcagctacatctttcttcatgccatgccaccaaaaacttctcttcagatcctggtacatcttagtcattcctggatggaaactaagacgacgtttatgtgcttcttccaagatcttaactgtcaaatcatct

SEQ ID NO: 126834 - DNA, 352 bp, Glycine max
  unsure (1)..(352): unsure at all n locations
atatttgtatctctaaattgtctanacatacattaaactgaccttttctccttgatcattnattactcacaggactattctatacattgtgaaactctaaaaaaacttttatttcaaggnnnnnnaactcaaatattatacacatcaccacactattccatgaaactattattataaatcaactagaacactttctatttttacgaatattaaatttttcgaaaaatatataaaaaacattactttctaatcttaatgctcccaacatattaacctaatttagtaaattgaatgaaatacaagaaagggaattcgatacccatgatgaatttttatactggatgcagttcaa

SEQ ID NO: 126835 - DNA, 470 bp, Glycine max
  unsure (1)..(470): unsure at all n locations
tccttaagaagattccttaagaagctagatcttatctacacatacctctataatagctaagctcacctccttgagatgagaagctagagcttagctacacaccccctataatagctaagctcacccccatgacaaaaaacatgaaaataacaaaaaaaagtccttattacaaagacaactcaaaatgccccgaaatacaaggctaaaaccctatactactagaatggccaaaatacaaggcctagacgaaggaataacctattctaatatttacaaagataagcgggctcatacttagcccatgggctcgaaatctaccctaaggctcatgagaaccctaaggcctttccttggatctctagcccaatctacttggagtcttctagccaatgcccttgcggggtaggattgcatcattccctccaccttggaaaggatttgacctcanatcccgagnttcatcatactat

SEQ ID NO: 126836 - DNA, 425 bp, Glycine max
  unsure (1)..(425): unsure at all n locations
agcttaatcttacaagttatggattgaatgttttccaagtattgatcctttcaactgtccatcttatgatacttttcctgaggaggaagaccaatgctcatatactttcctatcagacacattattgctcccaaccccaatggtatgatctttgagcaactcttaggccaactacaagaaatgtctatccccctggtgccactatctggagaagcaaaaccttttgagatgcctttctccactccactaaatctttagcaactcataagtctgatgtggatgatgaatgtgctgctgccaatggatcacacatgcttaagtgggatcttttataatgagggcatcactttaaaagaacctgaagccagcccaagtttncaagactaggagaaatcanattatggccttaagctcataataaagtt

SEQ ID NO: 126837 - DNA, 336 bp, Glycine max
  unsure (1)..(336): unsure at all n locations
tctaaggattatgccggtatcggggaatgttgattgaatgtgaatcagttgatttgtgcaccactagctnttgtttgatctgtttcttggagttttcgtgttcacattgtgggttttgagcgaagttattcaatgatgatactaatttagatgattattgcttgatatgttggccctttatcttttttatttttatttttaaatttaatcctttttttcccttaatttacaacaaattgtctaaatctgtacacttcttgtatatgcatgcacacttcggtagaagtttcagatgttgataattatttttngccgatggctatgttaatggtttgt

SEQ ID NO: 126838 - DNA, 505 bp, Glycine max
  unsure (1)..(505): unsure at all n locations
ggatccttaagtcacctgcggcatgcaagctntaaaaacccatgagagagtggaaggatattaattgtatacaataacacggtaataacatcatgatgaaataataataaaacaaaacatataatagaaattcatcattctgcctattacttttgcatgctttaatataacagaagaattcataataataatatgagtattcagaaaatactaagatatcagaaaataatatttcacaacctaattcctcttgttcgctaatcgctattattactaaacttcttcagcttgctccctatccgttgtcacaagggagtgtaattagagactccatatagacatcccacattccatacacagtcacctaacgtccatctggaacattaccataggagcgatacttttgcagttggccctggtcattaataagtcattagttcatatatacctaattactattatactnttatcaaggtatntntatatatcacgtcaactattattt

SEQ ID NO: 126839 - DNA, 464 bp, Glycine max
  unsure (1)..(464): unsure at all n locations
actcaagctgaaagctgtctctctcctatntgtatatatatatgttatttgaatgaaataaaactaagcaagttagtgaaaagttttcctcctcacatattcaaagcttcaagtggacagactaccaacaaggatgaatctgcataggagacaagtacagattcaggatttgcgttgtcctttttgcaggggtgctgaagaggaggcatctcatctgttcttccattgcatcttgatccaaccaatttggtgggaatcgatgtcttggttgaacttaaaaagtgcctttcctctcgggcctaaacaacactttctccagcatattttcatccaggcagaagggttaagggttaagaggtggagatattggtggttggcggtaacttgggctatttggaaattaagaaacagaattctattctcaaatgcagaatttgatgctaatagattgtttgatgaagcta

SEQ ID NO: 126840 - DNA, 417 bp, Glycine max
  unsure (1)..(417): unsure at all n locations
cagcttatccaaattctgttntagatatncgttatttattttctggcaatgngaaagttnttattcaatggcaaaacctccctccaagtgaaaatagttgggaatctgtggctaaattacaagaggtttttccgacttatcaccttgaggacaaggtgagtcttttangaaggggtattgatatgcataagcataagccacacatcaccaaggtgtacactcgcaaacaacgagcaaaagaagcaataaccatggaccaccagcagcaaggcgcacaacacccaaggggtgcaaaccacccaatagttacaacccatccaaagggtgtaaaccacctaatagttacgattcacccaaagaatgcaatgtcagaagatgcgaatcaaggggacatgacccttgggaacagtcacaatc

SEQ ID NO: 126841 - DNA, 486 bp, Glycine max
  unsure (1)..(486): unsure at all n locations
tctntggagaaacttccttgagaagctagagcttagctacatcacattcctctaataactaagtccacctccttgagaagcttccttgaaaagattcctaaagaagctagagcttagctacacacacctctctaatagctaagctcacctccttgagatgagaagctagaacttagctatacaccccctataatagctaagctcacccccatggcaaaatacatgaaaatacaaaaaaaaagtccctactacaaagactactcaaaatgccacgaaatacaaggctaaaaccctatactactagaatggccaaaatacaaggcctaaacgaaggaaaaaaacctattctaatatttacaaagataagcggactcatacttagccgatgggctcaaaatctatcctaaggctcatgagaaccctacggccttccttnggatctctggcccaatctacttggagtcttctatccaatggccttacggg

SEQ ID NO: 126842 - DNA, 443 bp, Glycine max
  unsure (1)..(443): unsure at all n locations
ttaagcaccgcggctgcagcttgagccattaaacgacaatacttttattctgatgtctgattgaggcccgtaatatatcgagacgctcgaaattgaatgtggaagctctgagcccattcaaacgacaataactttttactcggatgtctaattgacgcccgtaatatatcgacacgctcgaaattgaatgttgaagctctgagcaaattcaaacgacaataactctttactcggatgtctgattgagtcctgtcatatatcgagacgctcgaaattgaatgttgaagctctgagccaattcaaacgacaatatacttttactcggatgtctgattgagtcccatcatatatcgagacgctcgagatngaatgttgaagctctgagccaattcacacgacaataaccttttactcgaatgtctgattgagtcctgtcatataac

SEQ ID NO: 126843 - DNA, 325 bp, Glycine max
  unsure (1)..(325): unsure at all n locations
acggaccttaaaactcagcttaancattcaattttagcgtctcgatgtatgacgggacttattcttacatccgagtaaaaagttattgtcgtttgaattagctcagagcttcaacattcaattttgagagtctcgttatattacgggacacaatcagacatccgagtaaaaagttattgtcttttggattggctcagagatttaacattcaatttcgagcgtctcgatatatgacgggactcaatcagacatccgagtaaaaagttattgtcgtttgaatttgctcagagcttcaacattcaatttcgagcgtgttgatatatga

SEQ ID NO: 126844 - DNA, 479 bp, Glycine max
  unsure (1)..(479): unsure at all n locations
ctgcaagctttgaactagtctactacatcatcgcctttaatntttattgctacaacacctaaagctttccttagctactcaaatctttcaatctttgctgccttagtcatcacatctattactcgtgattcagtaggacaatagacaactttgatcacacttttgttcacttgctcctttacaaagtgaaaatttgtcttcaatatgcttgctcctttcatgggagactggattcttggccaagtcaattgcaaatttattatctacaaacaattttataggcttcttcaacttgatcctcaattctgttagtaatgaatcaagccaaatagcctgacaagcaacaaatgagcctgctatatgttctgctatatatgttgataatgaaactactattcgcttcttagaacaccatgacagtggtgctgctaataacttatacttgtaatcgaaagtattgtttcaatctgacgtatctc

SEQ ID NO: 126845 - DNA, 475 bp, Glycine max
  unsure (1)..(475): unsure at all n locations
tgagaaaatataaaacttanatcatcttagtgtatagagtatatattatatgttgaaacactagtggaagatctcgttcatacatatgagagatctatttaatgggagaatggtgttttattctcatcacatgtaaaattttgtttgatcaataacacaccgcaaatggatttctgtctggttcgtttacagaagtggtaacaaaatgagcaccacaaaagaacaagtccaccgtttgagaatttaaattaagactgaaagaagtacagcagcactctgtgttgcggggcgacaagtgcatgcagccacctcttccttctacgtgccaagtgcaaacaacaatgcatgtttctacactcttccttttctttctctttctcccttatcacttgcctcttccaatgtcttcctcttcctttctctctcacacactctnntccttttgttctgtctctcttttccaatgcttcaccca

SEQ ID NO: 126846 - DNA, 497 bp, Glycine max
  unsure (1)..(497): unsure at all n locations
cttagagcaccgcggctgcagctgcaaggtatcaatactcgactttctcgcatcacaagaataggttgcactagaattagaaggtattgtcaaagagtattctttatgaaatatatctcaatatgagtaatcgaactatagagtatccatattgctaagaacaagaaatcagaaacaaccatactatctatgcaattaaggcagaacatcatattacaagcatacatagaattataaggttcctataacaagtatataacgttcatataagaagtaagagttaaacaattaataaggttgtattaagaaattacaaacttcaacaactacattcatgactacacacaaaatagagggagttaagtagtcatgcgtttacacatcaagaaagacatactcatccaaggtatatatatacggttcanaaggttttcacaacactaatccatacatcaagagagaaatatagttattaacaacatacatgcaagaagata

SEQ ID NO: 126847 - DNA, 484 bp, Glycine max
  unsure (1)..(484): unsure at all n locations
ntgtcaattctcttagtgttggtaaggaatgtgtcaccatttatgatgttataatccagcttatactcaagagaacttcgatctaaagcacctggaaattctgaagaatcaaatggatctggtcttgttgcctctaactctaacaagaacatcaagaaaaaggtgtttaaaggaaagaagaagactcatgtcaatccaaacgatatttgtaactactgcaaggagccaggtcattggaagaaagattgtcccaagaaaaagggcaaaccatctgctgctgttgccaaggaaggttccacatctgaaaatgagcttgttctcttagttgttgatcatcaccaacattctgaaaatcagtggatattagactctggctgttcctttcatatgtgtcctaacaaaacctggtttgacacctatgaagagaaatcgggtggaaatgtcttcatgggaaatgatgtctcatgcaagacaattggaattg

SEQ ID NO: 126848 - DNA, 477 bp, Glycine max
  unsure (1)..(477): unsure at all n locations
ctgcaagcatgcaagcttgtatgattatgggggacccttcatatttgtttctangcggcggncgggcgatggtgcacaacaagcttttcacatccacaatgcgcgcagaaacccaccatcccctgttgcccacctgcaactgagctcacgtactcccacgtggcccatatcctcgattctctcaacaccgggtccccatcaatcctctcaagcttccacaacatccaatcaaagcagcattcaaacagcataagctatcacaaccaacaataacagagcgaaggcagaaaactctgctcaacacatcaaccagaatcacagcttttctcacgtagagaccacagtaacaattccttcgatccaattacttaaccgttggatcgactccaaaatgttactggaagtctatagtgcataagcctacattttgaccgttctgatctactatcanacatgcagaactcatctacatgactc

SEQ ID NO: 126849 - DNA, 462 bp, Glycine max
  unsure (1)..(462): unsure at all n locations
tcgatcccttcccagccattctctgtaccaaactttttattggcgtttatccggncgccgnaagcattcattcatttcctttcactttttcccactcgattatgatcttgtgctgctgctaaatcaagtaaccaataaaaacgctgtgcttattatttttctttcatattttagcggaattgcagataaaaataggcttggttagggtgaagaggatgagaatgtattttcaccttgttgtgtttgaatgacagaatcctatcgctatagcgctataataaatatatgatgtaacatgatgttatagtatgtcaattggtatcatataatcctttattgtgattggaagttgttaacttacacagaataatgcttagtacagatctgatcttctctgttgtcttgatacttcttggtaaatatgcatgattgagtggaatgaatagaggaattgaagacaca

SEQ ID NO: 126850 - DNA, 418 bp, Glycine max
  unsure (1)..(418): unsure at all n locations
gcatgcaagcttcttgagatgtgaacanggattttgtcatttctgtttctgngaaggnngagaaggagccttccttttcttagatgccatatgcaaaatataagacaaaacacaagacattagcacaggttattttcacaaaaacataaaataaaactaaaattttgactgggcgcttagcatagcatgttgagcttagcgagccttataaacttttactcagcggctaaacgctagtctgctgcgcttagcctgaagacacaaaaaatattttttctacagattaggcttagcacaacaattgagcttagcatggcgcgcttcgctcagcctcatcagaatgatacttangcttagtgcacagggcgcgcttagcctaactacaaaaacttaaaagatagtgagagagttgagctta

SEQ ID NO: 126851 - DNA, 468 bp, Glycine max
  unsure (1)..(468): unsure at all n locations
tgaagagaatgctntaatggaggagaagaaagagataaggtggtgtcacgaaattgaaggaataaaagagggagagaagtggaactttgaagtgtgtctcataagactttcattcatcaaagttacaacaagtgttacatatgcttctgtttatagacaaggtagcttccttgagaagctttcttgagaaaacttccttgagaagcttctttgagaaaaattccttgagaagctagagcttagctatacatacccctctaataactaagctcacctccttgagaagcttccttgagaaggttcctaaagaagctagagcttagctacacacacctttctaatagctaagctcacctccttgagatgagaagctagagcttagctacacactcctataatagctaagctcacccctattccaaaaatacatgaaaatacaaaaaaaaattccctactacacagactact

SEQ ID NO: 126852 - DNA, 420 bp, Glycine max
  unsure (1)..(420): unsure at all n locations
agcttgaccaatcccgacccaatcttttcttttttattcagtgagaacctgagacgtacctaaacagacgagctcctggcagtcaaccgataaaagaacaaagaccacatatcaaggaggcttgtgtggtggctggccaactatggatcttgagtgacatttggaatatggcctctggtaatcgattacaaagggtgtgtaatcgattacaaggcttaaaaatggggcctggaagtcgagatggcctctggtaaccgatcaccaaggggtgtaattgattaccaagcttagaaatagatacagtatgttgaggaggtctctggttatcgattaccaatactgtgntatcaataacctaaagtaacatgccactggtaatccattaccatttacttgttatctattacacagtgcatattg

SEQ ID NO: 126853 - DNA, 469 bp, Glycine max
  unsure (1)..(469): unsure at all n locations
tcagagctagggagacatctctaatgctagncttttttgttctcttacattacggagatgatggatgagaagaacattgtttggtgataattggaatagaagatcaaaagagatgatttacaaaagcctgtttggggaattgtagtacattataaaaccaacacaaacatgttaaaatgatttttggcttgagaaatcatacattcttattgtattgtttgattggaatccacatgaaaaagagcgtgtattgagttaaagaggaaagttggctcatgagtcaagactagaagcgttcgtggttcaacttgctaatttggaatggattttagataataggtcatccaattcgacaataaaagtacagcttagtttggatttatttgaattacatatcgaatcctatccaattgaaagtaattgagtatatcactttcaaatatcaaaattcccctctgtaataatttta

SEQ ID NO: 126854 - DNA, 390 bp, Glycine max
  unsure (1)..(390): unsure at all n locations
angcttgactagagcgagaagannntatgccttatttatctatcttttttatnacgacagtccaattaagaatgagaaatcccatagagaaaacgcccgattgattctgctctttcgcttcattttactaaaagatattgtctattattataatattattgtacctcttgcttgatatccaacgtggttacggctcgaccgaacggtcagaattcatttagccgaattaacagatgatcaattcaaatgatcggtggaaattattttattttgtgatacgcgagaaatgacttaaataaatgactggagcacgtcaaatggcggtttagaatgcagatgacatcgagaatacaaatgcatgaaacataatgtggaccaccacgggtacat

SEQ ID NO: 126855 - DNA, 471 bp, Glycine max
tcatcaaaacaaacctctaattattccaggccactctatgcttattatctctcattcatttcaaacataaccgttcatttcaaacaaaacacaccaccgaatatcaaattcaaccagttcactgttcaaacaagctttttgttcaagcacgaaacaacactaaaataactggaatttcaaaagattggaatctaaatgaacgatattaatacaactgaaacataaatcaaactaaaaagcaaactaaagactgataaactaaaatgttcataattttcaaaattaaaaacaaaacagaatttaaatgtcctaatcctcctgtggatgatcttcatttagatccgatactggagctgctgatgaatcctgaatggtgggctcaggctccaatgctagtattgatggcaaggtctccacacgagctgatgtaaaggatggctctggcatgggaattggagaaagtttctcctc

SEQ ID NO: 126856 - DNA, 469 bp, Glycine max
agcttcatgatgattcaagattgattcatggttgtttgatgataacaaagatgatgacaaaaagctcaaaagtcaagattacttcatgataacaaagatgatgacattcaagaatgagttccagattgagtcaagaacacttcaaggatcaagaggaaatttgatttcaagaatcaagaatcacgattcaagattcaagactcaaagattcaagaatcaagagaagacttaatcaagataagtattaaaaagtttttcaaaacattgagtaacacaaaaagttttcacaaaatcattaccaaagagttttactctctggtaatcgattaccagaatatagtaatcgattaccagtggttttaaaacattaagattttcaaaattcaaaatgaagagtcacatatgttgatgtgtaatcgattacacctttatggtaattgattaccagtgactggtttcgaaaaattca

SEQ ID NO: 126857 - DNA, 453 bp, Glycine max
  unsure (1)..(453): unsure at all n locations
tanacaatgagtgcaaatcttatgtagtagattttattttatttgaaccagtaaaatctttattggttaatcttaaccttaaaatattaaccacatcaaatccattttctataatatccataaatattatattctgtttaaatattgaacctaaatattatatatactgtaacaccctgaaatttcgttgattgtaaatcaatgtttaaatgtatttctcgtgttatttgattatgcgattgatttggatgagttgaggtattgtgtgaattaaccatgtgtgatttacatgatgtgaatgttgagttatgtagagctttattgacttaagtctaaattatgagatttcgagatttacctaaatctgttccggtaaaatcacaatcccagacttgttaaccattggatcaccttccaattcggactgtagcttcataactcatgtcttcacat

SEQ ID NO: 126858 - DNA, 330 bp, Glycine max
gcattactggcatcaaccttcgtaattcaactgtttcaactctaccactaaatgtttcaacgtagcatacatatcatccattggtggatgatttctttcaccaacacgtcgtgaaggaatattagtcttatattcaatccaacgtggacccctttgcttcctcacatcagattctctcataagcgttgatgctctcgcaactggatcccactctatatcatctgcatatatatgtgctaacaacatgaggtgtcctgcattgataagctacatttcgacatatacttggcggccatctcaccaagctcaagatggccatatgatttacat

SEQ ID NO: 126859 - DNA, 459 bp, Glycine max
  unsure (1)..(459): unsure at all n locations
agctnttcgattcattctatgtacctatangtttccacattgngnnncgngcatttttattctcgttttgtttactttttataccccctcttgacatgcttaagccattntacttaagtcatttctcgcttaacttaaaaataaaataaatttccaccgaacgtttgaattgtattatccgttaacttcggttaaaatgaattccgaccgttcggtcgtgccgtaaccacattggaaatcaaaaaagaggtaaaaaataatataataataaaaaaaacatcttttagtaaaataaagcggaaaatcaatcggacgttttctctttgggatttctcattcttaatcgaatggactaataactaaagtgaaactaaggctaaaatcaactcgcctagtcaagctcgtccacaaaaatagggtttgaagtttgtcatttcacaatctcattaagtaaaatgg

SEQ ID NO: 126860 - DNA, 465 bp, Glycine max
  unsure (1)..(465): unsure at all n locations
cgaagcaagagccgttctgagagctngatatgagtttgnttgtgatcgngagatcctagaggtgaaggagacatcctcaccacttgtatttttgcaatctttcatcttgttcttctctttgttgtaaagaaggcttcctggttatggaaagctaaatcctttgttggatcttccctgtagatacctgatgtaaatatatttctatctatttaatgatgttttgtgtgttctctgtgctatctgcttttcacttcagtatgcctttaccttgatcacgtagatgcatgctttgttagggtcattcaacagtggaaattggtctgattctaaagtcctttatagtacaacgctaagttgtcatactatcacgacgaatcggcgtgcgataatttagttgtgtatgtgtgtcttaatgcgtgcctgagtgagtttagtccaacaagaggaatctgcgaacaatgcttg

SEQ ID NO: 126861 - DNA, 491 bp, Glycine max
  unsure (1)..(491): unsure at all n locations
ttaactcacctgcggcatgcaagcttaccagtaatctctgcaggagcagaacttatccttgaaatgatgaaacctagttgtatctctaactatgatttctcttccttctatagttgagatgtacttggttgcagagtggcaatctccacagactctcaagtttttgaacacccggattggaacccctaatggtacctttaaaaggccaaatgcaattgccagcttctcactatgccataaaagaagctgttctttcagctcctctcccacatcatgcaacacaaattcaagatcaggcacataaccagccaacttcattttcttctccaagtcttttagtttctcatgtatagaagccaattcagggtgcaatctatcacttgatctaaacccatgcaccacactgtttatttcaatccaactatatccaggtatcttcactacattattggctntcattgatcttcggatactagcaacatggtcccatc

SEQ ID NO: 126862 - DNA, 480 bp, Glycine max
  unsure (1)..(480): unsure at all n locations
ctggttggatctagctagctatatgatgttactgatcaagttactctaacttgtaataatagattaattactaattagtatacgttacagacttagagtacattaaatcgtaatatatgtgatggggttggcgtcatttgaaaagtggcaattaattccaggtccacttgtattgtaaggccttgaatgcatgatagtcacgggaaggtgccatttgttgctctcttggaacagctttttccgtttttggtgacgtgccatgaagaggcaccaacacaattacatacacatactgccgctagctctgtgtaatttgctaggataatatgattttacagctagacttacaagctagttacaactaccattggccctgccgtgtatattattaaatatcacgtgtattctttgatagaaaacaatcttgtttgaacagatcgaganaataacatgcatgcatggatgataagattctcatga

SEQ ID NO: 126863 - DNA, 457 bp, Glycine max
  unsure (1)..(457): unsure at all n locations
agctntaatgtacatttattaanaagaaaatatattatttatatatatattgaatactaattaaatttagcatgttaattttatacataaaaaatagaatagctgtattaaataagatcattttttggaaattttattttttatgtataaatgatctctaattaaatttaattaatattcaaaatgttccttccaaaaaaatattcaaaatatttatattttttcctttttagaaaaaataataatttctaaaaatgatattcaatatagctattctaatttttatatataacttatttctaaaattaatatgttaaattcacttaatattcaaaatatttttatttttaataaatatacattaattaagcttgttcagtgttttttttttatgagtaggcttgttcattcgtttttactttaatagctcattatatatgaataaacaaaatgacca

SEQ ID NO: 126864 - DNA, 439 bp, Glycine max
tcctcaggtccctccaccagtaggaaaatcacactttgtctcatcttaactggaactctgtccaacctccatatttggagttaatgattctagcccataaatgttgctgatcagaagctaaggcccatatccatttgcccagcaaagctacattgaatttagatatttctttaatccccagacccccttcagccttaggaaggaaaataacctcccattttacccacggaattttcttgtaatccttatctcccccctccccccccccccccataaaaaattcctttgcaatgctaccaatctatgagctaccttttgaggaatcttgaagaaggataagaggtaaattggtaaagcattgaggatagaatttatcacaacgacctttcctgccatggatatatttctctttgcccacttggataatttagattcacat

SEQ ID NO: 126865 - DNA, 259 bp, Glycine max
aatattatgccattgtgaccacacctgacctatccacattaggctatggaaacccttcagagctcgatctcgctattcattgtgatgcatccaatatcgggtgcagcttccttagtgatcacattaatacttgccataataaacgtgccaaggcgaacctctccataccaagatagttaaggaaccatcaccttccttagactgatgaagccaggaacacgagcaataatcctcaatcatgtatacagtccatataacc

SEQ ID NO: 126866 - DNA, 476 bp, Glycine max
  unsure (1)..(476): unsure at all n locations
aaagcagaaactngacagtgggtggacactccatattttatttattctgactgaggacaaatncaagctctctaagtttggaatttcaacctgcaagcaagcacgtacacagttaatataattacaacaacttaaaaaataaaactgatgacaaattaattaaaattgaaggaaaagtatgcaatatcatataccacttcaccaaagagagggggagacatgccactacgttcatcttgagcaatagtaattactttctcatccctctctactgtttgtgcttgtgtcagtagagattcacaagttccctccactctgtaattataaaaactaataaatgatggcatccgcttcattgtcaaacagtgtaacatataatactcaaccttgtcaggatgtactagtatttcaaagagtctctttatagaaccacaatcagaaacatcaattggttcgagactttaaacagatttatc

SEQ ID NO: 126867 - DNA, 457 bp, Glycine max
  unsure (1)..(457): unsure at all n locations
accttacagcaccgcggctgcagcttattaaagctcacccttttcnttttttttatgctncnagcacactccagacaacttttcatagatcccaacggtcagatcatggaaaagtgtttttttgaagttacagaccacatttcgagaagatccaacggttaatgaaggctgggcaccgtttttaccgaagcagcttcatgtagctttctctagaagcttcattaagaggcttcctctagaagcttcctcgtggcttctttgagaagctttctcaagaggctcctttgagaatctagatccttatctatccacccctctattaactaaattaacttccttaaaaataattacggatgagaataacgcaacacataatcaaacatcgcacataattactaataatatatagatatatatattagggtgttacagggtctgctgatcaagaatctgcatc

SEQ ID NO: 126868 - DNA, 376 bp, Glycine max
  unsure (1)..(376): unsure at all n locations
ggtcgttntcaacaataagcgtagaagcgagcttattgttatcttgctaaataggctacaacacaaagtgagcttgattatatgaagccagaaaatgaaatacttgcttcacgttatgaagcaaccggttgtgtatgagcgtctacatctcttaatatggattatngcaaattgtcgcgagagcaggatgaatagcgtaaagatgaacacgatgaacatagggtgaagattttaactgatatggtgtatcgtcaagatcagggactaaatgaaagactgaacttagtgcttactgcatgggcaaatacttcgataattaaactggttggggttaatgagcaaattgccttatatgagaataacgtgatctatcaaa

SEQ ID NO: 126869 - DNA, 444 bp, Glycine max
  unsure (1)..(444): unsure at all n locations
agcttcatctgatgtattagnagattatnntttatntgtttattaatcattatagaataaaatatggtatatgtttttgcgggacaattctagatttattatcttttttttctaagcagatgtgatcgactacactagacattagcattggtgacaaatatattgttcaaccttcgtaccatattattattattattattattattattattattattattattattattattattattattattactctctcttttcgtaatctgttctttctccactttcatccatcttttgtttttgttattctgatattataattttgttgttgtaataaataatcacggttattgttcccaacacgtgtgttgcatctttggcgggcacaatagaacaagagaatacaatatcaaatgagtgagtctgctttaacgatcggaatgtgtc

SEQ ID NO: 126870 - DNA, 468 bp, Glycine max
  unsure (1)..(468): unsure at all n locations
ntatgttccaactcaacaagtaggtgataagattttccatatactatctggaaaggagtaagtcttgtaggggctctgtatgctgttatgtatgcccataaagcttcatcaagcttttgggaccaatccttccttgattgagcaactattttttctaaaattttcttaacttccctattagaaacttcatcttgcccattggtctgagggtggtaaggtgaggctaccttatttttgacattgtagtgttggaggacttttgtgagttggacattacaaaaatgagatcctctgtcacttattagtaccctgggtgtgccaaaccttgagaagatattcctttttaggaagcgaataacagtatttgcatctacgtgctataccgctactgcttccacccattntgttacatagtccacaaccaataaaatatattcatgtgagtaagatgaaggaaatggacctatg

SEQ ID NO: 126871 - DNA, 387 bp, Glycine max
  unsure (1)..(387): unsure at all n locations
agcttctgttttcaatcacgagcgttctccattattattgtactcaancggacatccgagttaaaagttattggtttttgactcttcttaaagcttccagaatctattttgagcgcctcgatatattataaggctcaatcggacttccgagataaaaggtaatgtcgtatgacttttctaagagcttccgtattcaatttcgagcgtgtcaatatattacagggctcaatcgaacatcccagtaaaagtgactgtctgttgatctttctcacagctaccgttttaaataacaagcgtctcgatatcttacaggacacacatcggacattcgagtcaacaagtaatgtggtttgaatttgctaatagcttctgttacatttacagcat

SEQ ID NO: 126872 - DNA, 333 bp, Glycine max
  unsure (1)..(333): unsure at all n locations
accatagaaactcagcttgagccattanacgacataactttgaatttttgttttttgtgcccatngatatcgaacgctcgtattgaaaaggaagctctaacaaaagtaaacgacttaactttaacttggatgttcgatgcgccctgtctatatcgagacgctcgaaattgaaaacggaagctctaagaaatgtcaaacgacaataacttttaactcggatgtccgattgagtactgtaatatatcgagacgctcgtaattaaataacgaatctctgagcacattcaaacgacaataacttttgtatcggatattcgaagtgtctctgtagata

SEQ ID NO: 126873 - DNA, 461 bp, Glycine max
  unsure (1)..(461): unsure at all n locations
agcttttggcanaggaagaagaatataaaatttatgattatgttctacgagattcanaggatgtacaggattgtaataattgtnctaaagttatagaaatgcaagtcaaggtcttgctcttatagactcttcaagtctggtcaagaaaaccattagaagagttatgacctttagaaaaacttgaaaaccattggaagagttacatcttctgattttcattcaaaacttatcactggtgatcgattaccaaatcattgtaatcgattacacaacgcatttatgtgaaaggatgtgactcttcataatcgaatttgaatttcaacgttcaaacacactagctatcgattaccaatatgttgtaatcgcattcaccatgttgaaaataattagaatgtggaaattcagtgaaagctttgaaaacaactttgtactggtatcgataccagttactgaatcgatac

SEQ ID NO: 126874 - DNA, 335 bp, Glycine max
  unsure (1)..(335): unsure at all n locations
tctacgtnccttggatataagttgacctttggcatgtctttttattctgaagcagcacattgcatgaattaaattattgcattttcccaaagtttgaattaatggcaggatcatttggttggcaggtgtgcagtctcaatcgctgtttctgaagagtcaaggctgcaggggcattagaatcattggcaagctacacacgtgtgcaagcaactgaacggctatatgtgcatagtaaataattatattataaatgcttttaatgctacacattctatgggtcaactggatctgacaatagggccagcatcatgatcaaacaatgtagacagaggttt

SEQ ID NO: 126875 - DNA, 467 bp, Glycine max
  unsure (1)..(467): unsure at all n locations
agcttaagctccttcaactgcacattgctcttattatttgaagagtatccttggggaaccttcacccgacgaagacactgacagaaacttatcttctccttcttggacaaagtatggcaggctgggggcaagtaaattttcttcccatcagaccttggatgcaactgtgatcgtatgcccatatcagctagatcttgacgggtattcaagccatccttcgtcttgccttgaatgttaaggagcgtcccaatcacactgtcacaaacattnttctccacatgcataacatcaatacaatgtctaacgtcaagatcagaccagtatggaagatcaaagaaaatggacctcttcttccacatgcaactcttacttttatccttcttttaggtcttcccaaatacaatattcaggtgtngaacccgctgatatacctgttcaccagtcaacggtatcggcgcaatatcatg

SEQ ID NO: 126876 - DNA, 431 bp, Glycine max
  unsure (1)..(431): unsure at all n locations
ggccttagatagccttaaagtgatcagataatagtatattttttatgtaangaggaaccgagtaaaaggcgtacaatgtcctcgctacttatataaaacccatctactattaagcacggacagccctacatctcatccaacctaaattttgatgtatcacaatctgcatgaatcattggtactctagtgaggacttgactagttgacaagactactatgtcacaggacttatctgtcctcaatatcatctacgactcaagagacaatgctctgcttatctagcatccaacaggctaaaagcaacgagcatccacccttatggaaaccactagtacacactagctagttagtcaacttatgtgaccaatctcgaagaaactctaaagattgagaataacatatgacggaacagcatgtgttctattgacatg

SEQ ID NO: 126877 - DNA, 469 bp, Glycine max
  unsure (1)..(469): unsure at all n locations
agcttgacgttggagttgatccatctattgtttcttctctnngcaaatggaaacttctaggctnttgattntgacgtgataaaaccttttattaaaaaagggtgcttgattcaatcccatgtttttgctagaatgaaaaactctattgatcaatactctgacaccctatcatggaggaaatataatgaaagcatgagggaacgtttatgctatgcatgacacaaatgcactttacagacacaagagccaggaagatcgtgtcttcttactcacaagcattgngcctcatagttcattcacagtcattaccatggtgccccatgcatgcatttaagaaggtgattggaccttccgaattcccgtgacaaaatgacaagacaaatgcaaggcatgagtgatgacacagtatggatatacatgcatganagcacgtggttgatgaaaagaaacatacttatacaacaaccat

SEQ ID NO: 126878 - DNA, 469 bp, Glycine max
  unsure (1)..(469): unsure at all n locations
ntanggcaggtgccaaccggtgctaggttcatgatcagatcaatcaccaccccgcgtctggctaaagacgttaaagaagcgctcctaggaggcagcctagtatctctaactttgcactttaatttcatgtttcatacttgttcattttcttgaattatcttatgaattcgcctaagcttatacataattaataaggtttaaaagggaaatatatacaacaaaaactttgcaaaaaagttttgcaaaaaaaaataataataataatttttcaactcgcctgngcgagcaaagtgtgacaaaaaaaataaaagagagaggggtgaagccaaatttcaccccatcttcccccattttcttcanaactcaccaaaggctccccaagaacccatgggaaccaccattttgcaccaacttcaagctntttctgcacatntgtctcaattattcttgcattccattcatcccactc

SEQ ID NO: 126879 - DNA, 476 bp, Glycine max
  unsure (1)..(476): unsure at all n locations
gaccttaagtcacctgcggcatgcaagcttggaaatgatttcttacaaaatttattatataaagcgactaacaaactcccccaaatttacagttntgcttgtccttaagcaaagaaagaacagttcacttgtcctcaagtgacaaagacagtggccaatcaaaagaaaatggtgtttgattcatcaagggcatcaaccatatgaactgaataccatggaatgcttaaatcaattaattctcacaagcatgcagtttttcaatgataagagcacaagtattagagtcacagctgaaataagctagtaagcacaagtaggactttctaggcttgtaacggngttaggctgccaacaattcatggtttttctaggattcaaaagcttaggttctaggagagcattcatccatagaataaccttcactttntcattcattccttccccatacttgccctttntcttagctttcatacctg

SEQ ID NO: 126880 - DNA, 446 bp, Glycine max
  unsure (1)..(446): unsure at all n locations
tgagatgaggaagtgttgaagggtgaaacttcctgctnttattgttgaccacagagtggtacctggagatatgtcgcgggggtcaggagaccttggggacgtcaggtggggtgctattgcccaaaaccaagcttgaccaatcccgacccaacccgggcatagtcggtcagtgagaacctgtgatgtacctaaacaggcgagctcctggcagtcaacagataaaaggaaaacaagaccacaaagcaaggaggcttgtggtggctggccagctgtgaattttgtgtaatatgtggattgtggcctctggtaatcgattaccaagggtgggtaatcgattacaaggcttaaaattgaggacaggaggctaagatggtctctggtaatcgattaccaacgggtgtaatcgattaccacgcttgaaaacgaagtcggaaacttatggagcc

SEQ ID NO: 126881 - DNA, 456 bp, Glycine max
  unsure (1)..(456): unsure at all n locations
agcttccattggttgagttttgcttcccttttacgctttagttctctccccacaagtaagtgcaatttcccttggttatttggctctccattgatgtgttttggtgctttagttgctcattttttgcaaaattcgtgaagcaattcgcatctgaatccatgcttgttttgtcgagttgagggtttgtgtgagaaggaattaggcctatgttgtattctgaagcaatggggcatgccacattgtccccattctcttgcaatttgtgtctaaacgtgcgccccccaagtgctcggtgaaatgccccaatgatatatgaatatgaatttacaaaattgggatggtgggactgttttatatatgtagagacagcatangagattcaaaataggtgcccaaatgcaatttcaagcttacgaacccaaactatttagcttcaatgcaagaaaacatactcat

SEQ ID NO: 126882 - DNA, 468 bp, Glycine max
  unsure (1)..(468): unsure at all n locations
tatgctgcanacatctacaacagacctcctcaacctcagtatcaatatcagccacaacagaataactatgacctctccagaaacaggtacaatcccagatggaggaatcatcccaaccttagatggtcgaatccttcacaacagtagcaacaacaacagccttattttcaaaatgttgttggcccaagcagaccatacgttcctccaccaatccaacagcaacaacagcaacagccccagaaacaacaaacagttgaggcccctccgtaaccttcccttgaagaacttgtgaggcaaatgactatgcaaaacatgcagtttcaacaagagactagagcctccattcagagcttaactaatcaaatgggacagttggctacacagttaaatcaacaacagtcccaaaattatgatagattaccttctcaatctgtccagaatcccaaaaatgtgagtgccattacattg

SEQ ID NO: 126883 - DNA, 393 bp, Glycine max
  unsure (1)..(393): unsure at all n locations
agcttgctacattgatgcatcttggctatagtttctntttatttatgcacttaaattctggaggcttaagtttgctatcaaaggagaagatggtgagaggactaccctatattaaccaccctgatcaaccctgtgaaggatgtttacttgagaagcaatttagagtgagtttttcaaaggagtaaaacccacaagctaagaagccactcaagctaatatatggtcacgtctgtgggccaatcaagccaagctcaccaggtaaaaataattatttcctccttttgattgatggtttttcaagaaaaacataagtctatttcttatagaaaaaatcacaagactttttcgcctttaagaaggttaaagctgtagtggagaaagaaaaaggtcaaa

SEQ ID NO: 126884 - DNA, 473 bp, Glycine max
  unsure (1)..(473): unsure at all n locations
ggacctatgaatctcagcttcaacctctcacnaggagaagacaaaaataaagaaggtgtgtctttcaactctaagaggtgagtttgaatccttacatatgaaagagttagagtccattttcgattatttttcaagaattctcattgtttcaaatcaactaaaaagaaatggtgagaagttacaagatgtaagaattatggagaagatactacgctcggtagatcccaaatttgagcatattgtcatgataatcaaggaaaccaaagatttagaaactatgacgatagaacaacttcaaggatcactgcaagcttatgaggagaaacataagaagaagcaagagatcattgagcaacttttcaagatccacctgaaggagaaggaagaaagtcaaggaaatgagagaagtcaacaggttgaggtagaggtcgaggtcgcgactaaagacaagttggatgtggcaatagtggatg

SEQ ID NO: 126885 - DNA, 443 bp, Glycine max
  unsure (1)..(443): unsure at all n locations
agcttctcgatatggtatgcgtctgaaacggttatgctatatgaatatttatgancagnncgaacnncccgagagcgttccgttgttcaatttctagcctcacgataccctatgagcctgaatgggacatccgattgaaaactaatgaccatctgaatttctcgagacctccctttgataaatttctagcgtctcgatacgctatgcgcctacatcgaacatgcgagtgaaaagtcaacaccattttaatttcttgagagattccgttagtcaatttccagcgtctcgatatgttatgcgcctgaatcggacatgcgcataaaaagagtgactatgttaatatctccggagcatctgttgtgcagatactagcgtctcgatactctatgcgcctgattagacatgcgagcgaatagttataccatctgaattatcgagagctt

SEQ ID NO: 126886 - DNA, 482 bp, Glycine max
ctcaagcattgatgcaacattcggagaggttcatgaaacaacgagattatgctctccatgatatgttggatcaaatggagaatagatatcatactgaagaataaaggaggagaagagggaatgatggtgttcctagacaaaaccgaattgatggtattaaactcaacattcctccatttaaaggaaagaatgatccggaggcctacttggagtgggagatgaaaatagagcatgttttctcatgcaacaactatgaggaggaccagaaagtgaagcttgctgccacagagttttccgactatgctcttgtgtggtggaacaagctactaaatgagagagctcgagatgaagagccaatggttgatacatggacagagatgagatatatcatgaagaagcggtatgtgccggctagttactcaacggactcgaaattcaagctctcaaaactaacaccatgcaaccagggggtaactatggct

SEQ ID NO: 126887 - DNA, 478 bp, Glycine max
  unsure (1)..(478): unsure at all n locations
ctcaagcttacaagcaatngaatanggatacttacaagaggcgcctnnttttatttttgttcacacccgaccatcgtaaacaggcgagtatattgtgtgtaatactttcttctttccattagattgcggccttgagtggttcaatccacttgctgaaaggaaaatgagattattgctacttacgaactgcgaactggactgaattaataactatggtattgaattcagttattaaatataaattatatattatcatctatatatactccagagaaattgaggacgagctactgggtctaggataagcaatgtcatgttaacatgacatggctgttcaaaataacaaattggttgatttataattaaaacttttaacttgtgaactggacaagtacctcaatgatttgtcatcctgagcatgaacattaagtnctagacgagagtaacattcacatgttgcacattcgcaattggacct

SEQ ID NO: 126888 - DNA, 452 bp, Glycine max
  unsure (1)..(452): unsure at all n locations
gcaagctcctatagaaggttcattcctaatttctctacaattgcatcatttcttaatgagnagaagaagaagaacgtggcatttacctgtggtgaaaaacaagagcatgcctttgctttgctcaaagaaaagcttactaaggcacctattctagctcttcctgacttttctaaaacttttgagctagaatgtgatgcctctggagtgggagtaggagttgtattgttacaaggtgggcaccctattgcttattttagtgaaaaacttcatagtgcctccctcaactaccccacctatgatacagagctntatgccgtaataagagtcctccatacttgtgaacattaccttatttccaaggaatntgtcattcatagtgatcatcaatcacttaagtacattagagggcaaagcaagttaaacaagacgcatgcagaataggtagagtacct

SEQ ID NO: 126889 - DNA, 420 bp, Glycine max
tacttacccgttgaagactgaagagaacgatagaacgaactatgaatcttgaagaacggccgagaatcttcgcgtcattactcacggaaacgttacggaagcgcctcggcttggattttcttcacggaactaattttcctcagctatttcgagagagagagaagtgcctaaggggctgaaccctcttctacttcacttctccctctatttatagaaaattgggggagaagcatgccacccagctcgcccaggcgagcaagggtgcttcctccagaagcaatagccttctagaggaatcttctggagggcccaagtgggcctggttgctatttgcacccccatttttactaaatacaccccctgccttttgtttggtgattctttttttgtaaagctaccggaacttacgaatttcataac

SEQ ID NO: 126890 - DNA, 444 bp, Glycine max
  unsure (1)..(444): unsure at all n locations
acttccaagtnttaagtactttttcatttctatcctaagcaaagttcccaatgtcctattaacaacttccatgtgcccatcggtttgcgggtgacaagtagttgaaaataacaatttagtgcccaactcgccccacaaagtcctccaaaaatggcttaggaacttagagtccctatcactaacaatgctccttggcaaaccatggagtctcacaatctccttgaaaaacaaatcagccacatgggaagcatcatcaactttttacatggaataaaatgagccattttagaagacctatcagcaaccacaaaaatggaatctctaccactgcttgtttgtggcagccccataacaaaatacatggataaatcaatccaacgatactccggaattggcaatggagtatacaatccatgatgctttatcttagactttgcgctttta

SEQ ID NO: 126891 - DNA, 447 bp, Glycine max
  unsure (1)..(447): unsure at all n locations
tatgaaactcagctgaagtgtgagcccactgtctttcatagtttattcttgttttgngnctactatcattgtcataattgttttctccgtcattgaggtgccacttgagctgccaggtctctccacctttgggcgtattcttttgaaagatacgtgccccctttttgcacatgttctgtagttgcatcctatccgaagacattatactgacactacctaacgaaggcaaccactaggtccttgcaagaatggactctggaaggttccaagttagtgtaccaggtaacagctaccccagtaagactttcttggaaggaatgtatcagcaattcctcatcttttgcgtatgccgccatcttncaataatacatctttagatggttcttgtggcaagtagtccccttgtacttgtcaaagtccagcaccttgaactagagaggggtgatg

SEQ ID NO: 126892 - DNA, 463 bp, Glycine max
  unsure (1)..(463): unsure at all n locations
agcttgtaggattatggggtacccttcacatgtggtattaggtggcggncgggcgatggtgcacaacaagtttttccacatccacaatgcgcgcataaacccaccatcccctgttgcccacctccatctgagctcacgtactcccacgtagcccatatcctcgtttctcccaacaccgggtccccatcaatcctcccaagcttccacaacatccaagcaaaacaacattcaaacagcacaagctatcacagccaagcaaaacagagcaaaggcagaagactctgccaaaacaccacccaaatcacagcttttctcacttaaagaccccagtaacaattccttcgatccaagtcactaaccgttggatcgactccaatattttactggaagtctctagtacttaagcctacattgtgaccggtgggatctactagcaaacattcagaactcattctacattact

SEQ ID NO: 126893 - DNA, 463 bp, Glycine max
  unsure (1)..(463): unsure at all n locations
cgagatgaggaagtgtagaagggtgaaacttcctgctnttattctttgaccacagagtggtacctggagatatgtcgcggaggtcaggagaccttggggacgtcaggtggggtgctattgcccaaaaccaagcttgaccaatcccgacccaacccgggcatagtcagtcagtgagaacctgtgatgtacctaaacaggcgagctcctggcagtcaacagataaaaggaacaaagaccacaaagcaaggaggcttgtgtggtggctagccaggtgtgaatctgtgtgatatatgggatatgggctttggtaatcgattaccaacggtgggtaatcgattacaaggcttanaaatgaagacaggagactaagatggtctctggtaatcgattaccaacgggtgtaatcgattaccaggcttgataacgaggtcaggaagctaggagggcttctagtaatcgatta

SEQ ID NO: 126894 - DNA, 353 bp, Glycine max
  unsure (1)..(353): unsure at all n locations
ccggatccttgagtcacctgggctgcagctagcagttatcagaacgcagatattatgatgantagcatgaactccctaagcacataggtcaggctaaccgattccttgaccaacccagaaaagatctccaaatgtacaaacttgttaagccataaggataggcttagcggttcaaacacatgctagagaggtggaagaactacacaacatgacaggacaaaaagaccccgccgttacacatatgaaaccaaacaacacaaattgggttaaccctacaacaccaaaataaccaacttatgattaaagagagagatgatacaactaanaaggaaatgaagaagcttaagaagaac

SEQ ID NO: 126895 - DNA, 464 bp, Glycine max
  unsure (1)..(464): unsure at all n locations
ntagcaaaaggttagaaagcgtgattctccacctttctattcctgtaaccttcaacataaatatatatgactataatggtttatttcaatcagatacattttgctctaaggacttttccaccattcatgtattatttaatttaatacaaaacacaattaatgtataaaatttaatgatatattttaattaataaattcatataattaattttaattaatttcacattaatgttgggacatgtgtcaaaaaagaaaaagaaaatcatttaaaagattcaagcccccttttgttgtattaccaccaaaacatttgattattttttaaaatctctctgaatagactcactacgttcatataagaagtaaatgaaattatcaagaatgatgtacaaaaaagggaaagagagattaaattagctatgatagtattcaatatattttattaccagcatcaaatattatat

SEQ ID NO: 126896 - DNA, 467 bp, Glycine max
  unsure (1)..(467): unsure at all n locations
agcttcaccggatgatgccgatngaacattttctaatctacatcatccaattgttaataagggatagaatagaatagacattggctggtgtcggtcgttatatggccctgactgatatccttccgctgacattgcgcaatttcttttacaaacgctggccgataatgtttttttacggtagatgaagattttngttttggtgttgcctaaaaaatttccaatgtaggtcgcctatgtttttgcgtgcgagctcaaccgaggttgtgtttcggccgacactggtgtgttctcatttagtcggccaagaaaacgttagcccaccgcggcaaaaagactcattattcacgaaaatttatcgaataaatgatggttgacgtccacatggtgagatgacagatcgaggtcaaacaattttatccaaatcaaatcaaatcaaatctgttatccaaatcatatccaatctgcta

SEQ ID NO: 126897 - DNA, 456 bp, Glycine max
  unsure (1)..(456): unsure at all n locations
ntacatcagattntagtaatgacccactaacctttattttttatttcttaatgccattaacctagggaattaaaagaacttaatggttgagtgtaactgaaattgtggcaaccaaaagtctgatgcctgngttgccaattgggcccttattacaacttgaactaaacctaactaaagcctttttagttgattaacccaaaacatatttttggtcagccaactttacaaggattaggccattatttagacaaactgaacactctaaaattgagacaaagtggtgccatttagtcctcctccatttgggccatgatacaactcacaaccttggacttttctccttgaaacttgggcttgtattcaaatagtatggtcaacacttgttgagacgctcgaaattgaacaacggatgccctcgagaaattcaaatggacataacctttcactcngatatgc

SEQ ID NO: 126898 - DNA, 481 bp, Glycine max
cccggatccttaagcacctgggctgcactgcacctcacacccccatcttcttttatttacaacacgacaaaggagggggaaaaaccgtacacgtgtaaaaaaatattcttttagtgcatatagcaagtagtatcattcaaggaaacaattttaatcttaataagaggagattattatggattacaagagtttagaatgtgaatatttaacttaattgtttgcatagatttaaaatcaattattaattaagccaaaaaaaattattttagttgatggaaaattaattattagatagtttaaagtcacctttaattattaattaagttaaaataatgtcatattagttgatggaaaatcattaaatagtttgaaatcacctcatgtcgggtcaattcgaatatgttcaagggtatattaaatttaaaatggatcgagttatccaatctattatataataatataaagcacaatatgaataatc

SEQ ID NO: 126899 - DNA, 460 bp, Glycine max
  unsure (1)..(460): unsure at all n locations
tgtggatagaaagaccataagtaccacagaagcatgtnttaatctgataacatgaatctaattgaaaagntcattgttaatgttaacttgtaaattgaaaagaccataagtttgtcaactgcctaactaaaccctcttcttttatcctggctgaggtttggcaaagaaagaatgaaattggcagagctcaaaaccatttacttgttctgaacaaaagcactttactcaagtagaaaaaaagatatttaaattttaatgacagtagtgaatggcaaaactagagatataggatgcaacaaggggagtttgattctataatcatgcataagccatctcaactttaattgcaatgtaacccatcaaagggatagctgcaacaaaatttgtatctagttgtggttattatttgtgagctgtaaaaagattataaacacttggctggttaattatgttttgaact

SEQ ID NO: 126900 - DNA, 411 bp, Glycine max
  unsure (1)..(411): unsure at all n locations
gacccggatccttnagtcacctgcggcatgcagcttgtcagcggagtattattttgcattttgtgccgccacaattaaatatcaatttggagaaacaaaaactatttcttgttgaacaccttgctgaagaaactggatcatcttattgagaagcaatggtcccgcgcaaccaatacaatcattatatcacctggacgaattgtctacacattttatatgaagaaaattaaatacaacatgataaaataaagcatagttcgactaaaattttggtttatttatggacaaagacttggtactttaatattgacacttatatacttcatataaggcatacaaacaagggcaggataagaactcaatatcatttggaaacatcctgctttctcccttgcacactaagaaatatat

SEQ ID NO: 126901 - DNA, 421 bp, Glycine max
  unsure (1)..(421): unsure at all n locations
tgtgcttcacggcaaacatgatagcactgttttgttctgcttcattgcctacaattggaagcatgatgacagagataaaagccactgacatattcaatgactcagatgctccctgctcgagaccagagacacaatgtcaatgaatgaacttatgatgcagaatttatggatgataagaatattgtgaatgtatgaatacagagttctgatgatgtgaaagtaaaatcaaacacggttgtttcaacaaacattattgctttaagattaattcatggtcaaacaaataagatcaagataaagatatggtctcaaataatctcactgcgtgattgatttttgccttataacaaattgcttgcaagagatcaaaggctctagcattncattactatgccatgtaatcgattaccaggagacaagt

SEQ ID NO: 126902 - DNA, 428 bp, Glycine max
  unsure (1)..(428): unsure at all n locations
agcttgtcctggtnttgtttgagtttaacagttattccttgnnctggaacccaaggattctagtcaagagaaaggagatgctctttgagtttatgatgatgtgcccaagcagtgacaatggctcttcacattgcaactttagggtgttggtgcaagttgaaaatgaaaggagtgcaaataggagggatgtcatgaatgatgcattggtaaaaatcgttatccttctcttgcctcgagaagcacatctgtcaatcattgaatctgtagatctttgttggacaaaagatttgcaccatacacatgtgattggatgtgtcttccttgtcatactctgaggtggacgcaagacgtgagtttcacacatgtctctgaagtaaaagagcatgccatcattctgatcaaactcaacgttctggtttagagtcaca

SEQ ID NO: 126903 - DNA, 457 bp, Glycine max
tcaatgatttaacaattgacttggtagatttgcctatcgtttggttggcatgcactgccgcattgccacgtggaatgttgaaacttgaaatttattatgaaaatattgtaccctataataacagcgtatgctaattgaattgtttaaaattaaattttgattgtttatataaaaaattatcattacaaatttttaaatttaaatccattcaaaataaaaataaaaaattactcaaaaaactaaaatttaaaataaattatttcttttttatttttaaaatcaaaccaaatcgtaacacttatattaatatttattattttaattttatgtgtgtattatttaatttttataatatttttatgatattatgtatatgaaatttatataatatatatttttttcaaataaccttttaaagatatattttattttaaatagatgacattctacatatttt

SEQ ID NO: 126904 - DNA, 480 bp, Glycine max
  unsure (1)..(480): unsure at all n locations
agcttaaccacaaactanaagttatacaaattttgaaatacaaattaaattagaataataaaaatattaaatactttaaaatataaaaatttatttaactatttatttactgatctgagatttttttaattttatgtaatgaaaaacaaaaaaatattttaaattttaaaataaataatttaaaacttcataataaataaacataactaaaaaaaataaatccaatgaattatataatagtaaattctaacatcatttcttcttctttttttatcattacagtaacatcttatcaggatacacataagatgatatttttcaaataattaaggggttaatataatgagtaagtggcgtcaatataatatatataatggatgtaaatataagggagaaataattatacattactagtgtacaaattnttgcaccaccatctaatcataattantaaattgttgacttgtatgatatntatgt

SEQ ID NO: 126905 - DNA, 461 bp, Glycine max
tcagaatcttctattggtgtttctggattagatggtgattttatgctccagatgcaaaaaaattcatctttttatagcaattttcaataaactggtgtaaccattttggttgatctttcaaaagtcgtcaagcatgctccaaaccaaaatcacttccttcgtccttcttccaaatgacatatgaatgaagcatggcatcattattcgtgaaaccacttttctttaataataacatttgcttgtaatgacccttgaacttttgcatgcccaaattaattttttgtcatcaggattttagttgattcactgctctctcgtagttcacctcaaaatttgttgtaattttttgtgactctcaaccaaaatgcttcttttgtttgaccaacaccaacaattggatcggttgagatgttgagccatgaactaatgaggtgtgtatctttttcaattgcaaagacaaa

SEQ ID NO: 126906 - DNA, 406 bp, Glycine max
  unsure (1)..(406): unsure at all n locations
cttttcttagactcctcatagcatgaataacttcttgggcaatactgatattatctccattattatgatttggaatgaaactgcattgacagggatgcactacgaatcccattatcgagctcaacctccaagcaaggatctttgtaatagttctaagaaacattacaaagactgatgggccaaagctatcttatattaaccacaggcttcaaaatcaacggaatgacggtcgtatttatagatttgataactgaatgatcaacaaaactctgcttaattagactacacaaagaatccctcaccacttcccactgactngtatagaaatcaacttggaacccatccatccttggtgccgtgcaatacccatggaggcatcacattgcgaatctctcttcagatggca

SEQ ID NO: 126907 - DNA, 420 bp, Glycine max
  unsure (1)..(420): unsure at all n locations
tatgatactcagcttgttccattggtgttccgatgggagggtgccatttgttttcttacaaggctctgataggaggagatcaaaataccagctggttgacaccgttcgcactaataagggttctgatgacaagtgctttggctgcgttgtccaagaggaagattccagtggcaagattggtgttactttgtcaagagatttgatggcagatgctggtcatgctttgaaaaccaacatcaccacattggggcctcttgtccttccaatgtctgaacagctcctgttcttcgccacattggttgggaagaagcttttcaagatgaagatcaagccttatattncagatcttcagctagctcttgagcactcttgcatccatgctcgaggcagagccgttgtggatgaactggagaagaactt

SEQ ID NO: 126908 - DNA, 430 bp, Glycine max
  unsure (1)..(430): unsure at all n locations
cgcgatcttaaccacctgcngctgcagctaaataaattggtggtggataacataatatatcataaactgttgtaagactaaatcatgttaaatgcataataaaagtttaaatctctgctcctgtgtctttgagagtgtaattgattattttacttgcgttggctaaaaagcctaaaattgctcctttttacagtccataaaagtgaagaacaatgaaaaatatggatgacatcaaagagcttaaccagtcaccactatttggaattattaataacctctgatcaatgctttacttgtgattatacatatgacacaaagtggttacatctattcgtattattgcttcaccaaattaagaatggatatagaataccttgtcttatccgcccattctgtgtacatatcctcatattcttatatccactccatt

SEQ ID NO: 126909 - DNA, 258 bp, Glycine max
  unsure (1)..(258): unsure at all n locations
atcttccaccaccgncgccaccatgagcttagaactttatgtttatattattagnacaangaggggcaacctcgcattttggctatatcatcatacgatccgaacaatacccttatttgcatggaatatggtatttgaacaaattactattaccttatttgcatggcaggtgtgatcaaatatcacgttggctatttgactatatgggtcttatagctaatccatttataatcgttacttcaagattcttgcatcatg

SEQ ID NO: 126910 - DNA, 412 bp, Glycine max
agcttggttcttctaccaatgggagacagattttcttcttcacttcatgcatatgacatgagacgaacactcatgcgagattgatacagctgaagagagaagcaggctttatcaccttactcccaatcatataacaacacccattgttcaaactgtcataacatacccacagtgctaccgaccccgtacggatctatagcattgtcgcagggggcacctttcttttgaatgcttacaacacatgcaatcatcttgtcctttcttgaaacataattagaactgtgtgtgtaatacatgccattaagcaaagcataaaaagttgcgctttccctctagcaaatcctatgcatcctggtattttgaacttttacacatatacacaaagggggcatgtccaaaacgttctatgcat

SEQ ID NO: 126911 - DNA, 457 bp, Glycine max
  unsure (1)..(457): unsure at all n locations
tatntcaaatgttctctccggtgcaagcaaagaactagatcttttttcttggaccacctccaggtgcaataatatttactaatttgcagataaaaagaaatgtgtaattgtttgaaagcagatattataaaaatgttcatgttaaatagcttcttattgcaccccgtcctagtatttttttccctagatcaatgaagactatgttaaggtccttttgctttttgctatgactttttgttgaatcccaatcccattagtgggcttgagctaagccatttttgcactcctaccatgtgttaacaaagtaggcattaaaggcaaggtgtatggtatggtagtgtgttgtataagttcttacgagatataaaacattcatgtgcattcaggtaatcaattgaagttttactcttgcattcttgacatggtattagaacctcattcgctttcgaatctactt

SEQ ID NO: 126912 - DNA, 392 bp, Glycine max
  unsure (1)..(392): unsure at all n locations
ttctacgacaaacaaagaagaaatactttcctaccattgatgatttattttacaatctatcaaaaagatcaattgattggaagagatcaattgttcactatatgtatagaattcaacatgtaatttaactagacaaattcaatcattgaaaatagtttcattcagcataataatatacattcatgatataaataggctcgaatatattnnnagnatataaaaaacacatgtacgcttctgacctttcttacacaagattttatttttggtatctctgtttgctatgtatcgccaacgcctataaatgatgtggacatacctacactctatcaacgtggccttcatataatatttgaccaatcccttgaatttgactatatgataaaaatatt

SEQ ID NO: 126913 - DNA, 479 bp, Glycine max
agcttaccaagattgtctcatagaagtagaggtaccagcggtttttggtaatattagccaacagttatgaactggaaaatcaacagacgggaacccaacttggtgatatgcaccatcacaatatgcacaatgaatgttagcttgctgtgtgaagcttcgtggatcgttgggaggcatggctttcatgcgacgaagggcttctttgtaattttggaggtatgaggcatctaccaaatgtgcaacgggtctgaccttaacttggggggtgattggaagtgtgaagtctatgatgtttgaggaaattggagggcaacaatatgtctgtttactcctgaaggaacgtcaggtgggccacatttggttatctctggaggggagataggtgctgcaagggacaatgaatcattgcttatggtaccatgaaagcctcctatgccaatgaggatatttcttctgtcaaacataaatgcctcttcttg

SEQ ID NO: 126914 - DNA, 391 bp, Glycine max
  unsure (1)..(391): unsure at all n locations
agctnttgacgcatatcagataattgtcattttctgtttcactccgtcatcgtccacgtgttattctttgcttatgggtttgagtcggaaacggtgtgtgcaagatgccttgactcttctgtatcagatgttagagaaggggtccgccatcaacaaagcggcttacactgngcctttggatggatatttcatgatgaataattnggaaggggctctctttctctggaaggaaatgaaagaaacaggtctatatcctgatgcttgtgctttaactgccttactagatggactgctcaaagcaggtaccgctgatgaggcatatgaatatttcttaaaaagtcagctatacgtttctgtcctaacaatgatgtctcaattctctgattaaagg

SEQ ID NO: 126915 - DNA, 440 bp, Glycine max
  unsure (1)..(440): unsure at all n locations
gaaactcagctatgcttgaattagcccattaaaatacgtttttcttctttttttgcagaagccaggctggaactctaagtgtcaacttggctagatagacttgtttgcacctttactgataaatgactaaccttacaattaacttcacatagaggaataccatcattatactaatgcataggtgacagacacaccttacttctgcattnaaccttgtagactgcctctctgaatgatgagacaaagctgttattaattctgatctgccaataaaaaggcaggggaaataataagtattagctgcgagatatagaggagagaataagaacagaaccaacctgtgcatgatgaagatctggctcaatgtgtttcctaaatcatggaaaaacgctatcaataacgtaatccagtgaacaagaatcttgcatgtcatatcgaac

SEQ ID NO: 126916 - DNA, 432 bp, Glycine max
agcttaaaggtgtgtaacccaccattttctcttagtagaacaccggtaacatgtctactatcattgttatcatctccctttctgtcattggaggcgccacttgagctgccagatccctccacctttgggcgtattctttgaaagattcatgctccttttagcatatgttttgtagctgcattctattcggagccatatcaaaattgtactaatactgcctaacaaaggcaaccatttggtccttccaagaatggactcgggaaggttccagattattgtaccaggtgatggctacgcagtaagactatcttggaaaaaatgcatcaacaatatttcatcttgcgcatatgctcccattttcctgcagtacacctttaggtgattcttgtggaagtagtccccttgtacttatcgaattctggcccttgaact

SEQ ID NO: 126917 - DNA, 460 bp, Glycine max
  unsure (1)..(460): unsure at all n locations
gacactaaaaactaagcttgtaagggatggatganaatatgtgtntaagattttttttatgttaaacaaagccttgcttttatagactctccatgtctggtcaagaagaccattcagaagagttataacttttagaaaaacttaaaacccatttgaaaaagtcaaaacctttttgaagagttacatcttttgattttttcagaaacagtcactggtaatcgatcaccaaataagtgtaatcgattacacaaagcttttgagtgaaaggatgtgactcttcacatttaaatttgaatttcaacgttcaagggcactgataatcgattaccaaaacattgtaatcgattacagccttttgaaaataattggaacgttgtaaattcaatttgaaaactttntcaaactcattttgctactggtaatcgattacaacaatatggtaatcgattaccagagagta

SEQ ID NO: 126918 - DNA, 426 bp, Glycine max
  unsure (1)..(426): unsure at all n locations
ccttatgcacggacaatgtaattatgaaattgagatgcccgattatatactttntcctagttaaccatgcattaggtaccatgtacaattatttcgtttttaagtgaaacgggtttatgatcccaacatggatggctcgtggtgcctaacacatgaaactaagaatgcagtgtgaagtttcacgcttccccctcttttgtttttgttttgtagaggaaaacgcaaggatgagcaaacatatgcaattttgcagaccaaaaagtttgttgaacgcatatgcatgatgatgccatgaccatgcaaaatgtgaggctggaatatgataacggacaaatgcaggatatgtccattatgatgttatgaagagatgcttatgcgatgcatgatatgaatgcatattactgacacgagagcccggacaatatc

SEQ ID NO: 126919 - DNA, 457 bp, Glycine max
  unsure (1)..(457): unsure at all n locations
agctttagaaagataagacaanatagttagtatatattctacaaggcaaacaaaccacttattttttggagctagtgcgctacaaatccaagccgaaattgcttgcatcaatgccaaattatttatatatctgtcttaacatattcaaataggatatatatatgatatatctactctatgcacagaaatctagcaaaggtgatctaataaaatcagtgtcgtgcctttgatagatcccaaaatggtggatactgttccaccagacccaatcagtgtcgttataagtctggatatattacatatattaaatccaacatcttttcctaataaataacagtgccacaacattggtgaacctaacaaaacacaataggtttcaattgttgatatttatatacaataacactcacaataatatgatcactcgaaatgataaattntatntactacactcata

SEQ ID NO: 126920 - DNA, 467 bp, Glycine max
  unsure (1)..(467): unsure at all n locations
tcagtttgtagatgtgttaggataatcattttctttttctaangaaacgagagaaatcacacacacacaaacacaagagatttaacgaggtttgacaagtatgcctacatccttgggagcagagtgacagtttctatttcttattcataaacaatagggttacatcacaatatataatatcacgtgtaccgtgagctttacctgtaccctcaacctgcttcgtaacccaacaacaggtgacttttttcctcagctccaacatttttccaacccataaaatatgagtcatgcacaacaatcttcaccttggcgaatattcagccctgtggaagataaatagcacatccacgttggtcttttgggttgggggtcttgtcacgtctagcactaatcaacattcaacaagtccaagcaacgcttgaacctatcagttgtgatcgtctatggtaacatatcaattgcatcct

SEQ ID NO: 126921 - DNA, 464 bp, Glycine max
  unsure (1)..(464): unsure at all n locations
agcatcctcggtgccattcctgcgaaggctatcattaggaaagttagtgtacaagagatataacaatcattacaaacaagggccaaacaacacttctcatggcccgagtgtcaacatgcactttataaaataatcatattggggtcgagctattttatgacacatacgtatttgcacacaaaaaaattttgtgtgaagcattttacgacacctatccatgtacatattttttgacaaaccttctcatgctacatcctatatatatacacacacatttttttggaaggcttcttttgttacctactcacaaatacacatattttgaaaaacaactttacgctacccatccaacactttgtaggcacttcatgctatatatattcacattantgcaggcaatttatataactttctgcaaggcattntaatcaacattgtgcaacgcatgtccatgctatatatat

SEQ ID NO: 126922 - DNA, 466 bp, Glycine max
  unsure (1)..(466): unsure at all n locations
tgttgatggttatcgaattgtttggaagcaaattggatgttctcttatggctgatgggtggactgattgttgtatgagaactttcattaattttctagtttattgtcctaaaggaactgttttcttaaggtatgtagatgcttctcatgtttccaaatctgctgaaatgttgcataagctttttagggagaaggtgttattagttgggcctgagaatgttgttcacatagtgacaaatagtgctgaaaattatgttgctgctggtagattattggaagttgactcttctaagttatattggtctccatgtgctacacagtgcattaatttgatgttggatgacatagggaaattagaggaagtaagtgagattgtgacacttgcttcanaaattaccaagtatatttacaatcatttgtattcattatacttgatgaaaaaatatacaggtggaagagatatactt

SEQ ID NO: 126923 - DNA, 366 bp, Glycine max
aacgacaatgcctacaagattgactcgcctagtgagtataatgtaagtgccactttcaatgtgtctaatttatctcttattgatgcaaatggaggagccttggatttgaagacaaatccatttcacgaaggagggagtgatgaacacacaactaagggaaaggaccatgaagcacttgtagggcccatgacaagaggcatacttaatatggcccatcacagtgatgatgacacatttaatggcaaggaccatgaatcacttgaatggtccatgaccagaggcatacttaaacaggcctaacactgtacagacacaaggttggtcatttgtatatctgccattgatgatgatagaaggcccatgtct

SEQ ID NO: 126924 - DNA, 458 bp, Glycine max
  unsure (1)..(458): unsure at all n locations
tagagaagagctagaannaagtttttcttttacatgccnnatttctcttgggnggcannngnattggntgttatattgaatgttgcatcttagtctttaacatatcatttgtgcatcatgcatcatcatgtgtgagtgagaagaaaatttctaaagttagaaaatttcttcagaaggcaaaactctctgattcaattgattagagcctaatcataatcaattacacaagttgtttaagcttgtagagttatgtctcgtatcagttgaatcaattacaagcttatcgtaatcgattacacagttgattttgagacaatgactgatttattcaagattctctactttaatcaattacaatgagatataatcgattacttctctttctataagtgtcttagaagaaaacaagaacactctaatcgattgctctgagtatctaattgattatattgttcttg

SEQ ID NO: 126925 - DNA, 472 bp, Glycine max
  unsure (1)..(472): unsure at all n locations
gcgatcctctaagccacctgcngcatgcaagcttgtcgttggtttagatatgattgatacatgatttatgacttgtatgatccaatttgggcaaaataggatgaaggcaaaagtgatttcgaacatctgcactttatgcataatcttgctgttgaaatgtgcagcataatattgtgcttgtgcagaaaatgcttatgtatggctggctgtggaaagggttgtacatattgggttttggacgttttatactacatcccaatggccaaaatgtagacttatgtactgtggaccttcactaaaattttcgagcccatccaacggtgaacgaattgtaacgaacagaatgctactggggtatttgagtaaggaaaactgtgcgattggtttgtgttttgggcagagtcttctgcctctgccctcgtttcttgtgttctgagagttcatgatgattgtatgctgaattgcttggatg

SEQ ID NO: 126926 - DNA, 478 bp, Glycine max
  unsure (1)..(478): unsure at all n locations
nntgtgtttagctctattatagccagatcttcatttgtccattctgttttatgttnganaataggcatgtctccatttgtgattattagctagagcctgtagtgattggacttgatgtacatttccattctatctttccaatatggatagtcttctcctgtgaagcatggtagccttgtgagagaagctccctcaatgatgaactgactattgttgatgttatctgccattaggatcttttcctcaagacattgtcaagtgctcaacccttagaggctaagccctgataccaagctataaaggcaaatatcacaagaaggggaaggtttgaattgtgatttaaagtaattgttgaaaaaaatttcaaaccaaaaaggctttttatctgagacaagaactttgtaagacagagaaacaactctattttaagaactcttaagatgatgacaaaatgaatctgacaaagagtagtttatct

SEQ ID NO: 126927 - DNA, 423 bp, Glycine max
  unsure (1)..(423): unsure at all n locations
agcttacctccttgagatgagaagctagagcttatctattcaccccctataatagctaagctcaccccatgacataaaaacatgaaaatacaaaaaaaaatccttactacaaggactactcaatagaatggccaaaatacaaggcccagatgaaggaaaaacctattctaatatgtacaaagataagcgggctcatacttagcccatgggctcgaaatctaccgtaaggctcatgagaaccctatggccttcccatggatctctagcctaatctacttggagtcttctacccaatgcccttgcggngtaggattgcatcattacgacaaacctaaggtgtcccatatgaccacctaagtttgtattaaaaccaacaataagaacaaacctacctaatgagtccgcatgtacatcaatcataaa

SEQ ID NO: 126928 - DNA, 465 bp, Glycine max
  unsure (1)..(465): unsure at all n locations
ntatgaataataaattaattgcaacacaatatctaattgttcattttttataggaactaatcaaactaaggaatctaatgcttatatactttacttgcaaacccttaatgactgtgacaccctctaccccgacatatatataaatgaataaaatataatggtaaacaaaatcacatgagtaaaaggttcacattcacttcaattaccaaataaaactcattaaaaacatattcggctcacaataaggtcgtcaaaatttacaaaaatattttgttaaatcagtgatgtgaaataaaatagactaacatcataaaattaacatanaaacttatatcccaatatcacatcttatcagagcgttgtgtcccgacgttcttcagcacaatattccttatagcagttcacctagtcatctgcttctccgaacacaaagttcaagatcatcacaggattcaaacacaaaca

SEQ ID NO: 126929 - DNA, 492 bp, Glycine max
  unsure (1)..(492): unsure at all n locations
ttagagccacctgcggcatgcaagcttcctcggggccatttcctgcgaagcatatattgtanagttatttttaccagngggacactactcttaaaacaaaaatggcatacaacctcctcccataaatacaaacatcaatctaaatttagagcaagcttatgcgcatatttccttacgaacgttcacttgcacaagacatcctatcaactaagaaaaatgcacccatatacaatcaaggtagcttcattacctagattatttacatgtacttccaaggtgtatttgttatttacatcacacacgcctccttggctgaatttacatacatgcatactcaaagcatgttggggtaccaaaaactgcacatgcgctcatcttggtatttctaatacccatacatatacaaacttcacgatgaatcttgactacctacacaataaggtgctgcatttcatgctttntttcaaagttttggctacctaagccacatgc

SEQ ID NO: 126930 - DNA, 442 bp, Glycine max
  unsure (1)..(442): unsure at all n locations
gccaccgatggcatatttaaataaagctttattataattttattgaaaagaaaancaaaagagaaatattttttcttatacatgagtttttcaaaaggtaacatgagagaattttataaattaatttattcataaattaattattatttttgggagggggaattatttatttttattttattttcttctcttatgagtatttgcaaaaaaacaattgttcaaacatttataattaatgagaacataatccattgagtttaaaatcatctatactatatacatatgaaaatactataacatatgaaaatgtttgtcaaaagaaatgtttacacatggcatcctcaaaagctctaagcagtaaatttatataatctttttaaataaattcatttgatattaaaagacacacaagtcatatataattgtagttataataatgaaa

SEQ ID NO: 126931 - DNA, 470 bp, Glycine max
  unsure (1)..(470): unsure at all n locations
ttaagcacctgagctgcagctntgatcttgaacagaactgatcctgcattttaatcagtgctccaaattggacactagattntgaaataatgtgtgaagcaagtgactatgcagtaaaagcaattatgggtcaaaggaaaaacaaaatttttcatgtgcactatgcaagcaaggttttaaatgaagctcaaattaattatgccacaactgagaaagaattgcttgcaatagtatatgctttggaaaaatttagatcttattagataggatataaaattgtggtttttactgatcatgttgctataagatatctgttggttaaagttgattctaatccccgacttatctgttggattctattattgcagggaattgtttagagatcaaggataaaaaaggaagtgaaaatcatgtagctgatcatctgcctaggctgactattgatgaagtgaccacacaaggacctgaga

SEQ ID NO: 126932 - DNA, 478 bp, Glycine max
  unsure (1)..(478): unsure at all n locations
tgtaattcctgaccctcangtaacataggtggtaaaggttgggacttttacgagtcaccaatggctttcttgaggagagaaacatgaaagaccagatgaattttaccgtgagatggaagatccaacttgtaagcaacaatacccaccttgtttaacacccggaaaggaccataaaaccaaggggaaagtttttcattaatccttttagccaaggatctttttctgtaaggttgcatcttcaagaacacccaatcaccgactacatatcctatgtcccggtggtgtttgttggcattttctcgcatgatatcttgagacttcaacaaattttctcttagagtggccaataattcattccgagcaactgctagtttattgacttcttcaaggcgggaaggaatggtggatcccttgagaatgtgagggggatcatatccatacaaagatttgaaaggagacatcttgcttaaagcgttat

SEQ ID NO: 126933 - DNA, 477 bp, Glycine max
  unsure (1)..(477): unsure at all n locations
agctntctccgcgaggtatgtaggtcaactgcttctattctatgtttccgngggtgtacatgttttattgatgataataatattaataataataataatacgtcttcagttgcagtattgctgattgaggtacgaggaaagcttaatgtttcgtgccattttgttagatctcattgccattgtcactgtttgggttcgaggtaagctcggtctctttttcatttgtagtttacttatgaaacatgttgaagtttgtctctgttaaatctatagacttcttggagcaccagcagagattactactgataaggatcctgttattgtgagtaatttaactcactatctcattattttgcattaaataggttcataacaagttactgacacttcttgcaattatttttggagttggggcactatgttggtatgtcacanatattccaaatgtcttccatataaatttgtgtgatatataac

SEQ ID NO: 126934 - DNA, 481 bp, Glycine max
  unsure (1)..(481): unsure at all n locations
ggtaatggtaagaaaagagcaacacacacaatcatataaatagcttcatgtataaaaaaaaaaactgtaagtataaaataaaagtgtgtgtgctactaattaaggaaaagaaaagctaagtgcggaacagcaagtaatagagctggaataaaaagaaaaaggttgatctatggatgaatgctctcctagaacctaagcttttgcatcctagaaaaaccatgaattgaatgcagcccagcctcgttacaagcctagaaaagtccttcggattcagtttgtgtgttcttgactgtatggcatgagatgaaatgcaaaggttgagacttatgttggttgtagattgatggataacctaaacacttgtgcttgagtgaaacagtagctatgaggctttggttaatgatccttccttgatatttgtcgctcttactagcttatttcagntgngcttcttaataatcatgttcatatctttaaaaag

SEQ ID NO: 126935 - DNA, 400 bp, Glycine max
  unsure (1)..(400): unsure at all n locations
agcttggaggggttgatggggacttcttgcttatatgaatgaggagaaaggctaccaacgtgtgcgtgagctcaatataaaggcgggcaactggggatggtgtacttatgcctgngctagtagaaatgggatatttgttttgcgccatcgcccgatcgccatctattaccacatatgaagggtgccccataacccaataaggcatgtgtgagaaagcatggaagagtcaacctttcaactcttatttgtggaccacacagtggtactctgatgatatcgttcgcgggtcacgagaccttgtggaggtcaagtggcgtgctattgcccaaaaccaacttgtgcaatctcgaccctacccgggcatatttagccagcgagaacctgtgattgtacctcaaca

SEQ ID NO: 126936 - DNA, 458 bp, Glycine max
tcttagtttcagatgatgcagatgggtttgagctacctttgcactcctctaatgactatggcatcatttctggcgctaaactgctgggagttggaggccatcttctcaattaaatttctggcatcagcaggagtcatgtctccaagggctccaccactggcagcatctatcatacttctctccatattactgagtccttcataaaaatattggagaagaagttgttctgaaatctgatggtgggggcaactggcacatagtttcttaaatctctcccagtactcatacaggctctctccactgagttgtctaatacctgagatatccttcctgatggctgtggtcctggaagcagggaaaaatttctctaagaatactctcttaaggtcatcccagctcatgatggaccttggagcaaggtaatacagccagtcctttgccactccctctaatgaatg

SEQ ID NO: 126937 - DNA, 423 bp, Glycine max
  unsure (1)..(423): unsure at all n locations
agctttccatgttgtcgcatgtgtcanaagcttatatatattnggntcaagacagaatttgtatttactcttctaaaacaaaaaatgaaacaagaaaataataataattttataactatttctaccaacttttaaaaatacgaagcaaagtaaaaataatgtgtcacttttgtaattcaaagtgaaaataaaaaatatttgtttctaaccaaacaattcttaaatattaataactgtgctacgagatgaacttgataaaaagataaataaaccattaccatataaacgatgaacaaagaggacttttgaaatattaaaatctgaaaacaagaggaagataagaatgacatgccttgaaaaggataaaatgataatcataattttctgcaggaaattgtttgaattcactttctataaatcagt

SEQ ID NO: 126938 - DNA, 467 bp, Glycine max
tagcattagcatgtgtagacactggatcactaatcattgtttatttgtttgttactttagtggatcctatcaaagaacctccgcttataactacaaacatagttctgtctgtttttgttgtgtattgtcatgtggacaaagttccatgccatgtttgagacatctaagattggcgtcttgcctttgcccactattattttttgcaacatcttcctttcttaaccttgtcattacctcgaaattttaatatggcaacttactcttgtggaaaataatttttaagaattaatataacactttaaaattaaatttagaatattaaaaaaatataaaacatagatataattctttaggtgttattgatacttttctcctgttagaattaaaatcgtacttcagtaatccacataataaagatatacatcaaagaattacataaattatcaaagtgaaactctcaaatttga

SEQ ID NO: 126939 - DNA, 397 bp, Glycine max
  unsure (1)..(397): unsure at all n locations
agcttaggctaaattacgctagaactttcctttctatntatagtgagcctaggccaacaagatggatctgaggatgaagcttactttaagttagtctaaacctacgagggctgtctaaattaagcctagtccaacaagagggatctgaggactaagcttggattgattccgtctaactagggatcgaggcttagcaatgtatgcttctacatagaacacgtaaccgtgattgattagagacacatctttatatacatcatcttgtgtgctacaaagacccttcatttttacctactacagtcaatattacttacttgcactttaattatgtgatgctaaattttatgtatagattgttttaacccacctcattaatgtgtcttgcactatgtcttat

SEQ ID NO: 126940 - DNA, 436 bp, Glycine max
  unsure (1)..(436): unsure at all n locations
tgcttgtggagcttctatggatgctggatctgttagcnnctangatgtccttcaatggngattcttcaccatggagatgcagcggaaggcataggagaagaggagaggggaggcaccatccactatggaataagccaaggaagaaggagcttcaccaccaagaattgccttggataataagctcgaagaggatgctttaatggagaagaagaaagagagaaggggggagcacgatattgaatgaataaaagagggaaagaagtggaacttcgaagtgtatctcataagactttcattcatcaaagttacaacaagtgttacacatgcttctatttatagactatgaagcctcctcgagaagttttcttaagacaacttcctttagaagcttctgtggagaactttcttgagatctatagtgtatctactccaccca

SEQ ID NO: 126941 - DNA, 395 bp, Glycine max
  unsure (1)..(395): unsure at all n locations
ggacctctgagncacctgcggcatgcaagcttatcaatccaggcaaggncatctcccctttatattttattatgcgacacgggagagatgcacgagcttgtggcagtgcctcaagctctcaagaatctcataagagagcgtgttctgagagatatcaagatgtgtgaattcacgagccgcgatagattcttaaatatctcaccaatgatgtcgctatgagaaaggtctatgccaaccaccctcttcgtagcactgcaagaaattccttcccattcacaaggattggagctattggtgttccaatatatgtaccctcctctgtctgcaagacttatgctgtccttatacaatgtcagattcatcagaacctatttgtgcttgtacatagattcccc

SEQ ID NO: 126942 - DNA, 453 bp, Glycine max
tccaacacctccacggagagtatagagccggcattggtcttttttttactccccggagaagaccactcttagtagccttagctgctagagcaccagctatagctcctgtgagggccccagctgcaaccacaaaacacaattacatgagaccaaccaaaccaaactttacagcctgtgcaacactaaaatagtggctactggccaggcaaacattctacaccctacaaattttctacccttgtaaacaatagcacctacaccaacaactagcacaccaaccataaatctcactaccaccaccaattcaggtcataaaaaaagtacacagcttaaaatacagttactttggtgcttttagcttttttctcctatcagaattataatatcacctcaaaaaactaagttggctttttgaataaatatttattacagagattactgtggtgaaacttc

SEQ ID NO: 126943 - DNA, 460 bp, Glycine max
  unsure (1)..(460): unsure at all n locations
agcttgccattgaacaagttcgatattctattgtatcttctagccgngcactcgcattggtacaaccttgagaggtttgggtttggtgtgttagagggtgacaagagaaatgagtcaaaattctcaagtaggattcacctaagggtgtgtcttgaaggtgcttatcatgtcctggatgagtccacaatgtatattagtgacacaaggccaactgctaggcaactttggaagcaaccaattggaattcttgaagtggggatattgagtgctcaagggctccaatctatgaagacaaacaatggtaaagggtcaacagatgcttattgtgtggccaagtatggtcagaaatgggtgagaactatgacaatcactgagagctttaacccanagtggaatgagcaatacacatgggaagtgtatgatcctcgcactgtgataacctttgnggtctttgacaact

SEQ ID NO: 126944 - DNA, 479 bp, Glycine max
  unsure (1)..(479): unsure at all n locations
ctcagcttattaagaggcttcctccagaagcttcattaattgtcttctatcacactccagacatcttctcaaagatcccaacggtcagataatggaaaggtgtcttgtggagttgcagaccaaattttgagaagatccaacggttaacaaacgctgggcatcgtttttaccgaggcagctccatgtagctttctctagaagcttcattaagaggcttcctcgtggcttctttgagaagatttctcaacaagcttctttgagaagctagatccttatctatccacacccctctattaactaaattaacttccttaaaaataattatggatgaaaataacgcaacaaataatcaaacatcaaacataattactaataatatatagatatatatatcagggtgttacactatccatccacatagtcgcttcttgatgcaatgcatcaatcaccctccctcttgcttctntttcggcgtacac

SEQ ID NO: 126945 - DNA, 455 bp, Glycine max
agcttgcccagagaatgtttccacgtgtggattatgcttaccacctcaaaagactggaaaacggtttctaatgactcctctgcggcttccacatatggcatagaggatgggcagctcaccaagatgtcttcctcgcctgatacgatgaccagatgcccttccactacgaatttcaacttttggtggagtgtagagggaacaactcccactgagtggatccacgggcgccccaatatacagctgtagggggggttaatatccattatctggaaagtaacttgacaggtgtgagggcctatctgtactgagagatcgatctctccactaacctctctgcgggtgcctgcgaatgcacgaaccaccattgaacttggctttaattgggaggcattgaatggtaatctctccaagtgctcttatgcatcacgttaaactggaaccttatcgatgagcac

SEQ ID NO: 126946 - DNA, 471 bp, Glycine max
  unsure (1)..(471): unsure at all n locations
tgtgataatgacactacctgtgagaacaacaaatattattttcattatacaatcaatcgacaaatgtaagacagaattcattgatactacaatatatcattgacaatttgaattaaactaacatcacccagtttcaactacatgttgatgacacagtcacaaacactaaacactcaaaggagaagcacttctcttaaaaaattaaagcaaattcttctcaaagaaacatcaacctaaaaaacttcagtcaattaattatcaatgatcgaaaacttgtcaatcttaacacaaattcaaaatcaaccacaacattgtcaaagacctgttaactgtgtttggatttgcctcatatatcgacattntcaaatgaaattgcatcaaactgtgagatgtaatgcaaaagctacaaattgtagcttctgactggcgcacatctgatggcatanaaagtgaaaccacacatganataat

SEQ ID NO: 126947 - DNA, 403 bp, Glycine max
  unsure (1)..(403): unsure at all n locations
agctntgactgatttatgacggatttcatgtttttttaatggngtactcgactacaatatattggtaatagactaccagtgtatctgaacggtgaaattcaaattcaattgagataagtcacatcttttcataaaatgcatcgtgtaaatgattacatgattatggtaaccgattaccactgacatgttttgaataaaaggacgagagatgtgacttatgacatgattttctcaaggttataactcttccaatggttctctatgaccagatatgaagagtctataaaatcaagaccttgacttacattcagacaacgctttgataatcttattgaacaattttctgagaaacctttactacctttacaattctgtactactcatatatctttttcttcttcct

SEQ ID NO: 126948 - DNA, 450 bp, Glycine max
acactatgaaactcagcttactagtatcagctggctagctgtgtggacctaatggctcgaatcggggggagtgaccaaagcttcacagagtcggttatggtattgaaaaatatgtctcctgaacataacagcttaccgaagagtcactacgaggcgaaaaagatattatgtcccgtacgcttggagtaccaaacaaaccatgcatgtccgaatgattgccttctatacagatatgagtttatggatatgcgattctgccccacttgcggactttcacggtacaaggccaacgatggggaaagtactgaaggttcaaccaccgctagtagtcgtccaacagaggtttgttggtatttgccaataatacctatgttgaagcggatgtatgcgagtgtactagattctcaatactcaatgtggcatatacatgatagaagaacggatggtatg

SEQ ID NO: 126949 - DNA, 462 bp, Glycine max
  unsure (1)..(462): unsure at all n locations
agcttcaacccttttacccttcatggaatcattttcatattgctacatattnctggggctcttattctcattggctttgttttttttttcgttttgcgcaattttgatctatgggtctcgcgaagaatctgcgaggctcgagaacggaagcgccacaagaaggtttacccatttcggcggttttcggtggctcctctgctgtcgtagctccgttgccatacctctcgtcctgtgcctttgatctcctctgttgtacgtgccaccgtgacctcctctgcagtgccgccacgtcggagtcacctaatccctaaacgagcagcacgtcctgcgcgattcccgccgtgggcttcccctcactttcgaaggtgtgtggttcctctttatattnttcgctttaacatttaatacttgaatgaggggtgtgtggtagtttaagacgattctcgaattaagctatgctca

SEQ ID NO: 126950 - DNA, 353 bp, Glycine max
actcagctatgaagccatttgcaatgttatctcccaattgagttcatttctctatgataccagttatgaaaacaatgcacgaattctaaaatgcaacacttagcagaagggtcaatttgtaaagttcatatagcaattcaattctaatccatatataacgtattttatatatattcatattccccaagagtctacttttcaaatataattttattttcatcaaacgttatgtgaatcaaacaaagtaaaaaactatgtgaagtatgtcaaagttgaaatttgtaaaacagcatgtgtgcacaaactttcaacaccaaataatttagaaatgactctaagagcccatatcatgg

SEQ ID NO: 126951 - DNA, 502 bp, Glycine max
  unsure (1)..(502): unsure at all n locations
atcctctaagacacctgcggcatgcaagctntaattacgggtctctgtcagttctacttgttacttgtcacctccagcaagggcatcaggccccctactaatcgagctttcatcaagaagtactgcgtctctaggcaggcgcagggcgaaacaccacagcagcctgtggaaggccggcagcgggcaacaaacgcaccgccatcacctctagagttcacctctgctcatccacaaaaaggtttgagtattgcctacaccacatggccgaccaataggcgaccaagtccaaagccaaaggtatgcaaagtactaggtcagtgaccaacaagtcataaggcgtccagctcaagacgttaaagaagcgctactaggaggcaacctagtaccttntgaatctatgcttgttatttgatcactttttatagtaggacgcacctagttgctcatgatcctgngaatntaaataaaacgagcacaagctcgaaaggtagtcataccttac

SEQ ID NO: 126952 - DNA, 477 bp, Glycine max
  unsure (1)..(477): unsure at all n locations
cctttgcggattggtctttgccagtgaaaggatcgatgtgtgtcttttagaggcaaatttagtcatcctgcttggacgaatgagaaaactggggcaaatgaagagggtgaggatgaaggagaagcccatgctgtgactgccattcctatacagccaagtttcccaccaacccaacaatgtcattactcagccaataacaaaccttctccttacccaccgcccagttatccacaaaggcaatccctaaatcagccacaaagtctgtctaccgcacttccaatgacgaacaccacctttagcacaaaccaagagcaccaaccaagaaatgaattntgcagcgagaaagcttgtagaattcaccccaattccagtatcctatgctgacttgctcccatatctacttgataattcaatggtagccataacccctagccaaggttcatcanactccatttctccgagaatacgactcgaacg

SEQ ID NO: 126953 - DNA, 479 bp, Glycine max
  unsure (1)..(479): unsure at all n locations
agcttaaagtcgttaggtaaggctgnncaattgtagntgtttcatttatcttgaacggcgttttttttgacagatacttgaatggttaattttacatacataacaagaattatattgattttgtggatattcttcacaataagttgtcacaagaatagttggaactagcccaatcatgtttaactagcctaacttcaacatgattctaatatgagcatcatgcgactagcaccaaagagggaaatctactctttagcaatggattcccaagctactctgaaaatcactgggaagatagaaatgtgttgaaaaattaaatgattgtcaaaaagaaaagctctagatgaaaaaccgtatagaatgtgagaggtataagaggcttgagagtgtaatctaatttgttttttttttttaggtanaagggtcctcggtacatattcctatcacatatatactactaattaacaacataaattgga

SEQ ID NO: 126954 - DNA, 357 bp, Glycine max
gagcggatatcgaagccggagattaacagctggcaaaatctggataccctcccttcagagtcggtctgacacaagtgcctctagacatggagcgtgaacatcgacaaggaacgctgtatcaactatgttgccagcagtctgaagagggtgcattcattgatacaaaatctcgccacctcttccctaaaggcacatcttgtgtaatatttcacaagatgacgacatcacgcgatgaatacatgacagccatataacgcttattcttgtatgcatgccgaactggataccagattgtggcggtgacaacgatacatagacttactttaaattatggttgagctattaccctcgatacag

SEQ ID NO: 126955 - DNA, 446 bp, Glycine max
agcttatgaaaaaatccttatgaggttaggtgtcaagctttctttgacctttgtcaaacacccccaaaccaacggtcaggtggaggcaaccaacaaggtcatccttaaagccctgcgcaccagactcaacaagtctaagggtctatgaaaagagcaactccccaccatactttgggcttatcactgttcaccttaaacaataacaaacaaaactcctttctgacttacataccacacagagaccctgatccccattgaagtgggggaaccgttaacaaggagattgttgttccacaaacagtaaaatgaagaaaacatgagggtagaactggagacaaaggatgaagtccaagagatgccaaaatcaaagaagaggccactaaactctgagcatcaaggagatacaatacaaaggttcatacctcaagcctttatcctggtgacct

SEQ ID NO: 126956 - DNA, 464 bp, Glycine max
  unsure (1)..(464): unsure at all n locations
tcctcgggccattcctgcgaaggcatacatttggaaagttgttttctttatatatgacaatcattacaaacaagggccaaacaacacttctcatggcacgagtgtcaacatgcactttataaaataatcatattggggtcgtgctattttatgacacatacgtatttgcacacataaaaattttgtgtgaagcattttacgacacctattcatgtacatattttttgacaaactttttcatgctacatcctatatatatatacacacattttttggaaggcttcctttgttacctactcacaaatacacatattttgaaaaacacttttacgctacccatccaacactttgtaaggcacttcatgctatatatattcatattatgcaaggcattttcatgctatatatattcatattttgcaaggcatnttattcaactntctgcaaaggcatttattcaacat

SEQ ID NO: 126957 - DNA, 422 bp, Glycine max
  unsure (1)..(422): unsure at all n locations
gcaagcttactaaggcacctattcngcttacttttttttttcttaactttagagctacaatgtgatgcctctggagtgggagttggagttgtattgttacaaggtgggcaccctattgcttattttagtgaaaaacttcatagtgccaccctcaactaccccacctatgataaagagctttatgccttaataagaaccctccaaacttaggaacattaccttgtttccaaggaatttgtcattcatagtgatcatcaatcacttaagtacattagagggcaaagcaagttaaacaaaaggcatgcaaaatgggtagagtacctaaagcaatgtccatatgttatcaaatacaaaaagggaaaaacaaatatggtagttgattccctctctataagacacattatntttcttcctacgagctc

SEQ ID NO: 126958 - DNA, 479 bp, Glycine max
  unsure (1)..(479): unsure at all n locations
cttgatctagtagaagacatgtatcaagaatgggttagtnctatctttgttacccgataccattggggttgcttatataaccttcttctaggttaatggacttagtttcctattttaagccccacaatggtgataatcttgggtaatagatatgatgttgatatatattttcttatatgatcctttaggcggtgaggaaatctttcccactttcctattttacaatgactaaatgcgttgatgatttttgcaatagatctactcaatcagacacccttcaagttagtgtgttaagtatgagttagcacatatgccccaagcatcatagtgttctgtatcggcttgagtgtttgctttctagacaaatagatatcaattactaaggttttttctagtctaggcaattgtattctcctggacttctcttttanagctatttatttcacttatcttacttggtcatttgtgggtgatgcata

SEQ ID NO: 126959 - DNA, 466 bp, Glycine max
  unsure (1)..(466): unsure at all n locations
agcttctaataactgggctaaattctgtcttatataaaaaaaacnctnccaaatgtctcttagagtgcgttcgaatataaaattttaactaaggaaactaatttatcagagaatttgaatttctgtaatttagaattcattgtttgaatgtcttttatgaaaaatttaaaattttggaattgtaaaacagaattttgaacaactaaaaatctggaatttcaatttccttctaaaaggtgagaaattgaaattctcttattacaatcttcttcaagaaacaccgttttagcttttaaaatattgatcgggtgtgagcatagaagaacacatataactagcacatcaattatatcttctcttttttttttcattcatgtttgtcatcttcataagtttaatcttttttatccatacaccaaatcttgaaaataaaaacacttcaattgaagtagttgaaatcttaaaa

SEQ ID NO: 126960 - DNA, 360 bp, Glycine max
  unsure (1)..(360): unsure at all n locations
ntagtcttcatgttgctcatgttgctcccctttttttttttttatgctttcagaggtgagtaaaacatttatcttttcaaaccatccatgttatatttattgaagagtatgacttttgggttcttgataggaaattattagatcaaagatattataaatattaagattgaattacatttgaatgttcatgtatgttggtcatataatttttgaacaattgagttatcatgttaaatatagtatttagtgctgttgtgattgtccccaaattttggtgatattgcttgtaatcttgtgtgcaaaataaataacatggggtgattcgtgatttggtgataataaacttccatgtttattatt

SEQ ID NO: 126961 - DNA, 445 bp, Glycine max
  unsure (1)..(445): unsure at all n locations
agcttgtcaagctccctagcttgttctagtgttgtcctatctactatctgtcaagttgtccagagaggacacacttcttgttntgcaggaaaagtcaaacatgtcaagcaagggaagtccttgcgattgacaattctatctttgttttaccattggagaacgcattgaagacaagcatttcatttgtcttttactacgggcaagtgcagtgcacgcatgttactctagcatatgtgtcacttgaggagtggacacgtattggagatgtggtgcatgggatattanggctacctcgtggtgcgaactttcattgcatcatttcagctaccgctaattactgaagagtcatgcctccacttaaatgaagtgtccatctgattctttattaccaccactgtgaatatatgctctttctcctgagaattcatagcctctacttacaatt

SEQ ID NO: 126962 - DNA, 390 bp, Glycine max
  unsure (1)..(390): unsure at all n locations
gctcgnncaaaacacgcttaaacactcatttcatacaaaacaatccactgcatatcattttcaatcaattcaatgttcaaacaagcttttggtacaagcaaacaactcacagtgttgaaatttaaataactgaaatttaaaagaactgaaatataaaaactgaaattaaaatgactgaacataaatcataaaataactgaaaataaactaaaatgttcaagatgcacaaatataaatgtcttgctcctgtggttgctcctgtgcatgctcatcaaggtccaacacctgagcagctggtgaatcctgagagataggatgctctaactcagatgctggtgcagatggtatggcatcatcaggaataggtgtaggagatggctcatgtatctg

SEQ ID NO: 126963 - DNA, 470 bp, Glycine max
  unsure (1)..(470): unsure at all n locations
gatcttaagacaccgcggctgcagcttacaagcagcttccatatatggtattattatcacaatagctncaagtaggtgctctataaacctccattaattttcagctctaccttctcctccattgttgtttcttcattattctccatgtatctccttaaatgtcttgtgctaaattttgttaacatgattctttataatttccaccgattaatcttgctatagaagctatatttgattttctatggctcaaatttcttgttcatgttcttgaaccatgagttgtgtngagtttatgttcctttgagttttgtcttgctattttatgtggctgaaacctaaaccataaaattcttacaaaaacattaatgtagaataaaacctcaaatatctagagtgacttgttcacctcgtatagttttgtcatagaagtcatgtctagtcatgacacttgtcacatgatatttcttatg

SEQ ID NO: 126964 - DNA, 474 bp, Glycine max
tatctatattacctaggaagagagagatagaatttggaattttttactgaagaaatgaatcttattcaatattgttcttgacttattgcttcttttattcattcctgacttgttgctttgatatatactaattttaaatgacaaacaaaagatgactaaagggctcaaataaaaatttccccctccctcactcacgggacaacacacaccccctcccctccctttctctctagcactcttgctcccctttcaacatatggattactttctcacaatagtacatcatgttaatgcaataaatcaagtaaaatgactctataagtttgcatatgtttagatttatatcagagtataccaaatttcttgtaaatttcctatgtcatttgtaattcggatgcctaacattgactcatttattagctattgaaattctgataccgatgacagatgtcgtaccggatgtcacgacatcac

SEQ ID NO: 126965 - DNA, 174 bp, Glycine max
  unsure (1)..(174): unsure at all n locations
agcttgggagctgctgaactcgtatttcccgtagctatgtggttnatgaagagagggggaaaagttttgggtgaagaaaacgttcctcctccaaccctttatgttttcgtacaggggttgctcgcccaggcgagctaacctgtaccctttttctttgcgggggggggggttata

SEQ ID NO: 126966 - DNA, 468 bp, Glycine max
  unsure (1)..(468): unsure at all n locations
tattaaacatacttaggctgtgctaagttaatgctgtttttgttttganaatggctccaaaaaggagcttgagaaagttggtctaaaaatctcgaagagctttcctcttactaggactactctggcatctatggagtctttgtccctgccagtggtactatgaacaccttactgtattttcagttttgagattgatcatgactttgtgtgtgatgtttgggttcatttgctgagaacaagttcaggaaattgttctttctgctgatatgcaatgtgagaagtgccagaagagggttgctgatattattactaaaatgaatggtaagtaacttgcacatgattgtgaaattcagacattgttcattgattgcttntggagctctatagagaaataagagatctgacttgacatctttgagtgaaagacaacttactgaatgtgtgatattctctagagaatccacaatg

SEQ ID NO: 126967 - DNA, 444 bp, Glycine max
  unsure (1)..(444): unsure at all n locations
tgtgcgaatcaaatcactcctgcattntatctctatcattgctttctttctttctttacccactcctcacgtttggttttttagggaaaacaccataactaaacacgccacaaggcatccctatcgcaccagatccaaatctagaacgatgggtgatcaagaggagacacaggaacaaatgaaagccaacatgtcagctctgaaagaacagatggcttccatgatggaggccatgttagggatgaggcagctcatggagaaaaatgtggccaccgctgccgctgtcagttcggctgccgaagcagacccaactctcttggcaaccgtgcgccatcctccctcaaacatagtaggacggtgaaggaacacgctggggcacgacggcaaccctcatctgggatacaaccgagcggcttacccttatggatngccacccaactactc

SEQ ID NO: 126968 - DNA, 398 bp, Glycine max
  unsure (1)..(398): unsure at all n locations
agcttgggtgaagnngtttcttctgttgggttccgagagaggntngcggnggcttgatccatgcgggcgttgaagtgacggcatgggtatctctttccttcctctttgccccagttgctctgatcctcctagcgatggtactggtggaggagacgtaatcaaacttccttctcttcaaacctacttcaattctttccccggtgaacaccaacttcgtgaagctggagggcatgtatcccactaatttctcatagtaaaacaccggcaatgtgtctaccatcatggtaattatttccctttcgaccatgggaggggccacttgtgctgtcaggtcactccaccgctgagcgtactctgtataggtctcactttccttattaaccatgttctgccagtga

SEQ ID NO: 126969 - DNA, 475 bp, Glycine max
  unsure (1)..(475): unsure at all n locations
gacctatgaaactcaagctttggagagaacatgggaccactcatttatttcttttgtngnatctagtcaaggtctgagagaccatacaagtttcctaacgatttctaattatgtgggccattaagtctatcatatgctgacaatagccgagaagcccatgaatttcttcgggggcggagtaggtgtccgccattgccttggctttggctaacaatcagggaagttcttgactcccgttcaaggtgagagcaaaccgatccatccacatggttgcctcttggtgtaaagagtcgatcacccttcctctagcctctttttccacgtatacttgggcatactcgtccgcgaccctatgctcgtgggccgtggctagacctaactcttcttggtacttggcgatgatagctagcatgttggtctccgtctcgcataaacgctgagacaagctccttttggaccttgaacaggcaactaa

SEQ ID NO: 126970 - DNA, 458 bp, Glycine max
  unsure (1)..(458): unsure at all n locations
caagcttgctgaanaatttctcttattctttctttgnncnanngcncctctcaactactccattatgttgaggggttctaggtataaaaaaatcatgttctatcccattttcatcaccaaatagattcaagtctttattctcaaattcccctccatgattatttctaatggatgcaatattgaggtttctctcattttgaatgattatggcaagtctcttaaaagcatgatatgcatctcttttgtgagcaagaaataaagtccatgtaaatctagaataatcatctactatgacacgagcataataatttccaccacagctcatggttctagaagaaccaaagagatccatgtgcaaaagtttgaagggttgtgtggttgaaacacaattctatgatttgaaagacacccttacttgttttccctttcacatgcatccacatctatcttctcaattt

SEQ ID NO: 126971 - DNA, 432 bp, Glycine max
tcggaagaaagggatgaggtgcaagcgctttagttatttttgtaagagcccgggtagtcaaagagaagttcaagtccatagccatcaaagtctgaagagagtatgatgaactaagggacgttaatatggccaccgatgaagccttggaatgagaaaccaataacgcccgaaaggaagaacactaccaaaacatgttttgaggggctgtatagggcagcaatagtgagctcaaactctgaagaggtgaaaggaatcatcatgggtcaaaggcatgatctggaaggacgagctaaaggcttgccttacgtcgaatagaaatttgtcccaacagttaaagtgagactgaagggaatatgtgggccgtcatctatgagtgcatatagaagctaaatcttgcagcgactcacgagcaaatgctataggatgagttcg

SEQ ID NO: 126972 - DNA, 436 bp, Glycine max
  unsure (1)..(436): unsure at all n locations
ctgcaagcttaaccatttgaacttnactaaagattctntgttgttcagaaagtcttgacatggaggttgaagcacttagagattttgactttctaagtggttagtcataacacttattattaaatgtttgatatgattatgagaacctaatatcaatgtgcatttgctcatgttcagaagatcattacatagataatgtatctcttacttgttatgagaaaacacattatgtaatgatgattcatcactcacaaagttgttgggttgactacagtgctcataatgctatactcaaaaagaaattttgacgctcagaatgttctaatgcaaatgcattatatatgacaacaaattacataatgtaaagaggaagagaaaagaggatttaacacatggattntatacccgttcaccccaatcttgggctacgttcaaa

SEQ ID NO: 126973 - DNA, 393 bp, Glycine max
  unsure (1)..(393): unsure at all n locations
ctacattntatctaacacactattcaacctcccttctagtgtgatatatgttatttgaaggaaaactagatgtagcttatgttgggtgaactagtataaaagattgcgttcttgctatctttgttttttcctcatgttttttctttggacaattgtttctatattgttcgaaatatttttgcgaaaagtttacaaaaataaggtgtttcttattatttcatggagaagttacctaacgaattagtcaatcatgacaataataaggtgactctaaaagtattgccatagctatagagttgtagatactaaggcaaacacaaccttttctatgtgttggtgtgctaatattangaccttgtcaatntgtcttaccatagattggttttttgctta

SEQ ID NO: 126974 - DNA, 477 bp, Glycine max
  unsure (1)..(477): unsure at all n locations
agctnntaacatattgttntaattacttccgttatcgatttgtttgttttacattaatattaggtgtaatttgctatatttcaataaaaaatcatcacgttttatttattttcaagtatatgtttttatataaaagattaattttttttaataattattcaagaggtaaaaaaattctctgttgttaggttttgctcgttaaatataatgaaaaaattatcacgacaaaaatagaaagggaaaattatagggaccacagaattagaaggatcaaaatgaaaataaaaacatgaaaccttattgttattgagattaaaaacttatattaagtcacgtttataaaaaaaaataaaaatgaaaccttcanatgttgcaaattcattagtaagggtataaaaaaattaaacctaaaaatgaagcactgacttttttnntatttaggaaacaaagaagcactgataagcagcanaaaaatta

SEQ ID NO: 126975 - DNA, 339 bp, Glycine max
tgaaggtgtgtaacccaccatttccataatagaacactggtaacatttctactatcattgtgataatctctttctctgttattgggggcgctacttgagctgccaagtctctccatctttgggcgtatcctttgaaagatccgtgccctctttttgcacatgttctgtagttgcatcctatccgaagccattatactgacacagcctaacaaaggcaaccattaggtccttccatgaatggactcgggaaggttccaagttagtgtaccaggtaacagctaccccagtaagacttccttggaaggaatgtataagcaattcctcattttttgtgtatgc

SEQ ID NO: 126976 - DNA, 477 bp, Glycine max
  unsure (1)..(477): unsure at all n locations
agcttaaggtaatcttggcacaccnataatcttgcaactatataacttcgcacttaagggtgagagttcaactgctgtttacaatgtctaactctttaactaggacactagtcacatcaagggtttcctactcaagctccaactactaagctagctctattgtttgaaactaaactcacgacaagattcttaagaattttacccatctcttctacctcagattcaactcctaaggttctcacaatgtatcctactagcggtaatgcctccaaaatgtgaaggcaaacaccatggctaccaactctagatcatttataggatatatcctttcatcagtcttgacttgttgagaaaacataggctagtactttgcctcttgcataagcatttctctaaaatgaaagcttactttggatacttcattaccctcaccgaaaccaatacaagagctaactcaaggtgggagatcctatccat

SEQ ID NO: 126977 - DNA, 489 bp, Glycine max
  unsure (1)..(489): unsure at all n locations
gacctatgaaactcagctgcttggggctttatggaggctggatctttggctttatgttgttctttaatggtgatttttcaccatggagatgcagcggaagacaaaggagaagaggtgagaggaggcgccatccactatggaataagccacggaagaaggagcttcaccaccaagatgaaccttggataagaagctcggaaggatgcttcaatggaggaaaagatagaaggagagaaagagagaggggggagcacgaaattgaaggaataaaagaaggagagaagtgaaactttgaagtatgtctcacaagactctcattcatcaaagttacaacaagtgttacacatgtttctatntatagactaggtagcttccttgagaagttttcttgagaaaacttccttgagaagcttctttgagaaaacttncttgagaagctagagcttagctacacacacccctctaataactaagctcaccttcttgaga

SEQ ID NO: 126978 - DNA, 459 bp, Glycine max
  unsure (1)..(459): unsure at all n locations
agcttgtccctgccattgagggactcgntgttttgactttattaagtcctctgatcgcgtgttcggtagacaccgacgatcagagacttttgtcctcatttgtggagcgngggccccgggagacgtctagtttccatctcccggtgggagagctcacgatcacgctggacgacgtctcctcgcttctccatctgcccgtggttggcgacttgcacgcctttcagcccttgcacgtggacgatgcggttcagatgctggtggacttattgatggtctctgtaaagtctgccagggttgagacagcctagtgtcgtggaccgtacgtatgcctgcaatgggtatgtgatatataagagtgtcgttgtcaggcaggtcattgagacagtgcggcttgcgcatatcttcttcatcttctggattgcactctatctgctaacaagagtgcaaccaatgtgcatg

SEQ ID NO: 126979 - DNA, 477 bp, Glycine max
cttttaatattaccacacattctcataaggtccttcatcatattatttcttctgccaacggcaaaacaaaggtacctacgactgaggatgaaaaggaattatggtcgactcttgatgctacggttctttcttggctttatgcaaccatctccaattatttgttgcatacaattattgaacccgatgccacgaccatggatgcttggaataggttgagagatattttccaagacaacaaacattctcgtgtggtaactcttgaggccgaattctccaatactaagatggaggattttccaaatgcttcagcatattgtcaacatctcaagtcccttgttgatcagttgaaaaatgttggagcactgatgttagagagccgccttgtcattcaacttgtttcgggtctcacaagtgcatatcgaggcgtagggacgttaattcggcaaagcgatcctctacctccgtgttattaagctc

SEQ ID NO: 126980 - DNA, 414 bp, Glycine max
  unsure (1)..(414): unsure at all n locations
agcttagcctgatcgctaagcattttcttatccttggctaagcgngacctattgtcgccaagcacaattccttactgccataactgaggtcaatgaagctaaacgccagtcctggcagctaagcgagattcattgcagcaatatgcgcgctaagcgagtccttatcagctaagcgcatgctcctctgtacttaagatgcatcactttagctaagccatccagagtctggcttagcgagagttgcagcttttcggatctgcaaaccttgctaagcaatctgatcctcgcgctaagtctagtttgtgtgttaaaaaaaactgattttgaatttgaaacgtcngctaagtgcgcgggtccgctaagcgagagtatcataanaattcttaagtgagtgtaacaacagttacactcaca

SEQ ID NO: 126981 - DNA, 440 bp, Glycine max
  unsure (1)..(440): unsure at all n locations
gacctataaaactcaccttggtcatagcanacacgcttgcatgccactcttgttttctcagcctctnggatccatccccagaagtgcaaaaaccattctctgggtttttctttagttcatatctccgacgaacacaccgaggaagcttctttaagtgattctcctccaaacctgattcggcaagggctttatcaattattcccagtttctgcctctttcttctgcacccttttcttgcaatttggttatcaaacgcagttgtccttcttctcttgttcctttgagacctataatcactgtttactctattttctatgatagattgaagactctggagttcgagagcacgggattcagcatatttctgcacattgatttttcgaggtggtggtggtggtgtaggtactgaaacttgaggcttcttggttccatcagtaacc

SEQ ID NO: 126982 - DNA, 252 bp, Glycine max
cagcagagcgaatgttgaagcttgttagccacaccatgagtctcttaggtggactgcgcacaagtaagcttgcagatactgatgtgcgacctgatcaccatgcgagctgatgacgatgcatatggctgatatgttagcatgcttagatgtgctgatgaatatgtcgcagagaattacgcatgctatgtacacaatggtgaacaaccgagccgagttatgagaaaatgatgtattgtggggaataatacggag

SEQ ID NO: 126983 - DNA, 289 bp, Glycine max
agcttattaaatagtgacgaaagtgatctaaactcaagtttgtttattaaatattgatgaaaggaaccacaggccacagctcaagtccatgccaaacacccacacacacacatacacacacacacacacctacaataataaagcataagcacccccgaaccccacaattccaaattagttacataaacaactttcgatgtcgatatttgtctgtaattgaaatttacattttgtatgttgttgtataaaggatcatgggttctacacctgcctcgcctcctcctcctcc

SEQ ID NO: 126984 - DNA, 351 bp, Glycine max
taataagtccatctatggattgaaacaagcctcccgcctatggcttttataatttcatgaggtcatttattcatttagctttgaagagaatgtcatggatcactgtatataccagaaagtcagtgggagtaagatttgtttccttgtattatacgtagatgatattctgcttgcgactaatgataaaggtatgctatataaggtgaaacaatttctctcaaagaactttgatatgaaggatatgggagaggcatcttatgtcataggcataaagatccatagagaaagatcttgaggcattttatgcttgtctcaagaaacctatttaacaaattttagagagattatatg

SEQ ID NO: 126985 - DNA, 412 bp, Glycine max
agcttgccaactatatggacactgtgtgtttttattttggtcgaggatgagcctaatgtacattagtcaaactaaccatcatcttgccggctgcatccgtggagagtcattcgatttgggcagtctcttttctcactttagaaaaagtacgcaggcaactaaagagtgggcgattagtgtctcctctcttgtctatacaaaaagaacacttgcactaatacaaaaacgttttcatagagcgcgtgcaaagattaataacaatacatgccttctttctcaaaaaaacgcgattacggcagtggtgactgctctccctattcaaatcaagaataattcgagcatagtggctgtgtagctacttatttattgatatataactatcctctatagaatatattcatactagagttgt

SEQ ID NO: 126986 - DNA, 451 bp, Glycine max
  unsure (1)..(451): unsure at all n locations
tcatcttgctagcgagtattgtgctctgcctcttatgcttattcaccctcatccccaaccttcctatccaaagatgagtgtgttcaatacattgactcatacattgcccgtttcaacataaaccctctctattgtcagtgcattgaatttgctgcgtatgatgaagttgaaaacaagcggagggtcgaagcaaataacactcttgaaggcacaagggaaatttacgtagctaagtttcttgtgattgccacgggtgagaatagcgaaaggtatattcctgatgtgcatggactacaaagctttgaacgagagataatgcactccatatactacaaatcgggttcaaaatatgaatccaacgaggtattggtagatgggtgcggcaactctggaatggagatagcttactatctcaatgactgnggtgcatacacttctattctcatcagaa

SEQ ID NO: 126987 - DNA, 450 bp, Glycine max
  unsure (1)..(450): unsure at all n locations
agcttgtgctattccaagttcattttccatatctctaatccaganggctnccttcactccttcagctaaggccatgtattctgcttcagtagctgaaagagcaacaactgattgttgatttgctttccaattgattgttgtaccaaacaaagtaaacacataccctgttaaggatttccttgtgtctacatttcctgcaaaatctgcatctacatagcctgtgattgctgcctcatgtgtcgtccttttgtaccttaatccagctttcaaagatccatttatatactgtagtgtccacttcacagcttcccagtgtgcactgctaggatctctcatgaatctgcttataatacttacagcatgagtcaagtcaggtctgctacaaaccattccatacattatgctattcacaccactagcatagcgtgtttgatccattatagacctttc

SEQ ID NO: 126988 - DNA, 466 bp, Glycine max
tcattgcctaatagaccaacttacaaaagcaattttcattatgactcagcataaggatgaataagctaaagttgagtatgtgaaaagattgcatgagcaagtgaaggctcaaattgcaaagaaaaatgaaagctatgccaagcaagccgacaagaacaggaagaaagtggtacttgaaccacgtgattgggtttggggacacatgaggaaggagaggttccctaaacaaaggaagtccaaacttcaacctagaggagacagacctttccaagtactagagaggatcaatgacaatgcttacaagatagatattccaggtgagtattgagtaagttcttcatttaatgttgctgacttgactccatttgttgcacgtgatgattttgaacatttgagagcaaatgctttctaagaaggaaggaatgataaaaatcctaaaatatcccaaatacagagacctatgacc

SEQ ID NO: 126989 - DNA, 466 bp, Glycine max
  unsure (1)..(466): unsure at all n locations
agctntaaaattngaattanttcgttcaatttttgctggtaatcgattaccatatatgtgtaatcgattacacagtgcaaatttttgaattcaaattttaatagctgttgtaaatcagttttggccactggtaatcgattacatcctctggtaatcgattaccagagagtaaatttcttgaaaaacactttttaacttaaatttcttggccaaaccttttgctacttcaattggaattcctttcctatttaatatacccttcctaagactctagaaactgtcttgatcatccatcttgaatatctttaatntctttgtcttgaataaagctttgagaaacatgtgatcctcttttagaagcatgtgatcctttggcatcataaaaacattcagcttgatcctctgtctacatatcttacttgaaatccatgctttatggctagttatcgattaccactcactgtat

SEQ ID NO: 126990 - DNA, 465 bp, Glycine max
  unsure (1)..(465): unsure at all n locations
ggacctataaaactcagctttanaaacaatttcaataatattctactttacatacctatacaaactcaaattaaatttacaaacctgctagtgtacaataacatttgaacataagccattaggtgagtagtatggcatactcacatccttattgagtttattccagatacaaaagctgatcttacgtttcatacaccaaaaaacgaacatacacaatatattaatttgttgaacataagaaactaagttttggtggctgtggttttcatgacatggattttctccacttgtgagtattattcttactagtacctttagcattgaccaatctagttttaaggtccacaggcatgtacattccatttccttcaagctcttgttccattttgtcatgcccactcttgcctaatatttacttccacttgaagaagcctttcttctttttcaccaccattgtctncatct

SEQ ID NO: 126991 - DNA, 394 bp, Glycine max
agcttgcttatgcgggcatcgtgttataacatcttaacatgatggggagggtttaataacgttttggaacacttgccgctatctttgctcttagatccttgcgcaagattctgcctgacggtgacttgggaattgcatcaatgaagaatactcggtttattcttttgggaaacaccacctgcacaattccacaactcattacattccttattttgtggctaagaaaggtacagttcacatcataaacctgcggaacacgcacttatatctgaaagtgacccacacttttataattacgtgggaagaagctgcgtgggtcaggtatcagagaaaatgatagactatattactgcggcgtgaatgagattatttgtcaaatgaatatatatcagat

SEQ ID NO: 126992 - DNA, 286 bp, Glycine max
tatcaagttagagaataaataaagcattctgtgcattcctttattctaaagatcaataatggagaaacaacaactattccttgttgtaacaccttgctgaagaaactggatcagcttattgagaagcaatggtcccgctaaaccaatacactcattaatcacctgtacgaatatcaaacacattttagatgaagaaaattatataaaacatgataaaattaagcatagttagactaaaattttggtttatttatggacaaagacttggtactttaatattgacatt

SEQ ID NO: 126993 - DNA, 431 bp, Glycine max
agcttcttcaagccttttcctgagtttcaagttttagccttaagttgttccatgttgcttatgtttctcatattgctccccctatctctaacaatagcttggacaagtatgagggttgttagtttgccaagccccccaacctagacaagtgttgtctagtgtcaagggtagtaaccttgacaggtgcaagagtagcatgtctgtcaagcttgtcacgccctccaacctaaacaagtgttattcgagctatttttgttaagttgtccagggtgcatgcacttttcattttgcagacatgtcaggtgagtagaatctctatatttgacaattctacccttctttgatcattggagattgaagatacggtattttctttgctcttgctgccggtaattgtagcgcacacacactacttttgcatatgtgtcacc

SEQ ID NO: 126994 - DNA, 459 bp, Glycine max
  unsure (1)..(459): unsure at all n locations
tgcttaagaagcttcctaaagaagctagttcttatctactcacacctctctaatagctaagctcacctccttgagatgagaagctagagcttagctacacccccccctataatagctaagttcacccctaagccaaaaaacatgaaaatacaaaaaatgtccttactacaaagactactcaaaaagccccgaaatacaaggctaaaaccctatactactagaatggccaaaatacaaggcccaaacgaaggaaaaacctattctaatatttacaaagataagcgggctcatacttagcccatgggctcgaaatctaccctaaggctcatgagaatcctagggccttccctgggatctctggcacaatctacttgcagtcttctatccaatgcccttgcagggtaggattacatcattccctccaccttggaaaggattacatcanttcctcaaatcccg

SEQ ID NO: 126995 - DNA, 362 bp, Glycine max
  unsure (1)..(362): unsure at all n locations
gcttctttattattgcaattatatctactttaaagattttatttgaatcgctctcgaaataattcataattagggtttcattattaattaaaaagagagntaaatttaattggggatagnttggtatcttaattcaaccccccttcttaagataccgaggccacttgtctaacaaattgttcatgttgaccgacatattttgcactaattgaagcatccatgtaactggtgctctcatttaaattaatatgtggcatgtcttcagcatgatcagtccaaattcaataattagacttgaaaccaattttgtataggtgaacattcacaactctatcctcccanatcctagtacaatcgcatta

SEQ ID NO: 126996 - DNA, 428 bp, Glycine max
caagtttgggatcgtatttttactgggacatgtttgagtgtatgttggaaaaagagagggttttgggagagggggaaaaaaaacgaatttgagaggaggaaagagcgtagagacatattgtaaatgtaagactgacttaatatgtctctatttataggtagggtactctcaacctattattcactctatttttgattttattattttataaaatgaaactttattttactacctatcaaatgaataaataaaatctcctttgtatttctaagaacgtatatttattttatttaccttaaaaccattattttaattaataaaactatttattcttatttatttaatcacaaaaccatcattattttcataaaactctatgtattttaaataaaataatttgtaatttattttatgaaaaatgagatgtt

SEQ ID NO: 126997 - DNA, 387 bp, Glycine max
  unsure (1)..(387): unsure at all n locations
gtcttaccggcaaaggatcngaaggggtctgaanagttgcatatttggacatcctgctttgatgaatactggggcaagtgaagagggtgagaatgagggagaaacccatgcagtgactgccattcctatatgggcaagtttcccaccaacccaacaatggtatttcttatgcaatatcaacccatctccttacccaccacccaattatccacaaagttcatccctaaatcaaaccacaaaacccacctaccacacgaccaatgctaaacaccacttttagcacgaaccgaagcaccaaccaaaagggaattgtgcagcataaagcctgtgaattcaccccaaattccggtgtcatatgctaaacttcctctcatatctactcgataa

SEQ ID NO: 126998 - DNA, 393 bp, Glycine max
aagttgcgtattgtaaaaaattgtatgaccaagtgaaggtgcaaattgcaaagaagaatgaaagctatgcccagcaagcccaaaaaaaaaggaaggaagtggtacttgaacccggtgatgatcttggacatttgaggacaaatgttttccaagaaggagggaatgatgagaatcatgaaacaggccaaatacagtctaaaggcccaagtggagaaagacgaaggcccaagtggagaaggacaaagcccccgagtggagaaggatgaaggcccaagtggagaaagatgaaggcccataggcagagacactatcaagactattaattgatgctgaaggccaaaattaatttgaaggcccataataaatatgttctatttaggtataatttttatt

SEQ ID NO: 126999 - DNA, 440 bp, Glycine max
tcgcccaggcgagctatgttgcttcctccataatcaaccaccttctggaggaatattctggaaggcccaagtgggcttggttgctatttgcacccccatttttacttaatacacccccttgctcttttttggtgatttttttccgtaacgttacgaaattttacgaaattcgtaacgattcttgtttctttccgtaatgttacgaaaccttacagattacgtaatcatcccttttttcccttccagaacgttacggaactttacggattgcgcactaacacttccttttaatttccggcatgtcacggaacttcatggattgtgctacaatgccttcttttgacttccggcatgtcacggaacttcacgaattgcctaacgatggtggccaagtacctcaaagtggtatgacagttgcccctctttacttgtcttttatt

SEQ ID NO: 127000 - DNA, 326 bp, Glycine max
aaggccggtagcactgctactgatgcaactcaaagagtgggtttggagggaaagctggttgtgattaatggacagctagtactgcccatcacattactcaaagatggcgatgtagttgaagtaagaatgtaaatcattcggtctttagaaaaatggaaagaattctttatgggccgtatgtggttaaagtagatggtatagaaatagtctttattctatatagggatggggattctcggtagaataacgtactttcataaattaaaaatgtggtggcttttaactatgactccataattagttggatcaccacatgtgctatcata

SEQ ID NO: 127001 - DNA, 435 bp, Glycine max
tccctgccctctataatggtcttctgacttagaaggagtgcgggtcgctcaataaattcctatctctttatctatttctgagatgtttggatttttcaaaactccatggacatgtagaagagaaatgctattcccactccgaccaagacataactttacttgttcaaataacaattaaggtgaagtagagtcacgaacaatgaatccctttatgataaatagatttattttgtaagttcgttattacaagtatttcctagacttcaaacatattttaatttaaataatataatataatgaataataaaaattatagaaaggaaatttgagggtaaataagtggtaggagaagcacagttaatgttgaaaataaccctttgtggtactaaagtctttgaccctattaaaactttataaaactttaaagaaaaaatt

SEQ ID NO: 127002 - DNA, 350 bp, Glycine max
ttcttttcagctgtccagagctctattcttctttgatatctgccaagcattccaaccacaaaagcaatgtcatgtcttgtacacacatgtgcatacccaaggctgtctacaatggaagcatatggaatgtttctctttctgttcctttcaaactcatttttacgacattgattcatattgaatctatcacctttcacaatatgcggcatgttgggtgaacaatctttcatccaaattttttctagaactttattaatataagccttttgaggcaagccgacaatcccttgagatcatttctatggatctctatgctgatgacatatgctgcctcacccatatacttcatg

SEQ ID NO: 127003 - DNA, 390 bp, Glycine max
  unsure (1)..(390): unsure at all n locations
cttaattttttctccttaaatctccattaatttttttgctttaccttcacttccattgntgnttcttcatttttctccatgtatctcctcacatgtcttgtgctaaatgtttttaacatgattctttaaagtttccaccgattaaacttgctatagaagctaaatttgattttctatggttcaaatttcttgttcttgttcttgaaccatgaattgtgttgagtttacgttcctttgagttttgtcctgttaattttggcggctgaaacctaaaccataaaattcttacaaaaatattaaagtagaagaaaaccctcaaaatctagagtgactctgtcacctattgtaattttgtcataaaagtcatgtctagtcatgaaacttgtcaca

SEQ ID NO: 127004 - DNA, 461 bp, Glycine max
tactcaagctatgctgcaacattacaatagacctgctcaacctcagcttcataatcaaccacatcagaaaaattatgacctctcccgcaacagatacaaccctggatggaggaatcaccctaatcttagatggtctagccctcaacaacaacaacagcagcctactccttccttccaaaatgatgctggcccaagcaaaccatacattcctccaccaatccaacaatagcaacaaccccagaaacagcaaatagttgaggctcctccgtaaccttcccttgaagaacttgtgaggcaaatgactatgcagaacatgcagtttcaacaagagaccagagcctgcattcaaagcttaactaatcagatgggacaattggctacacaattaaatcaacaatagtcccagaattctgacatgcttgcttctcaagctgtcaaaatccaaaaatgtagtgcattta

SEQ ID NO: 127005 - DNA, 161 bp, Glycine max
acgcttttgaggactgaagtttggatttttatctttcaagaatgtatttgtccgctcagtgaatatatgacaaaataaacacatattatataacacatatgcccttgtactgacaattagagatgaccacactaattatagtaacagattcatctctctat

SEQ ID NO: 127006 - DNA, 231 bp, Glycine max
ctctgatgtgacattgcttcaacatatatcatgagaccgatctaccgccacggttgatttatctgatacatacgtcagaatatttaacgactataccgaccttagtgtgtatggcgcacataaagcagagaagaattgctttgaactcatctgagccgtggcgttataatgctgttatgcactctatgcgaagttgaacactgacatagttctatcgcaacaatcaccttt

SEQ ID NO: 127007 - DNA, 452 bp, Glycine max
  unsure (1)..(452): unsure at all n locations
agcttatgctgcaaacatttataatagacctcctcatagcaaaaccaacaacaacaaaataattatgacctttcaagcaatagatacaatccagatcagaggaatcatccaaatctgagatggacaagtcctccacaacaacaacagcttgtccctcctttttagaatgttgctggtccaagcaagccatatgttcctcctccaatacagcaacagtaaaaacaacagtcacaacaaagacaacaagcaactgagactcctcttcaaccttccttagaagagttagtgaggcaaatgaccatccagaatatgcaatttcagcaagagacaagagcctccattcagagtttgacaaatcagatggggcagatggctactcagttgaaccaagctcagtcccaaaattctgacaaattgccttcacagactatgcaaaatccgaanaatgtgag

SEQ ID NO: 127008 - DNA, 445 bp, Glycine max
  unsure (1)..(445): unsure at all n locations
gagttccatgccaaaactctacctcactaatgtgacctgnggtctcacctaatggggtatcttcctaagtacaacctatatgttttgacttcgaatgacatgtcgaggtgttaagaactacttcccaaggggattatttgtaacacccagaaaattatgacttagtcagtatgcatatctattattctctaagaaattgtctgtgcttgaattggctatggactatgattgatttaaaaaccacagtgttaatttgtttcctagtgattaattgtctatgatagtttactcataattatattttcctggtgaaatttgtatgttgaattgattctcttttagaaaagaatatatatttgatcatcatgatttatttaattatgaaaaatactctaagtattaatgttataaatatttaattggttagttctcactcctaaatcta

SEQ ID NO: 127009 - DNA, 367 bp, Glycine max
  unsure (1)..(367): unsure at all n locations
agcttaaagtatgcccgagtcattcatccctatgagattngntgaagnattggcgatcagaatttcctttccttggattatagggttgaaccaagctcatgcttttacaaaaaggttcatcaagtcaagttgaaatatggaagtaaccgtcttgcaaaattggggcaaaagatgaatcgagtcacatcactgcttcgtctactgctaaacatatttaggaatgttgatgtccttgttacttccagtttcaccttgacaaagatatcatggaccatgttgaaaatctaaattggttcaaccccatatcctgcgtaaaaattcgcaatacttcaattgtacatcattcgcatacatccatgcttttcat

SEQ ID NO: 127010 - DNA, 461 bp, Glycine max
  unsure (1)..(461): unsure at all n locations
ggtaagaaaatcttaatacatggaaaatgaaatntaagtatatggtaagggttgactataaattctttctttctttttggtataaattctcataattagctttggcaatattttttagtctttgttttcccttcatttaaaaaaatttaatttaatttcatagatcgagtttctttgatattatgtttgctccaatttctatttaatttaagtatatttttgttttcttaaagttagctagtcatagcaatgaaaaaattatttggcttgtaatgtatagtccaaaaagatcaaattatggcttcgtagtgtttttcattggtaaatccatgcttttcttcaaaggttagaataaccttttcaaattttgccttttgaactttctaagtgatccctctcatcatgcatattacgtacctgctaaataatattacacgacacgagcgtgatcataattatta

SEQ ID NO: 127011 - DNA, 292 bp, Glycine max
ttactttagtgtgtcatcaccatatctaaacatgaatcaatacaaaccgctcgaatttatgctaactatagctggtatctttgagtgatttagtgcctttgatgtcatacgttattttactgttgctaacatattccacttgagttttcttttgctcccgatttaccgatccaaaattaaatcaaagtccactgctgcagggtgggcataaacttacaaaagaaaaactaaaagcccatttttatgtataccattgtgtttggatttggactaaacccgatagctaactttt

SEQ ID NO: 127012 - DNA, 448 bp, Glycine max
  unsure (1)..(448): unsure at all n locations
tntctaattgttgaaatacacaaatgatgctctgtgattgtcatactgcgattgtcaaaactgctagtatacttaactatcttgcctggtaatctatcccacctgttattgtggattatatatgtatggcactatatcaatgtgatttcaaatgtaaattctccacccatgcagccataattgtcaatcttaccctcttcaaatagaacaaggcagatcgtatctcatattctcatgtcaagtgaaaatagctattccatcacttcatctcatcattgtcagttgtagatattaggagttggaattggaaggaaatttctcagttgtctactaatagcatgtctggatcagctcatttcaacggaaataattgtctatttatcaaaagctctcttatgcgattatttctttaaagtatgctaaacacaatatgttctatcacattttt

SEQ ID NO: 127013 - DNA, 450 bp, Glycine max
  unsure (1)..(450): unsure at all n locations
ctgacgctgcatcttgaccaaccaaccctgcatgtatatgtctagtcttttacatcttttgagccaaatcctgactcaccacaaaccttgacccagggtgagaatgccaatccttaccctcggaagcaaaaaaaagaagagaaggaaaatttccaatcaaaggaaaaaggagaaggaaaatttccaatcaaagaggaagcaaaaaaggagagaaggaaaatttccaatcaaaggaaaaaagagaggaaaggaaattcccaatcaaagagtgggagaaagcnaaaagaaaagaaagaaaattcccaatcaaagaatgggagaaagaaaaaagagaaagttaaaagaagaaagttcctgatcaaagaaactagaagaaatgtgcagaaagatcttttgaccagatgatatctgaacaatacagaattgtcccaaatgaacaaaagaaagaaa

SEQ ID NO: 127014 - DNA, 394 bp, Glycine max
  unsure (1)..(394): unsure at all n locations
tcctaatttctctacaattgcatcacctctcaatgagctggtgaagaagaatgtggcatttacctgnggtgaaaaacaagagcaagccttttctttgctcaaagaaaagcttactaatgcacctgttctagctcttcctgacttttctaaaacttttgagctagaatgtgatgcctctggagtgggagttggagctgtattgttacaaagtgggcaccctatttcttattttagtgaaaaacttcatagtgccgccctcaactaccccacctatgataaagagctttatgccttaataagagccctccaaacttgggaacattaccttgtttccaaggaatntgtcattcatagtgatcattaatcacttaagtacattagagggcaaaacaag

SEQ ID NO: 127015 - DNA, 412 bp, Glycine max
  unsure (1)..(412): unsure at all n locations
tgcaacttgcgattggtcttcgccggtaatgggtcgaagcgattcttatagatgaaaatttgatcatcctgctttgatgaatgagaaaactagggaaaatgaagaggatgagaatgaggaagaaacccatgttgaggctgttattcctacatggccaaacttcccaccagccaaacaatgtcattactcaaccaatatcaactcttctcattacccaccacccagttatccacaaaggccatccctaaatcaaccacaaaacctgtctaccgcacttcctatgacgaacaccacctttagcacaaactaaaacaccaaccaaaaaggaattttgcagcaaaaagcctatagaattcaccccaattctggtgtcctatgctaactngctcccttatctacttgataatgcaat

SEQ ID NO: 127016 - DNA, 390 bp, Glycine max
actttgctactggtaatcgattacaggattctggttatctattaccagagagtaaaaactctagtaacttagaaaattttgagaaaaactcttttgaaaaaaaaaattgtgctatgtttgttttttgaaaaatcttttcaatacttcccttgtgaaatcttcttgatttcttctcttgaatcttgaaatcaaacttctcttaattcttgaatcttcttgatttctgctcattaaacttgaaattaaacttgatcttgaacttgttgactcaatcttgaaatcattttcttgggctttttgtcatcatctttgatatcatcaaaactacttgaatcaacttgattcatcatcatgaagcttgcttctacagactatactgaatttagagct

SEQ ID NO: 127017 - DNA, 428 bp, Glycine max
  unsure (1)..(428): unsure at all n locations
ccctctgtgtcttcaatctctgcgaacaacttctgagaatttcatcagtgaaatccccggcaaagggaaatacccctattcctgattggtttggtctctctcacccttcactcagaatgcttgatcttcgtttttgctccattgttgatctaagttagggcatgtcgtatttattttctcgcctcccagtaagttgatgagtgctatagcgaccataggttctcggaaaacagtatacttgtgaagaacattggaaaagttgttcttgatcttaggaatcttggatatacttccatggctgaagatgcttattcttctgctatattgttactactgaacgtgagcatgtntgttaaatttaaatcctggctttccacgtttctaatctcttttttttcaatttgctctaaatattgtgattatgtgcc

SEQ ID NO: 127018 - DNA, 458 bp, Glycine max
  unsure (1)..(458): unsure at all n locations
atgggaaatgtagtccttgatgatcgagtataatggtttctaaacttgtctttttttaccaagttggaatgcaatgattagaacaagatgcaagtaagtcaaatcaaaatgcgggggacatggtttcttaacttgtttttttttttatcaagtttgattgtgtgggttagatcgagatgccaataggtcaaaccagaatgttaagtagtacagtttccaacttgtcctttgtaatcatgttggaatatgagggtcaaatcgagaggccattatgtcaaatcaaaacgtcaggtaggatggtttcttcacttgtgtttntgggtcaacactactagaaaatatcatttcttgttgttgtagctactgccactgtcatgctcgtcatagttgtggtggtcgtcattgtcatctcctgttgccattggtcatcactgcatgtgtntgtgctcgtcactatc

SEQ ID NO: 127019 - DNA, 214 bp, Glycine max
ttaaacttgaaggataagagcggacagactctttgatcaaatcaaataatcagattatttcgggaacaggtccacttgttaaataaaactataggggcacctatattaaatttatccaatcacgaatatcatcaaatcttatattatataaccaataatgaaagtgtgtggaaggaacctacttgtcattgttacagtcacattgaccctttgt

SEQ ID NO: 127020 - DNA, 473 bp, Glycine max
  unsure (1)..(473): unsure at all n locations
acccagatgcacgcggctgcagctagcatgtaaattcaaagcaaacaatcnctttctacacactgcccacaaattgtgcctttcgacacccattccctcacacacctttctatctccactcctgcttacaaaaccttcttcaccggcggcctacgtggacattgtattatcggctcgcttaaagtttcgtgatacaataatacaatgacgataaagtgaatcttcacgcgagccaataatacaatgccattaatctgtatatattaatttataaacattatatatgaattggtattatttaaatcttttatttatatgaattgctattatttaactttttaatatgtaacatataacataatctttctggttcaattgatttttcttacttatttttaatagattatcaaatcactcacaatccattaaaccattgaattaatggcttcattagctcgataatcacttctttt

SEQ ID NO: 127021 - DNA, 145 bp, Glycine max
acaaaaccggccagaacaaagttcaagaaaaaaaacagccgcgcaaccaacaccccacaaacggggcaccgaagcgggccacccagccagaacaaccaacagggtcggacggacacccgaacacaaggcgggcatcgcagcggaa

SEQ ID NO: 127022 - DNA, 273 bp, Glycine max
  unsure (1)..(273): unsure at all n locations
actatacacatgaactatcttagagggaaggaaggagtttattgccattggagttaaaatgaacatgtttanggatcctaagaggatcaaattgggattaattttgggggggtttatgcattttaatttttcctgtacaatgataactatgaatttctcatgtttgatgggtcaatttgatgccctaatgcgaattggatggtttaattccgtgtttagctttgaatgttagaaaccctagaaattgggaattcttgattcttgcatattttc

SEQ ID NO: 127023 - DNA, 466 bp, Glycine max
  unsure (1)..(466): unsure at all n locations
taagatagctctctatggacttaaacaagctcctagacaatgctatgtgatacttaccaattntctccttgataaaaaatttgaaagagaacaagttcataagccgtttttcattaagaaatcctcttatgacatcttgcttatgtatgtctatgcagatgacatcatanttggctctactaataaatctctctgtaaagaatttgtgcataagatgcagggggagtttcaaatgtcaatgatgggagtgttgaattatttcctcaatctacaagtgaagcaaatgaaccatggaacttttctccatcataccaagtattgcaaggaaattctcaagaagtttgatatggataagagcaaggaagttgcaactcctatagctacaaattgctaccttagtgtgaatgaaaaaaaggaaactcattaaccaaacaaacgatagagggttcattagttctttacacta

SEQ ID NO: 127024 - DNA, 431 bp, Glycine max
  unsure (1)..(431): unsure at all n locations
agctntgacctctntattgattcgaccaatctttctgttcaatttgacccacttaaatggtaccgctccaaaatttcctttacacaaaagaataaaaattatttttggttaccaaaaatccttttacttttcatgatattggatcaagtctggatcatgattgcatgtgaaaacatgtttggtaaagaaaaattcatttcaatataattgttattggacaaatatattgcgaatctttttatgtggttcaattccccttggccccattttttggtttgtagtttgaatttttaaataatgtatacaaaagcacgttgatcacatatgtntgattgatctagtaaacaatcttttcaaaaagccaaaggtagactaaaaatatctataactcatgtggtatacattatttttatggaagtaatcccttagct

SEQ ID NO: 127025 - DNA, 459 bp, Glycine max
tctaaacatattacaactatacacaaggtattcatccatctcctgtgttaaccctcacacaaacctaagatacataaaaatcttagtggaaaacacatcttatcagaaccttttaacttctgttccacatggcaataaaattctgaaaaacagttcacggaagtgtatgaatgagaaaggagcatgagcttcaagacctatattgtccataacgcacctagctaaccccactttaaatagtctgtgcagtccatccaaatatggactatagtattcacttaatacatccaaatatatattattggtattatataatataactaggaatcccagagagtctattttgaaagcttatcaagcgggaatccatgatctgggagacagattcaagaaacacatattcctccatgccatgtagcaatgattcttgtgctcacaaataatctcgtcgatacagat

SEQ ID NO: 127026 - DNA, 444 bp, Glycine max
  unsure (1)..(444): unsure at all n locations
agcttatcatgtctagttttcatagatgttcttttaatcacataccattcccagttcacaaaacaagcatcaaaggttgaaataaaacatccaacaaaaaggacattttgtagaaattatagaaattntattccccattcaaattgaacgtattttatatggattcttatgtgttggatcgagtggcctcataataattaagaagggggggttgaattaattattcctaaaactttaccaattaaaaattactcttttaaggcttttacttttgttgttaagagaatatggaatagaagagaaacttaacagaaagtaaaagcgaaaattaaatgcacagcggaaagtaaaagagtagggaagaaggaaacaaacacacaagaagttttatacttgttcgcaacaacccgtgcctacctccagtccccaagcgacctgcggtcc

SEQ ID NO: 127027 - DNA, 411 bp, Glycine max
  unsure (1)..(411): unsure at all n locations
gtccgccacgttgcgttataggattgaangttcttctccacttcaaaccttctcttaattgtctttgggcttggcgaccacgatcaacaaagtactttctgcacctactatatgttgacttgaccaacgttgttattggaatgctgcgacaatctttcaacaccttattcacacattctgataggttggttgtcatgtgaccatatcgtcgtccagatgtatcgtaagtcatgctccatttttcttttgaaatgcgatcaatccatcttgctatggctggactcaattgacgaaatttttctaagttttgatcaaacacatgcttgcaaggagtgtacgctgcatcaaatttgttatcaccaaaagttgtacgtagacatgaaactcaaattaaattaatgtataatataa

SEQ ID NO: 127028 - DNA, 413 bp, Glycine max
  unsure (1)..(413): unsure at all n locations
agatgacgcattgtaatcgattacaggtattggtaatcgattacatgcccaataagccttctggtaatcgattacaggatgttgtaatcgattacaggctgcctgttcatgtgtaatcgattacactggatggtaatcgattaccagagcctatcctaggctagtttctaagagaatatctatatttatgctcaaatacatcctatatgactaattntcactactaatacactaaattcaatcattcaattactatatacacaagaaatcataaattctatcataaaaacaggaatttcaacaagatcnaaccaaataatctacaatcaaaaaggtaaaagtanataacccttccatcaatcaatcaatcaccaatcaattcctattttctaaatctctacatctaagagact

SEQ ID NO: 127029 - DNA, 464 bp, Glycine max
  unsure (1)..(464): unsure at all n locations
tgcttctacacacccatcttggcactaaatttgtgttgcattncaaacaccttcacaggttgccaaagatctactaactatgaaagataatagggatgaggaagaaaaactagaaaaacaaaagaaaaagaaggatagtaaggccttgtcttcaaaggccaaggggaaggaaaaagaggaaaaggtttcctccaagaagattgttaagaaggaaaataattttgcaatagaaggtaatatcaaaagagcactccttcttaaacaatctttctaccttctcctatcaagggaaatatcccttagcactgccatacctcttgagcttgaggttattccttaagtaaaggaagtgttggatgatggtctgattcgtaagagcttaaatccttgtgctgtgttggtgcccaaaatatgtattatgaggcaccatatccctatgataggtggaatgatatatgtgttga

SEQ ID NO: 127030 - DNA, 418 bp, Glycine max
  unsure (1)..(418): unsure at all n locations
acacttagatactcagcttcacatctgaaatttgagcgtctcgaaatattacgggacttcttcanacatcacgattaaaagttaatacgagcttccgcgttaatttggagcatctctcgataaatgacgacactctgtcgggcactcgagtaaatggtattgtcgtttgaatgttctaagagattccgttttaattgtgcgctgcccaatttattacgggactccatcggacatccgtgtataaagctatggtcatctcgattcgctccgagcttctagtcgcaattttgagcgttctatatattacccgattcaatcggacatccgatggacaagtctttcgtcgtgtgaagttcctacaagattgcgtcttcaacttagatacgtctcgatatattaccggactcgctcggacata

SEQ ID NO: 127031 - DNA, 312 bp, Glycine max
caagccggagaagtaggtatagaacctcatgttacgcaacatataaaagcctgccattcgggttcgctggcttaccgaactggatggggtaaagctgggaagaaccaagatgatgcttcaaagatttcagtcggggggcgatctatcaacaatctcaggcttagttgcagctaggagtatggtgtcagatgatcgcaaagaaagatctggatcgtcacaaatggaggcatcaaaattgatgaacaggttcccaggatcattcaaggacatctctgaattattgataaaacaggatcaaaggcatcatgtacc

SEQ ID NO: 127032 - DNA, 463 bp, Glycine max
  unsure (1)..(463): unsure at all n locations
tcacctctccatcattgcctttatatgttgaaacttgtgtttgattgtccattcaattcattttaattagtcaaactattctctaaattgttttataaccttttgttacggtatgtcaaatagtcccacatcgcttatgatttgagaccgagaatattntataaacacccttctcccttaatgcattgaggcaccttttaatgaaaaaaaccatgacagagcaatcatgcatcaaatcaaacaatacctcagatgtgttatcttaacgaatctcatagacaatgttggaacacctttactattggttcttttcttatacaagaccaaatcttggaagagataactagagttgaatctaaaacaagtggtctctacactatctctagcctttntctctactatatgtgctacaatatagtttattaatcctgttaagcatttctagggtactcatctttctcat

SEQ ID NO: 127033 - DNA, 456 bp, Glycine max
  unsure (1)..(456): unsure at all n locations
tttctctacaattgcatcacctctcaatgagttggtgaagatgaatgtgacatttacctgtggcgaaaaacaagagcaatttgctttgctcaaagaaaagcttactaaggcacctattctagctcttcgtgacttttctaaaacttttgagctaaaatgtgatgcctctggagtggtagntagagctatgttagtcggtcaatacgactaacttttgtgtataaaacttgtgtaaattgtatcaaactcttccaatttatgggtattgtgtagcgttataagtattttctattaagtataggtaataaatacttagtacttctattttgtgtgtttaataatcattcgttcttaatttcagattaattacgcaagcttagaaaagtgttgtttttcaccttctcgctaaccaatctgctggctancgagcgtccgctatcacaacactcatgggct

SEQ ID NO: 127034 - DNA, 433 bp, Glycine max
  unsure (1)..(433): unsure at all n locations
tttctaagttctttaacaagcttagaacaatatactctgttcttcatttaactgtctttgggcttatgggccactatcaacaaagtactttcgacacctactgtatgttgatttgaccaacactgttatgggtatgttgtgacaatccttcaaaaccttattgatacattctgagaggttggttgtcatgtggccatatcgacgtgcttctctatcataagtcatcgtccattnttcctttgaaatgtgatcaattcatgttgctatggctagactcagttgacgaaatttttctaaattgtgataaaaaaatgtgcttgcaaggagtgtagcgtgcataaaattagttagcaacaacaatgttaagtatatatgaaacttaaattaacgtgaccatcataaatgaaatcttacccaatttcttcaacatttc

SEQ ID NO: 127035 - DNA, 383 bp, Glycine max
ctgatttagatgatgtccaagaagaatcttaccaggctggttcaaatgattagcatttgcttcaaaaataattcaagaatgcttcaaccaaccaagccttggttcaagattcactaaagaccaagccttgccttaaaacaaagtgctttcaagacatgcaaggctctggtaatcaattaccaggaagtgtaatcgattaccagaagacagggttgagaaatagctgttgaaaaaggttatgaatttgaattttcaacatgtaatcgattaccacatgtctgtaatcgattaccagcaacgaaactttggaaattcaaattcaaaagtcataacccttaaaattataactgtgtaatcgattacacaaacattgtaatcgatta

SEQ ID NO: 127036 - DNA, 450 bp, Glycine max
atcgatgtgggtctgaaaaaatgcaaattttgtcatcctacttggacgaatgagaaaactggggcaaatgaagagggtgagaaagagggagaaacccatgctgtgactgccattcctatacggccaagtttcccaccaacccaacaatgtcattactcatccaataacaaacctgctccttacccaccaaccagttatccatataggccatccctaaatcaaccacaaagtctgtctaccacacttccaatgacgaacaccacctttagcataaccaaaaacaccaaccaaaaatgaatgttgcactgagaaagcctgtagaattcaccccaattccagtgtcctatgctgacttgctcccatatctacttgataattcaatggtagccataaccctatccaatgttcatcaacctccatttctccgagaatacgactcgaacgcaacgt

SEQ ID NO: 127037 - DNA, 425 bp, Glycine max
agcacctaagggtcttttatctatatgctacattcatattccagatgtgaagaggcacaagcttgaagacaagaatatacgaggtatcttccttgggtatagcaatatctctaagggctaccgtatctataacttgcaaactaaaaaactcgtcatcaatcgagatgttgaagttgatgagtacacttcttggaattgggatgaagaaaaagtggagaaaaacgttcttatacccgctcaactacctcaagaagaagttgaggaagaagacccaggtgaaccaccttcacctccaccacaacaacaagatcaagaactatcatcaccagagtctactctaagaaaagtaagatctttggtggacttatatgaaacctgtaacttggtcatacttgaacctagaagctttgaagcagcgtcaaagc

SEQ ID NO: 127038 - DNA, 449 bp, Glycine max
  unsure (1)..(449): unsure at all n locations
agcctgagcctatccttgtaattaaatatgccagtttatgccatgctttatgtatgccaagtcatatgaccctgtatgccggcctatcctattcccacccttatccgacggattcgatgaggaagccatcgcccaattgttgtgcacaccggggcaggatttcgcccggaccgctacatggaggcgggtgcggatcatgcacactagcatgaccaccttgacctagacatggatgacattgctgctcatcaatgtcttgcctagtgatcacaactctgatctccctctgcctaagtgccagttggtgtatgccatcctgacacgaatgagcatcgacgtggcccgggtgattgctgacgccatttatttgtttgcaggtatagcgcctactatgcacccnttggacccatataagtccaatatggccctgtggtttccggcgctgatca

SEQ ID NO: 127039 - DNA, 329 bp, Glycine max
tgacagcaatccttttccaatacctcactgctgaagaacagttaccaatccactaaataagaaaagcaacaaaaatgccaagataggataatgagctagaaaagatcctttaaaatcttaattcaatacacccctctaactccccaagactgtttcatatccacatactctgatggaagaaatactattaaaactagaacaaattaatgaaaaatgtattagaaataaggacagaaactaggctataagataggataatgagctagcaaatatccaatataaactgcaaaggcatgtcaaaaacattaaaaaaaaataagaatgaaaaa

SEQ ID NO: 127040 - DNA, 446 bp, Glycine max
ttgccactggtaatcgattacaggattctggttatctgtttccatggtgtaaaaacactagtaacttaaaaaattttgagaaaaactctcttgaaaaacaaaactgtgctatgtttttttgtgtgaaaaatcttgtcaatacttcccttgtgaaatccttttgatttcttctcttgaatcttgaattcatcctctcttgaatcttgaaatcaaacttctcttgattcttgaatcctcttgatttcttctcatgaaaattgaaattaatattgatcttgaacttgctgactcaatcttgaaatcattctttgggctttttgcatcatctttgtcatcatcaaaactacttgaatcaacttgattcatcatcatgaagcttgcttctacagcatgcaccagagccgcagcatcaacatcagatgctcctctttctcctcaacctcctt

SEQ ID NO: 127041 - DNA, 447 bp, Glycine max
agcttccatcatgtaccttcttcttcagatgtactacactcctcgccttcagaggactacatggtcttcccatcagaggactacacgtccttcccttcagaggacttcacgtccttcccttcagagggctacacgcctttgccttcgtaggactacgtgtcctcacctttagagggctacacgccctcacctttagaggactacacatcctcacctttagaggattagacgtcctcgccatcagaggtctgcccgccctcacctttagaggactacacatcctcacctttagagggctacacgcgttcgccttcgtaggacttcacgtcctcaccttcagagggctacacacattcaccttcgtaggacttcacgtcctcaacgtcagaggactgcacatcctcgccttcagagggctgcacgccctcaccatcagaggactacaca

SEQ ID NO: 127042 - DNA, 348 bp, Glycine max
  unsure (1)..(348): unsure at all n locations
actcatcttaaatccttcatgctgtccctatacatataaaacattcccaccatacccagtgtactaaaccatgctcatatgtgtgtgatgcatttcaccgagcacttggtgggcgcatgtttaatcatgaatatcaagatagtgggggcaatgtgtgttgccccattgcttanacatgcaccctacgcctaatgccatcccctacaacccctcttctcttaccaatcatgcatgaagacaaaccaatattgtcccacaaatttgagcacattgccacaatttagagcgcctctagacgaccacaatactccaatggatagctagattgctcaaggatgagatacttgt

SEQ ID NO: 127043 - DNA, 392 bp, Glycine max
  unsure (1)..(392): unsure at all n locations
agcctgcttttcctaaatattatattcatcttgggaaaattttggacaaattacgattagntagtagggcactaactgaaattaaattgaatttaaatataggaatgtaagcaacactatgcaagactaaagtgttggttaagcaaattgaaccaatggcaagaatgggtataatgtcactattaagcaaagttacagttttatcataaacaagctgataagatctaaaattatgaagagagcaagtaatatgaatgcttgcaccagaatctaaaagtcaacaatcatgaagaanattggaagtggaagtagaaagaatcataccacttgaggaagaaacaccgtgaggaatacaacattggagcatgacttataaagatcataattggtat

SEQ ID NO: 127044 - DNA, 451 bp, Glycine max
  unsure (1)..(451): unsure at all n locations
ttgtgtcaagaatgtcagaagggtctcctttgctagacaatttgttcctaacccactgaaccaagtgtgcaccccctggtagagttgggtctaatgggtgccttcctgggagaacctcaagtatagccatgccaaaactgtacacatcactcttttcaattataggctatagtgatgcatgctctgtgcataaaccaaaagcaacaaaaattagtactattcaaattagtacaaaaaaaggataaaatgtgttttaagttttagtgaaatttggttttagttcctacaatttaaaatagtggtttaggtccttatattttttgaaatgtgatacatttgatccttcatcacatcaaaacaaaatatacggtcaaagacaaaattcaccacatttcataaatatgataaccaaccactggttctaataacatatggactaatnatcaatttt

SEQ ID NO: 127045 - DNA, 434 bp, Glycine max
  unsure (1)..(434): unsure at all n locations
agcttggtgtatatgatctatattctccatcttgccgggagtgttaagaagaaaactgttntgatatttgctgtacagcttttgtataagttgtcttgctgnttctaggatatagtatatttttgttgtgttatctatctctcatgtaaaaggttgctcaatctctttccatatatatatatatatatccagagccccataatcagcaacatcaagaggcactgaacatatggtgcaaggcaaggcaactgggagtctcagaaatggaggagcagcaagtaatcattgatcaacttatgaagatggaagaaagagatagactagaggcagagaagaggggtgtcagcacaaggtttaatgaatattttttcatataatgtaagggggctggggaggggtatcaagtgggcagcaataaggaggttaagaaattc

SEQ ID NO: 127046 - DNA, 475 bp, Glycine max
  unsure (1)..(475): unsure at all n locations
tcttgtcccttgcggcaaacataccttacgaagctcaagtcatggataatgacaagggtactgctacccatcttccctctgagttggtagctgaggaattgggccagcttatatgcccaacctcttcagttaataaagtgtatgtgagaagaaaagagatgatgaaaagtaaatctaaagcccatcatgtggaggacccttttgaggtttgcaattcagagcctcacgctgagtttatgtctcctttacaacacaagccatatttaattgcatgccctatggttgatgttctgacccatataccgaatgactctnttcacacgcaatgtgcccttctaaaggaaatgggattatcctgtgagaatcaagacagcaaggtagaggagttgttattatccatggagaacagagatgctttgatggcatgagagaagggaataaaataaacacaatcatgattatactctcttataat

SEQ ID NO: 127047 - DNA, 428 bp, Glycine max
  unsure (1)..(428): unsure at all n locations
agcttctatataagctgaaccattatatcattttcacaagtngagtngtaatcagaaagttagaggtgatctcttttatcttagagagagtgattctcctaaattcttgagtgattcaagaacaccctggctgtatcaaaggactttcacaacctttgggtgttgccctcgctggaaagagtgattctttgcttgcaatcatcttcacccttgttctttcaaaccacaatttcagaatatccacctctgcccagaattatctcgtggccataactcccattgtacgcactcaaattaagtgattcttgagcctaaattgaatttcaaaacgagaactttcacctcgctatggaatcacctcatttggagccctgtagctacagatattgacattgctatatttctggacagccaccacttaacctaca

SEQ ID NO: 127048 - DNA, 388 bp, Glycine max
acaatgtttgttagctggagttgctgcacaatatgtccaacgttatgtcaaataatatgatcgggctgctcaatgcacaaggcaagataaaatgtccaatgaataattgtagctgcacgattcacgatgtccgatacaatgttcatgacatcctgcctgaaaacactggaattgctaaaagcattgaagctgcaagatccacgatgtcggatgcaatgtccacgacatcctgcccgaatatactggagttgctaatagcattgaagttgctggatccacgatgtcagatacgatgtgcacgacatcttgcccgaaaatactggacatatgaatctgttatatctttaacagaatattgtgcagttaggaagagatcatatgatctatc

SEQ ID NO: 127049 - DNA, 460 bp, Glycine max
agcttttggtacaaagatctttattaagtttttagagacccaggctcgtaaaggattgtaacgaaatgatcggaaaagtattcaagattcttgaaatgcaaaacaaagccttgcttttataaactcttcatgtctcgtcaagacgacaatttagaagagttataacttttagaacaacttagaactaatttgaaaaagtcaaaaaccttttgaagagttacatcttttgatttattcagaaacaacattggtaatcgattacaaaattagtgtaatcgattacacaaagcttctgtgtgaaaggatgtgactcttcacatttgaatttgaatctcaacgttcaaaggtactggtaatcgattaccaaaacattgtaatcgattacaactgtttgaaaataattggaacggtctaaattcaattgaaaactttttaaaacaattttgtactggaatcgata

SEQ ID NO: 127050 - DNA, 405 bp, Glycine max
  unsure (1)..(405): unsure at all n locations
cttgatggtgcgcatcccaccatctnttcatagtagagtacttattatgtgtctaccatcacgattatcgtctccctttccattattgggggtaccacctgtgccgccagatccctccaccttttgggcatgttctttgaatgatccgtccccctttttgcacatgttctgtagttgcatcctatccggaaccatatcaaaattgtactgatactgcctaacaaaggcaaccattatgtccttccaagaatggactcgggaaggttccaagttagtgtaccatgtaacagctaccccagtaagactttcttggaaggaatgtatcagcaattcctcatcttttgcgtattcccccatcttctaacaatacatctttagatggttcttgagacaagtagtcccctt

SEQ ID NO: 127051 - DNA, 297 bp, Glycine max
  unsure (1)..(297): unsure at all n locations
tgagacatcacagaataaagaatcatcttntatgttaccagaagggaaaggtagtaagaagggtaaactatcccaaaaacataggagaaagagcggcnaatcaaacatagagcagacagaaatagaatttgtttactctaaaagtgaagccattcccaaatctgaggacctgttggatattgacatcatggggtttcctgattcaaaggttggtttactcaatgtgctattcatactatttaaaaatatttggtgaaatcatattttcaatgaaattattctcttatattttcttgg

SEQ ID NO: 127052 - DNA, 290 bp, Glycine max
acaaaactatttttgcatagtatgtttcaactctgatatgatgtttttcttatatagatcggctctgcgtgatattatatgatgttgtgtaacagtgttaacataagaagtgagcttctttcaccatattttaatacacaccacttttttataaattttgtttacttgaatattaaagaggtaatacatgataatttattaacgttaccctatacatttaactcaaaagaaaagcttgcacgccacttctaaaaccagtgaattggacggaattgcaattttaacatttt

SEQ ID NO: 127053 - DNA, 445 bp, Glycine max
agctttaattgcattacaaaaaggcctatttatttatttataaaaatagatgaggaaaatgaattagaaaatataagtgggtgttatttgattttgaatgaacatgatagcaatttagatataggtgaaagcaacaataaagaagtagttagtgacgaggataattataattctgattctccaactcatgataacgaggaggaaattcagagactagatgattctatttttgaaaatatatatgatccaagccaatgaatacaataatattaactagaccaatcgtttcagtttaaatgagtttttcaaaactaaaaataataaaaacttacttaagatcaacaatgtctcaacaaaattgaacggattgacattattgtctattaaaaaagaaatattaaatgaaattaattacgataatttaatcaataattttgtatgacaa

SEQ ID NO: 127054 - DNA, 464 bp, Glycine max
  unsure (1)..(464): unsure at all n locations
tgttcgcacatcgttcgtgtgtatgatatccactcgactttgtttgaagtagaggaaaccttcaatcctataacgcaacgtggcggacaaaagtgggcagttaacttgaatggtcattattgtcaatgcggaaagtattttgcgcttcactatccatgttcacacattattgcaccaatatatagatgttgtttacacaaatgagcacatcttataagcttactccgcacaatggtggcctcttgggaatgaagcggctattcctccttctaatgacgcatggacacttatccctgacccaactacaattcgtgcgaaaggttggccaaaatcaacaaggataaggaatgagatggattgngtcgaaccatctgagcaccgacaaaaatgaagtagatgtggagtagaagagcacaacaagcgtcgatgttcaatgcaatatgaccgtgggagtngttcattta

SEQ ID NO: 127055 - DNA, 434 bp, Glycine max
  unsure (1)..(434): unsure at all n locations
acttaatttgtcttatttatgctggagccaaaaggacagagaatacacacctgggaacatatttttcattctgttgtccacactgacatacaaaagttgattttcattgttcggctgtttattgtaatttttgcatccttcataggaccaaccactgctgccaacattaaacgtggcaaatgtccctacaatgacaatatctatttgttagtcatagaaattttttaatctatgaaaataacaaataatggtttgtttaaattgaaaacatgaatatggtaatagatcagtacacacctcatttaaatgattnatttcagatatagacatcaatcttgcattataaaggaacttgtccttgtttgaatactatgatctaacaatgcattatgagctcccaatgaactgagagctttgagaaaactggatcatat

SEQ ID NO: 127056 - DNA, 411 bp, Glycine max
caatgactgccaaagaacctcaagtgggcttgggcaaactggccaagcgattttatggacctttcaatggtttggaatgcatcgaccaagtgtcttaccacctgcaattaccagaaggggctcggattcattcaatcttccactgctccttgcttaaaccattcaaagggtcaccgaagcagtcagaaatcgtatctttaccataacatttcattaatggtcaacctttagtttctcctctagctatcctcgattatcgcaaggcaccaggaccatccaatacttcatatcaatcacaggaaaggggatagttgcaatcacaagttctgtaggctctagatgtattgctgatgtcataattgttctttgaaatgaccaaaacttattaagtgtcggccaactgattgaaca

SEQ ID NO: 127057 - DNA, 415 bp, Glycine max
  unsure (1)..(415): unsure at all n locations
tcggtctgagagggatcgaggtttattaatttatgctacttcatataacacaagagcatgattgataagagaaatatatttatatgcattagcttgtttgttagaaagacccaacatttctacctgctgttgtcacttttacgtaccttgcattttatagttgttagcataaaagtttaatttaaattctatttgaaattagcaatcatacatgttctctcaacaatacttcatttctgaacttaactcatgctaacattaattccctgtgctcgatactcggattcatccattntaatntttaaatacttgacgatccgatgcactttccagtaaacccccattgaaattctcttganacataattgagcaaaaagtaactgcaatggggagtcaacacttgccccttgctatc

SEQ ID NO: 127058 - DNA, 195 bp, Glycine max
gaaaaaaaaaaggaagaagcaaagaaaaaagaaagaggaggagagaggggaagaaaaaaaaaggagaaagaggaaaagagaaggaaaggagaggaaaaaaaaaagaagaaaaaaagaggaaaaaacagaaggagaaggagaagagaagaggaagaaagaagaaaaggggagaaggaaagaagaaaaaagagggaa

SEQ ID NO: 127059 - DNA, 355 bp, Glycine max
  unsure (1)..(355): unsure at all n locations
aacaacatacaaagccatcttggaggatggaacaacagtagttgtgaagaggtaagagaagtggcaatgggaaaaaaagaatttgaacagcaaatggagattgtccaaagacttgatcatcacccaaatgtgattccccttcgtgcttactactattccaaagatgaaaaactaatggtttatgactactcaacagccggcagtttttccaagntattgcatggtaattactcttactttgaactttttcctgattactaaaggttcataactgggcagggtcggatagccttcttttcttattatagagggnaaacacagattaaccacttactggtatcaatattactatcaa

SEQ ID NO: 127060 - DNA, 404 bp, Glycine max
ctcactatgtctcattgtccatacgcaaatcgccaattatcaacccattaacatatttaatatacacccttccattatcacatgagaatcatttggactataatatactcacattcttctattttaagtttgagcatatttaccatctgtactactatgttgggagaaaaagataaaagcccctttgtttaatgagttaacgtgagaatattatttataaaccaagagaattttcgctcccttcgtctccaagataatatcatttgatgttgaagaattgattggttatggacattatcttatatttatgggttgagcgtatgagaaagagatttttttatctgatattatgctgattgaaaaaacaaatagcgattgcattggaaaaaaaatagtgtttgcac

SEQ ID NO: 127061 - DNA, 460 bp, Glycine max
  unsure (1)..(460): unsure at all n locations
gatcctctaatcacctgngctgcagctttacaaaagtgggtttcatttaatgatatggtgaagcaacaattgaagatttctcacatagagatcttggcacaagtttatctcacttggaaggcttcaacttatcttcatgatactcctcgatgaccttttaaagctccaaagaagaccattgaaatggagcccactcagttgataaacttttggaaaaagtaaacaaagatgacagttgtcataatatgacagctagcaaggtcattatgaggtttccattctaagaaacctttcgaataagcattctgaagtaacatcagaatgataattctaatgttagctaagaaaggatccatacttgaagtaaatccttctgatgaagttcaattgttatgtctttctgaagtagcacatcgtcatcaatcttaacacatcttcacaacaaaaaggattctgaagt

SEQ ID NO: 127062 - DNA, 306 bp, Glycine max
  unsure (1)..(306): unsure at all n locations
tgatatatttgtcctggaactcttcgaatttaactgcaaaataatgggcatagatattataatgcgtcgacataattctaaataaatacagaacattgacacttaatctttggtgcaagggtccaaatcatagatttttgtatattgttctcctattatgagttggttgtccatgaaactggtttacgatatgttattcttgcgattccttgatgttaaactatggaanaaaggggtcacgaatattagttatgtggtggacataattttataaaataaatgcaaaacatatgcacttaagctttg

SEQ ID NO: 127063 - DNA, 324 bp, Glycine max
  unsure (1)..(324): unsure at all n locations
ctaaaaagctattctttgggacgtagaaaggaaatatcctaattcagtagagaacgtaactggtgcacaagacaaaggaggacaggaggggttcgggggaggagctctcggcacatagtcagtcggcatggtctttcatgacccataggctttgggcttccatggctgcttgaaagacacatattgggaagttggctatggtccgtcctgcattgtgcaaacgactgatggcttacattgccaaaaggcattgtgagacanaggataaggctgataatgatggtgcccactatctcacttttacctatgcatgtccgataatgc

SEQ ID NO: 127064 - DNA, 292 bp, Glycine max
  unsure (1)..(292): unsure at all n locations
cgagtatgacagccaccgctttatgagtgctgaacaccatcagcgcttcgaggccatcacgggttggtcatttctccgggagcgacgcgtccatctcatggacgatgaatatgccgattttcanggggagataattcgccagcagtatgcatcactggttacccccatggccaaattcgacccagacataatcctcgaattttatgccaatgcttggcctatggaggagggcgtgcgagatatgagatcctatgtgaggggtcagtggatcccgttcgatgcggatgctatc

SEQ ID NO: 127065 - DNA, 411 bp, Glycine max
cgcacatcgctcgtgtgtatgatatccactccataaggtttgaagtagaggagaccttcaaccctataacgcaacatggtggacaaaagtgggcaattaacttgaatggtcatcattgtcaatgcggaaggtattctgtgctttactatccatgttcacacattattgaagcttgtggttacgtgagcatgaactactaccaatatatagatgttgtttacacaaataagcacatcttaaaagcttactccgcacaatggtggcctcttgggaatgaagcggctattcctccttctgatgacgcatggacactaatcactgacccaactacaattcgtgtgaaaggtcggccaaaatcaacaaggataaggaatgagatggattggctcgaaccatctgagcaccgacaaa

SEQ ID NO: 127066 - DNA, 466 bp, Glycine max
  unsure (1)..(466): unsure at all n locations
ctggctagttaacttgcaattgtgagagtttgcatatcacaagactcttcaattntagagatcttggcttcaaacttgtcaggagccaaaaccatgattttttcaaagaccctatgatttgtgaatgatgcctcaccaacaagtcccatttgatttacaacatccattaatcttccaaaataatctttgacagatacattgcccatctgttaggaataaatttatatgctcacaatctaaatcatcatataatcaattctaatgttaataataaaagattattttattttcattgtcatatttcactatttgattaaatgggccatttgataatgtccttgattaaaattaaagactcgttattataatagagattatgataatgaaaaacanatgtgttctgaatttaatctaaaccggtctcgatcataggattattgtanatgggatatcaatgatccagata

SEQ ID NO: 127067 - DNA, 340 bp, Glycine max
  unsure (1)..(340): unsure at all n locations
tcggcaacttcggcctcggtctccgcaaggaggccgatgggggcaccgacgggggcggtctggccctcggcgacaacgatgacggcgaggatgccattgtagaacgtctcgacgtccatgtcggccttgtcggactcgacgacgacgacgctgtcacctttggagaggacgtcgccctcggacttgacccacgagacgatttttccctccgtcatggtggagctgagggcgggcatgaagatctccctgatcttcgacttcaccgtcagggaggacctccgtcgaggggaatgcgacggagacgccgcgaagtggaggcggcggccggngactgcggcgg

SEQ ID NO: 127068 - DNA, 466 bp, Glycine max
  unsure (1)..(466): unsure at all n locations
ntaactagtagttntacaagtntactttgacacattaagtcacacaagtgttatttgtaaaacctttgtgaaaactattttatcatacattggatgacaattttttttttcactaaaactatttttaactcattggacgtcacaatcaatctctgtattcttgcatattaacttgtgaaaatcactcctttgtgaaaaagtttatatcttcggttaatgtttgacaccggacgatccatcactagacaacccaaacgtgtcttacgattttgataaaaaaacaaagatataaatttgtgttaagcactntgctgcatgtaagttaataggtttgatgactagaagcaacactaagcaagacttatccattaatggataccttgtctactggaagcaggaagtactcgtccagtctatccaaacaatgagtggaataagcactgtttgtgaattattaatgtattct

SEQ ID NO: 127069 - DNA, 398 bp, Glycine max
gacacttaaatctaagctttggactttgacccctattacgaatgtatacactgttcttttactgcatataattgtggaatttggccaagcggtctatttacctaatactttatagatattatttgctatattaggtcggtattctatggatactttacattaataaagtcatatttgtatttacgtgcctgacctcatacctatacatgggaaagtaatgtcttggccatacttaaatattagtgtaagtatatgaaagacgtttgatacatacaaacatatagattagtatatgaaggcgtccaataccatcattgaaaataatggatgaaagagaagaatgatgataatctataaaggaagattcacaaatgtataataatataaaataagattaa

SEQ ID NO: 127070 - DNA, 397 bp, Glycine max
atgaccagttatcttcgtttgtctatatatagatatatactattctttgggtctttttataaataaaacaaatggttataataaaaaatatattacaactggattatttttccaataagctaacaaccgtaatagtgtttgaacgatcaaaattgagcgtaaagctcatacatgtagcagcttccttccttcaactatcattcatatccatactaccgaaaatttcttctaactcatgggcacaggtactgttaatttctgatctatcctggtgtcagttgttacttgtgaaaactatggttttaatttggacgtaaaaaaatttggagatctaataaaaacatttttctataaagcaggccaaagaaatcggaactaaatcaactaaaagatcctg

SEQ ID NO: 127071 - DNA, 406 bp, Glycine max
ggaaacaactcatggacagaatatacaagatgaaaatggttatcctgtatgttaactagagttccaactgttttttgttttttgatcagccaaaataagtatatatatattagcaaagtaccagaggtactagaattacaagctaagattctagtctagttcagcaccataacaatttggttgcagaccagaataagtttcatattataagactaatacaattattgaacctagattcaaatcctcatctgcggaagaatccttcagatagatttgatgaccactgattatagtgggttgtgaaatccttctcaaaatttttgagccaagtccataacagaaatactgcatcatccaccactgtatttgcgttgaaggcagaattggagaaaactatactatttct

SEQ ID NO: 127072 - DNA, 399 bp, Glycine max
cacctctcaatgagctggtgaagaagaatgtggcatttacctggggtgaaaaacaagagcaagcctttgctttgctcaaagaaaagcttactaaggcacctgttctagctcttcctgacttttctaaaacttttgagctaaaatgtgatgcctctggagtgggagttggagctgtattgttacaaggtgggcaccctattgcttattttagtgaaaaacttcatagtgccaccctcaactaccccacctatgataaagagctttatgccttaataagagccctccaaacttgggaacattaccttgtttccaagggaattgtcattcatagtgatcatcaatcacttaagtacattagagggcaaagcaagttaaacaagaggcatgcaaaatgggtag

SEQ ID NO: 127073 - DNA, 346 bp, Glycine max
  unsure (1)..(346): unsure at all n locations
tgcctcaaagaagtccaggaatgacaatgcggtcgaatgttctatttccgctctggagtacgacagtcaccgcttcatgagcgttgtacaccaccatcgcttcgaagccatcaagggatggtcgtttctccgggagcgacgcgtccatctcatggacgacgaatatactgatttccatgatgaaatatggcgccggcggtgggcaccactggttactcccatggccaagtttgatccagaaatagtccttgagttttacgccaatgcttggccaacagatgagggcgtgcgtgacatgagatcctgngttatgggtcagtggatcccgttcgatgccgatgctatc

SEQ ID NO: 127074 - DNA, 378 bp, Glycine max
  unsure (1)..(378): unsure at all n locations
aatcatattcatataacattggggcatttcatcgagcacttggtgggcgcacgtttatacataaattgcaagagaatgggaacaatgtggcatgccccattgcttcaaaatacaacctaggcctaaggccttttcattcaaatccttaattcaagaaaacaagcaccaaagcaaaccaaaactgccttacaaatataagcatgttctcacaattcaaggcagccaaaagatgaagaaagcacatcaatggaaagcaaaaacatcaaggatggaatacttactntgtggagtgaatgataacaccacaaatgaaagcaaaacgccacccaaagtggcttgatggggcaagaaccgcaagccttcgtgtatttctttctt

SEQ ID NO: 127075 - DNA, 378 bp, Glycine max
tggtggtgaagctccttcttccatggcttattccctagtgtatggagcctcctctcacctcttctcctttgtcttccgctgcatctccatggtggaaaatcaccattaaaggacctcattgaagctcaaagatccagcctccatagaagccccacaagcaagcttccatcaagtggttatcagagcacaatagcttcaagtatgtgctccttaaacctccattaattttttgctttaccttctcttccattgttgtttctttatttttctccatgtatctcctcacatgtcttgtgctaaatgtttttaacatgattctttatagtttccaccaattaaacttgctatataagcttgatttgattttctatggttcaa

SEQ ID NO: 127076 - DNA, 414 bp, Glycine max
tttctaaattggcattgcccttaactaagttgactcctaagaaccaaaaatttgtctggaatgaaaagtgtgagccaagtttccaaaaattaaagaggcggttgacaacagctccagtgttaattttacccgaccctaagagaccatttgaagtgtattgcgatgcaagtggacaaggcttggggtgtgtgttgatgcaagagggaagagtatgcttcacgtcaattacgtcctcatgaagttaactacccgacccatgacttggaactagcagcggtggtctttgctttaaagatttggaggcattatttgtacggtactcgttttgaagttttcagtgatcacaagagtctcaaatacttgttcgatcagaaggaactcaatatgagacaacgaagatggatggagttcctc

SEQ ID NO: 127077 - DNA, 463 bp, Glycine max
  unsure (1)..(463): unsure at all n locations
acttaattaacactgtaaatgttaattgtcaaatttatatgtattattatacgaataatggttgctttataataatttacgaaaatgtgtgtttgaaaaattacatgtaaggtgaaactaatgaatgtaaatatcttatgtcggctggttattgtaaattccttcgcaactatttttattctctcgattaataaaaaaataaactaatgaatataaagatattcttaaagattaaaaacgaatgtaaaagatacaaatattgaagttacaaataattacatggtgttacatttttttataataaaatgatcaagtaataaaactttattntatgtttaagaataaagctatcgtcataattttacgtttcaaatatctataatcataaagtagtacagtattaacacaattgttaaaaagaaatttaaatatcaagcaacgggtataaaggagagttaatgtg

SEQ ID NO: 127078 - DNA, 412 bp, Glycine max
  unsure (1)..(412): unsure at all n locations
agagagcggagttttatagagagaaagagagagatgagggagcctatgaattgaaggagatgaggaagagaagttgaactttgaagtgtgtctcacaagtttcacattcatcaaagttataacaagtgttacacatgtttctatttatagcctaacacatgggaagcttccttgggaagctagaggaagaaagtttccttgagaatgtagagggagggctactcacacccctccaatagctaagctcacccacatgccaaaatacatgaaaatacaataggaagcttccttgagaagctagaggggggctactcacacccctccaataactaagatcacccccaagcccaaaatacatganaatacaaaaaaagttcctactacaaagactactcanaatgccttgaaatac

SEQ ID NO: 127079 - DNA, 427 bp, Glycine max
tgcccttcttttgggtattttgcatatttcctttcgaaatgtcgaataaaccttacggattgcacgacaattggtgttaagtagctcaattcgactagcaagaatccaaacgtttgttaatgatcgtccccggacgaaattagggtatgacaaaggaaaatcattttgcaataaaaggtgatataaaaaaagcactccttcttaaacaatctttctaccttctcctaccaagggaaacatcccttatcactgccatacctcttgagcttgaggttattcctcaagtaaaggagttgttggataagtgtttggttcgtaagagcttaactccttgtgctttgttggcgccaaatataagtattatgaggcaccgtatccctatgataggtggtatgatgaatgtgttgagtggtacaactctctttta

SEQ ID NO: 127080 - DNA, 476 bp, Glycine max
  unsure (1)..(476): unsure at all n locations
tactcaagcttatatggatcataggcgtcttcattgtgggtgtgggactaccttggaggttgtttccacaaagacaccataaaaggatatttactaagcaatatgattaccatccatcactgcttatcatttttttatcttaattgcaattttgaacctttattatctgtattctacatcattttatgaattttgtcctctcatttttttgaatttaaacctctattattttaattatgtaatttatattcatccattaatttcacatttaataattaaccattggcttgacattctattgtactggcatattaacacattcatgttgataccacactacacaatactatcactctttggttaaatattatatatcaagttaataaattgatcaatattatcaattaaaataataaatatgaaatgtgtgggaaaaaaataaaagaggaatntagcttatttcattaagcanaagt

SEQ ID NO: 127081 - DNA, 231 bp, Glycine max
acatcaaattgccaccaggcccagagtgtgcaacaaaggaagattcccaactttggaagggagtgcttccgaaaatgaattcccaccaagatcaagatacctcaactgtgaaagatttccaagtgatatgggagttccccatccagataattaccacttagatcaagatattgtaaatgtgtaagaattccaagttgataaggaatttgtccttggagtaaataattgtta

SEQ ID NO: 127082 - DNA, 181 bp, Glycine max
tccatgttcacacattattgcaacttgtggttacttgagcttgaacatctaccaatatatacatgttgtttatacatacgagcgcatcttaaaatcttactccgcacaatggtgtgctcttgggaatgatcggctattccttctttgatgacacatggacacttttccctgaaccaactac

SEQ ID NO: 127083 - DNA, 449 bp, Glycine max
  unsure (1)..(449): unsure at all n locations
agcttgcactntttttattctgtgaaactatagactctcaatgtctttgctattagacgttcaactaatttccctctcattgaattggtctactttaaaataaagtgatatttataataaaaagggaattagtattttcatatagcatgcacgcaaatactagctactgcagttttctgatatctcatctacgctggaaatttccacttgtctgttgaaatactcttcccctgtgagtctgtcacttgtggagaattataataacttcgaggttgggaaataacatgctcatgttctggaagaataagaacaagaagtcaacaatcatgaaatgacaagatatcatacaataaggaagcaataagaacaatgatataaagaaatagaatatccctcaacagcagtaattaagaaaaattaatcttcttaataagcaggtataaatacta

SEQ ID NO: 127084 - DNA, 464 bp, Glycine max
  unsure (1)..(464): unsure at all n locations
attgtctttctttcttttgccaaaatgatgctcaaacaatacaagttataatggcaaatgaaccgattgaacgtacgttgagaagaagcttgctttcctcttccctttatcatatgaaaggacactccagtcccttacaataatgtgccttaagccacgtttctcatcaccatgtgttactacaaatctaagaaaaaaattattaagaaatatccatggatacatgtggatataaaaaaatttcaccaacaatttttaagtgggtatatggtggataacaagacaaattttctctaacaagacatatatagctattaattatgcttatgnttgtctttcctaaagttggggtcataacaataatgatgatgacaatgtaatgagatgacggtagtacgaataaagacaatattaatagtgatgtcggtggttatgaatatcgataatagtcagagcattatgat

SEQ ID NO: 127085 - DNA, 451 bp, Glycine max
  unsure (1)..(451): unsure at all n locations
agctngaagaaagagtcatatatgcatgttatatactgaattgcagtaggtatatattattgaactcatcacctcacgaacgaattctattaattattttagtacgggtaattctttggacataaaacataataacatgcatttgaaggatcaaatcactataaagtaaaataaaggaggtaaataaggagaaattgtttttctttgaaggacataatgagaaattgttaagaaaataatcaaatactactgcccagttagatactttgacttggtgcccaacagcaattagagtgcaacgacaatttctattttgacttagtgcgcatgtgcaacagcaattatatagctntcaacggtcaaggttctcactaccacattaactattgctgcccaagtggcacttatatatctacaatagtattacacaatataaaaggagtaacgatga

SEQ ID NO: 127086 - DNA, 401 bp, Glycine max
  unsure (1)..(401): unsure at all n locations
tttttatccttccgcacgggagtttcactatgtcccatgtcaaccctcttacatggcaaccaaaaaatatgaattaccgtaaggatggtcattcaaatcttttttcttattgaatccacctaatatcactttcgtacagtatccttcttatcacggtaatgcgaagtgatgaataaatattattattttaattttggtttgggaagtgtacttcatatatgcaacttaacttttatcataaaaaatagataaattggatttattaaatacacgttatggatttttttttaaaaaataataatagggttaaataattaattttttttttcatttttaanggccataaaattatattnntgcaattctaaattggatatataatatgtgataatatatatata

SEQ ID NO: 127087 - DNA, 352 bp, Glycine max
  unsure (1)..(352): unsure at all n locations
tctggctccatggctgctgtcgaaggagacgngttggatgatgaagggatgacatcggntctcgctctctttcttgatgccatctgcaagaacagaatgtgcactgtcgcaacctacccttatgcgggagggcgatgcggtgatcacgggtgcgttatcgaagacagaataatgcgcggagtcaccacctgcgtctatttgaagaaaacgtccgaaaaaccgcacaatgtgtggtctacgaactttaagagtgaaacgttctggaataggttctacacacagagaagggattatctccccacgcggtcatcacattggatgacaaccctgaatgcagtgtgcagacatgact

SEQ ID NO: 127088 - DNA, 363 bp, Glycine max
ggatgtctcgcacgatctgctgacaacctatgtacaatgttttctcacttgtttggcttcaacacaaagcgagcttgattaattgatgctagacaatgacaaaatcgtttctagttattaatgcaccgtgtgtgcttatgctaaatctcttaatatggataattacaaatatttgcttgatgagtttgaaaagtgtatgaatgatcactatgaataatgcatgattgtgcaaactgagctttccacgcttaaagatctttttagaaaaatgaataatagaaagagtgatctgcatcacttactcattgtgctgaatcatgctactgattagactgatttggggtataacaagctatctaacct

SEQ ID NO: 127089 - DNA, 438 bp, Glycine max
agcttgccacccagctcgcccatgctgcttttctcgcccaagcgagcagggttgcttcctccagaagcaacagccttctggaggaatcttctggagggcccaagtggggcctggttgctatttgcatccctatttttactaagtacacccccctgccttttttttggtgattcttttttcgtaaagttacggaaacttacgaatttcgtaacgatacttgttttctttccgtaatgttacggaaccttgtggattacataatcatccgctttttgacttacggaatgttacggaacctcactaattatgcaacgatggttccatttaatttccggtgtgtcacggaaccttacggattgtgcatcaatattttcttttgttttccggcacgtcccagaatttcacaaatttcctaatgatgggtgccaagcaccttac

SEQ ID NO: 127090 - DNA, 453 bp, Glycine max
  unsure (1)..(453): unsure at all n locations
ctggagttcggggtctttntgaagttcctcatctgacttgtagtagaatgagacatattcttccacccaagacttgatagcatcccatatctctagcccatcagaagcataaggatagtcctcgatcaaaagtcgaactccatggggagcagatggatccttaacagcaactcctctgaattaaaagcacccaaataacattgattagcacaagagttatatcaagcctgaaaccttttttcttcttatgtcattgatgactttttatatgatgcattcatgtgttcccccattgtatgcactttttgatttcttttctttttttttaatttactgtcaaatgcaaaactagagctgaatcggaacaagaaactatttccaacacataatggctagagctgaatccaaacanatagaaacaatcatggctagaaatgaaaaaaattaaaatag

SEQ ID NO: 127091 - DNA, 402 bp, Glycine max
  unsure (1)..(402): unsure at all n locations
ttatctctagcatgcattctttctttctttacccactcctcacgtttggtttttttatggaaaaacaccataactaaacgcgccacaaggcatccctatcgcaccaaatccaaatctaaaacgatgggtgatcaagaggagacacaggaacaaatgaaagccgacatgtcggctctaaaagaatagatggcttccatgatggaggccatgttaggaatgaggcagctcatggagaaaaacgtggccaccgctgccgctgtcagttcggctgccgaagtagacccaactctcttggctaccgcgcgccatcctcccttaaacatagtaggacggngaaggaacacgctggggcatgacgacaaccctcatctgggatacaaccgagcggcttacccttatgga

SEQ ID NO: 127092 - DNA, 374 bp, Glycine max
tcatggtgctcattgactccagattgctgcaaagaaagacttagatctgtatggtgatctgcagaagaacatagaccacagactctttccacaggtgcaaatttctgattcatggcaagctgagttactaagttgaccaaagcatcaaattttccctcaagctttttattttcagcagatgaagatgaatctgtggccaccacatggactcctctaatgacaataacatcatttcttgcactgaattgatgggagttggaagccatcttctcaatcaaattcctatcctcaacaggagtcatatcaccaagggctccaccactggcagcatcaatcatactcctctccatgttgctaagtccctcatagaaata

SEQ ID NO: 127093 - DNA, 375 bp, Glycine max
  unsure (1)..(375): unsure at all n locations
tatgaatggctcgncatgccatatgggctcactaatgcccctgctacattatagtctctcatgaatgatgtatctcaatgctatctaaggaatattgtactaggtctttttaatgacatacttatatatagtccaaactggtcagctcatttacaacatttggaaacagcgctgaaagtgttacaacaacataatttggctgccaaattatccaaatgtacatttgggctacaagagatcaattacttgggccacacagtatcatgcaagggagtaacaatggatcaagaaaagttcaagcagtcctgaattggccatatcctataaatctgaagcaattgagaggcttcctccgtctgactggatactacagca

SEQ ID NO: 127094 - DNA, 379 bp, Glycine max
  unsure (1)..(379): unsure at all n locations
tcttctgatgctgtctatttgattgataagataattatactactcttataatgtagtgtacaactaaaaaaattatataatagaaaatagtgcttaagccattcaagtcaagtcattttgaatctcatcattagtatcatacatctatatgtgtcagagaaaaggagaaacatgcatggttatgcatatcacaacaaaacattatatgataacatgttntctaaacccaaccaaggaaaaaagtttcatatgtatgaaaancatggcttctatggggaacaatgatttaattggtgagtagtctgagaatgtaagtgatggtttctgattgaaatatactcaaaacactatggctatgaaggatggttctatgctaaat

SEQ ID NO: 127095 - DNA, 262 bp, Glycine max
  unsure (1)..(262): unsure at all n locations
tgcaagctgctctaaattacattgatgnttgtatttatgggaggatgttcttgtcatttttggtttaagagtagtgtcccactggtaaaactaactttccaaatgtttgccttcgcaggaaatggccccgaggaagcttgccttcaagaggtccaagaaagaccaggcagccgaaggaactagttccgctccggagtatgatagtcaccgctttatgagtgctgtacaccaacagcgcttcgaggccatcaagggatggtcg

SEQ ID NO: 127096 - DNA, 486 bp, Glycine max
  unsure (1)..(486): unsure at all n locations
tactaagctgtgcatccataccctgatgaggatgtcccatatgttcttaaaactggactgattcatttgcttccaaagtttcatggccttgcatgtgaagacccgcacaaacatttgaaggaatttcatattgtctgctccaccatgaaacccccagatgtccaagaggatcacatatttctgaaggcttttcctcattcattatagggagtggcaaaggactggctgtattatcttgctccaaggtccatcacgagctgggatgaccttaagagagtattcttagaaaaaattttccctgcttccaggaccacagccatcaggaaagatatctcangtattagacaactcagtggagagagcctgtatgagtactgggagcgatttaaaaaactatgtgccagttgccctcaccatcagatttcggagcagcttcttcttcaatanttttatgaaaggactcagtaatatggagagaagtatgat

SEQ ID NO: 127097 - DNA, 283 bp, Glycine max
  unsure (1)..(283): unsure at all n locations
actatgttntcattaatanttatggcttaacgacacttacatgaacaaatgttaaaaacaaaaagtagatgattcacaagccgataccgatgatcctaacacttagcaaagtaaaaacaaaagaagacagccaaaaacattgatccttagcatttcggtctgttaccttcactatcntcccattcaccactttctttgaagggccgatagcttcaaagggcaacatcggttggccacaactttaacttgctccatcatggcattaaaatccggaacttcttcc

SEQ ID NO: 127098 - DNA, 444 bp, Glycine max
  unsure (1)..(444): unsure at all n locations
gcttggaatgcagaagaataagaagatgcgactctgctacttcttctacctctaccgtgttactgttagggcttactgagttgcaagattcacttcaaattatgcgtttcgctgatcggttcctcatcacatcaaacgacgtcgcagatcatcgcaattccttgattatttccttttgttgatacgcggaatcgcgcacacggtaccacttgaattttgtatggatttcggtttttagggtttgggagggggataactatagggtttgataatttatgaaaaaggggttttgagtgtgatcttggacccaatatgtcgttgagtcattntgattntttttggnggtgaagatctgtgaaatcaggaatgttgtttntgtgtgaatgactgtaatttgaggattgtgatgctagatttgtgtttacatgtgctggtgtggcactg

SEQ ID NO: 127099 - DNA, 399 bp, Glycine max
atgatgagactggtcgccgtctggctaactattgtaagcgttatagtgttccctttgagtacaatgccatagcatcaaagaactgggaaaccattcggattgaagccctaaaaattgagagcaacgagctagttgctgtcaactgtcaccagaggtttgagaatttactggatgactctattgaagtgaacagtcctagaaatgcagtcctgcatttgatcaggaagataaatccaaatatttttactcagtccatcactaatggatcatataatgccccgttctttgccccgcggtttagggaggctctctttcattattctgctatttatgatctgattgacactatcatacatcgtgaaaatgaaaggagattgatgattgagagagagcttttgg

SEQ ID NO: 127100 - DNA, 428 bp, Glycine max
  unsure (1)..(428): unsure at all n locations
atactaagctgtgtgcnaaagatctcttangtagcttaacatttgagattgggaatgtttagcataaagctagacatcaatttttacagaaatggtaaatgcttaatagatttttacacagaccaagaacatgtagagattattcaacactaaagggaatgaagattagggttagaatttttgaagtgccaacatgtgtgacaagaataccagagctgttaacaaatagaacaaattcttcactattgtactgaaactttgtgtgaaggttaactaattctgaagtcacatgattggagaagccatagaattgggttaccaagcaagatcaacaactgttgatggagtagccattaaaaggcttgcagattggttgaatcgaggcttgccagttgctgctgagaactatgttggttgctttgatcaac

SEQ ID NO: 127101 - DNA, 412 bp, Glycine max
  unsure (1)..(412): unsure at all n locations
tgaaagaacaacaattgaagtaaactcaaggctgtcacgagtcactcagagaggatgattactttgaaggtcaaaagaagactcaaagtgtcattggttgtgtactgcaatgaagaaatcaacatgctcactagatgaagagaaaaacttcaagtcatgagaaataatcagcaattaaaggacaagaaaaatgtttcagacatgaagatttgcacaatgaacatgacctggaaagcttgtaaaaagatcttcaacttttatgcacaagtcgtgacattgtatctggagttctagaaatgcaattgaagtgttcttattagctttagaaagatttagaaagatcttaaactttcatgcacanatcgtggtctaatacaacttggatcatggacanaattgagcttgaagttgc

SEQ ID NO: 127102 - DNA, 494 bp, Glycine max
  unsure (1)..(494): unsure at all n locations
tactaagctaacaagttntttaatagtttgagtttggcctttttatctaataaagctttgtaaaaagcttgaggcctttatagcatggttgttaaactcgtgatttaattcgtaaaatcgtacaattttacgattctactaagggttggcgagttaaatcggaagcaacatcgaaaccggagtagactcgtccgattttgcgtatacttggacgagttntggtagactcgcgagtctgctccaagtccacgggtctacgataacctgaaacggtgttgtacaacaacccccataaatgactctcgcgactctgtctactcactcactctgccttgttcaagctactcaccccagaatatgactttcgctaagctactcgcgttgtggtggttgtcatcatcgttgtcgtgctatactgttgagctactcgcgtcgtggtggttgtcgtcattggttgaaacttgaaagccctcactcgttgatagccctcattt

SEQ ID NO: 127103 - DNA, 308 bp, Glycine max
gctatgtgctcgcgactggtccctttcttcccttcgcaacttgagttcattattgctaccccatagagctccgcgaaatttgttccggccatactcttccttgcgagccctcttggtctcttgttcaagggctcttgcagtaattgcattctcttcccgtaacccggcacactccttccgaacgtgtgtaacagccaacttgaacttctccttggcgagttttgcctttcctaactcgctcttgagagcttggacttcttcgtcctcttccggtgcttcaaaattctctttgctgacgacttttaact

SEQ ID NO: 127104 - DNA, 436 bp, Glycine max
  unsure (1)..(436): unsure at all n locations
cattcgggcactcattttttatccttcatgctgcccctatacatataaaacagtcccacaacccaaagctcacaaaaccatgctcatatcttgttgaggcatttcaccgagcacttggtgggcacatgtttangcacgaatatcaagagaatggggacaatgtggcatgcgccatcacttcagaatacaccctatgccaaagccatcccttacaacccctcaattcaacaaaaacaagcaacaatttgaggataaatccctcacgtttcttagcaaacacatgcaatgtagagcaccaaaatacatcaatggaaagctagaaagcccaagaatgatgtacttacttgttggagacgaataatagagcaaaacggaatcaataacgcataatatggtgacctaatggctgcataatacgtgagtcccgtgagccttc

SEQ ID NO: 127105 - DNA, 354 bp, Glycine max
  unsure (1)..(354): unsure at all n locations
tgacacttcaaactaagcttttgccatagganatactgggctaatggtatattctgttaccttttctgagagttccattcttttgaccccttaaggaacccattataaaagctttctattatgctataagataccatatgatccactatgttatagtaattcacaaaaatattgaaatactcgatagttctagctagcaagacttaaaaaagatactaagttaataaacttttggaacagaaaaagaaacaacatatatcctatttcgtccaaagctagttgttgttccagctgcattattatcattgaagcaaaatcacatttccacacagtattctgcgtacgtgatgtgac

SEQ ID NO: 127106 - DNA, 439 bp, Glycine max
  unsure (1)..(439): unsure at all n locations
tctacctttctactaaacataaagtgcgttgtgtggatgttatttattattaaagaaatatttaaataaattatttggttgataaattaaattttaaattaagatattttttatttatcaatatattataagaaaatattcttaaattggagggtgaccactcaactaaagtcgattaacttgaagacaaaaagtagcgttatgtataaattntatacgagcaatataagaataaagtgaaattgacataatagagcagtcaaagaaatatatttaatgaaagaaaaagtcaaccataatggtaaagaacataaaaatgatgcgaataaaacacaaaanattattcatttaaatagactttttgtatntatttccttntgtcggtgacctattgttgannatttgtttctttggtgtgctcctttntaaactttgaagt

SEQ ID NO: 127107 - DNA, 321 bp, Glycine max
atgctcatatgtcggagaggcctttcaccgagcacttggtgggcgcatgtatatgctcgaatatcataagaatggtgacaatgtggcatgcgccattacttcacaatacgctctatgccaaggccatcccttactacccttcactccgacagaaactagcgacgatttgaggattaatccctcacgtttcttagcaaacacatgcgatctagagcaccaaaatacatcaatggaaagctataaagcccaagaatgatgtacttacttgctggagacgattaatagagcaaaacggaatgcaaaacgcaaaaaatggtgacc

SEQ ID NO: 127108 - DNA, 454 bp, Glycine max
tacgtgacactatgaaactaagctttataagcgacatcaagtgcatccatctacctatgagtcctttcacgacgtggaggatgagacatgtcctcattatgataactagtagatgaacgctcataatcacaatattgacaatcaccgacaacagaatactcagaatgctgacaatgcacgaaatgcacttaatgatctggatgcacactatgcctaacttactgatgatacgttctatctatttcatgatcatatgcttgaatagtacccggattggccctactcatgcactatatgcagaacataatgtgttcttaaacaagcaccatggcgtggttaaaactacaactatcttcaaatgatatccatttgagctgatatcttgtgatcaacaccctaatattatgaacagatagcacaaataatttcggactttgattcaatgtcttactat

SEQ ID NO: 127109 - DNA, 368 bp, Glycine max
ctcagcttattataggcttcttctatgccaattttacgctttgtccactccataatgacctctagagccctcggtcatatatggacatggttttgcggagatgcacaccacattatgagaagatgcagccgttatcagacactgggcatcttttctaccaacgcaactccaatgtacatcatcgagaagcgtcattgagaggctcaacactggcttatttgaaaatattgctcatcatgcatcttcgagaagatagatccgtatctatgcacgccaatctattaacgcaagaaactttcttaacaatgattacggttgattattacgcaacaagggatgagaatcgaacgtgcatactcacgatatac

SEQ ID NO: 127110 - DNA, 408 bp, Glycine max
  unsure (1)..(408): unsure at all n locations
agctntaactgtatttgcaatgttctcatgttttttaaatggggtcatcgactacaatatattggtaattgactaccagtgtatctgaacggtgaaattcaaattcaaatgagaanagtcacatcttttcataaaatgcatcgtgtaattgattacatgattatggtaatcgactaccagtgacaagttntgaataaaaggtcaagagatgtgacttatgacatgattttctcaagggtataactcttccaatggttctcttgaccagatatgaagagtctataaaatcaagaccttgacttacattcaaacaaccgtttgataatcttattgaacaattttttgagaaacctttactacctgtacaattctttcctactcatatatcttcttcttcttcctttgtca

SEQ ID NO: 127111 - DNA, 440 bp, Glycine max
  unsure (1)..(440): unsure at all n locations
ntactatgttatcagctgtgctatgcttggttaacctaattgctctattctggtggagtgacaaaagcttcacagagttgtgtttggtattgaaaaatatgtttcctgaacataacatcttaccgaagagtcactacgaggcgaataagatattatgtcccgtatgcttggagtaccaaagaatccatgcatgtccgattgattgacttctctacagaaatgagtttctggatatgcgattctgccccacttgcggactgtcacggtacaaggccaacgatggtgaatgtactgaatgttcaaccaccgatagtagtcgtccagcagaggtttgttggtatttgccaataatacctatgttgaaacgggtgttcgcgagtgtacaagattctaaatacctaatgtggcatatagatgaaagaagaacggatggtatgatc

SEQ ID NO: 127112 - DNA, 484 bp, Glycine max
ctgttcttggtaaataccatatttagatcagatacaacatgtttattctattataggagattaatatgtaggattgtgaatacccaattgtattcaagtgtatttttatcttttaaataaaaagtatttaaaatatttttgaaaaaaaattaaagaagatgtggactttataagaagacttggtcaacagaagatatttcagtcacactggagcaacattaattcatatgaggaaaagaagtggttactaaaagatacatgaagccgcaagcctacaaacaaggagatcatggtatactggaattagttagtcatttggagaccaattaagttgttcttggattgtaaaagagacccactagcactcaaaataggaaggataaaaaagggggagagagaaagagttattcctcttcagtgatagtgttagctttcggaaatcacgatctcatattattattatcgctcagtactcaccacatgg

SEQ ID NO: 127113 - DNA, 425 bp, Glycine max
  unsure (1)..(425): unsure at all n locations
ctgcacttcttctatcaggcacanaattttaatttttccccataataaacaaggcttccttattattaacttactcgttttcaaaaatttttttatatgaattttaactaataaaaaatatgtttagtacaagtgttagaaaaatgcacttcctatgttgtcttgtcatataacatncttacatacagtcactacataaaagtaatctcaaatattattatgaaaaaatattgtcgttaagagtaatggtttgcacacggtacttatgaaggaaggagtaataactcacatgaaatggaaccaaaaatacacacgtatttgtgggaaaccaactcattctaattataactggtatcttaattaattttagttcattcacttcaccatacttcttcaatgactttacaccacttctctttaattga

SEQ ID NO: 127114 - DNA, 459 bp, Glycine max
ctgttgcaactggacccattctcacactgattcaaaaaggttcataaaaacgctctgagatcttggaatgggccgttcccgatattgtggtctgccgatactgccgtatcttgaccagaacccattcacccacctggaactcgtggtccctacggtgtccgtcagcaatttccttcatacgagcctatgcgttctgaagcttttgtcggagtaaagcaaatatggcttccctctgactgagcaaatcatctactgccgccaccgttgatgtgcccgtcatgtattgcggaaagctcgacgatttgcatccaaaggttactttgaatggcatcaaccccatggctgagtgagtggacgtatcgtatgaccactcatcccataatatgaaacgtccccacgtactttggcggcggtgtacgaatgcccttaagtattgctcaatgatcctattggcaactt

SEQ ID NO: 127115 - DNA, 389 bp, Glycine max
ggaaccacattcgagcggtatctattcgaccaaatactgcttacaaagttctgatggaagaaataaggggggatccagtggatgggagctttgtgtttttgtggaagcttaagataccacctaaggcaaagatttttacctggagactcatcaaagaccgcttaccagctatgttcaaaatatatttgtactcacagtgcctctggtactatttcatctatctaatacatatctatttttgctgagcaaaaaaaaaagataaaaatacaaaaacattcaacactaacaattaacaagttttgagagccaaaatcacagtcaatacttaaaagatatcagtccagtaaaaaaaaggtcatgtagagaggcatcaagatatcagtcccatg

SEQ ID NO: 127116 - DNA, 378 bp, Glycine max
  unsure (1)..(378): unsure at all n locations
cttggacaagtgatgaccgagctttttctgcctacttgtctggggaggacatactttnggctgtgcaagtgagatctgatgagcatggtgagaaaagccattgcatttgaaaactttccctctttctgaccgctggagagtgcatttatgatagacatttcattttgtacattgatgcatgcgtgtgcatcacacgcgcaatacttttgcgtacatgtcactcggggaggacgcacgcactggagacctgatgcatgggtaagaggggctgagtcgtggtgcagaaaattatggtaccactctatctccttacagctaccaaagaacatggctgctctttatatggagcatacgcttgatctgtgaccgacatcactt

SEQ ID NO: 127117 - DNA, 361 bp, Glycine max
tatgtgtaatcgattacacagtgcaaattttgaattcaaattttaatagatgttgtaaatcatttttggccactggtaatcgattatatcctctggtaatcgattaccagaaagtaaatctcttgaaaaagactttttaacttaaatttcttggccaaaccttttgctacttcaattaggaattcccttcctatttaatatacccttcctaagaatctagagactgtcttgatcatccatcttgaatatctttaatttctttgtcttgaataaagctttgagaagcatgtgatcctttggcatcatcaaaacattcagcttgatcctttgtctacacaaatgaataaatatttacctcatg

SEQ ID NO: 127118 - DNA, 477 bp, Glycine max
ccgggatcgctaagcgacaacttatccttggctaatcgagacctattgtctccaagctaaattccttacagccataactgaggttcgtaaagctaagcgccagtcatggcagctaagctaaattcattgccgcaatgtgagcgctaagtgagtccttatcatctacgcgcatgctcctctgtacttaagatgcatcattttagctaatctggctagagcctggcttatcgagagttactgcttttcagatctgcaaacctcgctaagcggtcttatcctcgcgctaagccaagcttgtgtaaaaaaaaaaaaacttaaaacttattttgaatttgaaatgtcggctaagcatgcggatccgctaagcgagcctcattgagaaaccaaatgtctctctggcttgcttatcgcagcggtccgctaagcaaaagtatcgaaaaaatgcttaagtgagtgtaacagcagttacattcacac

SEQ ID NO: 127119 - DNA, 248 bp, Glycine max
  unsure (1)..(248): unsure at all n locations
attttaattttggttctatattttttttgcggttttgctttatatatttgaagtggaaggacgaagtagtggtatgttctatatttatatttgaaaaaatattgtagactaaaaattatcataaattaattatttaaagattaaaacataaagagtgttaataataaattaatgacagaactaaaatggttcactcctaaacatanaacactaaaatacgacttttataaaaaatcaccatgaaaaac

SEQ ID NO: 127120 - DNA, 485 bp, Glycine max
  unsure (1)..(485): unsure at all n locations
gacactataaaactaagcttaattggagtcttgccttgacagacttagttggacatctgttgagtatgtaaacagcagtgtagactgcttcagcccaaaatgtgttaagtagtcccttctccttgagcatcgatcttgccatctccataactatgcgattctttctctcggacactccattttgttgaggagaatatgcgacttgtagttgtctcggacactccattnttgtgatgacagtccaccctttgccgcgatcacttcttagtacttgtatccgttttccactttgattntcagcaaaggccttgaactttttgaatactccaaagacttctgatgtttcttttagaaaatatacccatgtcattctagagaagtcatcaatgaagagtatgaagtacatgtngttcccatgtgatggcagtctcattggtctacaaacgtctgtatgtatcaactccaatagatctttctctcttcat

SEQ ID NO: 127121 - DNA, 433 bp, Glycine max
  unsure (1)..(433): unsure at all n locations
agcccctatcttggacaagtgttgtccagcttctttctggtaagntgtccagggaggacacacttcttgttttgcaggaaaagtcaaacatgtcaagcaagggaagtccttgtgattgacaattctatcttttttttaccattggaaaacgcattgaagacaagcatttcatttgtcttttactacgggcaagtgcagtgcacgcatgttactctagcatatgtgtcacttgaggagtggacacgtattggagatgtggtgcatgggatagtagggctacctcgtggtgcgaactttcattgcatcatttcaactaccgctaattactgaagagtcatgccttcacttaaatgaagtatccatttgattttttattaccaccactttgaaattatgctctttctnctgaaaatttcgtgccttctactcacat

SEQ ID NO: 127122 - DNA, 428 bp, Glycine max
tcattccaatccacttaaatcatacaattgctcgttcaaatcattcttaaacactcatttcataccaaacaatccactgcatatcattttcaatcaattcaatggtcaaacaagcttttggtacaagcaaacaactcaaaatgttgaaatttaaataactgaaatttaaaagaactgaaatataaaaactgaaattaaaatgactgaacataaatcataaaataactgaaaataaactaaaatgttcaagatgcacaaatttaaatgtcttgctcctgtggttgctcctgtgcatgctcatcaatgtccaacacctgagcagctggtgaatcctgagagatatgatgctctaactcagatgctggtgcagatggtatggcatcatcaggaatatgtgtaggagatggctcatgtatctgatctgtgga

SEQ ID NO: 127123 - DNA, 441 bp, Glycine max
  unsure (1)..(441): unsure at all n locations
caagctatgagatattctgataaccttaaacttgatcttaaagnttntataatggtatagtgatgcatatttataataatgtgggtggtctataatcttattatctagaatattatattgatgatgagataattatgttaattgatgaatgtcttgaattgtgttggttgatttcttgatgatgatatgagatgtggttgagatcatattttatgattagattttactttatatgagatcatgcgattcacattcacaagtttttggtgagttgttagcaaaatttcaagatgttggaatgtctggctatgcttattgaactataggtgagttcatgagcatggtgaacatatgaatggtgaatctatgatattataacctcttatgttattgagaatggtgaatgaacctgtgatgatacatgatattggtttgaatgat

SEQ ID NO: 127124 - DNA, 471 bp, Glycine max
tatccaaagtgactattacttaatccctatttttaattaattgtcttatcctctcttaacttatatatcttttcaattttaatcctaggtttttttaacttcctaaactttatatattctaaatctatatattgttcaattatcatttaaaatactcttttttaatcacatatttatatttatatttttgtaacattgttattccttttcttttaaatttagaagactttcatgattatcaagtttaaagtttatccaaggtgatcatcattaacctttcacgactgtaataataattatttcgaaagtgcatctaattaaagtagttactatgtaacctttattgtataaaatatttaagaaaacattctttcaaagtattccatttaactggaagagttaaatgtattaagcatcacaaattccaaatgtgtgtattcttcaatatggtttttggccttacaatttagt

SEQ ID NO: 127125 - DNA, 424 bp, Glycine max
  unsure (1)..(424): unsure at all n locations
agcttgtgcctatccattttctgnntccaattattcttctttngatggnaccatgtacctcacacaacatttgaagaagtttcgtgctcatttgataatgaatggtggtaatgatgctctctaatgtatgttttctgtaggaaccttatcaggtgttgcattggattggtttaatggtttggttgatggacccattgctcgttttgatgagattttgagtttgttcactgtcagtttgtagctaacaaagagaaaccaccaacaataaccaatctatttgacatccatcaacaggtaaccaagtcactaaagaacttcttagcttcatttaactcaattgcagtacagattttatacccaaatgagagaatggttgtggcatctttctacaagggtttacatgtatgaccgtttgatgagtctt

SEQ ID NO: 127126 - DNA, 452 bp, Glycine max
tcaagatatatatggcctcagcaaactccttatttccagtatggaattctatcaatagacctccaatctttaatggagagggttaccattaccggaaaacccgaatgcaaatttttattgaggcaatagatctaaatatttgggaagccatagaaatagggccttatatacccaccacagtggaaagagtttcaatagatggtagttcatcaagtgaaagcataactatagaaaaacctagagatagatggtctgaagaggatagaaaacgagtacaatacaacttaaaagccaaatatataataacatctgccctgggaatggatgaatatttcagggtttcaaattgtaagagtgctaaggaaatgtgggacactattcgattaacacatgaaggaactacagatgttaaaagatctatgataaatgcactaactcatgagtatgaatta

SEQ ID NO: 127127 - DNA, 453 bp, Glycine max
  unsure (1)..(453): unsure at all n locations
agcttcaacctctgaccattttctacctttctctatctagagnctctgactgaggatcaaacaattctactgctctatacggcttgacttccttgactgtaaatggttcagaccatttagatttgagcttgcctgggaacaacttcaatcttgagtttaacaacaacacctgttgtccaagctaaagtccttctcgagcagcttcttatcatagtaagccttcactttgtccttgtacaaccttgaagactcatatgcattcaatcttatttcttccaactccaagagttgtatcttcctctttcccttgatgcagcctcatcaaaattcagaaattttaaggcccagtatgccttatgttccatttccaccggtaagtgacaggatttctcataaaccatttggaatggagataggcctatagcgatcttgaaagtagttctgtatgcccat

SEQ ID NO: 127128 - DNA, 432 bp, Glycine max
  unsure (1)..(432): unsure at all n locations
tagaatgacacacaaggaatgttccattgctctattgactctcattgcngnnctctnnggcaacatgaacatccaatgtgccactgctgactatggtagttggcagagtgctcatgccactttttatggcgggggtgatgcttctggcacaatgggtgagtttaacctctcattttttttctacttctatgttttgagataatattttttagacaccaaataatgctaatattttcttaacactgtaatgtttttattttatttcttttcttgtcacatataacatctttatttttgtctctagtattttttttaagagtttactagtatagagtgttcatgcattatttttcatgttgtgataacaaatgctaaagaaaatggaatgaaatgagatgaaaggaaaacaagtggagggaatggagttctaat

SEQ ID NO: 127129 - DNA, 305 bp, Glycine max
acaacaaatgtcagtgtggatgatggccgaaggggggttattggacaaataatcaaattgttgaaaacttagaattcaccttaaactcacatcccacaccaatttattcaaggaacggggggcctgcttgtccggcctcaaacattaccgttctatcaaccagcccatgggaccatagtatgggtgtctgtggatatttatttacatataatacaataggtcaataaaaatagaacagatgacaactccataccgcaaaattcagttgagtaaaaaattataaggacaggctatacaaatgtatt

SEQ ID NO: 127130 - DNA, 445 bp, Glycine max
  unsure (1)..(445): unsure at all n locations
tccaccatggccatggaagttgcctctaatatggaacctgtttcaactggcaggggcaggcacactttcacaccacacccttcaaaatctatcacgcaaatatgggcctctgatgcaccttcaacttggtgaaatttctgcagtggttgtgtcatcctctgacatggccaaggagataatgaagactcatgatcttaattntgtgcagaggccagaactcctttgtcctataatcatggcctatgattcaacggatattgcctttgctccatacggtgattactggagacagatgatgaaaatatgtacgctagagcttctcagtgccaagagggttcagtctttctccttcattcgcgaagaagaagtggctaagctcatacaatccattcaattatgtgcatgtgcaggttcaccagtcaatggttctaaaagtggtttcttt

SEQ ID NO: 127131 - DNA, 334 bp, Glycine max
  unsure (1)..(334): unsure at all n locations
ttatgactggaatngtagtcagtttgccagattgattgtgaaggaatgcattgaccgtatcccggtgagagtgtgatccttaaattttgagagaaatgactatcatttaatactgatttttgcatgaatctttgaagtatggactgaatgcatgaaattgaggatgatgaaggccatgtttgattgggatagccacttagccacgtgtttgaatgatttatcctttgcacctaatttgagctgaatgaattattgattgattgaaccctgagtctatagagtgttatctcttgctaccttgacttaggttgtaggagagcatcatccacagaaa

SEQ ID NO: 127132 - DNA, 461 bp, Glycine max
  unsure (1)..(461): unsure at all n locations
tccatcaaagtgtatgaattttataatccaatcctacagtttcttgaattaattaaattcgttattattgtttctgtaattttatgtatttttgacacactaaattcgattatatttgttatttcattcctttagttattttcgtcaattaaacaaacccatgatatttcgattaaacttgtacttaactaggggttggaataggccaggccaggccagactttgaaaggcctgagcctatcctatgatgaatctttgatgcctgagcctggcctatagcctatcaaaggattntattttggctcggcttgacacttttaaaagcctggcctatcctgatggcacttttaaaagccttcttcacaataaatatgtaatatttcatggagtaggaacgtaatacgaaagttaaagaaaaaggaaagttaatcanaataatgatgaatataacaggacacatg

SEQ ID NO: 127133 - DNA, 414 bp, Glycine max
tcctgcacacattatggtggatattttttttaatcggcgcataaacaagtatattaatattatgagttctcagaggtgtcatggagataaacaaccagttgctgctaccagaaggtataatatcaagctttggaattaaatagcacttaactcgagaacctaacaaaaaagaaagtgacatatcaagccaacatgatcacttaccacgaaatggatgaggagtagcaacctgttcatagtctttgctaatttctccgcgctcactttgtcaaatggatgctcaagcacatcaccgtctcaaggcagtgttttaatcttataacgaaaacaaactcgacaccaacatggcgacataaagagtgtatatcctaactgtctcgcatgtgcatgtattcaggttcaaccttatgccac

SEQ ID NO: 127134 - DNA, 452 bp, Glycine max
  unsure (1)..(452): unsure at all n locations
gacaacttatttctatgtatgtgattggactctctgccaccgaaaataacttccaccacactcacgtgaacaacatcatcagcatagggcacgttgtggatggtgccaaaactgtcgcactgtttgcccactgccactaatttattggagttctcggcagttacatgcagcctgacgttgtcaccattcaactgagagggttttttagctaatgcatttgtctctgctgttgcacagcttcccttcgtgcttacccttgctgctaatacttgtatatcatttggttgaagtggggctgaatgttgtgatgcaatttgtgacaactccaactngatagcttcttgtatttgtcctttaaatgtgtccatagtgcgctatttttcctcttctatcctnctcatccacacctcctctcttttaatgttttcttggtcagcctgtctttgccattc

SEQ ID NO: 127135 - DNA, 428 bp, Glycine max
  unsure (1)..(428): unsure at all n locations
aatttatacaagaaagacttcacatcatttattaaatgcatattactaccaaatatcaatatgtcatccatatacaaacataaaatgacacatccactatcatcaaattatttaacatacacacatttatcactattattaatttgaaaatcatacgaaagaataatttgatcaaatttttcgtgtcattgctttggagcttatttcaaaccatataaagatttaacaatcaagaatttataagtagtactatgcaaagaatatccaacaaaaacataatcaacaatgtttcgttcaattgtgcttttcatattaatagaatgctaacctgtgctagacaccgccacactntaagatatttcagatttggttctctttgtttccatagctcataagggaattttttcaaaaaatttgtagggggcata

SEQ ID NO: 127136 - DNA, 215 bp, Glycine max
  unsure (1)..(215): unsure at all n locations
ttttggagccttggaatttgtttgggaataagtgtggggggtttttgttcattggacaactttgtttgttggctatgcttcatgatgtattttgggccatacttgatgtacattgtatattggntaaatgttggacatgctgaatgaaatgttgtttctcaaaggctaaagagttaaaaaaaaaaataaaaaaatctaaaaaaaaaaaattcgaa

SEQ ID NO: 127137 - DNA, 445 bp, Glycine max
  unsure (1)..(445): unsure at all n locations
agatgaanatgaatctgtggccacatctatgactcctctttgacaatagcatcatttcttgcactgaattgtggggagttggaagccatcttctcaatcatattcctagcctctacaagagtcatatcactaagagctccaccactggcagcatcaatcatactcctctccatgttgctaagtccctcatagaaatattgcggaaggagttgctccgaaatctggtagtgaggacagctttcacacaatttcttgaatctttcccagtactcatacaagatctctccactaagtttcctgatgcctgaaatgtcttttctgatggcagtggtcctagatgcatggaagaatntatccaagaacaccttcttaatgtcatcccatctggtgatggacttgggtcaaggtggttcagacaatccttcgccactccgtcttgagaatg

SEQ ID NO: 127138 - DNA, 337 bp, Glycine max
  unsure (1)..(337): unsure at all n locations
agcttctgtatctagtcacagtagaccctttttcatttngatgaagntgtggcaaagtttcaaagactggcatttgatcaacactctttttctaatccagattacaagcctcaacttcaacagtcaataaatgaggtctttaagtttaatgacatagtggttgatgagatttgaaaggagacaagaattttcctcaatatcttcaataatgcctttgaagctcatcaattacatagtcaacataccactaatagtcttctacaagatcctttggcggtacttatgccaattcaagaagaacttcattccactcgcctcaagcttgaagaacttcgat

SEQ ID NO: 127139 - DNA, 317 bp, Glycine max
  unsure (1)..(317): unsure at all n locations
ttcggcctttatactaacttgctaacaaggcttaaactcttgctttgtttcnatccagaggtatcgattccaaaacaggtggaatacgtgaaaatattgattgatttacatgtatcattccatatgttggacgatccacacgacttggaatcaattaaagtatacctcaatataatggtatcataccaactgtatcattccagggaaatttaaaattgcacagcacttttattgtttaatgctcaagcttaatggatgggacaattaaaacttgtggaaatgtttcttcacaatgaaaatcaaactatgcatgttta

SEQ ID NO: 127140 - DNA, 420 bp, Glycine max
  unsure (1)..(420): unsure at all n locations
tatgactcaatctcatgggcttttttggattatatgctgcaaagaatgggtttttgtcccaaatggagacactggatttctgcctgtcttaattcaacaagcatttctaaaagatgtccaagtttaattctctgatttgacgctagtcaacaaattgtttctgacaagtcatcaagctaacaagcttgtaaggattctaccgaaatcattgtgattgaaaggaaaagataatagaaagtaaatatgatgctaggacaacaaatggttgtcattttgagatgattaatacactggcttagtacttcaatttattctttagaaccaataaggagactgagtattntatagtaaatatacagaggacttctatattgtggaaacatgaatggtgaaacaccgtggcatatcatggtcatgata

SEQ ID NO: 127141 - DNA, 210 bp, Glycine max
ccacaggccacagctcaagtccatgccaaacacccacacacacacatacacacacacacacacctacaataataaagcataagcacccccgaaccccacaattccaaattagttacataaacaactttcgatgtcgatatttgtctgtaattgaaatttacattttgtatgttggtgtataaaggatcatgggttctccacctgcctcgc

SEQ ID NO: 127142 - DNA, 441 bp, Glycine max
  unsure (1)..(441): unsure at all n locations
ccttccgccattggcatttaatatttcatgaggtcatttattcatttagctttgaagagaatgtcatggatcactgtatataccaaaaagtcagtgggagtaagatttgtttccttgtattatacgtagatgatattctgcttgcgacttatgataagggtatgctatataatgtgaaacaatttctctcaaagaactttgatatgaaggatatgggagaggcatcttatgtcatangcataaagatccatatagaaagatcttgatgcatcttatgcttgtctcaagaaacctatattaacaaagttttagagagatttaatatgaaagattgttcaccaagtgtagctcccattgcgaatggtgacaaacttgcttcgagtcaatgccccattaatgattttgagcgggtacacatcataaatattccatatgcttcag

SEQ ID NO: 127143 - DNA, 481 bp, Glycine max
  unsure (1)..(481): unsure at all n locations
cgggatccttaagtcacctgcggcatgaagcttgccagtgagcaagttgaatatatttacttcctaatatgcacaactcctcatatgcagcccacattagaggatccattgagagtgcctgcttaaaattatgtatggcacttttccttctgtcagtgtatctgaaaaagagaataacagccaaagaaatttagaaaggtggatttatcaaatgtggcaagctagcatgacatacacacatacatacatacatatgtgtacacacacacatacacaaatatatggaattgactccagttacagcatccaatgtctttctatgaaatgtatttttcattgattcaattgttgaattacaactatctatcatttnttttcatgtcaaactttgaaaaacttgaacatcaataaaaaggtaatggaatagatcatattttcatacattttgaatggtccaaacttccaatcatatattaaaata

SEQ ID NO: 127144 - DNA, 418 bp, Glycine max
  unsure (1)..(418): unsure at all n locations
gacacttctaatactcaagcttgacacgagttaatctagtttaattagcatgaacaggttattctttcgtggagaatccaaaactctcgagtttggccatttagtaaagtcctaaagttaatgtttataatattaaggtgttgagaatgtgagaatctcgagaacattgggtgttctgggggctcaagattgatgatggatttggtgacccactatagatgaaccatganaatctatgttagcttatatataaataaatagataataataataatataagataagttgatatcttttgtgctgtaaatgttgggtgatggcaaggggtgtatgctttttatattccataaaccactatgagctaacgatcacacttgggtctctttggtctattcccacagcagacagtcattcccct

SEQ ID NO: 127145 - DNA, 440 bp, Glycine max
gtgatctctaagcacctgcaggctgcagcttggctataccagttcattaccattttctttgctatatggcttccttcactccttcagctagggccatgtattctgcttcagtagctgaaagacaacaactgattgttgatttgctttccaattgattgttgtaccaaacaaagtaaacacataccctgttaaggatttccttgtgtctacatttcctgcaaaatctgcatctacatagcctgtgattgctgcctcatgtgtcgtccttttgtaccttaatccagctttcaaagatccatttagatactttagtgtccacttcacagcttcccagtgtgcactgctaggatctctcatgaatctgcttataatacttacagcatgagtcaagtcaggtctgctacaaaccattccatacattatgctttcaacaccactgg

SEQ ID NO: 127146 - DNA, 404 bp, Glycine max
tcattgcctaatataccaacttacataagcattccccatgtgactcatcttaaggatgaataagctaaagttgagtatgtgaaaagattgcatgagcaagtgaaggctcaaattgcaaagaacaatgaaagctatgccaatcatgccgacgtgaacaggaagatagtggtacttgtaccatgtgattgtgtttggggacacatgaggaaggagaggttccctatacaaatgaagtccaaacttcaacctagatgatacagaccttgtcaagtactatagaggatcaatgacaatgcttacaagatagatattccatgtgagtattgagtaagttcttcatttaatgttgctgacttgactgcatctgtggcaggtgatgattttgaacatttgatagcaaatgc

SEQ ID NO: 127147 - DNA, 277 bp, Glycine max
tttctacatacatacttgctcaaacttatgaaaagaaacacaaactccatcataatcatgcattcaaaccaaaatcaattcatacaccaattttcacaaaaagataaaagtgtttcactgcataatcatcaaaatcaagtcaaactgttccatatgtttcaggataagcatacaacctaaccataaataaaaacattagtgaatataaacattaaccaaaatcactgaaaaaccaatgtacttgaactataatcattataataacaatcccaaaagc

SEQ ID NO: 127148 - DNA, 324 bp, Glycine max
  unsure (1)..(324): unsure at all n locations
tttaaataggctcgtaggtctaaccagacttttatgttattctatccgagaccttataaatatgctatggcatgtaatgaaccaagctcaagccttgtgtattcaactcaagccgagctcaagcctagttaagcctggcttgacttggctcatntccacccctatgactgcacacttcaatatattaactgcatcataaatataaagtgtgtgaggaatacatgttataatttatgcaaattaatacacatctgtattattggttgtaatttatgcaaaaatatgagaaaaagttgattaataattttgtgcaatttgcaagaa

SEQ ID NO: 127149 - DNA, 332 bp, Glycine max
gcctgacggtgacttgggaattgcatcaatgaagaatactccgtttattcttttgtaaacaccacctgcacaattccacaactcattacattccttattttgtggctaacaaaggtacagtacacatcataaacctgtaaaaaacgcatttatatctgaaagtgacccagacatttagaattacgtgggaagaaacggtgtgggtcagttataagaaaaaatgagaaattatattaatacggcgtgaatgagattatttttaaaacgaatatatcttagatcaagtgaaaattaatagcaaagttattataacgcgttttatttattcatta

SEQ ID NO: 127150 - DNA, 267 bp, Glycine max
taaaccggatcatcttattgagaaacaatggttcctccataacaattcaatcattaattacctgggacgaatttataacacattttagatgaagataataaaatattacatgatgaaataatgcatagtctgaccaaaactttggtttatttatggacaaagactttgtactttaatattgacatttatatacctcatataaggcatacaaccacggcatgataataattcaatttcatatggaacattccgtttctcccctgtaac

SEQ ID NO: 127151 - DNA, 444 bp, Glycine max
  unsure (1)..(444): unsure at all n locations
agctttattcaagacaaagaatattacatattctagatggatgatcaagacagtctttagagtcttagaaagggtatattaaataggaagggaattccaattgaagtagcaaaaggtttggccaagaaatttaagttaaaaagtctttttcaacaaatttactctctggtaatcgattaccagaggatgtaatcgattaccagtggccaaaactgatttacaacagctattaaaatttgaattcaaaatttgcactatgtaatcaattacacatatatggtaatcgattaccagtagtttttgaacgttttaattcaaattntaaagcgtgtaatcgattacacacatattgtaatcgattaccagaggagattttcagaanatattctcaacagtcacatctttttatgtggntcttgaatggctatcaaaggcctatatata

SEQ ID NO: 127152 - DNA, 453 bp, Glycine max
  unsure (1)..(453): unsure at all n locations
ctttatccatggcttcctatggtggtgagcttgttcttgactcatcttctccttgaagtagcatctccaatcacctttccttcttctccattccgctttcattggccttcaagaagcaaaagactccatcgatgaagaagatccgaggcctacaagctctacatggagctacatcaagagtgttgtctcaacctttcctcgctcatagccatttttcaagagaaatgaacttagtttttcgtttcaagctctatgagcttgcttaagtccatatagggctttgttgagcttgaaaacatgttaaggaaaggttcacattcaaatcctggaggttgttcaacataaacttcctcttgcattaagccatntagagatgcgacttttatgtccatttgatacaacttcatatggctataattggcanatganagtatatgcatactgcctctaaac

SEQ ID NO: 127153 - DNA, 282 bp, Glycine max
gacaaagcatgcgaaagaactagtttctcttctggtatgaccttcacctgtttaaagagcgctgtccacccgcatcgcttagaggcctacaacggatgggcgtttctctgggagcgacgcgtccagctcatggacgacaagtatactgatttacacgatgaaatatggcgccggcggtgggcatcactggttactcccatggccgagtgttgatcagacataagccttgagtatatgctcatgctttggcaacagaggagggcgtgcgtgacatgagatcct

SEQ ID NO: 127154 - DNA, 406 bp, Glycine max
  unsure (1)..(406): unsure at all n locations
gccaggagtgacttattgacgaagaatactngggtcttcctcttacggggagattaggtgtaatgtcaggagtggcttatggaatactcactgtcaccaaaagtggcatagagaatactttggtgtaatccaagatttgatcagtggaacccttcaaggttagaaagataatttgatgtaacccaacagttggggtgaactagcataaaatctttgtgtgttcattactgcttctatataactagatcttttctttaagtcacttctacgctatcttatcgaagttctgtcaatagcgtctctaagaacaaagtcatttcacaccccatggaggagaccttttgtccattaatatatttttcgagaaaaccattntatagttttcaaaagacaacagtttatccat

SEQ ID NO: 127155 - DNA, 438 bp, Glycine max
  unsure (1)..(438): unsure at all n locations
gcaagcttggtcttttcattcatatcaataacatcctcataagaaaaatgttttatgactgccttgagaacactatatcttcccctcctttgatatttctattacttatggctaccaaggccttctcctctgaagatagctcactgggtaccctagcaaagcattttttttttatttctccattcacaaacatgtctaaaacatatattttattccatgttaatggtattttggcaagggcattaatcaaacaagtaatacaatgggtaagtccaaatatcatttcccaaaagacttgtgcaatataagtaatgcagcgaactattaacttaggcttttaaataatgcaagaaaagactaaaaaattgaacttcaaggtggatgtgtgacatanaaaacacatcacgtaagaatacaggatagtagatggttttatgc

SEQ ID NO: 127156 - DNA, 484 bp, Glycine max
  unsure (1)..(484): unsure at all n locations
acttaggcttntagcccaatggacttaccttgaattaattccttggattctccnaaatagttctgaagccccnnccttgnnnggaagctcactacaagtcttaagtgaaaaaccatgatatcaccatatccttaaggaattgttttgggaataagtgtggggggtttttgtttcattggacaacttgttttgttggctatgcttcatgatgtattttgggccatacttgatgtacattgcatattggttaaatgttggacatgctgaatgaaatgttgtttctcacaagctatataataaaaaaaaaagaattaaaaaaatattcgaaaaaaaaaaattcgaataaagaaaaagaacagcaatacagttgagtgaataagatcttaaatggcacaagaatgatgaaactcttggntctactcttcatgtntaattcttatccttacttctctttatcttcttactttntctcttaatatgcact

SEQ ID NO: 127157 - DNA, 411 bp, Glycine max
  unsure (1)..(411): unsure at all n locations
ggacttgtatgattcaattngggtttttattggatgagggaaagagtgatttcgaaaatatgcactttatgcaaaatattgctgtcaagtaggtgcagcagaattttggctttgggcaaaaagtgttgagtatttgctggttgtggaaaaagtattacagatttggttctggacgttttctagcagatcccaacggtcataatgtatatttatgtgctatggacttccagtaaagttttcaagtcgatccaacggttaacgaattggaacgaagagaatgttactggggtatttaagtgagaaaagctgtgatagtggtttgtgtttttgggcacaaatttctgcctttgccctattttcttggttttgatagttcacgatggttggatgttgattacttggatgttgtgg

SEQ ID NO: 127158 - DNA, 473 bp, Glycine max
  unsure (1)..(473): unsure at all n locations
ntaatgaaagaactaaacttgagaaatagcagtcctatgatgttgtttatggataataaatcagcaattgatttagctaagcatcatgtggcacatggcaggagtaaacatattgaaaccaagtttcatttcctgcgtgatcaagtgagtaaggagaagcttgaattggagttttacaggtctgaagatcaagttgcagacatactaactaagccattgaagtttatcaagttcaaggaattgagagacaagttaggagtgacatccttgacaaatctgaattaaggagggatgttgatgtatgttttaattcagttagttaattaggagttagttagtttgacaactatgaagatagttgtagttacatatacagtgtgtataaaaataatagtgatcatgaatgagatgtatganagtgcagaagtttatttagaattctaagttccctctattttctcaatcaattcttt

SEQ ID NO: 127159 - DNA, 469 bp, Glycine max
  unsure (1)..(469): unsure at all n locations
tcaggttgctcaattgctccatgttgctgcatggaagggttatgtctgtatggnggtcagcagaggagcacataccacatacccttgcgacaggtacagatttctgattcaaggccagctgggttaccaagttgaccaacgcatccagtttgccttcaagcttcttagtttcagatgatgcagaatgggttgtagctacctcatgcactcctctaatgactatggcatcatttttggcgctaaactgctgggagttggaggccatcttctcaattaaatatctggcttcagcaggggtcatgtctccaagggctccaccactggcagcatctatcatacttctctccatattactgagtccttcataaaaatattggagaagaagctgntctgaaatctgatggtgggggcaactggcacatagtttcttaaatctcttccagtactcatacaagctctcttcactgag

SEQ ID NO: 127160 - DNA, 402 bp, Glycine max
  unsure (1)..(402): unsure at all n locations
gatctcctttttacgagaaacttcatcaaccgaagaaggtgtgaaaaaacaagagttcatcccattatcctaggttaagagaatcttacaatgagaaccaaattaaaactctgaagaagcaaaacaagataaaatctatgtctacatacactgatggctaaaccattcaaaactaaatgcaaactttagctaaagatggctcataatagttaaagcttgaagaaaagataaacaatgaggggaggacagtaatggtgcttatgantttacttttcactgctctatgatacataacccactgttgagcatgtactcatcaatctcagaggcgtggagcagccaaccncaaaaacactatagcagttagtagatagcaagatagccggtatactggaaaatatg

SEQ ID NO: 127161 - DNA, 471 bp, Glycine max
  unsure (1)..(471): unsure at all n locations
tatgggcaacaacaaaataattaatatgatgtatgatcttctttttttttaaaattttttaaataaattttagcagaattaaacaatattttttaaaaaaaatgtgtggctagcactttntattttagtatccaagctcaaccttcatatcgtacttaaatccattaacggcgtttttgtcttacatgcctttattttgacaaactattagaataataataatattttaaaacatacttaaataaattaataatataaaaatattttaaatatttgtgacaaaataaaataaattgagtataattagaatatactatgtaaaatatttttacattgttaaccaactatatttatcatatatttaaaaatcgttaaattttgtgacaattaatttattgaataataatatcaaatctttactcggtcaatatattaaaattaaaccataataatatgtaactttataattta

SEQ ID NO: 127162 - DNA, 363 bp, Glycine max
  unsure (1)..(363): unsure at all n locations
aacccattacacatattttggtgntggcacaactcaatgtcacatatcaactcccagttgtattgcatccctatctttggcgcagtgcaaataaaaacagacccccccccccttcccgataaatagtttgaaaacaactcctctttgataaatagtttacaaaaggagtctaaaccgatacttttgcccaagtacgcaattaataagacaatcaattactatatcaaaatcattntgtttttttaatttaaaaagaagtttgattttaaggggggaaattataaagtcaagacaatacttaataaatatcatttttaatttgaaaataataattatatagaagaantttaatatagcacgtgt

SEQ ID NO: 127163 - DNA, 394 bp, Glycine max
tacacaattttatcactcaccgcctcttaaataaatctaagttcttcataaaaatttaattttgttgagtttctgcggttgttctttttctaagcgtagtactttctatctcaaaggttttgctgtctaagagtgagagatattatcttatggtaattcttttatcccatcaaggcgtttattctaatttattttttaatcttctcttttgatatgtttatgggtttgctcactaattttttttatttgttttacactttcttgccctcattatgcacttgtgattatataaagagatagtctttttcaataagtttgaagtatgttacagcagcgaaaagtggtttttttacgcgtaactaagtttttatttctttaatttttttagattccg

SEQ ID NO: 127164 - DNA, 385 bp, Glycine max
gctaaatatactcaaatccagttcctgttgtataaatcaatccgattaatcagttgaaaacaaaaatagactatgagatgagcgtgtctcattgatttaatctcccgcctccctccccccaggtacactaatctaataaattacacgcatatcctttgtgttttatattacttttacacatatatacagcagttgttttttctataataaaaaaaaactacacattcctcccttacaaattatacacacaataccctgaaaaaataatgttattatgctaagtatagatttttaatcaaagagtgcaagtacaattaataccattatgctaactctgtacagatcagtgaattatctccatattggttttgaacatgcctcattt

SEQ ID NO: 127165 - DNA, 415 bp, Glycine max
  unsure (1)..(415): unsure at all n locations
cgaacctctcgccctaaacttatatgaactcatgccaatttcatttcctaaacttctgcctctcacccttatactcgtcctccagatccatatctatatatgagtggaaagaggaatccttccaccaagtagcgccaccaccatgaaccctagccaccacgaattgccatctagtccatcataaatagtgttgtcatcgactccattgtatccctccagttcctccctatcgacaacctcgtcctcattaatgggttgggttccaccatgtgggactctagaaattctaacttgggtgtctccttcgccacccttcatgacaatggaaacttggttctctctaatgtcatcggntttgtatggtcaagccttgacaacaccactaacaccacttgtctatttcaaaacttcatca

SEQ ID NO: 127166 - DNA, 282 bp, Glycine max
ttttgcgatggggcaaaatatgattttcacaacctcatatcttgtataaacccatcatctgctattgtccacctccagcagatgcttcctactcccacgtagcccttatacttcatttctctcaatgtcggggtcccatcaattctctcaagctcccactacatgccagaaatgtaacatcccatcatcacaaactaacaaaaccaagcaaaacagggctaaggcagaaaactctggccaaacacaaaccaaaatcacagcttttgacatacaatattccag

SEQ ID NO: 127167 - DNA, 478 bp, Glycine max
  unsure (1)..(478): unsure at all n locations
tataaatctcagctgctctaattacattgatgtnggatntatttgttgttgttgtatgccannnctgntttaagagtagcattccttggtaaaactaactttccaaatgtttgccttcgcaagaaatggccccgaggaagcttgcctcaaagaggtccaggaaggataatgcggccgaagggactagttccgctcctgagtatgacagtcaccgctttatgagcgttgtacatcagcagcgcttcgaggccatcaagggatggtcgtttctccgggaacgacgtgtccagctcagagacgacgagtatacggatttccaggaggagatagggcatcggcggtggacatcactggttactcccatggccaagttcgatccaaatatagtccttgagttttatgccaatgcttggccaacagaggagggcgtgcgcgacatgaggtcctgngtaaggtgtcagtggatcccgcttgatgc

SEQ ID NO: 127168 - DNA, 338 bp, Glycine max
  unsure (1)..(338): unsure at all n locations
tcatgttcacttattgtgttgcttgaagcttggtggtgtaaatcttcttagtgtttacccctctcgaatgcacaaaattggtatcagagctttgattcttgaaattaaatgttatctatccttttgggtttccttttattgggngctttctcatttgcttgtctttccctttttgttaacttatattnatatttcatcttcttttggtttatttctttgagnctatctttcgtttctgaactctatctaaaatcaatatcttttttactctttttaatatatatatcaacanatctgggcaaaaaaaagagagtgaaaaaaatataatttcaaattga

SEQ ID NO: 127169 - DNA, 458 bp, Glycine max
cttaaatactcagctagcagggttgtaaggactcagatgttgtatttatttttatgcatgacactgtaggacttcattggacggcgaaaccattaaatttaagtttttatgttgaaaggtgttttcttatttctctgttagcgtcaacaaactctaggtaataaatcgggcataaccaaatttacataggtagtgtatgttatgatggagccgttgatccactatacaatcattccatcaatattgagatcttaaaaataaattacatactttactttctaacgtgtgtttttttctgggattaagaaataggtccatcaaaaaaataggaagggacgagtagtcctctgcaagttgttagcgatctccctcaacaattgtataaggcctaacgttaggggtgttttttctcttgagtatagtcttcgctgtgttttcttttctctacaagtctttct

SEQ ID NO: 127170 - DNA, 349 bp, Glycine max
  unsure (1)..(349): unsure at all n locations
agcctttctttctttattaatccggctactgtccaacaaatcttaatgccagttcacattcttggtctttctttggctaacatacacatttggtcaaacctatgaaaagaaacacaaattccatcacaatcatgccttccatcccaaatcaaaccctacaccaattttcaccaaaggataaaagtgttcactgcataatcatcaaaatcaagtcaactggtctaatgcttcaaataagcattacccaaatcactaaaaccaatgactgaactatatatgttgaattaaaagatcacaganctgagcatctactcatctatagatggaagacggggatcaaaagagcaca

SEQ ID NO: 127171 - DNA, 461 bp, Glycine max
  unsure (1)..(461): unsure at all n locations
tatggagacttgctctntatacaacaatgcctgtttgactctttgactgctgagagctagagacttttctttcttatgtgcttcgtcttgttaaagttcatgttcatgaacttaagagtaccaattaattctttaaaggaaattgagtcaagattctttaaaacccttagtgctgttacttgttaatgtggctccttgtaaagcttgtaggccttggatcttcttcatcaatgaagtccttcgcttcttgaagatcaatggcagcggaatggagaaaaaggaaaggttattggagatgccactttaaggagaagatgagtcaagaacaagctcaccaccataggaagccatggataagagcttgaaggtaggagaagatgggtggagggaaagggagagaaaggaacaaaactttgggagggagaatgatgtctaaactctgaagtctaatttctcaaatg

SEQ ID NO: 127172 - DNA, 255 bp, Glycine max
gatacaacccaataaacgtaatggttttggggccatgtggcccgaaaatgcattgtaagctaattgggctggtgatggcccattagcctcgtcgttatcgtcactcatatcagggaaaaaatcactcgaagggtatcctcttcgtctgtaatcaaaaggaacaatttgggagcacacctatgaccgtggatgattttttcatcgcagttgaaacataagcctttcttccggcgcgaggcaagctcttctggtgac

SEQ ID NO: 127173 - DNA, 430 bp, Glycine max
  unsure (1)..(430): unsure at all n locations
tatnggagacanagagcaaatattttttggcttaaagattgttgattttactcaattttttcaatgcaattgctaatgcaaggaaaaagaaaatttttatctcttttttaatcaatgtaaatggtgatattgtttatgatcacaatggtatttctgatgttgtttcttcttactttcatgaggtattccaaccagagagtaattgtaatgattntctcccaattatcaataaaattccaacatgtgttttcccttatgacaatgactcacttttggcacactttactattgataagttcaagaatgctctcttccagattggctctaacaaatctttaggcttagatgcattgaaccctattttctacaagaaaatttggcacttatgtggtccttaactctttaactctaaagtttgctggcttgaaca

SEQ ID NO: 127174 - DNA, 443 bp, Glycine max
agcttggccagctgcaaccgggagaccatcttatattattcgtatcagatccactttagagcaagcactgacctgaaaaaacaaattatttatgtaagtcgacaaagcacaaatttgatgaaacaaatcacaataagcgttttcaaacatgatacggtaccaaattttctaaatttccttctacatgaaataccataacagccattccccttcctccatcaatctcagcctgttcatttgataagtcaaagtgttactgatatgccaaacaaaagtagaaacatactaatataatgtcaagacgtcttatttgagtactgtataattgcttggattttggtttaaccactcaccacacaagaacatatggctatgcctgcagtggccattgctgcagtgacctcagccatcatgcctgcaataattgttcactgggttacaat

SEQ ID NO: 127175 - DNA, 343 bp, Glycine max
  unsure (1)..(343): unsure at all n locations
tatnataaattcaacaaaaccaggtagtgcttagttaaaagagttatgcctcacaaaactctgtaaataaagcttgtagcttgttttcacaatttcatgcatgtcattctccgcacctttcatctttatttccttttatttttgtagtgtgcgatctaagacgaaaacatctaattgtgtctttttaaagcttcaggtgttggggctaagatgcccaaaggttgcatattctaccatattccactggaatcatctgacatagagcaggctatgcaatntanaggctataatggtagtagacctagtatattggccttacaggtgattaattctatcatttttc

SEQ ID NO: 127176 - DNA, 431 bp, Glycine max
  unsure (1)..(431): unsure at all n locations
tagaggggatctcatccaaggcttttatgtcttagacctcagggactctcttgattgtaaatttactttttttgttatcaattcacatacaacttccattccttgtaaaaatgctcatatttggcattctagatttggccatatctcagacaaagttttcagacatttgaataataaaattggtctacacctttctcccaatttctcttcttctaattgttttgtttgccctcttgctaaatttagaagattatattttcctaactctaaccatttattagaattatcatttgacttaattcgctgtgatatataaggtccctatgctcaccctacctatgagggaaagagatttttccttacattggttgatgactactcaagattcacttgactatntctgcttaagcacacatctgaagctctaatct

SEQ ID NO: 127177 - DNA, 64 bp, Glycine max
  unsure (1)..(64): unsure at all n locations
gaaaattgccttagaaatagacaaaaatatcaaatgggtttctcttacaaattatntatctaaa

SEQ ID NO: 127178 - DNA, 146 bp, Glycine max
ttgccctttccatttcttgccccttctttaataattttcctttaaatttctccatttttatggttggggaaaaatatttcataatttatatataaagatttatttaatataaaataataattttagttatataaaataaacattca

SEQ ID NO: 127179 - DNA, 407 bp, Glycine max
  unsure (1)..(407): unsure at all n locations
tcttataattatgtgggtaagaaattaaaattagcgagtcgatgtcaatttaaatcaaaagtttgatcattatctctaacaaacaaaaaatatctttaagtaactaaactcatttctaagcaatggaatttaggtcacatggttagctcatttagtaagatcggaaaatttttatataaaaataaggggattattcttggtgttttacaactaattatagttaattatgtaaatataaatagataaaattgtataatttctcatattaataaaataattattcaggatcactcttctattaaaattataactctcataattatttcataatttcctacgtagttttagtatttctgggtgagcctttacagttaaccatgatcactntggtcatttttttaggaact

SEQ ID NO: 127180 - DNA, 410 bp, Glycine max
cctccatgccaaattacatgaaaattttttatattccctactacaaagactactcaaaatgtcataaaatacaaggctaaaaccctatgctactaaaatgaccaaaatacaaagcctaaaagaaagaaaacttattctaatatttacaaagacaagtggacccaaccttggcccatgggctcaaagatcaaccctaaagttcatgagaaccctatgaccttcttcaatagctctagcccaatcctcttggagtcttctatacaatacccttgaggggtaggattgcatcatcccctcccccatggaaaggatttgacctcaaatccagaggttcttgatactctggggcttcttccctcgacacctgtaaataaaatataaacatatatattattggtgttgggtatgtt

SEQ ID NO: 127181 - DNA, 468 bp, Glycine max
  unsure (1)..(468): unsure at all n locations
actaagcttggggtggcagcaccattttatagagagacttatatgtgtcttcatcacgantatcgtctcccttttcattattgggggtaccacctgtgccgccagatccctccaccttttgggcgtgttctttgaaagatccgtccccctttttgcacatgttctgtagttgcatcctatccgaaaccatatcaaaattgtactgatactgcctaacacaggcaaccattaggtccttccaagaatggactcgtgaaggttccaagttagtgtaccaggtaacagctaccccagtaagactttcttggaaggaatgtatcagtaattcctcatcttttgcgtattcccccatcttctgacaatacatctttagatggttcttgagacaagtagtccccttgtacttgtcaaagtccagcaccttgaacttgggaatgaccatgtttgggtattaggaacaactttcct

SEQ ID NO: 127182 - DNA, 283 bp, Glycine max
gaatgaataacgaattaagatgattagagatgcccctttctggaaaaaatgagttaagaagaagttcaccaccatacggagccatggataatagcttgaatgttggagaagaagaattgagggagaaagagaaagggagcatgatatctgtgcctcaaaagaggtctgaactttgaagcgtaattcttcaatgaataaagttgaaaaaatgcacacacatgacctctatttatagcctaagtgccacacaaaattggaggaaaatttgacattctattcaaat

SEQ ID NO: 127183 - DNA, 464 bp, Glycine max
  unsure (1)..(464): unsure at all n locations
nttcctctagctgctntgctagggttttcaagtgttagattatatgagaannggatgaagccttaatttcatgatctccgtgcaagggacatttctctttctctagacatttntgcacaaatcccaatggtgagaatttgaaaacatgagttctgaaggtggtttccaaatctcaggatgatccaacggttaacgtatccgagatcatagttttactatgagagatttgagtgtatgcgagaaaagagacggtttgggagaggaagaagagagaaccaatttgggtagaagaaagagcgtataagcatatcgtaaatgtaaaaattgacctaatatgtctctatntgtagctatggtactctcagcctatcatttactctattctnttttattctattattttataaaaaagaattctatcttattctttcattagataaataaccaattaaaacattccttta

SEQ ID NO: 127184 - DNA, 372 bp, Glycine max
ctcgaattctagctcttgatactttgcacctaacaaattcggacacaaaggtatcaatcactacttcggacacaggttgcagagttttgtcagataacttccttcattcaggtgtataagctagaaccattaagtgacaaaaaatctttggaattgttatgatgtggaaaggcatttatttcgggttttggtggatgctgtacaaaagaatatgaagacgtaggtcttgaaatggttagaaagtgtgaacgtttacctctagcaattgttgcattggtggtcttttatatagcaaatgtcaaagcgcacttgaatggacaggtttagtcacaatctatgttctgaagtgacgaggaattctgagttaatagg

SEQ ID NO: 127185 - DNA, 451 bp, Glycine max
  unsure (1)..(451): unsure at all n locations
ntannaaatcaattgatgcctcanatccactcattctcctctctttcacgagccgcaaaagaaagaactngagggaatcttgagttttcctgttgtcaaaaattgtctgcctttgtaggaacactattttcagcttctttgtattgtgttggtgttaataacgctaaaatgggcgtaataattaacactcaaaaaaccacatgattggaacgtcgaanacattagataatggttgcattttttattgaagaaaagaaaaaggccacgaatgtcattctacaaagttatagatgtgaaaaagacgcaccttctttntcaaatttgggcacatcttagtgatgacttctgccgaatatatgcgaaagttcttcagcatccctgctccanatacgtacatggngcacatcttggatgatccagtggtcttctccttcatcangagcaatgcact

SEQ ID NO: 127186 - DNA, 295 bp, Glycine max
cagctaaccctatttaattaaatttttgtcgaaaaggtttgttacccaaacccgttacggctatcctcacttcatacaggatgaacgccttcacacaggccgttaagcgtcattaaaatcaaatttgactttcagactgacacggggtctttatccttaacccattgcctaaggctttagtaccaaatctactgactacctaaactatacctacctacacaccactagaaacagaagctctatctagttgagatgaaataaaatgaaggctactactgatggctgaagagcatga

SEQ ID NO: 127187 - DNA, 337 bp, Glycine max
  unsure (1)..(337): unsure at all n locations
ctgtcttgagtagaactagggtacaaacctaactccgaagatttgttcanattccagagcacaccacaatgcctacttcacgaaaagagctctggaagcagcagaaggagcaacttttgcagagatacctacgtatctgaagcttattactggtaagcgttcttctgttacatctggctaaacaccctagatagggatttctaatgaacaactgatgtaaatacctaatatctaaccgattatgttttctgagttcaatgcttccttcactgcttaatgtttgtatgtctttgggctgatcattcatttgtgtgcataactacgtaacttttgttgg

SEQ ID NO: 127188 - DNA, 318 bp, Glycine max
  unsure (1)..(318): unsure at all n locations
aaagcacaaganaatatagcattccctttatgcgactgagaaacatcctcattgtcgacggtatcctcgaggcgtacatctatggtggtgacaatgtttgcgtccacgaagaatgaatgaaccccggatcagnatctcttatatggataactagttgaaaaatccattgacctcttgaacgataagtacatgcatgtgaacgcctcaaagggggtgagtttaaactcggtgctaagtatccaacttgttgatgatgacgcaggggtaaggcgctcatctaacatggtagatcacacatggtccggatgtgacaccctg

SEQ ID NO: 127189 - DNA, 463 bp, Glycine max
  unsure (1)..(463): unsure at all n locations
tcctttaattntgtggattgatgctcttaagattgctgcttatatatttaaccgaantccaaccaaggttggctcaaagacaccttttgagttattcaagggttggaaaccaagtttgcgacatatacacgtttggggatgcccgtctgaagtaagaatttataatccacaatagaagaaactagaccctaagactattactgggtatttcattggatatgctgaaaggtctaaagggtataggttctattgtccatcccacaacactaggattgtggaatcaaggaatgcaaagtttcttgaaaatgacttgatcagcgggagtgatcaatttcagaacatttcttctgaaagggatcactatgaagttaaaccttctgggacaagtaataggttggtagtcattcccacccctcaagttaaaatatgtgttagacaaccagtgattgaagttccacaagct

SEQ ID NO: 127190 - DNA, 363 bp, Glycine max
tttcacaataaaacctttcggataaccaaatttttgtgtttgtgtattttaaactacctaaaacttatctaaaccgaaaataaaaaatatatttttatagagattaatgtgctaaaaatttaataacaaaaattaaaagaaaagggtagaagttacttgttgacacgataattattattgacggaaacaataacattgagatgctaagattgtactcgaaatccctctatttaccacaattcttctcctttctaacgtgatatatcgttcattccccattctctaatgtactttatacctaatccctaggtgatagaacctaaatcacttgcatggattcccaatcctttggcaatccaacac

SEQ ID NO: 127191 - DNA, 471 bp, Glycine max
  unsure (1)..(471): unsure at all n locations
tcaatggagatacatcagctatgttgcgagtttatgattgttcttgtaaaaaaggttgtagtgcccaaactacaaatgatagcatgcacttctctcaccagcaacccaggagaagtagagctcgaccctagagaagcaaaggcaagagcataacctactaaagaattgaaacccttccaacttagcaaagaatccaattgtaacactgtggattttttaaaagtatgttaaatgtttgataaatactagaggaaagtaaatttagattcatgatatttataattgaatttaataaatggattgttttgttatgtgacgtagtgttattgataactttcatgagtgtttgacctaaagtgtggggtataagattgttagaacctatagttgagtttcctttagttgtagaanaaaggggtgtgcttagaagaaataaagagtagcaattntaagttatctctttagccttaa

SEQ ID NO: 127192 - DNA, 390 bp, Glycine max
  unsure (1)..(390): unsure at all n locations
atatgttggctcacctgaacattatttattcagcccaaacacaaacacacactagaatgaattaccacattcatatattataagatgctagagcatgtgaaacatataatacttagagctgaatttacataaacaacatcacttcacaaaatcacacacattattcccactcattcaagttcacacactccaaaaaataacatcaaaccaaaattggtaactcaatgaaagtcaaacacaagcattatgcaacaaatatactagactcaaacctacatgcaatgtggtatcattnttcagtgaaaaacctcgtcgggcgcctaagagtacatgacgatacatgcctcacaatgggtaagtcaagtcactgggtaagtcaagtactctcac

SEQ ID NO: 127193 - DNA, 416 bp, Glycine max
  unsure (1)..(416): unsure at all n locations
cattgnttctaagctaactgctgatatggctcagatttgttttcctaaaggcttttagccttcgttaatatattatgcgtttacaaaaacagtcaaaccaatttttttgtcgagaccaaacaactctagaataccaaaacaaaaaacactaattttcttttattaatattatgttggtccaattgaaactaagtattggagtataaatgtgtgatgaaggcccacattgagtagaaatgaaaaggttgaacattatataaatgaggaaaatatcataaacttatgtaaggtttttttgagttaaagtgtggtatcaaattttcttgtgtgattgtttatgacttattgatataaattaagtaaggttttcgatctaattcttataaatgaaaaaaaaatatgagtgaaagaaagtt

SEQ ID NO: 127194 - DNA, 415 bp, Glycine max
  unsure (1)..(415): unsure at all n locations
agcttcgacacatttttatattgngttgtgtatggtttcaangacttcctaataatagagacaaaatattacttaatgtaattaatgttttaattttaatttccatataagcataaaataaccatcaatcataatggtctatggacatccccataaaatgaaacccctagcaaataccatttttggtattctaattaaaaaatctaaaatgttatgttccggtgatgacttagaatgtgagttagtgagtatttgtgttatgaaaatagattcaaatctatcaattcaattggttcaatcaataattagtaatataaatttgttgagttggntatttgaccaanaatgctnatagaatagatgtggtttaatttctgctttactttctgtaagtttctcttctactcctaatctc

SEQ ID NO: 127195 - DNA, 465 bp, Glycine max
  unsure (1)..(465): unsure at all n locations
ccttaaactcgctgataccgttttcatgggaacatttttggattgtaaagnggntagtagaggaaaacaatgtaagttaactgtgagtaacgtgattttagtgcatatatgatttacctaagcagttcacaataacatgcatcatgaagttttgaaatgaactataactagcacatagtaattcaaactgataggtttgacaaacattgatgcattacttattgatgcctcttgaaattgttacagctcgaaaacgagcaatgactaatctaatggcttactccatcttttatggttgttgttgttattcttgttgcataagaaggaaactgcgtaacccattttgttttggtagggaggtttgtttaattgaggttcattgaagagaggctttgcatcatcatacaactacacaaggcccaaacaagaantttaatatccgtactcatattttccaaaatatta

SEQ ID NO: 127196 - DNA, 395 bp, Glycine max
  unsure (1)..(395): unsure at all n locations
agcttccaagaatcaagatcaagattcaagactcaagattcaagaatcaagagaagacttaatcaagataagtatgaaaaggatttttcaaaaactgagtagcacatggatttttcacaaaacatgtttaccaaagagtttttactctctggtaatcgattaccagattgttgtaatcgattaccagtagcaaaatgtttttgaaaaagttttcaaatgaatttacaacgttccaattgatttcaaaaagctgtaatcgattacaatgttttggtaatcgattaccanngcctttgaacgttgaaattcaaattcaaatgtgacgagtcacatcctttcacataaaagctntgtgtaatggattacactgatttggtaatcgattaccagggatt

SEQ ID NO: 127197 - DNA, 412 bp, Glycine max
  unsure (1)..(412): unsure at all n locations
actaagctttgagccanaattccaactcatcataaaccttgacccagagtgagtattcctttctcgccctcggaagaaaacagaaaaaataagaaaganaaaagaagtttccgatcaaagatcggaagaaagcaaaataagaaaatttcccaatcaaagattggaagagagcaaaaaagccagaaatattcccgatcaaagatcagaagaaaacaaaaagaaatatactaaaagatctttggaccagacaatatccaaacaatacataatagccacaaccaaataaggaaagaaaggaaaccacaacttgaagttggtctctccctttggttgccgaccaaaatcctgtgcactggcgactntctcaccccgcactaaacaaaaacagaaaagggaaaggccaaaacactca

SEQ ID NO: 127198 - DNA, 362 bp, Glycine max
attcaagtccatagccatcaaagtctgaaaagagtatgatgaactaagggacgtctatatggcctccgctcaaaccttggaacgagaaaccaagaatgcccgacaggaacaacacgtgcaagcaaagctatgacgggctttatagggcaacaatagaaagctcaagctcctaagaggtgaaaggaatcatcacgggtcaaaggcatgatcttgaaggacgagctaaaggctagccttatgtcaaacagaaatgtgacccaacagttaaagagagactgagaggaatatgtgggccatcatcgatgagtgcatagagaagctaaatctagcagcgactcacgagccaaagctagaagatgagt

SEQ ID NO: 127199 - DNA, 481 bp, Glycine max
  unsure (1)..(481): unsure at all n locations
taacctcagctgcttgggagctctatggggctggtcttgagctttttgaggtccttttatggngannnntcaccatggagatgcagcggaaggcaaaggagaagaggagaggggaggcaccatccactatgaaataagccaaggaagaaggagcttcaccaccaagaattgccttggataagaagcttgaagaggatgctttaatggaggaaaagaaagagagaaggggggagcacgaaattgaaggaataaaagagggaaagaagtggaactttgaagtgtatctcataagactttcattcatcaaagttacaacatgtgttacacatgcttctatttatagactaggtagcttccttgagaaactttcttgagaaaacttccttgagaagcttctttgagaaaacttccttgagaagctagagcttagctacacacacccctctcataactaagctcacctncttgagaagcttcctca

SEQ ID NO: 127200 - DNA, 304 bp, Glycine max
accaatcaatacattactactaatttatgccggaacctagttcatgtatatgtaaaccgtggtctggttcacaagcaatcgcagtacatttgcctgaataacaataacattatcatacaaagagaattgaacattaagcttgcaatattattcaaaaaaataacaaaagctacatgtagaaaagatcattatcaactaaccggggtacctaactttgtgttaaaagtgctatctgaaagttcaagctgactcatgaaaagagattaacaatccctatgcagaatcactttttaacaacattttt

SEQ ID NO: 127201 - DNA, 397 bp, Glycine max
aattatataatattttatatcgataacattggttgcaacatgaagcacgtgtcgaatatcttttaggataacgtaactaatagtggggtctgcgatttatttgtgcagaaataaattatggcataaattagtttttttcctttaatttattgggcaccaataattagtaccctaaaaaataaaaaataaaaattttattctttttcatgtataatatcgtgcgactatcatatgtcagaaaattcatatttatttgactttgacaatgttactgtaattttattctttaaacttaattacatgatattttagtccttaaacttaattatataatatgattatttctattcttaacatattacgatggtgataataaatgatatttatttatagtgat

SEQ ID NO: 127202 - DNA, 304 bp, Glycine max
cttaaatataacacgctatataagaagcatgctctattatcacgaacatatacaacactggtgtatcacgtggcctcagaataatttacacgggaggttgtcattattatgaatggggcttgactaattaatacatttatccttcttaacgtaactagactcaaaccggctctactactaagttccgagaaagttaagaacaggaacaatttcttagacaaacgtcgagcggagataaaaagtacatgagcgaaatgataagagtgtgtggaagaagatgacaacacacgatttgttctggttc

SEQ ID NO: 127203 - DNA, 387 bp, Glycine max
  unsure (1)..(387): unsure at all n locations
tgtaagcgattaacactgtcgtgtagacaactaccagacttttttatattcttatttcaagaccaacgaggggcaactcttctgacactatctatgtgatcgcttaccacttttatgtaatccatcaccaatatgggatgtttgtatataactaccatgagtcacaactgctcaagaaatagatgtatgaccatctaatgcctctatatatgtgactngcgatactaactatgtgagagtgtatgtgatcaaaactgtcttatcctctcagaaccaaaccgtcttatcactctcaaaatattccttggacacacacttatccattcagttaggaatcttgacggagcttcacaacgtaatatccttctcttagagagagaaacttct

SEQ ID NO: 127204 - DNA, 381 bp, Glycine max
  unsure (1)..(381): unsure at all n locations
ataacaatggcttgaccacaacaacactggaggcggtaagggacaatggtcttttaaacaaacctgttgtacatgaacaaagaatatatcatgcggtgactgtgtcaaatgaaccagcgaagtcattgcataattgttatactaactatattcaatgtacctgaacaaaatgatttccaaacacgtgaccgatacatatcatgcggcgcccacaagaatcatgtgatggttgacttctaagaggaaaaaatgtcatgcttcgttgtcgggacaatgatataaggattacgttataccgtgatgcaatcacatatctcatctccgttatatccatncacttggccacactaacctgaatgaaccanacatacacatgtaagt

SEQ ID NO: 127205 - DNA, 456 bp, Glycine max
  unsure (1)..(456): unsure at all n locations
tagtcataaagccctnttctaataattgacctatgctgatattattcttttcatacctggtacaaagagtacatcaatgatgcaagactgacctccatcctttgttttgataaggaccttcccaattccttcagcagtcaagattctatcatcagcaaatttgacttggctcttcacagattgatcaaggttgagaaaccactctcttcttcctgtcatatgagtggagcaacctgtgtcgaggtaccaacaattatcacttgccccttcaatttgagtagttaccattagcagtacctgttcagtgtcatcatcttcttcctgagccaattttgcatcatcacctttacgttctcttttgttattgngtttgctgtaacactcatcagcaaaatgcccaaacttttgacagttaaagcattgaatacttcttttgtcaaacttctttctatttga

SEQ ID NO: 127206 - DNA, 373 bp, Glycine max
ctgtctaaaagcacattaatggacgctgagagaactgcaccacctaccactggtgctaccattatctcaagaccaaaagatgatcatagttgaaagacaaatgccagggaattggttgctatgaactgggttggttcttggtaaggttaactgatttgatgagatttggcttataacaactctcttcaccttcactcgttctgctgtgcaagacaaaagtatggtccatgttatattattatttgattattatgggggggtacttttacgttggagtcttttattttgaccccacatgtgctttgtgattttctatttgaattacctccttaaataaaactcagagattaagagtgtgaattttaccgtaatt

SEQ ID NO: 127207 - DNA, 464 bp, Glycine max
  unsure (1)..(464): unsure at all n locations
tgacagttataactgttacttaaaccttagaagctcaattaatattttcttttaacagagtttcaactaatgtgtttggttggaaaacttaattactagtattatggtttttttttagttggaagcacgtttttcagttgagtaagtagaagttattatgacgtgagtgtgttgtgtgatgacgagggtgacgcacaaataaaggaatcacgtcgagtcgacaggtaaaagacaatgacagagccatctccatctgagttagtgccaatcgcacgcgtgattgctgtgcctggatttaaaatataaaatacatttaaatctatcttttattatttaaatattnttatgtttaaatatttggacattatcttatgatatatttatttatcaaaataacattgccaactagcatgctaatttttgttggatcttattttaacttaacataaattcttntaacttaa

SEQ ID NO: 127208 - DNA, 346 bp, Glycine max
gataccatactcgatcttaccactctatactacttatgtgaatcggctcgctttgggtacgctatcaacacactcttaactgaatattgtctttatgcgacataggtcgctatagaatctccttcttgactactgttggatctcccctgcgggtactttttgttccactttttcttcggtcaaatatattccagggaaatcccgtttgccggaaagcgcaccggatcgtcaagatttaaaaattaatggatgaatccaatatcaaacactgcgactaatgttacctgaataaattcaaaaatgaagcatggtgagagaactgttgctgatatttcaacagatttaa

SEQ ID NO: 127209 - DNA, 452 bp, Glycine max
ggatattaatgatataaggggacaagggtatgttattggttctatcaagaagggtaaaattaagaagtgcaaaaaagattattagttataaattctacaaaattttatacgtcatttggatgttattatttagatttagtcttatatgcctaatttatctcctggagctatttcttttttttttttagagttctacaacacatttattctctatttacttcatacactaaacaatggaaatttttgcaagataatgtatgaaaattttctattaaatcattatctcaaacttgatgggagagtagaattgaaagtgtcaaaccaataaaacttcaagcaccatagataagagatgttttgcttcaattatcaaaatatagtgaagatcctaaattaaaaagtgaagccctatgtttaacaacttataagattaaaaattttgaaattttatt

SEQ ID NO: 127210 - DNA, 271 bp, Glycine max
tctcttgcatcttaacgacagcgattctcctatattcttgagagagtcaagaacaccctggctggatcaaaggactctcacaacctttgtgtgttgcccatcctggaaagaatgattctttccttcctatcatccccacccttgttctttcacaccacaattccagaaaatacacctctgcccaaaattatctcgtgaccataactcccatttacacactcaaattaagtgattcttgagcctacattgaatttcaaacgagaccttcacc

SEQ ID NO: 127211 - DNA, 465 bp, Glycine max
  unsure (1)..(465): unsure at all n locations
tatgcgcatattntcttacgaacgnactcttgcacaagattttctattaactaagaaaaatgcacccatatacaatcaaggcagcttcgttacctacattatttacacgtacttccaaggtgtatttgttacttacatcacacacatctccttggctaaatttacatacatgcatactcaaagcattttggggtaccaaaaattgcacatgtgcacatcttggtatttctaatacctatacatacacaaacttcatgatgaatcttgactatctacacaataaggtgctacattccatgctcttttcaagtttttgctacctaaagccgcatgcaaattcaagtatattttcctttgctgactaaaattgtattcaaattaaagggtatacattntttgtaatgtattttctttacataacatgcaacatatttatgtatattttttgtgagacattntgactac

SEQ ID NO: 127212 - DNA, 352 bp, Glycine max
aggattgtaatgaaatgattggaaaagtattccagattcttgaaatgccaaacaaagccttgcttttataaactcttcatgtctcgtcagacgacatttaaagagtattacttttagaaaaacttacaactaatttgaaaaagtcaaaaaccttttgaagagttacatcttttgatttattcagaaacaacattggtaatcgattacaaaattagtgtaatcgattacacaaagcttttgtgtgaaaggatgtgactcttcacatttgaatttgaatttcaacgttcaaaggtactggtaatcgattaccaaaacattgtaatcgagtacaactttttgaaaataaatggaa

SEQ ID NO: 127213 - DNA, 476 bp, Glycine max
  unsure (1)..(476): unsure at all n locations
accataaatctcagcttgagggcgcagccaccatctttcatagtttattcttattatgngncnaccatcacgattatcgtctccctttccattattgggggtaccacctgngccgccagatccctccaccttttgggcatgttctttgaatgatccgtccccctttttgcacatgttctgtagttgcatcctatccggaaccatatcaaaattgtactgatactgcctaacaaaggcaaccattaggtccttccaagaatggactcgggaaggttccaagttagtgtaccaggtaacagctaccccagtaagactttcttggaaggaatgtatcagcaattcctcatcttttgcgtattcccccatcttctaacaatacatctttagatggttcttgagacaagtagtccccttgtacttgtcaaagtccagcaccttgaacttgggaatgaccatgtttgggtattaggaacaac

SEQ ID NO: 127214 - DNA, 387 bp, Glycine max
ttgaattttaacggtcaaaggcactggtaatcgattaccaaaacattgttatcgattacaactttttgaaaataattggaacgttataaattccatttgaaaaatttttcaaaacaattttgctactggtaatcgattacaataatctggtaatcgattaccaaagagtaaaaaccctttggtaaaaggtttttgtcaaaacttatgtgctattcaaagttttgaaaaactttttaatacttatcttgattgagtcttctcttcatccttgaatcttgagtcttgaatcttgatcttgattcttgagatcttgaaccttgaatcttgattcttgtctttagactttcttcttgagtcttgaattcttcttgattctatccttgactc

SEQ ID NO: 127215 - DNA, 461 bp, Glycine max
  unsure (1)..(461): unsure at all n locations
tgcccatggccagcttagcgagccatcaccttgttatttgaggnctgngcgcttagtgcaggctaacctcacttattgagaaatggagatgcgctcaacgagtggattgtttcttgaaaatgttttaaagttatttttagtccactttctcaaaacatgtagaacaaccccccaatatctatgactcattataagctgatatcccccctttttaatgataaaaaagcaaattacaacttatgcaatgcatgaaaaacaaaatgaaaggagtcagaactgggttgcctcccaagaagtgcttttttaacgtcattagcttgatgcttttacctcaatgggtgataaaatgcaagaatggtgttgccttctcanactctccaccatggtatagtttcaatctttgaccattcaccacccatgttctgtcagggttctgagattatggatcatgcagctctatt

SEQ ID NO: 127216 - DNA, 418 bp, Glycine max
acaatctgtttataaagggtactttttattttcttcccttcggatctttgtgcaacttcaaaccacactcaactagagtggttacagaattgcaatcatgcatctgaaatctatccaaaatatctcacatatttcttttgagaaagaaaaattccaacatctgattgcactatttctataccaagaaagtaatgcatcatgccaagatccgtcatttcaaactcattcatcatagacttcttgaattcatcaaacatgagagtacaatttccattaaatataagatcatcaacatataaacatactatgaacatttttcctttttcatcagaattaataaacaatgaatgctcatagggggcattttgtaaaccaacttttatgaaataagactcaatgcgactataccaagctcgag

SEQ ID NO: 127217 - DNA, 452 bp, Glycine max
  unsure (1)..(452): unsure at all n locations
tagaacaataaacttggccttctcttaattgtctttgtgtttggcgaccacgatcaacaaagtactttcggcacctactatatgttgaattgaccaacgctgttattggaatgctgcgacaatctttcaacaccttattcactctgataggttggttatcatgtgaccatatcgtcgtccagatgtatcgtaagccatgctccatttttcctttgaaatgcgatcaatccatcttgctatggctggactcagttgacgaaatttttctaagttttgatcaaacacatgcttgcaaggagtgtacgctgcatcaaatttgttatcatcaaaagttgtacgtagacatcaaactcaaattaaattaatgtataaaataaaccttacccaatttcttgaacatctctttctttttcgcgttgttgaaattgcgattgaaatngctggctatgtgt

SEQ ID NO: 127218 - DNA, 438 bp, Glycine max
  unsure (1)..(438): unsure at all n locations
agccaaatccctcaaattatgattcggctttaatangtggctttgttcgtgctcgtgtgcttaacgcaattatgaaccgcttagcgcgcattattgaatttcggcttagcgcggcttttctcactcaacgaatggactgaagcacggcgccgtacgggatgacccttcactcaacaaacatgcacaactcatccttcttccagattctttctctcgcttagccgaggattggtctcgctcagcggatggctcgctaagccaataaattgtcttggcgagagggtgaaaatcagcacttcaaaacttgcctaattaacctgaaatngagagaaaaatgattattaaacaaacaaaatggaagtactaagtacttattacctatctttaacaaaaattaattacaacactacaaagttagtcgtattcaccgactaacac

SEQ ID NO: 127219 - DNA, 373 bp, Glycine max
tttatattatccaatgggtgttacttgtatttggaattcagtggttgttgtggcgtccctaaattaatgactggtttaataacaataatttaaataacaaaaaccatggtaaaaaatttttttttcttctttttctttttcatttctttctcttttcaccataactaagtttagaaggaaagtcctcactatagagtcctgaatggtcagttcacaactctattcggagtcatttctttcttaccgctcataatctctaaactattttgctttttcaaaaggaagaatgtaccacccattactttaggtctcacgtgaaaacaaaagaatataatacggtcgataaactcttttacaaataaagttgctaatg

SEQ ID NO: 127220 - DNA, 245 bp, Glycine max
atgcttcaatggaggaaaagaaagagggagagaaagagagggggggagcacgaaattgaaggaaaaaaacagggagagaagttgaactttgagttgtgtctcacaagactctcattcatcaaatatacaacaagtgttacacatgctcctatttatagacttggtagctttcttgagaaactttcttgagaaaactccttgagaagcttctttgagaaaactttctgagaagctagagctaacta

SEQ ID NO: 127221 - DNA, 479 bp, Glycine max
  unsure (1)..(479): unsure at all n locations
tctaacctcagctgattnggagttatttagccttagttcactttngtattagtttattctatttaagaacctacccttcggcgggagggcaagtactgtcgcaacctaccctttgacgggagggcgatgcgggactcacaagtgcgtcttccatgaaaggaaaatgcgcggagtcgccaccaacttttatttgaggaaagcgtcgggaaaattgaaaaggtgtggtctacgaactttaagtgtgaatagttcgggagttgtttttacgcacagggaaggtattagcaccccacgcatccgtcacaagggacgacagcctttaatcaagtgtgcaaatatgacttcaaaatgtnttattttcccttttttatgtctttntgtgcttttatgcattnttatgtttttaattttggtgtggtcgacaagggtgtctccttcgctcctacgtatnctcaattgcgatgaggaaatcagactta

SEQ ID NO: 127222 - DNA, 448 bp, Glycine max
  unsure (1)..(448): unsure at all n locations
ctgcagcttgtcacacgcggagatttacgtcgtcttccacgcagacaacctttgtcgagactaactcgtgaagttagggggcaggcggaattacctaagtggttatcccgataaacattcttttgctatctctaagactcagcgcatgatagcatgcggagacaaacgtcggcttctgcaccctttgtctatcgcggccaacaagcttgttcacacgcggagatttacgtcgtgttccgcgcagacaacctctgtcgagactaactcgagaagttagggggcaggcggaaatacccaagtggttgtccgtataaacattgntntgctatctctaagactcaaggcatgataccatgcaaaaacaaacgtcgtcttctgacccttttgtaatcgcggcaacaagcccgtcacatgctgagattacgtcgtcttctgcgttacaaaatct

SEQ ID NO: 127223 - DNA, 481 bp, Glycine max
  unsure (1)..(481): unsure at all n locations
gaaactaagcttggtactcaagttttgaagagtggaggggggactgagttttaantttattgcttagaaagaantattaattccctacatttaaattttgttagcaaataagtacctcaagatctccaaaacttgtattatttagtatcttcaaggaacattcaatcttttttgcacgtagacacagttgtaactcatgtgattcaaaataaaattataataccatgttctcgtgaagctttgtaaacatggtctgaaactagtaaatggggcaaaattagacaatacacagactgaaaatacaaatatcaagccaagtctaaagagttgtggttactttttcgagaagggtgaggaataggatctgaaataaaaataggtactattggaagtgcaaatattcaagatatatgatgaatagaagtccttaacacanaacatcctaaaacgatattttagacatgataggatttcatgaccc

SEQ ID NO: 127224 - DNA, 448 bp, Glycine max
  unsure (1)..(448): unsure at all n locations
gcttgtgcattcatatctttctaaagacttttcctcattctctggtatgagtggcaaaagatttgctatactaccttgatcttangtctattttcagttgtgatgaccttaaaagggtgttcttggagaaattcttccctgcatctaagaccactaccatcaaaaaagacatttcaagcatcaagccacttaatggagaaagcttgtatgagtattgggaaagattcaagaaattatgtgcaagctgccctcaccaccagatttcagagcaacttcttcttcaatatttctatgaagggcttagtaacatggagaggaaaactngatgccttggtcaacctagtaactcagcttgccatgaatcagaaatctacacctgttgcaagagtatgtggtctatgttcttctgcagacaccatatagatctctgtcttctttgtagaatctg

SEQ ID NO: 127225 - DNA, 481 bp, Glycine max
  unsure (1)..(481): unsure at all n locations
cttgagtatgaatcttgcaggtaagacaagaaataatcacttatagatcaagatcaccaaggtcaaggcaagaactcctcttcaagaactcaacattttcttttctattccttcaaaccccatggccataacaaagggaaatgaccatctctctctctcgctcagcatccatgacacacacacacacacacattcaatttcttttgttctctcataaactagatatttaggaactttgccttatgttgtgaactattaggctttaaggggttttagaggtgcgttcacacaaatttgatggttgatggggcttcgtgtgggcagccaagttatgcctaaaaaagggtgttctagcttttgcaactctgattatatttggccaaagtagactntggccaaaaatggaaatctcactctaaccaaaaatgataaatctctaggcaaaacataattaaaatatctacacattataaatctatac

SEQ ID NO: 127226 - DNA, 432 bp, Glycine max
gaccatgaaactaagctatccctgcttcttggccgcgttgcgagtatatcttctctatgtatgtccatccactgattgagtaaggagaaagagagccttcttgtctctctctcttgactccttggacgcctactctacacctcggcgtagagaggcttcaatttgctctctcgaaccattctctacgagataccacacatcttgagctcctagtaacgccctcatactgatgctccaatgatcataaaagctctgtgtgagcatccgtcattggaaaggaaaacctccattcaccatcatgtgaggaacatggagcactgataccactttgtcggacacaatgctgtttatgtatatgaaaagagtgtaggaatattggagactatgaataacaactctgtgcgagggatgattctttatggaggagagaac

SEQ ID NO: 127227 - DNA, 467 bp, Glycine max
  unsure (1)..(467): unsure at all n locations
ntacagcagaatttagtaatgacccactaacctagaatttttattacttaatgccattaacctagggaattaaaaaaacttaatggctgagtgtaactgaaattgtggcaaccaaaagtcacccccaacagccaacaagtcagccaccatttggtctcccaaaaggctgatgcctaggttgccaattgggcccttattacaacttgaactaaacctaactaaagcccttttagttgattaacccaaaacatatttttggtcagccaactttacaaggattgggccattatttagacaaactaaacactctaaaattgaaacaaagtggtgtcatttactcctcctccatttgggccatgatacaactcacaaccttggacttttcttcttgaaacttgggcttgtattcaaacagtatggacaacacttgttgaagagcttccttggctttccttgctctagccctt

SEQ ID NO: 127228 - DNA, 273 bp, Glycine max
acaaattttttccaacaacttccagtatcgccttcccacaggaccgggaaatataaggcaggtaaagcgaaatcattctttcattcacaaatcggcccctaataattccttttatataagtggttgaaacaaatagtagtccaacactaaatagggacctttttcggggaaaaattgcttttttcaaacacttcggaagccaaaaaatatattgatttttgaaacagcctacacacacttaattctgatccttcctgttctaatcaatatgtt

SEQ ID NO: 127229 - DNA, 446 bp, Glycine max
  unsure (1)..(446): unsure at all n locations
tgtgcacacgtnntgcagtcaaactttaataggcatgcctctggttaaaatttcggctatagcgggtctgcaagcgtacaaaagaccgctgcaatttttgtagacaagttatgctataagatgcttgtaatacatatgctacgtcgacacaaattnttgcatggaaaaaaatttctgtaacaaatctcaggctcagcacctatggctgtacgtgtttgtacattcgtattgaaagattctagttatataactgtagctatgtccgattagcttcaagtcctagaaatttaaatgtagtactttaccatgcagtttagatttatttgtataacccanaaattgtcactcgattcagtttttgggttaaatcaagaatttgttggatacgattgggctatgtattcggcatgctggctaaattgggtctctttgtaatttgggtattt

SEQ ID NO: 127230 - DNA, 347 bp, Glycine max
ctgcactttaacttgtcagaatgagctttgataccactgtagacaatggcctcaattcttaaaaggggggtgaattaaatattcaacctttcccctaataaaaatctatcttacttttacttaagttatgaattcccttaatgacaatcttcttaaataataattcaaatgaagcaacttgaatatgaatataaagcaataataaatcaacgagattaatggaagagaaaatgcaaactcagttttatactggttcggccacacccttgtgcctacgtccagtccccaagcaacccgcttgagagttgcactaacttgtaaattcctttacaagttctaaacacaca

SEQ ID NO: 127231 - DNA, 486 bp, Glycine max
  unsure (1)..(486): unsure at all n locations
atacggacctataaaactcagcttgtcaacgaccggcaagtgcaccgatcatgcttgtngttttatattataagcaaataccgagtatcgaactctcggggaacttgttttacttggtaaagctgtggtttagtaaatgagtgtcttgggatgaaagtttggtgtgtggtatggacaaatatgtaaactaaactattcaaaagcaaatcatgtgagtagtggtgtgtgatgacagatagacaacatgttgatctttctactgggtgactaatgttattaaggatgttctctacctaacaatgtttacatgttctatgttgtctcctggactactaaaccccgatgtctcatgcatgtttagcctaatcctaatcaagcgtcatcctcagatgtctcttgttagactaaacttaaccagaaccgcattaagacataacataacacanacttggttaccataccccgatgtctcatgaaaatatgata

SEQ ID NO: 127232 - DNA, 412 bp, Glycine max
atatcaaatcgttcaagtaataatgattatttgtaaagtatcatttcctcatagaattatgcgataattgggtaataattagtaaatttaatagactacaagtgtagaaagattaagtaaccaaattttaatgctattgcttaaaagaagaagcataaagaaaattagttgagaaatcaatgagataacctaagtccttttttcgaacagctggtatacacaaaaaattgagatgaaatcaatgagagaaatttatcatggtttaactccataaaaccatcgtcgacatctgtggatgaacctaaacatgcaatggagagtaatactaataatttacgtcatttacctcaatatttgcataataatttgtgtaatctgcttgttttgatgtaacacgaagattgtgatggca

SEQ ID NO: 127233 - DNA, 464 bp, Glycine max
  unsure (1)..(464): unsure at all n locations
actcagctgcttctcaaattcgctagaattaatttaggtttattatttggtgaactgagaaaggataaactctcgtaacctaggataagagacttgcttgtgaatcaaggggaagcaacgtgttttaattctgatattttctaattcaattttactcgctgtttaatttacaaaaaaaaaaaaaacaaacccccccccccccaattcattactattttcctactatctgttatgaacgtttggttgatcattgctcgttgggagacgacctaggatcacttcctagttactgcattttaatgtttatttaattagggtacgacctcgatcaaagagtgtaaagtagttagtgtggcattaattgctaagcatggaagggttcaagacttagtgttcttacagaagtaggtgacctanaggattaatgatattagttgtatgattagcgagataaatcttcgttc

SEQ ID NO: 127234 - DNA, 319 bp, Glycine max
  unsure (1)..(319): unsure at all n locations
tctgaataaaatgagttgatcccatatttctactccaaaggtagtgcgaatcaaatcacttctgcattttatctctagcatgcattcattattctttacctactcctcacatttcggttttttttaagaaaaacaccctaactaaacgcgccccaaggcatccctatcgcaccagatccaaatctagaacgatgggtgatcaagaggagacacatgaatagatgaaagccgacatgtcgactctgaaagaacaaatggctttcatgatggatgccatgttaaggatgaggcanatcatggagaaaaacgtggccaccgc

SEQ ID NO: 127235 - DNA, 486 bp, Glycine max
tacgcgacactatgaatactcagcttcgccagccaccctcattaattactataggttcttttgaatgtagacaaagttcaactacgttgggattcgaatgagcatagcaatagcggaaggtagaatgagttagaattgatgaagatctcttgctactctgttgacaatattccatgcatcaatggtatactatgggaccaactagcccatccaatcaagaatataaagtcttgattcttgatgaatattttgtattagagaataaaggtgaaatcaaggggaatcatttggttgagaagggtgtgtgagtgttataaaccctctgatagtgtgttcaatgatagtgtgttcaattcctacttataaaatagagaacaaatgtgaaaataatggtgatgacaatgcttcaaaagaagtttagtgatttgataagagttcaacggcgaagaaggctaaagaacagttatgcagaaaaatatcaatcac

SEQ ID NO: 127236 - DNA, 379 bp, Glycine max
  unsure (1)..(379): unsure at all n locations
ctatgatcatcttaatctttacactatcagcttaaatacaaatccatattatggcccaccacccaaaagtgccatagacatgaaagcatttcaaagggacaatgacaaaaaataacacacgtaaatccaattatttgtaacataaacctgggggagaattggtttcacaaatctttcccagtttttatgtttatcaagtacacatattgataggctcatgaaggccatgacagaaaaataaaggaaaataagccaaagtagttagagtagatatagaagtangtagggttggtttaatattagttagttactggaatagtttgtggctagcttacatagcagaagggaagataagatcactcattctgcattggtactt

SEQ ID NO: 127237 - DNA, 459 bp, Glycine max
  unsure (1)..(459): unsure at all n locations
tgactaggcgagtngattntagccttagttntactttagttattaatcaanncgattaagaatgagaaatcccacagagaaaacgtttgattgattttccgctttatttcactaaaaagatatttttttgattattatattattttttacctctttttgatttccaacgtggttacggcacgaccgaacggtcggaatttattttaaccgaagttaatggataatacaattcaaacgttcggtggaaatttattttatttttaagttaagcgagaaatgacttaagtaaaatggcttaagcacgtcaacagggggtataaaaagtaaacaaaacgagaataaaaatgcacgagacacaatgtggaccactacgggtacatagaatgaatcgaatagcttggttcgaggtacttacccgtngaagatcgaagaacgatgaagaacgaatgaagaacgtcg

SEQ ID NO: 127238 - DNA, 420 bp, Glycine max
  unsure (1)..(420): unsure at all n locations
gctctctgccaatcacacaaacctcttctccttaccactcacttgcatttntctttggggagccaaacctactaactctttctctctctgcactatctccttcacaagggtcctcttccttaacccatcaatctcgaaaacctaaactcggcctttcctgttgtaatgttagagagagagagagacacacacacacatacaacanatttactatggatgacactgttaacctttgcaccttgaccaccgcaccgacaattgttgtagtcgataagtctccctttctattgaagcttcgattctatgcctttgcttttgcttcccatcagaatggtttgtgccatcttcttctcttgctaaaagctctgcatcggaagaaaggtctctctctctctctcttcctctttacggatgtatctt

SEQ ID NO: 127239 - DNA, 477 bp, Glycine max
  unsure (1)..(477): unsure at all n locations
ctaagctttagtcttaggaaactacgcaggttgaattcctcatcgtacctgtttatacatangagcaagggcaacacccttgttgacccccaaaaaataaaagaatataaaaagggaaaagtaaataattctgaagtcacgttgcacacactcgattaaaggctgccgtccctcgtgacaagcatgtggggtgctaataccttccccatgcataaacaactctggaacccttcttttcaatattcgcagacctctttttggtttttctaatgttttcctccaataaatgttggtggcgactccactcgttttctcccttggagacgaacactntggcttatctattttgcttttgccctctcgtcgaagggtaggttgtgacagatggcgactccactgtggacttgttagagagttaagctattcgataagtgtgcaatggttatcatgacttcttcattcatgttccattntctc

SEQ ID NO: 127240 - DNA, 419 bp, Glycine max
  unsure (1)..(419): unsure at all n locations
acaagtacacccactataaaaaaaaagtaaatagaaaagttagtggtagaatagaaatgttgaaagcgggaactattagatcaagagtaaacccctattctatccctatcatattagggaagaaaaaaagatggcatgtggagattttgtgtggattatagggcattaaataagattacagttccatataaattccctatctctatgattgacggctgttggatgaattggctagggcagcaatgttntctaaattggatttgaaggttgggtatcatcaaataagaatgaaggaggttccatgaacagctttccagactaacgatggaacactgagttcctagtgatgccatttgaactcatgagtgctctctcctcttttcaatccttgatgaatgaaggaataagaccctactcat

SEQ ID NO: 127241 - DNA, 483 bp, Glycine max
  unsure (1)..(483): unsure at all n locations
cactctgaaactcagcttntacatattaataaatattaaatgcatatgattttttattttatataangataatataaaatatttggagtcatacttcatcatttgtgtgatttttaacataattattataaaaattaatcaatttatcatgagttataattagataattttgtaaaactatgttaaaagagtcatactaacgtttttttagtgtatcgttaagagaattatagtaccatgcagtaatacttctaaagttttttgataatttgacaacataaatagttacttctatatccaatccaactataatgttctatcgaacaattcaatcacgcaaataacactgaaacacttataacatgggcaactaagcgcatgcgtgtttgaattagattcgcgttatgtccatagagaagcaagctagtgaatatagctgctgcgttattttgccattntaacgcgattntgctgcctgaatgt

SEQ ID NO: 127242 - DNA, 424 bp, Glycine max
  unsure (1)..(424): unsure at all n locations
gattcatcagctgcgagtcacatgttattcaatgaaggtttctctgatgttgcaaacttactcaaaatgtggctttatcttaaatcaaaagatggatatattatggttacgtattttataatactttaaggggaattacattgagtattaaatggaaaataaaagtgagttagaaaattaagaactctgcccagtatgaaacctagaattccttttggattaattaaagattaacattataaccttggcatgaaattgtgtggtatatccccatgaacacaggaccgtgtctaaacgtttcaaggcgaatacatntaaagactgataatntaatataattgatcaaagttcattcttttttaccgattacaaaattactattcaaagttatatatataattaagtgtttctaaacttttactat

SEQ ID NO: 127243 - DNA, 471 bp, Glycine max
actaagctagcgagttctaagctgggattggtctataactttcgattatcaagtttctttccgcttaacgagacaaagtagcgcacattatccctagcaatgaatcattttagatgctctttcaagttctaaggatttaccatattttacaatgcttaaaccctaacataacatataaatggatgatcaaaccaagtacatataaataaacacaggaaggaacaatgaaactagcaataacattaaatagatagtaagagtttttacatcaagagagtttagtggaaagctcctcaaccaagggttgtttagcccttcatggtcatgaagggctcaaatgtacaaaggatgtaaaaagtgaagggataaggaatgaaggtgaatcacggaaaaagaatggattcccaatgattgtcttcttcctccagctcaagctttagggttttttctcgtctctcaactaactaccta

SEQ ID NO: 127244 - DNA, 398 bp, Glycine max
ctggtgcatgcgcgcatcatatgccttggtctgtgaaatgaaattatgggtgggccatgttggttctctggtttaagaagtgtcaaatgaaatttgctagcatttttctgctcaagggttggagcttttatgcaggctttggagcaatttctgctagcaatttcctctgcatctatacaatttccatgatagtaaggaactattgatatggactaagaccactgttaaaccttacaacagcttgtagagtttgaaaaataatcacatgatttaatgtcatgtttcttctctttctcttataatttacacattattttggagctggagcttcatgtatttgaacttcgaattagagagagaacaaggaatgaccatctactttagtgctcttttcttcc

SEQ ID NO: 127245 - DNA, 482 bp, Glycine max
  unsure (1)..(482): unsure at all n locations
actaagcttttgcatcctagaaaaccatgaattgattggagcctagctctctntattagctctagcaaagtccttcggattcagnttgtgtgttcttgactgtatggcatgagatgaattgcaaagattgagacttgtgttagttgttgattgttgaataatcctaaacacttgtgtttgagtgaaacagtagttgtgaggctttggttaatgatccttccttgatatttgtcactcttactagcttatttcagttgtgttccttaataatcatgttcacatctttgaaaagttacatgtcttgtgagaagctgttgattgaagcattgtattccattcatttcatgtgattgaattctttagagcaaacaccttgtgaataaccactgtgattntgtcacttgagcacaagtgagttgttctttctttgcttgaggacaagcaaaactggtaaattggggagtttattagtcgtcttatac

SEQ ID NO: 127246 - DNA, 416 bp, Glycine max
  unsure (1)..(416): unsure at all n locations
tctctctcctatnagtatatatttatgttatttgaatgaaataaaactcagctagggaatgaaaagttttccttctcacatatgcaaagcttcaagtgcatgtaagcatgttcaaataaaaatattcatcaggtgtgattaattactaattagctcctgtgctattcctagaatttgggattgtgggcttaactcaatcccacaaaattaacttataaggtgaggattgtctgagccttatctataaggaccacaatggtcatatcaaggtgacattggacaaaatacaccggcttaaggctacaattaatgctgtcctaagaagctgcgaataaggcaacacgcataaccaactggaaaggtgaggattattcaagccttataaagactggattggtcatgtctctagtcgatgc

SEQ ID NO: 127247 - DNA, 482 bp, Glycine max
  unsure (1)..(482): unsure at all n locations
actaagcttcttatcaggctcatcttggtggggaagcacacacttctatggctttttccttagngganggcgcctcctctcgcctcttcttctttgtcttccgctgcatctccatggtggaaaatcaccattaaaggacctcattgaagctcaaagatccagcctccatagaagccccacaagcaagcttccatcataaacatccttatatgcatcagctggtctgttagaaagacccaacacttctacctactgctatcaattttacttacttgcatttttattggttttatcctagacttagtttaattttgttttacaccatcaattatcaatgtttctttcaacaatgccttatttatgaaattaacccagtcttagactagttccctgagttcgatacttggattcatccattttaaagtttaaataattgacgatccgatgtactttccggcaaaccagattttccttgaacatat

SEQ ID NO: 127248 - DNA, 428 bp, Glycine max
  unsure (1)..(428): unsure at all n locations
ggaccctaagcaccgcagctgcaagctgcactttttatttgtgaacatagatattcaacttttttattgacgtcaactaattcctctcattgatcggtctactaaaaaaaggatattacaaaaaaagggatataatattttcatatagcatgcacgcaaatactagctactgcaggtttctggaatctcatctacgctggaaatntccacttgtactgcgaaatactctacccctgtgagtctgacactcgtggagaattataataacttcgaggatgggaaataacatgctcatgttctggaagaataagaacaagaagtcaacaatcatgaaatgaaaagatatcctacaataaggaagcaataagaaaatgaaataaagaaaagaaataacccaacagcatcataagaaagataatcttctaata

SEQ ID NO: 127249 - DNA, 213 bp, Glycine max
cctattcgatccaagcggctttgtgacctagataattcacacgtaacttccaggtgtatttgtctcttacattacacaccctcttggcgtaagtctacgaaatgcatactcatagcatttcgggggacccaatattgcgcatgtgcacatctgggtatatctaatacctatacatacacaaacttcacgatgaatcctgactatcatacacaa

SEQ ID NO: 127250 - DNA, 464 bp, Glycine max
  unsure (1)..(464): unsure at all n locations
cactcaagcttgtcttttataaaatgagaagnnctggactcattacgttatctaaaaacctccgggaggatccaagngcaccgatcattcatttgcatattcatgtttgggtggcatactcacctttgtttatttctttaggaaattcatcataactaagaaaacaccaaggcacccctataacactcgatccataaaaatggataatgaagagggcgtgcaggaacagatgaaggccgatctatcggccttaaaagatcaaatggcttccatctcggaggtcatgttaaaactccaaaaaaccatagaggacaaagccacggcaaccgcctccagtacggttagggaagcggagccggtgctgcaacccgctttaaatccgggccgagacagatacacggccgtgccactccggaagattaagccaagccctactttgaggngaacttccgcctatgacacta

SEQ ID NO: 127251 - DNA, 227 bp, Glycine max
cttttttaatcaattttttgacagaatactaagtagacttcggtgaacaatctaagtcagtgattagaatagatcatagatcatttggggaagaaaagctccctctcagccggccgattggatcagccctgcctattgtccgagtagataaacataatagcggtgggccataaaagcgcgaatatgacaataaatattagactaaaagggcaaaggtaaaaatgaaa

SEQ ID NO: 127252 - DNA, 454 bp, Glycine max
  unsure (1)..(454): unsure at all n locations
aactaagcttgaccaaatctgctaccataacctttttttattttgtttatgtcanccnnaccctcggaagcacaagcgaatataaagaaaattctcactcacaaaataattgaacgaaaactttcactgtatagcaaaactaaataagaatgaaaattccccattcaaagagtgngataaagctaacagaaaataaaggatattcccatcaaagaatgggagaacgttaaaatgaagaataataatgaaagaaagctcctgatcagggatcgaaggaataacataagatatgtgcacagaggtctttagaccagacaatatctgaacaatacataattgtcaccaaatgaacgaatagaagaaagganaccacgacctataatgttcttcttcctttgattaccaaccaaaattccgtgcgctagcgactttttcgccccgcactagacaaata

SEQ ID NO: 127253 - DNA, 359 bp, Glycine max
gcttttcgaatcattctatggacccggagtggtccacattgtggttcgtgcaattttattctcggtttgattactttaataccccctggtgacgagcttaagccattttacttaagtcatttctcgcttaacttaaaaataaaataaatttccaccggaccgttgaattggattatccattaacttcggttaaaaataaattccgaccggtcggtcgtgccataaccacgttggaaatcaaaaagagggaaaaaataatataataatcaaaaagacatcttttagtaaaataaagcggaaaatcaatcggacgttttctctttgggatttctcattcttaatcgaattgattaataact

SEQ ID NO: 127254 - DNA, 444 bp, Glycine max
  unsure (1)..(444): unsure at all n locations
ntatgaaaatatggtgatcatggtttctgtcacagacattatttccactttccatgtctccttctcaactcctacctatagacaactatcggcaacgtcacccgcaacaacccgacgccatgtttttaccgtggatgttgatgaagatatgctgcaacagaaaaagccattggtaggtgctgccagccgagggttaatgtatgtgctgccaccggaggctttgaaatatgtcaaatataaacgatacatgaaggtggaacgcagtagtcggaggcgttgcctgtggaagattaacgtggaaaacagcgtccgtactcttgccgacccatggtaccagtacttggcggacaatgatttcatgtctggagatgaggtggtattntactacacattaaagaaacatggatgggacgtcctgtataggaagcaactgatatgggatga

SEQ ID NO: 127255 - DNA, 372 bp, Glycine max
  unsure (1)..(372): unsure at all n locations
gggtatgactcctaaaactttccttcaaatgtggctgaatatatttatttatatgattatatttatttataaaaatccatggttttgatgttgatggtggggttcattttgcttctaagtttattggcatggtaagttgattgaattttctgtaaccttttttttaatcaaaatcatctcatacttaaataaggaaaacaaccacattttttgaaagacatatgatttgtcatttcaaatatttgaatgacatttangagagtttgattaagtttaaatattgaggagatgcatgtgtaattttttaaatttcacgaaaaatttgtataggtttaaaaatactaatgattatttgtccatatctttttttgt

SEQ ID NO: 127256 - DNA, 385 bp, Glycine max
  unsure (1)..(385): unsure at all n locations
tagtgacatccgtgactngatcntattttttatgttctcttgagagattcangagaatcttccagtcatgtttccaattcaacattgaatactgaaggcaggggaaggactacccacaagggtcagaatggtcgaggcagatcaaagtcaagagggaaaggtcagagaaaatttcaaagtgaagttacttgctggaattgtgacaagagaggtcactttagcaatcagtgcaaggcaccaaagaagaacaagtcgtacaaaaacaagaaacgtgatgatgatgaatccgcaaatgcagcaactgatgaacttgatgatgcattaatttgcagtttggatagtcctgttgattcatggatcatggactcangtgcgtcgttccaca

SEQ ID NO: 127257 - DNA, 428 bp, Glycine max
  unsure (1)..(428): unsure at all n locations
acaacagatantaaacagcttattatttctgaacaatatatataataagacaactattctaacatcaatcataaatactaaatacagggactgcaaaaacttcaaaattaaccagtgcttagctccaaattgcatcatcaatagcctgtggctctatgttcacgtgaaagaaagaaagaaatgaatcacacacaatgtgcatgaagatactacataggctccatcatgatgcccacctccaaacaaaaatatgttgataacagagtacaaattaaatcccagctttgacacggactaacagctggaaatcccatattatgggctgcaggtttatccacttaataaatagtcaaaaactgacacagccacatcgcagaaggtcatatgagcaataatttcctgatactagttattggttgtacctcaca

SEQ ID NO: 127258 - DNA, 452 bp, Glycine max
  unsure (1)..(452): unsure at all n locations
actcagcttgagatttgtcagaaatctagtactctcatgccacaatggttttcttttataccacaaataccttcttacagaatatattttatttgaacttgataggattactttaaatgatgcaactctctttttaattatttaacatagttgaatatcttgaattcaaattcaaaacatctaattaaaccgaaataatttcatgtgaattgatcgagacttggtggtgtcacaatgagtttatacccatttaagttgacaagtttggaagttgaattagccagaactcttgcaaagtcaaatcgtactatgtttctttctctcttgtttttctggaatcccagtgaatatacgatgaatttgtgtagtggcaatgtgaataaaaattcatgatcaacaaaaggcaacagaaagtgacccacttgttaattgttatgtcacctttntatcta

SEQ ID NO: 127259 - DNA, 457 bp, Glycine max
  unsure (1)..(457): unsure at all n locations
taagcaccgcggctgcagcttacaggactacgcatgggngttttttcatcttcgnctatgtgatgntctttcgcttcctctatctttntggtcgggcatttcactttaagtccttggtggtcatcttattctccatgtatatcctccattgtcttggggtttgatgctgcttatagtaaatccaaaaaaataaatcgattaaatcttagatctacacttgctcttgcatttctatggttcaaattttatagatctactcttgaatcatgtttttatgttgattttaggttctatcatttttgagtcataatcttcttgtgctgaacctttagatctcaattttctttgcaaatattgattagaaaaaaaaaacagaaaaatctaagtgtaaatcacttaatccatgttgtcttagagtcatgtttagtcataatactngtcacattatgttctaagt

SEQ ID NO: 127260 - DNA, 468 bp, Glycine max
  unsure (1)..(468): unsure at all n locations
tataagaacanaattgccttaatatttncaatatgcatgtatttattacgcatcaacaagaatcaagccaaggctattgtgcaagcaatcaatggggccaaacacaccaaatgattataatgatggatggctcaaattctcacaaaggtaaaatcatcactttcaaattgagctttcaaaactatcatgacatgtagagaagaatcaaggatttcaagtcacaaaatgtcaagaacttttattttcaaaacaattacccatttcttgaacatatcctataattcaaagaanaacatgcaaagtcgtacgtgcacacaaaattgacccaaaatattaaactgaaaatccgacgaaactaacaacattaacaaattaacacaactaacaaattaacaaaaccaacaaaactagcaaaaccaaagaacactcccccccccccccatacttaaacaacacattgtcctcaat

SEQ ID NO: 127261 - DNA, 450 bp, Glycine max
  unsure (1)..(450): unsure at all n locations
agctcgtntctacatgtataaaccaattcaactcttttaatagcatattgttgttgtgcaagtaatgcttccaaattgtttctccacatagtgaacttggataaaggttttagcaagcattcaacctttacttctaaaacatacatccttcacaaacaaagtgacattagtggtgttagtgcaattacaagaagagttgttcttttctttttctaattttttttttgctttttcttccaacaactctttttgaatttccactagtttatccagatggaacctcaatttacattaaagaagattatttgcaatgaccaacttttgtgcttcttgatgcatttcattgaaaacatctagtagctgatcatagttatcatcatcatcactttcagcttcattgtttgccatcaaacacaaatnttcttcatcctcttcattgntgtcactgga

SEQ ID NO: 127262 - DNA, 472 bp, Glycine max
  unsure (1)..(472): unsure at all n locations
ntagccttttactttntctccgtcttttgtttggcaacttcttcatctagcttcctatgaaactcatcaccataatcatctgtatcagatgataaatgaatatggctaccaggtggcgttaaaggacaaagaggtttccaaccaattgtcttcttatagaagtagtccctaattaggaaccatttgtgagcttccttctcagcataagcacgatcctacaaggcttgagcaagggcttcttaggttcttgctagtttaacttcaagcaacttcagtgagaagtaacttcagccttatattcaatttcttcaatgataggatccacatggtgtgtgaagaagaatntggagaatggcaagacaccatanaaaagaaggtgtgattagacatagcatataatttccttttccatgtataggccatgttgaaaagagtttcttgagtaaagcacgtatgattcatggtctgatag

SEQ ID NO: 127263 - DNA, 442 bp, Glycine max
  unsure (1)..(442): unsure at all n locations
gcttgtgctgcattcttcttcagctctttcttatgtctaataacctcaccgagtaatgacgctttgtccatctatatgttcaaaagtaaaaaaaagagatgttcaaaacttcaaacagggaatgcattctttaaaatgtttatttccactgacatctgagcataaatcaaactataagcacaatntcaagttcctctcgcccccttttaggaaagaaaactcaaattgagtccttgacaatcaaaagcaacaattcaactaccaactagcatagttacataccaaaatttcaagtttccaacaattcattcgtacacaagttgagatggtaatggaagcagaagagagtgctaatgagtttaattgctcaaaaaatactccaataagtcaaagctctgatgaagatgaatgcaaacacgatatgtaccanatccatcaaact

SEQ ID NO: 127264 - DNA, 459 bp, Glycine max
  unsure (1)..(459): unsure at all n locations
tatgccgcanatatttacaatagacctcctcaacctcaatttttaatctaccacaacagaataattatgacctctccagcaacagatacaaccctggatggaggaatcaccctaatctcagatggtccagccctcagcaacaacaacagcagcctgctccttccttccaaaatgctgctggcccaagcagaccatacattcctccaccaatccaacaacaacaacaaccccagaaacaaccaacagttgaggcccatccacaaccttccctcgaagaacttgtgaggcaaatgaccatgcaaaacatgcagtttcaacaagagaccagagcttccattcagagcttgactaatcagatgggacaattatctacacaattgaatcaacaacagtcccagaattctgacaagctaccttctcaagttgtccaaaatcccaaaaatgtcagtgccatttcat

SEQ ID NO: 127265 - DNA, 250 bp, Glycine max
agctaccaaccttttggaattgatacctaccgacatttgtgggccctttcataccccttcagggaaaggtcaaccgtattttatatcattcctagacgattactctagatatgcctacttgtttcttatacatgaaaagtcaccatctttggatgtgttcaaaacatttaaagctgaaagtgaaaatcaactcaaccaaagaataaagtgtgtcagatctgaccgcgatggtgaatactatggccaatat

SEQ ID NO: 127266 - DNA, 487 bp, Glycine max
  unsure (1)..(487): unsure at all n locations
aactcaagctggaaggcgtgtaacctaccaacttctcatagtagaaccctgtttatgtttctactatgattgntatcatctccctctccatcattgggggaactacttgagctgccagattcctccacctttaggcatattctttgaaagattcatattctttcttgcacatgttctgtagctgcattctatccggagccatatcagaattgtactgatattgcctaatgaaggcaaccattatgtccctctatgaatggactcgggaaggttccagattagtataccaagtgacggctgccccaataagactttcttggaagaaatgcatcaacaatttttcattntttgagtatgcccccattttcctgttgtacattntcaggtgattcttgtggcaagtggtccccctgtacttattgaaatccgacaccttcaacttcggagggataacanagtcgagcactagacacagttctaccatgtc

SEQ ID NO: 127267 - DNA, 335 bp, Glycine max
cagccttttggaggaatcttctggaaggcccaaatgggcctggttgctattagcacccccatttttactaagtacaccccctggcttttttcttggtgattctctttttcgtaaaggtacggaaaattacgaatttcctaacgatactttgtttctttctgtaatgttacggaaccttgtgggttacataatcatcccctttttgacttacggaatgttacggaacctcattaattgtgcaacgatgcttccattagatttctggtgtgtcacggaaccttacggattgtgcatcaatattttcttttgttttccgcatgttccgaaatttacaa

SEQ ID NO: 127268 - DNA, 405 bp, Glycine max
tcctcggggccatatcctgcgaaagcaacatttgtattgtttttttaccaaagaatgctactcttaagacaaatatggcatacaacctccttcaataaacacaaacatcaatgtaagatttagagcatactcatgcacatatgtccttacgaacattcactcgcacaagatattcttctaactaagaaaaatgctcccatgcacaatcaatgcaccttcgttacctagattatatgtatgtacttccaaggtgtatgtgctacctacatctcatgcacttccttggctaaatgtacatacatgcgtactcaaagcattgggtgtaccaaaaattgcacatgtgcacattccggtatttctaatacttatgcatatactaactatgtgatgaatcctggctatcta

SEQ ID NO: 127269 - DNA, 310 bp, Glycine max
taaaagcacagtcttcaaatgttagtgagatcgtgcaatctctaactccttcactcaattgagtggctgtacttctataatacataactagtgtccaaacgtgagttatgccaacaaaatgcatgcaaaattacacaaaaactcacaaaataccactcacaaaggggatgatcaacaaccacattgcttatgagaaattacttaacctacaccttctccttgtgttgcccgcatagcttcttgagaaactcatgaatgggggagagggaacttgtttgtgtgactccgattgaaaatgggattcgcagac

SEQ ID NO: 127270 - DNA, 463 bp, Glycine max
  unsure (1)..(463): unsure at all n locations
ntgtatctctaataaacttgagagatgtgtgattatatctctggatattaaanggctacctcctcctattgataagttaaaattgaactgtgatgcctatattatcctggactttcttgtttgtttgattttcacttttgctgttaatatgggtctttttagttttaatggctgaattatgggccatgtgtattgtgatctccatagcttggagtaggggcttcaaatactttttagttgagagtggttctagctagtgatttcagttctgaagcatggatgtaattcttctaacctctcttatagtattgcccataatattcattcattctttgacagaggaggtgtttnttagtggcaccatgcattgcgagaagcaaatcaagtggcagacaacattgcanaccatgaaatgtctttagatgataattggcatggttgtgatattgtttacctcttgttg

SEQ ID NO: 127271 - DNA, 389 bp, Glycine max
  unsure (1)..(389): unsure at all n locations
ttccactggctattaacccttttatgaaaaaccaggtgccataggtatagcaaattccctaacaaccaatcttgaaaagcgtaaatgtttatcatttttagctcacgtaaatgaactgaatcttggtctttttcaacgaactataactcaaggaaatcaagaatcctcatgaaataaaaaatttgtttggcattaatataattagtttagtcatagatataggcatatagcacactgcacgtcatctaatatgtctttaagacttctatgngtaaaaaatgaagtcgtttgaatgccataatggcaagcctccaaaagtgaaaatagttaaataagtcctaaattgtaatgctgattgcatggttgggttcaagtgttcacttatctta

SEQ ID NO: 127272 - DNA, 426 bp, Glycine max
  unsure (1)..(426): unsure at all n locations
acacgtattccatnntctgcacaaagcccacaaccatttaatatatgtataacatcattccggtccattcctataaagaaacaagctatatcaaggaatattcctttctctgtatcatcagttaaaccatcatagcttatttttaatttctcttgtacttcatcattaggaattttcttaagtttctccagtacattattccactctgttacctccatatcaaacaaataggacccaaggacttcaagagctagtggcaatcccgcagaataagcaactacatttctagaaagttcaataaaatcttctcttggacttgcttgcttaaatgcatgccaactaaaaagctcaatagattcgtcttcatccattcctttcattctgaacactntgtcaactcttctccctctaattatatgcatatct

SEQ ID NO: 127273 - DNA, 333 bp, Glycine max
tatggaggctggatcttttttcttattgttgtcctgcaatggcggttctccaccacggagatgcagcggacgacaaacgagaataggggtgaggaggcgccatccactacggaagatgccctggaagaagagctccccaccaacatgatccttgtatattacgcttggagaggatgcttctctggacgaacataatgacggagagaatgacagaggggggagctccacattgaacgaataaacagggagagactttgaactttcgaggatgtctcacaggactctcattcgtacgagcgacaacaagtgttacacatgcttctatatatagac

SEQ ID NO: 127274 - DNA, 264 bp, Glycine max
aaggatattgcttattaataaaaaaaaactgaattgattacttaatatccaaactgcatataaatgtcaacattggtactgctttattaggtacataaatggtatgaaaaggagctttacttagaacccaattcgtccatcatgcaactaacatgctttggaaaatcctttaataattaccagggataatcaccattattgctttcgacaactcacggttggaagatgttaatctttggtatgaataaatagtatgtataaaat

SEQ ID NO: 127275 - DNA, 395 bp, Glycine max
  unsure (1)..(395): unsure at all n locations
tggcccttttatatatacctgcacgacacacaatacctgctatgaatttgattgagattggnntatacacacataagaagcactgtttagtttatcactttcaggtatcattgactaaatttgcgggcgtggagaggaattacgcaattgaatattgctgttctcactatatatcgcattcacatttatttgtttatgatccttgcttgatgggtcatgaattcagcttttctttaacagaaaatgcggcctttcacaaggattgaaatgattcaacatcatgaaagtggctttagtgagatgtacgtattattgctgaagagcacagtagagacagtagcagataaccataaagactctggaatatgtaggttcatcaaattaaacggcactga

SEQ ID NO: 127276 - DNA, 291 bp, Glycine max
ctaagcaaagatcccaaagtcctattaacaacttccgtttgcccatcggtttgtgggtgacaagtggttgaaaataacaatttagtgcccaacttgctccacaaagtcctccaaaaatgacttaagaacttagagtccctatcactaacaatgctccttggcaaaccatggagcctcacaatctccttgaaaaacaaatcagccacatgggaagcatcatcaacttttttacatggaataaaatgagccattttagaaaacctatcaacaaccacaaaaatggaatctcta

SEQ ID NO: 127277 - DNA, 467 bp, Glycine max
  unsure (1)..(467): unsure at all n locations
gaccttgaatctcagctggattgaaganatagcaaaactatggatcttaattttatcaataagataacaaagtatggactttagttgaagcttcaaaggttggttgtaaatgggtttacaagaaaggattggagcaaattggaaggttgaaacctacaaagcttgcctttgtgccaagggatattgtcaaaaggaaggtataaattatgacaaaacttttctccgtggcaatgcttaaatcaatttagattctttttgctatagtagcatactatgatcatgaaatgtgaaatggatgtggaaaatgactttccttaatggtgggctaaaagaatatgtgtatatgacacaacctgagggattcacatgcttgtctgatcataataagtgtgtagaaagtgaagcattcattntaacaagataattgaatggttcaatctttgtagctatgaagaactttgtgagta

SEQ ID NO: 127278 - DNA, 310 bp, Glycine max
gaactaccactatcaaataatatctgaatcacctgccattaattgtaccactaaacttcataattcctatgctagaggaacctttaaaggcattataagaaaggtgaaggtctaaattcaaatttcccatctcttcctcaattctaggaggtaggtctgggtgcacttcagcatttttcatcctcgtccatttgcaataataggtattgccggttaggacacttatgagaagaagtgaacttctcatcacatgtatagcatagccctttcttccttcggatctgcatttcagctggttaagtaccgtttg

SEQ ID NO: 127279 - DNA, 466 bp, Glycine max
  unsure (1)..(466): unsure at all n locations
cgcttggaagttgaagccagcactgctcagtctgattggctcacaccctttcattggaatggatcatcaggattcatacacgcatttgtctaccttcttggagttgtgtagtaccatgggagcttttggcaaaaatgctaaagttgtctacctcaaagctttcccattctccttggcaggtaaggcaaagacatggctccaatcacatctaaacaaatgcctcaacgcttgggaagaggtggtagaaaacatcattgcaaggttctttcctctatccagattcatcaggatccattgctactttttcccaaggatctgatgaacctctctgtgaaacatgggagagattcaagtctttgttgcagaggtgcctaaaccatagttntgatgatgttgcacaactacatattttctacagtggtttgaaacctcagacaaagatgattcttgattgcctcagttggag

SEQ ID NO: 127280 - DNA, 430 bp, Glycine max
  unsure (1)..(430): unsure at all n locations
aacgttcagaatctgctggtaatcgattaccatatatgtgtaatctattacacagggcaaattttgaattcaaattttaattgcttgttgtaaatcagttttggccactggtaatcgattatatcctctggtaatcgattaccagagaataaatttcttgtaaaagacattttaacttaaaatttttggccaaaccttttgctacttcaattggaattcccttcctatttaataaaccctttctaagactctatagactgtcttgatcatccatcttgaatatctttgattgctttgtcttaaataaagctttgagacgcatgtgaaccttggcatcatcacgcatgtgaacctttggcattatcaaaacattcagcttgatcctttgtctacaatctccccanttttgatgatgacaatccctgaaatc

SEQ ID NO: 127281 - DNA, 470 bp, Glycine max
  unsure (1)..(470): unsure at all n locations
tatgcgcatatnntccttacaacgttctcttgcacaagacattctatttaccttaaaaaaaaatgcacccatatacaatcaaggcagcttcgttacctagattatttacacgtacttccaaggtgtatttgttacttacatcacacacctccttggctaaattcacatacatgcatactcaaagcattntggggtaccaaaaattgcacatgtgcacatcttggtatttctaatacctatacatacacaaacttcatgatgaatcttgactatctacacaataaggtgctacattttatgctcttttcaagtttttgctacctaaagccgcatgcaaattcaagtatattttcctttgctgactaaaattgtattcaaattaaaaggtatacattntttggtaatgtatcttctntacataacatgcaacatatttatgtatatttttttgtgagacatattgactacca

SEQ ID NO: 127282 - DNA, 452 bp, Glycine max
  unsure (1)..(452): unsure at all n locations
ctgcagctggactggctagaagaanaccaatgttttatgagaacaattatccttttctagggtaaatttgggcgttgaggagtcaaattgtgattcggtgaaattttaggcgtaagtccagtttgaacaagtttaaattgatgttatggactcgtgtgaggtgaaagtttgctccaaatttacctcattctcaatttcacttctcaaacctagaaaacccattgaattgaggggttttggacacctaaattctgtgtgctgtgctttaaagcttgactttggtttaaatatgattgatacatgatttgggacttgtatgatctgatttgggcaagattggatgagaggaagtgtgatttcgaaatctgcacttatgcagtaatttgctgtcaaatatgtgcactagaagtttggctttgtgcagaaaaatgcttgtgtgtggtgggcttgtg

SEQ ID NO: 127283 - DNA, 477 bp, Glycine max
  unsure (1)..(477): unsure at all n locations
gaaactaagcttgatcttccgcaccgccgccaccatcatcttagatcttatttntatattattagtacttngattttcagccttgtattttggctatattattatggtatttgaacaatttccttatttgcatggtatatggtatttgaacaatttactatttccttatttgcatggtatgtttgaacaaatattaagtatgttatttgactatatgggttttatagttaatctatctatgattgttacttcatgattcttgcttcatggtttggttgatatttttccatgaagattgtatagatgattaatttatatctgtatactttaagtttgatacgcactttggctttttgttgatgccaaagggggagaaaaatgggattaaatcaagaattcacatgagtaatcaacttaattntaaagataagcataaattcaaaaacaaagggggagaatntatgtgagtgatcgact

SEQ ID NO: 127284 - DNA, 425 bp, Glycine max
  unsure (1)..(425): unsure at all n locations
tctcatatcctactcttgatcaagaantggagctcttctatactccactataaccagacctgaagtaagttttgctggaaacaaagtctgtcaattcatggccaaccctcttgaatctcactggacagcagtgaaaagaattctcaggtatctcaaaggctctttacaccgtggcctacttctcaaagctgctactcctggaattcccattcccattaaggtcctttgtgatgcagactgggcttctgaccctgatgatcgcagatctacttcaggagctgctatttattttggccctaatcttattttaagaaacaacagattgttgcaagatcaagtactgaggctgagtatcaaagtctagcgcaagccacagctgaagtagtgtggattcaaactctgctgactgaactatctgttccttt

SEQ ID NO: 127285 - DNA, 471 bp, Glycine max
  unsure (1)..(471): unsure at all n locations
ggtagaacaggtggtcatgatatatgtcanggtttggccttctgttctatgtataaggggatgtcctacattatttccatgatacacatgcaacaatgatgattaagaaattttatgcaaaactggtcatgcatgcacccatgtggacactcaagcatcaagtttttatggtcatgtgacactanggctcangatttattttccctattttaagtcaacccagtatttccaaaatatgttcttctatcaatntgtgcattcatccgagtctatcttgngtgttcgaaaaacttttcacagcatttacccttcaaatgtgtacacacatttttttcaaaaaaactggttaagatcagtaaaatctttcaaagaaaagttggaaattatctcttttcacaagcatgttgttttttagctagacaactttntattattatntttttttcttattcttttcttgctcgctctctt

SEQ ID NO: 127286 - DNA, 413 bp, Glycine max
  unsure (1)..(413): unsure at all n locations
aatatattctcacactatcacgttacattcaaaatatagtttaactttttttagtggacaagtttaaaatgatgtatgatttttggactctattatatgcattttatttctcaccaattattttgttttcttttctttaaagcttaggtgtggaagaggttgtaaaagtttggattaaatttttggcagccccacgacagaaaattgcagagcaagatatgaaggcagagtaattagagaaactagcataacaggaagattggtgtaagcagttcttattattactttcttgataagggtatgcattttgccagtatttttaagtacatatcttttttatactaaagaacnaaataaaattataaattgctgatntccttatatttgtaagtgtggttcaaagatcatgtcag

SEQ ID NO: 127287 - DNA, 477 bp, Glycine max
  unsure (1)..(477): unsure at all n locations
gaaactaagctaggagaacgatcttggaagagggccatagaagtagttttttttatttcctctgagcaactaagatgtaccaagaccttatgcaaattttttggtggctgggtatgaagagagaaatgggtttttccttgcatacctagtgtgtcagaaggctaagatagaacaccagaagccttcatggaagttgcaacctttagagatacttgagtggaagtgggataacatctccatgaattttgtggtggggttacctaggacccccaaaggtttagattccatttgggttattgtagataggttgaccaaatatgctcacttcatcccaattaacatcagatattccttaaagaggttgactagcttgtacgtcagtgagatagttagactgcacggtgttctttctagcatagtctctgatagagatcccagatntacctctagaatttgggagagtcttcataaagcctt

SEQ ID NO: 127288 - DNA, 139 bp, Glycine max
ctgcagcttcacaataatttcagcgcctgatttttatggactcttcttactttcgagaaaaagtattggcgttgaatttgctgatgcttccacaatcaattcaacgtctcattattacggactcaaccaacatccagaa

SEQ ID NO: 127289 - DNA, 357 bp, Glycine max
actagcttgagccatcaacacatatgtttgtcggatgtttatttttctcttatcatcgaacctcgaattgagttgaactctcacaattcaacgacaatacttttactcgagttgatgagtccataacatcagagctcgaatgaagtgaactctagcaattcaacgacaatactttacttatgtctgatgagccgaatattcgagatgatcaaatgaattctgagcttagctaatcaacacatacttttgtcgatgtctgatgatccgatctatgaacctcaatgaattgacctaactattaacacatactttatcgagctatgatcctaaatcaacctcaagaagtgacttacaatc

SEQ ID NO: 127290 - DNA, 305 bp, Glycine max
tttgatagcccttttgagccttggttccctttccttgggttgaagctcactacaagccttaagtgaaaaaccatgatattaccatatccttaaggaattttggagctttggaattgttttgggaataagtgtgggggggtttttgtttcattggacaacttgttttgttggctatgcttcatgatgtattttgggccatacttgatgtacattgtatattggataaatgttgggcttaatcccgattttggttgtggacttgaagagggcaaataaagcagcgcttagcttaattaatttctaat

SEQ ID NO: 127291 - DNA, 449 bp, Glycine max
  unsure (1)..(449): unsure at all n locations
nttaataatggtgatggcttatttattaggctttatgtgtatgaccttatccttaccggcaataacccaaatttgtttgaagacttcaaggattccatgtctcatgaatttgagatgacagatatgggactcatgtcatattacttgggaatggaaatgaagcaaatggagaatggtatctttgtctcacaagaaagctacacaaaagaagtgttgaagaaatttaatatgcttgattgcaatcccgtgaacacacctatggaaggtggcttgaagttatcaaagtttgatgaaggagagaaggtagaccccacggtcttcaagagtcatgtggggagtttgatgtatctaaccaatacaaggcccgatattctatatgcggtgggagttgtgtgttgctttatggaggctcctacctctactcatctaanagttcgcaaaagaattct

SEQ ID NO: 127292 - DNA, 432 bp, Glycine max
  unsure (1)..(432): unsure at all n locations
gcaagcttaaaatatatcgagacgctcgaaattatatttcgtgaactctctttatattcaaatggtcatatcttttcacacaaaggtcagattcgggctcataatatgtcgagatgctcggaactgaaccacagaagctttcgagaaatagaaatggtcataacttttcacactgagctccgattcaggcttaccatatattgagacgctcgatattaaacatcggaagctctcgagaaattcaaatggtcataactnttcacacggatgtccgattcaggcgcatcacatatagagacgctcgaaaatgaacaacagaagcttttggagaaattcaaatggtcataacttttcacactagggtctgattcaagttataacatattggggcgcttaaattcaacaacggagcttttgagaattgcatggcat

SEQ ID NO: 127293 - DNA, 409 bp, Glycine max
  unsure (1)..(409): unsure at all n locations
cacaacaagttttccacatccacaatgcgcgcataaacccaccatcccctgttgcccacctccaactgagctcacgtacttccacgtagcccatatcctcgtttctctcaacaccgggtccccatcaatcctcccaagcttccacaacatccaagcaaaacaacattcaaacagcacaagctatcgcggccaagcaaaacagagcaaaggcagaaaactctgccaaaacaccaaccaaatcacaacttttctcacttaaagaccccaataacaattccttcgatccaattcgttaaccgttggatcgactccaaaattttactggaagtctatagtacatgaacctacattgtgaccgttgggatctactagcaaacatncagaactcattctgtactactctttccac

SEQ ID NO: 127294 - DNA, 290 bp, Glycine max
gaagcacatctcttaaaatggtgttggtccataatcttatatctaaatatcattcggtgatgagattaccatgtcaattgatgaatgtcttgaattgtgtcggtcgatttcttgatgatgaaatgagatccgggtgagaacatattctatgactcacatttactttatgtgagatcatgcgattcacatccacctttcttggtgagttggtagcaaaatatcagatgtggaatgcctggcttgcttattgactatagggagttctgagcatggtgacattgaatggcgat

SEQ ID NO: 127295 - DNA, 446 bp, Glycine max
  unsure (1)..(446): unsure at all n locations
tatccaaagggactattacttaatccctanttttttattttntttatcctctcttaacttatatatgttttcaattttaatcctaggtttggttaacgtcctaaactttagatattctaaagctatatattgttgaattatgatttaaaatactcttttttaatcacatatttatatgtatatttttttaacatttttattccttttcttttaaatttagaagactttcatgattatcaagtttaaagtttatccaaggtgatcatcattaacctttcacgactttaataataattatttcgaaagtgcatctaattaaagtagttactatttaacctttattntataaaatatttaagagaacattctttcagagtattccatttaacttgaagagttaaatgtattaagcatcacaaattccacatgttnttattcttcaatat

SEQ ID NO: 127296 - DNA, 397 bp, Glycine max
cacttacccattctggattgacaaaatctcaatcacttgggctccaatgaatccccttatccaagtaagagaccataaggtcttgccacctctgtctcacctgaattatagacttgaatcataaacttctctttcgcaaacaaaccaataaacaataaaccctaagtgccacacatcccacgcaattgggctgcttctaatggatcatcatatagggccacaatgttgagcccaattagtacccaagtgagacaaaccccaaagaatgttcacctatggccttaacaactaagcatccaaaagtgatggcaacaaatccttctagaaagccattgcacgcctcaacagcatcccagtgggcgactaataaccatcggctaaataagataactacccc

SEQ ID NO: 127297 - DNA, 447 bp, Glycine max
  unsure (1)..(447): unsure at all n locations
aatttaacgaatttgtattgctttattgcctatatctnngnctgggccattntgtcctccaagtatatgatttcgctgcatgttaaccagaacttcatatacattctggtttctattcacccaaatagggtttggttgctctctatcattcactaaccgtgttaggacattaacttcattttcaagattattattattattattattaggtctttcttgcactggtatttcctgaattatatgtctattcccaagttggtttctaggaatggccaaagcatctcttattcgagttaggataccattcatctgttgataaatttcattagtggatctcaacaaaggatttaaaatcaaggccatgtgatttgtcaaagtattcaccatccatgattactttggtctatttgttgtctaaaggctgcctaattttcgatagaaacacct

SEQ ID NO: 127298 - DNA, 429 bp, Glycine max
  unsure (1)..(429): unsure at all n locations
agcttaatggtgcttctttgggtgacggtgtctattaaaatatgnncttcctctaaaagagaagtgagtttaataaaacaatttagattttaattaaaatacaccagtaatagaaaaaaagaattattccataacattggtttatttaataagaactaactttacaacaaatatactttaaaatcgcataatactttctaaggaatgccaatctaacaatctttatacatgaaagtgggactcaacaaaaagttgttatatttttttttctaatttcagaaatggaataaaaaaaattttgctaattaacttctaaaagaaaacagttaaatttctcaaactatatccaatctcatgaaaaaaaataatttaatgaaggaaaagcttttgctcattntctttcanataaagattaaattaacaagtgag

SEQ ID NO: 127299 - DNA, 461 bp, Glycine max
ctcagcttgaagctatcaccacagcaaaatcaccagtgatgtatgttatgcaggagatgatcagatgtccttgctcaaatcatcgcttgaaaaactttcacttttaaatactgaaaattcaaagaaagtcgaacttgtggagtcttcattgagaaacaaagaaagaagcagtagagaatcaagcctgcctatgccatgaaagcatcctatgctatattttatttctgtagtagaactggtgtggtttgaactatgatcctacttgcactccctctaatttagtcactttaattgtctcgccaaaattagggattttcatagaaagaagttgggagtacggttaacatatttacattattaaaagcttaatgtcaaggtcaacaggaagaagaaagtagcaaactttgttgtacactaatacctaactcccttttcatatatgtcagtatcagaaaagaaat

SEQ ID NO: 127300 - DNA, 253 bp, Glycine max
  unsure (1)..(253): unsure at all n locations
gacttatgatacaaagatgcatgtgcttgtcgaaataactactggccaagattgcatatcatgtcctctatatgaacctcaatgtctacatcaacacgcttaatgtgggatggtgttggcatgtctggaaattcaccatgccatatccattttgtgtaactcggaataatcccctcatagatgaaatgggaccttatntcaatcactaggcgggggggcccattcctactttaacacattaaccaaaatattt

SEQ ID NO: 127301 - DNA, 329 bp, Glycine max
acattatgtgagcatatgactggattacattgcatgctacctgaagaaaagaaaacaacttcaacatcgtttatgactcataaggatattaacattctattaaaaaaaatttgttacatactatcccaaatctatgaatgtgttgcttatgaacaagaggaccagttgtagatgccattgtctaggattagatgctaacgtctagaagaacttagagagggatatatgagaaccagagagtgagtctatgagtttgcgtatatgacggaaatacatgcaatgcatttatcggaaaaatctaacaataacacaacccactaggcgatatc

SEQ ID NO: 127302 - DNA, 369 bp, Glycine max
ggaaatgttagcactttgccagattgattgggaaagaatgcattgaccgtatcccggtgagagtgagagccttaaatgttgaaagaaaggactatcatttaatactggattttgcatgaatctctgaagtatggactgaatgcctgaaattgaagatgatgaacgccctgttttattgggatagccacttccccacgtgtgtgaatgatatatcctttgcacctaatttgagctgaatgaattattgattgattgaacactgagactattaagggagatcccttgctacctcgacttaagttgtaggagagcatcattcccagaagtgtggttcaagcacatttgtgcacatttggggagtattatcag

SEQ ID NO: 127303 - DNA, 411 bp, Glycine max
aagaaattcgttattattgtttctgtaatcatatgtattttcgacacactaaattcgaatatatctgataggtcattcctttagttattttcgtcaattaaacaaacccatgatatttcgattaaacttgtacttaactacgggttggaatacgccaggccaggccatactttgaaaggcctgagcctagcctatgatgaatctttgaggcctgagcctggcctatagcctatcaaaggattttattatggctcggcttgacctttgtaaaagcctggcctagcctgatggcctttataaaagccttcttcacaatagatatttaatatttcatggagtatgaacgtaatatgaaagttaaagaaaaaggaaaggtaatcgaaataatgaggtatattaaaggacacatga

SEQ ID NO: 127304 - DNA, 430 bp, Glycine max
  unsure (1)..(430): unsure at all n locations
atganggctatgaatgaagcattatttcctttggggatttatccattgatgtattattcatacataaacctgatgaagtctggtttcaaaatctcccaaaaatgcttaatgaaatcgaaatttagcccatccggaccaaggcttttgtccccccacagtcccaaactgctgatttgatctccacttcaaaaaatctagtcacaaggctttctttatctcttggatcaagagtagagaactgaacaccatccaagggtggtctactagaaacttcctctgaaaatctgtccttgaaataaaggatagctacttttttaacactgcagggttcatgcacccacacactatctatggagataccttgaatggcattctttcttcttctatgggtgatcaatctatgaaaataggtagagttgttgtccctttc

SEQ ID NO: 127305 - DNA, 279 bp, Glycine max
aaccaccagccgcagatgcgccgacaccacctctaccggagacaccattcctggaggctatctccgctcacctgtagaggatggaacttcagatacacgcgtatatgcagcatgtgactggccagcaagcggctaatcatatgggtcaagggcagctgaatgagaatttctaccgggacaccttgcactagcagagccaggacctcaagcctttcccgtggcctacccctgagcagttccgggccacagttgcatgccctggagatgatctcaattttc

SEQ ID NO: 127306 - DNA, 452 bp, Glycine max
  unsure (1)..(452): unsure at all n locations
gcttcgtcctcaaatccctcttatnggactatgtccaatttanactttttctcttaggngnagagtaacttaatgatggaagcttgctttgggggcttctatggaggttggatctttgagcttcaatgaggtcctttaatggtgattttccaccatggagatgcagcataagacaaagaagaagaggtgagaggaggcgccatccactatgaaataagccatggaagaaggagcttcaccaccaagatgagccttggataagaagcttggagaggatgcttcaatggaggaaaagaaagagggagagaaagagagaggggggagcatgaaattgaatgaagacaaagggagagaagttgaactttgagttgtgtctcacatgactctcattcatcaaagttacaacaagtgttacacatacttcctattatagactangtatacttcttgag

SEQ ID NO: 127307 - DNA, 358 bp, Glycine max
ttaatggtgtttttccaccacggacatgcatcggcagacaaatgagaagaggtgagaggacgcgccttccactatggaatgagccatggaataatgatcttagccactaagatgagccttggattagaagcttgtaaggatgcttcaatggatgaaaagatagacggagagaaagagagagggggtagcacgatatcgaaggaataaacaatggagagaagtggaactttgaagtatgtctcacaagactctcattcatcaaagctacaacaagtgttgcacatgcttctatctatagactaggtagcttccttgagaagcttcttgagaaacttcctgagaagctttttgagaaact

SEQ ID NO: 127308 - DNA, 440 bp, Glycine max
  unsure (1)..(440): unsure at all n locations
cctctgaaactcagctttagtgctggaagcacgtttctgtggtntccattttgtttcttcttcaagtatgngtatatgtgtataactgtattatattcgctgttctggttgttgtttgtattttgttttgtgcagaagaaaaaagaagaagtagagatgagagtcgtcatcgcgaanagggcaggacggacgaaatcagtgtcctatctttgctttcctcttatctctgatgagaggtaagtaaagaggggcaactgtcataccctaatttcgtccggggattattacttgatgacatgcaatctttggttagccgctttgagatacttggcgtcctttgttgcacaataaatgaagtcccgagacgtctcagaaatctaaaggaagtaggcttgcgcgatccgtgaaattccgtaatgtggcggaagtcgaaaagagat

SEQ ID NO: 127309 - DNA, 376 bp, Glycine max
gcttcaaattcttcttcaattccacacaatatttcagctaggctttttttgttcccaagaacctacctctaccttaatggaccttccattgcatgaaaacttctgcttacttgaaatctgaaggtgttgaggtcttgggagctataatggggagttctactacgctatcgcatttaggtagttggttgtcaaggaaattgtcgttaatcatgctaaaacttgatatgttaaattaacaaaactgcccatgttaattgatggttaacaaatgatgttttgatgtatatgtatgcttgacatgcagttattaaactggtagagaagattagtacagttatcttatagataaatgtgacgaacgtagtgttgtatgtgg

SEQ ID NO: 127310 - DNA, 410 bp, Glycine max
gtatataacaacatacagagacttgtcatcgaaagggcccaaagcggcgtcgtatagtccatcaggcacggggtgcagcaaaaaatcgacgagaatgggactcgttatcttcacgcggctgctccgccgtatctcgtcgtcggttaggaagctgaacgccaccgcctcgacggagttcgtcgcgccctgcgaaggttgcgtcacgacggcgttattagataggtttcagagagcaagaaaagtaaaagagagcgttgagttggagattattacctcggtagtgagaaccatggtgccgccaccgtcgaagcaggtccgaacgccgtcaagggtttaacggagagggacacagagagggtttagtgttgaggagggtacgcacaatgaagaagtaagtatgttttgagagg

SEQ ID NO: 127311 - DNA, 424 bp, Glycine max
  unsure (1)..(424): unsure at all n locations
agcttcggcttctttctatattcatnanngttgtgttaanngccgaaaagaaatccaatangcattatatccactactcgactttaattgtaatcaactgcccataataatgtctttcatcatccttaatntcaagtttttgaaccaattgtaatacaaaaccttggctcgttccatgaatntcaacattataatgctgtttggaagatttggaagatgttatacttttgctgttgtttcaggtaagtataatcatgtaccttcctaccatggatgctcggcagaggaaagatataacagaagaattctttcattataggcatttgactcaggcaaaattatgggattgttactccgcatatgaacactgngctaagatngaggtaatcatctaagcatcatatagaatgaaagggcctacatg

SEQ ID NO: 127312 - DNA, 403 bp, Glycine max
  unsure (1)..(403): unsure at all n locations
gatctcatcaaatgggttctggagaaagagagctcatcaaagcaagtaagtgacagctacactttttctgattgcttaaaattatatcttcacctgttgcaaaattatttataaccttggcttggtatatgctgggtgatttacttgaaagggggcaaaattaggcataattcataacactcttataataaaatattaagaatttagtcatatctttatcttggaaggttcaccatttgcctttgaaactttattacagtggacctggataatcgaattattgagtgtatttaacatgcattggatttggtggttggtcccttttttccttgagttttcttttccttcaagggaaagtggacccacaatttagaaagcttnntaattaaaganggtttctgat

SEQ ID NO: 127313 - DNA, 406 bp, Glycine max
  unsure (1)..(406): unsure at all n locations
ttgggactgattctacctaatacattttatataaagagggagtgtggagaattgaaagcgcaaaacaaagaataataaaaaagagaggagaggagaccattttattgcaaccggaaggagctggaagttcaaccgacaaaacctcgtcgttttgctgcatcatctcctccgcattctccatttctctctcactcttgcctttcaggagttgagtttcaatttgtttggaataagaaaagataagattaacaaacggtcaatctctctctctcttctcttatcaacgacatatgataaactcacgcggagcacctcactcctcatgccatntcaaatngaaacccacgtgattattntaatttgtccttcacacaccaaacaaaacagacaacactnttcttccttt

SEQ ID NO: 127314 - DNA, 465 bp, Glycine max
  unsure (1)..(465): unsure at all n locations
ttcgattcattctatggtactcgggggggccacattggttattgtgtatctncattctcgntttatttactttntataccccctcttgacgtgcttaagccattttacttaagtcatttctcgcttaacctaaaaataaaataaatttccaccgatcgtttgaattgtattatccgttaacttcaattaaaatgaattccgaccgttcggtcgtgccgtaaccacgttggaaatcaaaaaaagaggtaaaataataatataataatcaaaaaacgtcttttagtaaaataaagcggaaaatcaatcggacgttttctctttgggatttctcattcttaattgaattgactaataactaaagtgaaactaagactaaaatcaattcgcctagtcaagctcgtccataaaaataggttnnttaaagttatcatttcaatttcttactaagtaaaatggatcattttc

SEQ ID NO: 127315 - DNA, 349 bp, Glycine max
  unsure (1)..(349): unsure at all n locations
agcttgntcgcacatcgttcgcgtgtatgatttctctctcgacaaggtttgaagtagaggagaccttcaatcctataacgcaacgtggcggacaaaaatgggcagttaacttgaataaccattattgtcaatgcggaaggtattctgcgcttcactatccatgttcacacattattgcagcttgtgggtacgtgagcatgaactactaccaatatatagatgttgtttacaccaatgagcacatcttaaaagcatactccgcacagtggtggcctcttgggaatgaagcggcaattcctccttctgatgaggcatggacactaatccctgacccaactacaattcgtgc

SEQ ID NO: 127316 - DNA, 469 bp, Glycine max
tagcgagttctacagctgggattggtctataactttcgatatcattcacctgcccgcttaacgagacaaagtagcgcacattatccctagcaatgaatcattttagatgctctttcaagttctaaggatttaccatattttacaatgcttaaaccctaacataacatataaatggatgatcaaaccaagtacatataaataaacacaggaaggaacaatgaaactagcaataacattaaatagatagtaagagtttttacatcaagagagtttagtggaaagctcctcaaccaagggttgtttagcccttcatggtcatgaagggctcaaatgtacaaaggatgtaaaaagtgaagggataaggaatgaaggtgaatcacggaaaaagaatggattcccaatgattgtcttcttcctccagctcaagctttagggttttttctcgtctctcaactaactacctattctc

SEQ ID NO: 127317 - DNA, 392 bp, Glycine max
  unsure (1)..(392): unsure at all n locations
actgaatctaggaggcatgcatgcatctattccccagtgcttacaaaagggagggttgtgctggtgtgcatttgaagagggtatctgcattttaatcttcaatgcccttgttcttgaaggaaaactgttctaattatttttctgaaagtagctttattatatttacatctttgcattttatattccaacaatttttaggcaaacatttttggtcatgcattggttggttgcatgtttgtacatttgtttgaggcaatggtttcattttaggcaaaaagtgttacatacatgcatgaagcttacaaattctattgtatttgaatggtccaatatatatatatatatatatatatatatatatagntaaatgattttttcacacttgtcattat

SEQ ID NO: 127318 - DNA, 470 bp, Glycine max
  unsure (1)..(470): unsure at all n locations
tctccttactcacttggtcacgcagganatgaatctnggtttctatatgttnactcctgccatgtgccacaggatgcttagctaaatcaattgctgatttgttagtgtaaattcctgacccgaagcttagttagtgtaaatttctcaagtttagttctttcattaaagcttccagccatagagcttgacaggctgccatagcagcagcaatatattctgcttcacatgttgacaaagcaactatactctgcttctttgagcaccaagagattggtgatgttccaaatttgaaaacataaccagtagtacttttcctatcatccttatcactacaccaatctgaatcactataaccaaacacttctccttctatattcttctgactgtaaggatataaaatgccaagatccaatgttcctttcacatacctcagaatcctctntgctgccatgaagtgaggtgtctttggt

SEQ ID NO: 127319 - DNA, 400 bp, Glycine max
  unsure (1)..(400): unsure at all n locations
agcttcaaactttggccatcatttctgcctttatgtgaacggagattttttcggggtcgngaagtgcgtgcctacgagtgggacttcgaaatttcaggtttgggtggacttctttctcctttgattatcgtgggtatggggttttgggagatatgatgggtagttttgttagctttctgcttcatgatagttatttgtgaagactcttgttgaaagcttattgaaattgccatgtttggatgagttaaacatacccattctgttttagggtttttatgatgatgcttgtgatgttcatgtgctgaaattgcttatggaaaactgttagagatgaagggtagaactaacctacggttagaaagtgagaatgtggtgttaggagtggaaaaagagtgaattt

SEQ ID NO: 127320 - DNA, 452 bp, Glycine max
  unsure (1)..(452): unsure at all n locations
nggctttacaccatgagtcttcattcttcatctattattattggtgagggttctactcctaaggaccccttgtataagatattagatgagttgagttcccttaagttggggaaagaaaaacaagagagaaaagaaaaaggaaaaaaaaaagagtgaaagaaataagtcaagatgaaaaagagaaaataagggaagaagatagaaggaaaatatgaaaagagttaagaaaagaaaaacatgcctcctatagtagtcataactcttgcaagagcttaagtgaagaacttcgtaactattatgaaggaaggcataggtcacatcttagacctcactcccatataagagaaaaggaaagaaagcctcaaaaggctaacattaacctcccatactttcatgggaaggacaatgtagaggctaacttagaatgggaaataagggtagagcaacaactt

SEQ ID NO: 127321 - DNA, 260 bp, Glycine max
tgtatgccatttttggtttaagaataacatcccttggtaaaactaacttttcaaatgtttgccttcgcaggaaatggccccgaggaagcttgccttaaaaaggtccacgaaggataaagcggccgaagggactatttccgctcctgagtatcacagtcaccggtttaggagcgctgtacaccaacagcgcttcgaggccataagggatggtcgtttcttcgggagcgacgcgtccagctcagggacgacgagtatactga

SEQ ID NO: 127322 - DNA, 467 bp, Glycine max
  unsure (1)..(467): unsure at all n locations
tcaacatcagaccacttccagggggctggaactacttcttatggacttganggngcccatgcaagttgaaagccttggaggaaagaggtatgcctatgttgttgtggatgatttctccagatttacctgggtcaactttatcagagagaaatcagacacctttgaagtattcaaagagttgagtctaagacttcaaagagaaaaagactgtgtcatcaagagaattaggagtgaccatggcagagagtttgaaaacagcaagtttactgaattctgcacatctgaaggcatcactcatgagttctctgcagccattacaccacaacaaaatggcatagttgaaaggaaaaacaggactttgcaggaagctgctanggtcatgcttcatgccaaagaacttccctataatctctgggctgaagccatgaacacagcatgctatatccacaacagagtcacacttagaa

SEQ ID NO: 127323 - DNA, 337 bp, Glycine max
tgattctttgacagaactattgggctatcatcgttgtctttcaaagataccggtggatcacccagttttctgcacaacagtgcccccattgtttttttctctggtggagctgtctttgatttacccaacgaatatttcattgtaaaaaaacttagaacaaaaacaagaaaaagaaaatgacgtgcagggagtatacaaaaaaacaaaaaagatatagtaattagtaataattatataataaaaaaaacttatcagaaacgtgtccaatactttgttggtagatttcataatagaagtcaattaaaaaataaaccttaatttctataccacgaagatc

SEQ ID NO: 127324 - DNA, 452 bp, Glycine max
  unsure (1)..(452): unsure at all n locations
tgaatcggacctcagtgtgaaaagctattaccatttgaatttctcgagagcgntccgtggtcaatgtcgagcatctcgacatattatgcgctcgaatcgaacatccgtgtgaaaaggtatgaccatttgagtttctcgagagcttccgtggttcaattccgagtatctagacctattatgtgcccgaatctgaccttcgtgtgaaaagttatgaccatatgaatttctcgagagcttccgatgtttaatttcgagcgtctcaatatattgtaagcctgaatcggagctcagtgtgaaaagttatgaccattagtatttgtcgaaagcttccttggttcaattccgagcatctcgacatattatgtgcccgaatctgaccttcgcgtgaaaagttatgaccatttgaatttctcgagagcttccgatgtttaatttcgagcgtctcaatatat

SEQ ID NO: 127325 - DNA, 460 bp, Glycine max
  unsure (1)..(460): unsure at all n locations
nttatccatggcctgctatggtggcgatcttgtttttgtcgtctatccatcatggagcacatctgcatgaccttcccttcttgtccattccgctatcattggccgtcaagaagcacatgactccatcgatgatgaacagcccaggcctacatgctgtacacggagctacatgaagagaagtgtctgacactttcctcgctcaccgccattattcgagagagatgacaccaccaaatcgtttcaagctctaagagctcgactaagatcgtatagggctttgttgagctcgataacatgtaaaagaatcgttcgcatacaaatcctggaggatgtacatcataaacttgctctcgcattatgcccattatagatgcgcttgttatagccatctgacacagcttcatattgctcatatttgcaaatgaaagtaagatgcatactggctctaaacgagctacat

SEQ ID NO: 127326 - DNA, 463 bp, Glycine max
agtcacctgcggcatgcaagcttcggaatgtgacatcatccattcttcttgttttacattattaatgcagtgaaatgcagcttcactaataatgcataatcctttgaaatgcttttaagttgttaagtatggcatcaacagtaatttcttacgcaacctagttttattgttgctattttcagccaaaacaaattccgaaatcagctgatgatatgcttttttttcagtatgcttgcaggaaggctcttgctgacagtcagccaagaatccgtgggagatttgcaaggactgaagagtctgatgtcaagagggaatgaatgacttataactgatttagtaggaagaaagtacagttgagtagctatatctgatcaagctatatggaaaaactcagcagtaatatgtgattagaacttatgtggggattctctgtatgcttgagcagatatttgctgaataaacc

SEQ ID NO: 127327 - DNA, 416 bp, Glycine max
  unsure (1)..(416): unsure at all n locations
gacggagatcaggttatatcattttattattgatagcttctaaaatagaataggaaatatggttaaaacaggtaggactaacataaacaatatagcagccttagctaagctatgagcagctatattaacttgtctcctaataagcttggattaatagcaaggaatttcctgcaatcattgaggatagaacccacttctgagatgtcacatgtgctgctcatgaagcagccattggagtaaaccaaaaaactctccctccaagactgaaaccagaagctccagaatcatcatgaacaataaagtcccaacttgtcagtccttcataagagtggaaagctgcatccgtgttgcatttgaaatatccncttcagatagggactgtatagtcgntctgatggtgccttctgagttatctc

SEQ ID NO: 127328 - DNA, 335 bp, Glycine max
  unsure (1)..(335): unsure at all n locations
agcttanatgtcataaatgaatcaaatatgattaattgtttgcaaaaaccttttcttactctctctgcaacaaataaacgagattcctttgcccacttcataaacaaattcctataactatttcctcatttattttgagctaaaacttgaagcttccaactcccaagaccaaacgaatcacaatcgatgctataaaggcatacttactatgtatcctcaaaacctatcggccgtcattaaaatgaaatgtgacaaaaacatctacaatctaatactaaaaattattattaccctactcacgtcttaataaactatgaaagaatactgataaaaat

SEQ ID NO: 127329 - DNA, 407 bp, Glycine max
  unsure (1)..(407): unsure at all n locations
ctcagcttaactgacataagtcattgaaatgccctgtctctactttctgttatttctatgggagcatgggaagtattaaacaatcaacagtgcttgagtgatagacacatggatattggtctacatacctattaatagtcctgcttctggctttccactttctcttntcattctgctgttcaatatcctttgattatgggatcaacgtgggctctatcattgatcatgtattacttacaaattgttgagagtttctcatggattataaacacatatttttaatatatcacggcgccacaatgggcaagtgtgaacttaaggatattcatttgcatgcactgttcacgaattcaccagtatctcggagtgcatatatcatctgactatgttcataattctttctgtgc

SEQ ID NO: 127330 - DNA, 480 bp, Glycine max
  unsure (1)..(480): unsure at all n locations
gatccttaagcacctgngctgcagcttgtaatgganaaggtcttacattcaatgcatgcaagctttcaactcaatacaatttcatccaactacaggatctcaatatgtaatagacatctctatagattaaaataattttaaatgtttaatgtgtatccaattaattatatggatgtgtatctcaatatgtggtaaacattagaaatgaatttaatataatacataagttatttttatttgtcaaacctatctgtcatataatgaaaaagacaaaaaaaaatgtacaataacaaattaaattttatttattttctataaattttctatatcttttctatatatagaatatagaattcctatatatagaatatagaattcttttattctttaaccttttttagttaataaggttaaagaataaaagaaaaaaaaaatagaagcgtccattgtctaatggataggacagaggtcttctaaacc

SEQ ID NO: 127331 - DNA, 498 bp, Glycine max
  unsure (1)..(498): unsure at all n locations
ngtctatattcagagataatattgtcccaaacactagcaatgctaatacgtccatgaatgatacccactctccttggcttgctagagtttccgccttctcctccaagcacttcctcagtattcctgctacttcattcctactttgtttcactcgatctaattctcattatgagatcttgaccactcctgctattctcaccatagaaggatagtacccagaaaagaggtatggcttccttcctcctatcgagcatcctaagatcccatcaaactcctctatggttagtgctaacggaaagtccccaaaagtaaagcatctaagaaattggtcatagcattgagtgagagatgtaatggcctcaattgacacttctatcattttcagatcctagatcttcccatataccttgctaaaagatttacgttgaacttgatccatctactaccccagtttttgcaatatggctacttctagatttttgactgtgacatgatggc

SEQ ID NO: 127332 - DNA, 445 bp, Glycine max
  unsure (1)..(445): unsure at all n locations
atacgctcccattatgttatataaaaagtatgtatgttcaatcatacattaatattatgttgccaactacttgccaaaattggactcttgcatcataatggtgtaatttttttttcaaaaattaacctaatgggtatatttnttaaaaattataaaaataggtaaatggtgattggaaatataatcttatcatcaagaaatgttgcttcaaagtatgattttgtttttcataaaattattatactaaaatcgtatgtgcacctaagatatcaattgtttattattaaaagttgaaatcgatttcaacatgcttttttttttaattattttaaaaataatattttaacataattttgctataaataaaaaactaaaatcatattttataatacgatttgagttcttacaaacatattttcaacacataaaaaataaaatcttactt

SEQ ID NO: 127333 - DNA, 440 bp, Glycine max
aaaacttgagattatgtgaagactgtcatgccgttacaaaatttatttctaaatctgctaatagagagattcttgttagagatgtgaatcgcttccatcattttagagatggagtttgttcctgtggtgactattggtagtttgtggcacaatacaatgctgttaagatacttgagaaagtaattctaatatagtggccgagattgaatgatgctacattgctatggcttcaaacacttctactcccccattcttcggtagatttttttgtcttttttacacgcgcatgaatttaactcttatttacaacattaagaacattcaatttctaatcgctaggtgataaaagcttttataccatgtcaaagaattattctttccaaaaagtttatgctattgagttacgtagacgaagttttcttttagattctactatttca

SEQ ID NO: 127334 - DNA, 445 bp, Glycine max
agcttcatggtgcaaatattttcctcaaccttctttctagtctgacatcctcttccacgtggttcttgttgttcgggcctgcttggtcgctgtggagggtgatcaggacgaggttgatcttcttcttcgtcctcgtcctcgtcatcttcatgctttccatggcttggtcgtcgtggaggataaaagggagtttgttcatattcttcgtcttcatcttcgtcttcgtcttcttgttcttgccacttggggctgataacgctgaggcctccctccactgtcacgatctgcttcctttcgtcatctggagaccgaagtttctcagctgtgtcctcgttggtgttgaaggattgtgctaagaaatgtttgctgaagccactgagcacactgccaccttcttcctcctgctgctggtgttgcccctgcttgcgtccaccatgactcttct

SEQ ID NO: 127335 - DNA, 492 bp, Glycine max
  unsure (1)..(492): unsure at all n locations
gctgtcaacatganactatggtggcgctcctcacttagcttcttcttggtttaaaaatattgcttgaatcaaagtgattgatgacaaaaagtatttatttgggttctaccaatcgcaacatcacaaacaggtttaacatgggtttaaaaatattgcttgaatcaaagtgagtgatgacaaaaaggatttgataaaatcagaaagactgaaacaaaataaggttgattcatatagcccatttcgaagttgtgttgattcagtacttcttcaaccacttgatttatatattgatgatattgttgattgtttggctgccaattcatattattgttgggctgcctcctatgtccttccatcattgcattgtttcaaattccttataaaagtaaatctgcattttgatttcgatttaccagtattggtccaccaccatctccttcttggtggtgttgcattttatttttctagtcattggtattaacaatgccctta

SEQ ID NO: 127336 - DNA, 482 bp, Glycine max
  unsure (1)..(482): unsure at all n locations
ctgcgacggacttaagcgacgcggatgcagctttctacctattaaactaatgattactctatgaagagggagaaggaagggaaaaaatcttgggtccaagatgaaagctntctcccactcacacaacaactccacaatatccatgccacctaaacccccaaaaaccaacaaaaaccatatcaaaatcatgaaactaaacacttttgtgaacttcataaggtggtcatggagggaaaacaaaaataaaagatgagaggggaaggaggagagttccttacaactaaaatagcatcaaaggtaaaaaagaacactgctacaaggtctcttgagtcaaggaaattgaaggtttcacactctctaatggtgggttctcttggagagaaaagagagtgaaatgagagcatttatgatttggttcaaatttacgaaagggttagtgaggagtttatgattntctcacttccttctctttacaccctcac

SEQ ID NO: 127337 - DNA, 439 bp, Glycine max
  unsure (1)..(439): unsure at all n locations
agaatagcattgccagtggcattgacccatctattccaggttctcacaaactcctcaacttccatatatgctggtcatcttggagacattgaactctcttctatctctgtgagccaaggggtcatgagttccatctattttcagttggtggttagtacattctaatctctccaatattaatgtttttttttttcatttgagatctaaacacagaaaaatgaagttaccgaatccattaatgtgtaatttaattgtctttatgcccaaatgataattaacaccagcaagtaaatgtgttatttttttcctcttatgaagcacagatacgatacatatccaatactgtgatacgattatgttaaatttattggatacaatacgtgtaagatacatgtntagaaatatataaattaaaatctataaatataataaatatata

SEQ ID NO: 127338 - DNA, 456 bp, Glycine max
  unsure (1)..(456): unsure at all n locations
agctttgacttgagtcatcaagaaattatatatatgttaccttggcatgaaacaatttntttttcatctcaatcatctttttcaatcaatctttcaatattttctttcatctcttttaatagattttttttgattcatcttctcttcatctttctaaaattttgtgttcaaaactttctctttcaagagaagttctttgttcaaaaacttgtgatattcatctttttcattctcttctccctttgccaaaaagaattagacaaggactaactgcctgaattctttgtgtgtctctcttatcccttttccaaaagaacgaaggactaaccgcctgaattcttttgtgtctcccttctcccttgtcaaagaatttaaaatgacacagtctgagaattcttttgattcttcccttttcccataaacaaaagatttcaaaggactaaccgcctgggaatt

SEQ ID NO: 127339 - DNA, 472 bp, Glycine max
ctcagcttagacaacttgtgaatcgacacaatgatgttgaatctattttacaaagagctgtcgtctctgaagaatatttcttaacttagaaaattttcttcacacacactatgatgattgttagttctttggcaagcgtaccaaatcgctcgtagtaataatttctcgataagccgagtgtcgtaccacatggattctgttacacttatatgaagtacttttcagtttgcgaattgtaaatttagtgtataaaattaacgggaaatttaaatctaagaaaaactcaagcaataaataaagaataaagtctataaaatattactaaatctaataatcctaaatacctactcctaaataaaataggggatactacttctaagaaaacccaacaataaaataaggaataactacttttaagaaacccaacaatgaaataagaaacttcaaacaataaaatagggaataaaatcta

SEQ ID NO: 127340 - DNA, 459 bp, Glycine max
  unsure (1)..(459): unsure at all n locations
gcttgaagatgatgctctaatggatgtaattatatagagaaggggggagcacgaaattgaaggaataaaagagggagagaagtggaactttgaagtatgtctcacaagactctcattcatcaaagttacaacaagtgttacacatgcttctatttatagactaggtagcttccttgagaagctttcttgagaaaacttccttgagaagcttcttttagaaaacttccttcagaagctagagcttagctacacacacccctctaataattaagctcacctccttgagaagcttccttgagaaaattcctaaagaagctagagcttagctacacacaccccctataatagctaagctcacatccttgagatgagaagctagaacttagctacacaccccctataatagctaagctcacccccatgacaaanaacatgaaaatacaaaaaaaagtccttact

SEQ ID NO: 127341 - DNA, 416 bp, Glycine max
  unsure (1)..(416): unsure at all n locations
actcagcttagggccaagcaactcacaatctaggtatctaaaccctctcattaagnggaatttcaaggtttgagaagtgaaaatgagactgggaaattttggagcaaactctcatctcacacaagtctataacattaatctaaactcgctcaaactagttttacgaggaaaactctaccaaatcaaaatttgactcctcaacacccaatttaccctagaaatgactcttgccttcactttggtcactcattttcctcctttgcacagcccaagctttctcacagtcctaaatgacatttcaaactaggattaactcactctaacctccaattaccactaaatccagatatggcttgtcaaatcctcaaagcatcacacttttccactcatatcactacattctcactttttaccct

SEQ ID NO: 127342 - DNA, 457 bp, Glycine max
  unsure (1)..(457): unsure at all n locations
agctnggaattgcatttgggcacctattntgaatctcctatgctgtccctacatatataaaacagtcccaccatcctaattttataaaatcatattcatatatcattggggcattttactgagcacttggtgggcgcacgtttggacataaattgcaagagaatgggggcaatgtggcatgccccattgcttcagaatacagtataggcctaaggccttctcattcaaatcctcaactcaagaaatcaagcataaaaacaaaccaaaactgccctacaaatataagcacgttctcacaatttagagcaccaaaagatgaagaaaacacaccaatgggaagctaaaaactcaaggattgaatacttacttgttggagtgagtaataacaccaaagatgaaagcaaaatgcaaccaaaagtgacttgtgggagcaaaaaccgcaagccttcatgaatcc

SEQ ID NO: 127343 - DNA, 479 bp, Glycine max
  unsure (1)..(479): unsure at all n locations
tctctgggaccttgagcaagcagctaactcctcttttaagaccatgctatgtgctcgagattggtctctctctccccttcgaagcttgagctcattattgcttccccacaaagctccacggaatttatctcggccatgctcttccttgcaagccctcttggtttctcgttcaagggctcttgcggtagctgcattntcttctcgtaactcggcacactccttccggatgtgtgtagcgactaacttgaattattctttggcaagtcttgcttttcctagttctgtttttaaagctcggacttcttcatcctcttccggaacttcgaagttctcctcgttgattattttcaacttggagagccaatctaaccctcctgtacaaactttcagccattcatgataaccaccgatgatgccattacggatgcccctaagttntntatctttccttaatgggatatcccacgccctgtggactc

SEQ ID NO: 127344 - DNA, 439 bp, Glycine max
  unsure (1)..(439): unsure at all n locations
agctngcaagaattatgacgtaaacatattaagcactaaccaatagctctgattctcctccccagaaatcaggtcgcacaatccgctggcagtaactgcaaaataacacatttaatcatgacatttaatacaaactaacaatatacttcaagatcttcattttctgttaatgcttccaaaaacataccgttgtataggctcgtcaactgtgatggcaatgagggcttcttcgtataatttacgttcaccttcattttcacatatagcttctttcacagccattcttaattcatctgtgctatcatgggcaaggcaaaacattgacaagaatagaaaaacaacgagaaaggaaacgaatgttataatgcatgaaaaaggaataaacatggtaggcaaacaagaagcacagttaatagcagaagcagctaatactatcata

SEQ ID NO: 127345 - DNA, 428 bp, Glycine max
  unsure (1)..(428): unsure at all n locations
tgctggaagctttaacatgttgcttcctatgactcttcgtatctgagngggtgtggaaacagagtgtgggaggtacttctgtttctagtttgtgaggattattaattcacactcattgtgagatggaaatgtcaattactggaaaatgcaaataatttataaatataatcctagaatggtaaagctcaatctacaaccaacagattaattggtgtactaattttcatatattttctaattttgaagtttttgaagtcagtgaacaaaattgaaatcatatatttaattctaaaataacttgcagaatgcatttagtttaaatatctcaagtgatattattaattttgatgtgctccattcattgacttattctcattntgatgacagataaattcccttctagcttgacaatgcccctctcactcaaa

SEQ ID NO: 127346 - DNA, 423 bp, Glycine max
tttgcacgtaaactactgtcattattaatcctaatcttccaattaggtaacaaccaaacaacccccaaaaattaatataaaaaattaaaataaaaccacaaaattttactttctttaaaaaaaattgaaaacccttattatgacaacactacgccgcaccgccgctacaaattccggcaagcgaaaccggaaaccgattacagaggctctccgtcggcggtgctcgatcgtcgacgtcttccggcggcggaagaaccctcccgtcggcgaagagcaccctgctgccgttcctctgctggtggccggcgaccactccctcgagctccgccgccgtgccgtagaacgcgccgtcgccgaacctccgctccacctccagaaactccccgagagacgctggcctggcgtcgccgtcgcggcagagct

SEQ ID NO: 127347 - DNA, 452 bp, Glycine max
agctcttcgattcattctatgcacccgtagtggtccacattgtgtttcgtgcattttgattctcattttgtttactttttataccccctgttgacatgcttaagccattttacttaagtcgtttctcgcttaacttaaaaataaaacaaatttccaccgaacgcttgaattgtattatccgttaacttcggttaaaataaattccgaccgttcggtcgtgccgtaaccacgttggaaatcaaaaaaagaggtaaaaataatataataatcaaaaaaaaaaaatatctttttagtaaaataaagcggaaaatcaatcggcacgtttctctttgggagttctcattcttaatcgaattgattaataactaaggtgaaactaaggctaaaattaactcgcctagtcaagctcgtccacaaaaataggcttttgaagtttgtcatttcaatttctc

SEQ ID NO: 127348 - DNA, 202 bp, Glycine max
tgccttttggaaaacttactggaaggcccaaatgggtctgatcgctattatcacccctctttactaaattcaccccttgcctgttttgctgattctttttccgtaacgtgacggaaacttacgaattacgtaatcatccctcctttgccttctggaatgctatggaactttacggattgtgcatttacactttcttttgact

SEQ ID NO: 127349 - DNA, 459 bp, Glycine max
  unsure (1)..(459): unsure at all n locations
agcttctctgaagggcatggttatttccagtttcttgtatnttatctaaaaatctcgccaaatgatggtccttctccttcttggaaggtaccactggatatggtacttccatacttgcgttcacaactttatcacttctactattctcttccttttcattgttgtcatctttttcaatttttttagtctctttttctgtatctacttctttttattctgcttggtcattaaattattttttcttgaccattatttgtttctctgtttcctgattgctttcacctctcacatcattttgttgccatcagtacctgtcatttcagcagctttcttcttgtgcacaacactctcctcatcctcatgctccacaaaccttttactccttgtcatcacaactttgcatttctccttgggattcttttatgtatttgccatanaactgttggatgacttggcagc

SEQ ID NO: 127350 - DNA, 399 bp, Glycine max
  unsure (1)..(399): unsure at all n locations
agctgtctaacatntatgcgagacggagaccaacatgctatttttgatcgccaattctttagaagagnngggtctatccacggtccacgagcatagaatcgcggactagtatgctctagtatacgcagaaatagaggctagaggaagagtgatcgactctttacaccaagaggcaaccatgtggatggatccggtttgctcttatcctttgaactgggagtctaagagacttctccctctttgttatgccaatggccaatggcgatgtgctgacacctcacttcgtctccctcaagaggaatcatggagctgtctcggctattgtcagcatatgatagactctatgggccacattattagaaatcgttatgagactcgtatggtctctgatacttgatt

SEQ ID NO: 127351 - DNA, 369 bp, Glycine max
  unsure (1)..(369): unsure at all n locations
gtcacctgaggctgcagcttatgtgacggtgaggaagtcggcgagttctctgtctgagattntctctaggcgctctcatggccccaactcggtgtcgttgactccgaggccttcgaatttgaccaatgcggagatttactcgctgcagagctcgaggaacccgactccgagaggctcgagttttaaccacacggatttttactccatggtgaatggtaagaacaacaacaacaacaacaacaacgtgagtatgagtccgaggcagagtaattttggaggctttgatgaagaaagtggtgggggtgtgagggtgaatggtggtgctggtgtatgtgggtaccctgngcctgagaatgcggggattttttc

SEQ ID NO: 127352 - DNA, 297 bp, Glycine max
  unsure (1)..(297): unsure at all n locations
nncttgattgaactattattactcacatatgtggtggatcatcttcaagttgatgagagcatctgtggtgataagatcccctagcttaatagaaattacatcacccggaacaagaatgattacaattgtcttaatccaatttttatttcttatttttatctcgaaggactttagctttagacgctagatgagccatgacaactactatatcattaccaacattgttctcctctaacgaaagttattgttgacttgataagatggagaatgttaatcccaaccatgttcttgtcatta

SEQ ID NO: 127353 - DNA, 459 bp, Glycine max
ctgcagctaaagatgccgagcattatccctatagatgttgtgaagtattggcatcagaattgccattccttggattatagggttgaaccaagctcatgcttttacaaaaaggttcatcaagtcaagttgaaatatggaagtaaccgtcttgcaaaattggggcaaaagatgaatcgagtcacatcaatgcttcgtctacttccaaacatatttaggattattgatgtccttgttacttccagtttcaccttgacaaagatgtcatggaccatgttgaaaatctaaattgattcaaccccatatcctgcgtaaatattcgcaatacttcgactgtacatcattcgcatgcatccatgcttttcattggttgcattgctcattgcattctttccttgaaaaataaaataaaataaaataaaatgaacttatcaaaaagaaaaggaaacgctttacggcgcc

SEQ ID NO: 127354 - DNA, 285 bp, Glycine max
  unsure (1)..(285): unsure at all n locations
actcacttagaggaagctagtgtgaagatgcaattctgcattatattgaagctgcttactgggttcccaccaatcatacttccactgttgccacaggtttgggtaaatttctgtatgctgttggaaccaagtccaaattntaatttggaaactatatttttgatcaaactgtcaagcattcagaatcatttgctgtcaaattacccattgccttccctactgtattgtgtggcattatgttgagtcaacatccaaatattttaaacaacattgaatttgtaatga

SEQ ID NO: 127355 - DNA, 481 bp, Glycine max
  unsure (1)..(481): unsure at all n locations
agtcacctgcggcatgcaagcttgtgcaaataaatcactcccgcattntatctcttgcatgcattgtatgttggtctcgtcctttgtcacgggaagccggaaggtccatatcaccttcttaattgtacacatggggcactgcgcccccaaatgcgcaagtaagaagagataattttccgggctctcgtgtccgtaaaatgcattcatatcatgcatcgcataagcatctcttcataacatcataatggacatatcctgcatttgtccgttatcatattccagcctcacattntgcatgagtcatggcatcatcatgcatatgcgttcaacaaactttttgatctgcaaaattgcataccatttgttttcatgtttgctcatccttgcgttttcctctacaaaacaaaaacaaaaagggggaagcgtgaaacttcacactatattcttagttgcatgtgttaggcaccatgagccaaccatg

SEQ ID NO: 127356 - DNA, 341 bp, Glycine max
ctaagctgcaccagctcgccaggcgagtagagttgcttcctctataagcaacagccttctggaggaatcttctggagggcccaagtgggcctggttgctatttgcacccccatttttactaagtacaccccctgccctcttttggtgattcttttttcgtaaagttacggaaacttaccaatttcgctacgatacttgttttctcttcgtaatggtacagaaccttgcgggatacataatcattcccttttttgacttacggaatgttacggaacctcacttattgtgttacgatgcttccatttgatttccagtgtgttacggaaccttacggattgtgc

SEQ ID NO: 127357 - DNA, 123 bp, Glycine max
  unsure (1)..(123): unsure at all n locations
ctacgtaggtctaattctctcatcccaattgaggaatacgtangagcaaagggaaacacccttgtcgaccacaaaaagagaaaaaatataaaaagggtataaaaggatatataggaacataaa

SEQ ID NO: 127358 - DNA, 320 bp, Glycine max
  unsure (1)..(320): unsure at all n locations
tactaagcttcctttaatgcgtacatctaagaccgggttcaatggttgtatgagctntctacagtagttggaggaaggtgatgggggaaatcgacattcccattcagataggccctcacacttgcaatgtggttttccaagtgatggacataaatcctgcctacaactgccttttgtggagaccatggatccactcgctatgagtggtcccctttacgcttgaccataaactaaaaatcacacttggtgggctctcggcgatagtgtcatgctaaaatgatatgttggtaagctgtccctcctctgcaccatatgtatat

SEQ ID NO: 127359 - DNA, 483 bp, Glycine max
gatccttaagtcacctgcggcatgcaagcttcttgcaattgttgaccacctgttgttattatatttgatttagcttcgcagatttattataaaaacatgcaagttcaaagagatttggaattcatttttttttacctgtttccccacctagcatgcagctctagaattatgctttcttcttgtggtgttatttgacccttctcgaggtctggcctcaggtaattcacccatctcaatctgcagctcttcccatttctttttagtcctgttaagagaataataaatgatcaatcatttggacaaaaaaaaagatgataaaaacaattatgaagaatgatactcaagagtcaagagttaagaataataaataacatgatcccaaaaggccaaaagaaaaacttatggtaaagggtagtcaatttactgagttgaagttggaagcaatttaattgttgtgtcacttgtattgtcaaagtcaattga

SEQ ID NO: 127360 - DNA, 453 bp, Glycine max
agcttgagggatatggtcttgccagtgaattgatctatgtgggtctgaaaaaaggcaaatttagtcatcctacttggacgaatgagaaaactggggcaaatgaagagggtgagaaagagggagaaacccatgctgtgactgccattcctatacggccaagtttcccaccaacccaacaatgtcattactcagccaataacaaacctcctccttacccaccaaccagttatccataaaggccatccctaaatcaaccacaaagtctgtctaccacacttccaatgacgaacaccacctttagcaaaaccaaaaacaccaaccaaaaatgaattttgcactgagaaagcctgtagaattcaccccaattccagtgtcctatgctgacttgctcccatatctacttgataattcaatggtagccataaccctagccaaggttcatcaacctccatt

SEQ ID NO: 127361 - DNA, 260 bp, Glycine max
tcgatggtgtctagaagaaatcacatgtatgtcttcatctgtaatgtggagaatgtgaatgtctgtgtacatgatttatatgatgtcgaagaagaatctaacaaggctgcttctaatgataagcattcgcttcaaagataatccaatactgcttcaacaaacaaagccttgtatctagattcactaaagaccaagccttgccttaaaacaaagtgctttcaagacatgcaacgctctggtaatcaattaccaggaagtgt

SEQ ID NO: 127362 - DNA, 394 bp, Glycine max
gactatacactagcctttgttgaaggaaacaatacagccactatcataaaatcgacttatgctaagtagattatactccacacctttaacatataagacgttgtctatagagactacagaaggaacaccaaatctacctaaaccagagatccctcccttaccaatgtctctgaaggaaacttctccctccttgtgtggttttaggtataggaacatagacctttcccccggaattgtccaagtactagctcaaacccttcctttttcctaccaaggatatgtccaacaagcactatttgagaatttgggacgcatatcttcttgggtcgcacattgccacgacccttagacattagcctcttctttcggacgcatctacccttagagagttcat

SEQ ID NO: 127363 - DNA, 246 bp, Glycine max
tgtgctaccaccacgaatatcatctaccttgttgacatgttctgtagctgcatcctatccggaaccatatcagaataatactgatattgcctatccaatgcaaccatcaagaccttccaagtattgcactcctgatggtgccacattagtgtaccgggtaacaactagccccagttggacttccttggaagaaatgtattaccatttcctcatctttgcgaatgcgcttatcttacgaaaatacat

SEQ ID NO: 127364 - DNA, 470 bp, Glycine max
  unsure (1)..(470): unsure at all n locations
agcaccgcggctgcagcttccgccatggtantaaaatttcattatgtcntttcttcatttagctntgaagagaatgtcatggatcactatatataccagaaggtcagtgggagtaagatttgtttccttgtattatacgtagatgatattctgcttgcgactaatgataagggtatgctatatgaggtgaaacaatttctctcaaagaactttgatatgaaggatatgggagaggcatcttatatcataggcataaagatccatagagaaagatctcgaggcattttaggcttgtctcaagaaacctatatcaacaaagttttagagagatttaatatgaaagattgttcaccaaatgtagctcccattgtgaagggtgacaaacttgctttgagtcaatgccccaaaaatgattntgagcgggaacacatgaaaaatattccatacgcttcagcagttggaagccttat

SEQ ID NO: 127365 - DNA, 461 bp, Glycine max
gatccttaagtcacctgcggcatgcaagcttgtaaataaggcgtacgatccttattctatatgtggtatatgtccagaacttgaacatatgtatcacaaatttgaaaaaatctatgaacgacgatgccattattttcatttgacgcacggcttcaacctccaccttacttgaatttgacaaacatgtgtgtgagatgtacatgttgggattcaattctaaatgttgggatttaatcaatcaacctaatttcatgatgaaaaaaaaattaaatgccgaagcgtacctagattagccataatggaataatgatcaaagactgatgagaagattggctgtatgatcttcttaatgtagagagacatttttttcttatgacagtataaagagaaaaagcgaaaatgtgctgttttctctcttatattgattaccggaatccgctactctccaattgataattatg

SEQ ID NO: 127366 - DNA, 440 bp, Glycine max
  unsure (1)..(440): unsure at all n locations
acactatagaannactcagccctggcaatatatatgggataatttgcctgtttcattatgttcttaatggctctagagggtacttcctcgctaacatcttttgtcttgaatggaattgccatgacacgtttattgttactgtctttgatatctggtagttgatattgtgctgcgggaggtaattccgattggatttactcaccatccttcacttgccaatttgttatgacattcgttggtgaatcacctatgatgtcttgtttccaagggtaatctatatcctctctgatggcataagcatgaaacccatcaaagaaaaagacattaattttgactctttcgaccaattcgtagaacttgccttggattagatttctgtttgtacccttgtaatgttggaaaaaccatattcttgtaggtcattctctcgagaataaaat

SEQ ID NO: 127367 - DNA, 457 bp, Glycine max
ccaagcttgttacaatcagagatgaaagggataggattctttcgttgacatccacatccaggtacacatcaacaaacctatcaggaaacaagacctaaaaattggccaaggtcatgagaagttgtaggcaaggctttaaaaaacgatccgcaattagcaattgtccgcaatttaaaactttggctggcttattagtttcagcaaatacaataaaaaacaaaaacactaaaccagctccaagctttcttttctttacaatttccaaataccataaatcatattctcaacgggatcaacagtcatcatataaaagaggcaaaaaaacaaaagcagaagaggcaaaaaaacaaaagcagttcaaaaaccaaagcaattcaacgggaatgagaatttcttccattttcaagaattttttttttcatatttatgatttatgaggacttctacaaagttcaaa

SEQ ID NO: 127368 - DNA, 341 bp, Glycine max
  unsure (1)..(341): unsure at all n locations
ctcagcttttggagtgggtcttgagcttaataaggtccttcaatggtgattntcgaccatggagttgcagcgaaagataaaggataagaggtgagaggaggcgccatctactataggataagccattgaaggagaagcttcaccaccaaaagagtgccttggataagaagcttaaagaggaagcttcaatgaaggaagagaacgagagagatagagtgatgcaatcctaccccctaatggcattttatagaagactccaagaagattgggccacagatgtcagagaatgcgcttcagttctgatgagccttagggtttatttcatggcaatgacatgggct

SEQ ID NO: 127369 - DNA, 440 bp, Glycine max
  unsure (1)..(440): unsure at all n locations
agcttgaagttgcaatagtgctaatgttttttgttntagntactccatattgttgacaattaacttgggtttctacctttgtgatcatttagtttaatgtgctaagttgtttcaagtttggtctttggcaagtgtgtacaaagttagtacctatcactttctatattttttgttgttcagacctcactatgaagactaaaagtttcaagtctttaatatgttagtttttaaatatttttggaggtagatgttgaaggtacttacgtctggccttgtgggagagctcattttcttgaaggctatgtcagtttttagtaaaaggctatgtcagtttttaacagtgttactttattgctatgaaaaatgttgtctttgagagtggtgatgctcacacaatacttagaaacaaagtatcaataaatcgtgtatggaacgacact

SEQ ID NO: 127370 - DNA, 245 bp, Glycine max
tgtctttatgatatttaagcttaatcgtgcaacctgttgtaagtgtggtcgttggcatatgtgctaaaagatatgcctgtggattaatatgaacgatgcaaaacgctataggatatgaagagactgtgattgaggtgtattgctaaactactgatcattgaatatgtggcaaagttaactccatgatatctactaccatatatatgaactacatgcctcgatgatataaggtaatcggttatcac

SEQ ID NO: 127371 - DNA, 469 bp, Glycine max
  unsure (1)..(469): unsure at all n locations
ctcagagtcacctgangctgcagcttactgaccgacagactatactattatttttccactaactaataaatcatcatctggcatgtccccagccttcttcatttttgtatgtagatcatgaagtaaatgccccaggggctcatattgagagtgtggtttatcaccaactacaaatacttgcactgtattgccaacttcaatccaactacaacctggctgctnttataaccccatgtccttcattctcatcctaacgtttgctgcttctttccatttccctactgaagcatacatatttgaaagtaatgaataggtgcctgcattctgtggttcaattttcaaaattttctctgctacaagcttcccaatatcagcatttccatgcacattacatccagcaaggagcgctccccaaacagtcaatggcacctcttccccaagcccctcaatgatattggaagcttctttc

SEQ ID NO: 127372 - DNA, 481 bp, Glycine max
  unsure (1)..(481): unsure at all n locations
tcagcttaaataataggctattaaaccatgttgnaatcttatatatatctcccttngaaaatccaaacttgtgattcttttgcactgcataatgtcgatacatggaagacatgacaaaaatttcattgagtatatgagcactacatatcctaccacggcttaactgattaactaacattttcccactgaaatcattcaattaacaagcacactagagattatgcagaaaaggagtcagggggaacacagaaatagtgtaccttctcaaaaagattaaggcagtcttggttgtcttcaaattcaactctagcccagtcaatgccatcttgaatatattcctgaaatcaaccgcgtgcataggcagatatttagctttcagaggtattcaatattttccttcatttaaaaggacatcaatacttgtngaagcattcagactctgcatgatccataccttctgttctaacttgaataaatgacg

SEQ ID NO: 127373 - DNA, 325 bp, Glycine max
gagacacgagagaaagcattccttttcttggtagcgagacaaaccatgccacccagcggactggacagattactatattcaaaagcttctctcgatagttaatgccgatgcatgatgctacgcacacaattacgatagtcgctacttcctctgatgcatcgaacgtacctctaccaagagtctagggagcttggagaaaaaatatctgagtcttatctcataaatgcattatctccatcagggtagggatgccactgtgccaaggcatgttgcgataacggaggttcaaggaggacggattgcttatcaccagttttctgtgcac

SEQ ID NO: 127374 - DNA, 462 bp, Glycine max
  unsure (1)..(462): unsure at all n locations
agcttntgccaccttgatagagaggctcctcttgatttacatccaataagtcaggcctatcattcttcctaccagatgcttctctcccaactctcctttcatcttccaatccactcctgctacttcgttcactatgtgccgttatcccatcattacccctaccaatctcacccggagcaactcttgatgaacctattcttaccaagggtggtgaagctccatacaatcttgtcccttccttccttcgctcgggacctacatacatgctccccccttgagacacggcatcatattcaactcatttgaaaagcaagtcaacttcataaagcgagtgccttgatggaggacttgcagaacggtctctaatagaccgcgatctctgcagcacaactaggtccctcatgattgacctatcacccagcatggggctgctcttgtgcatatggatcttcaagagaatac

SEQ ID NO: 127375 - DNA, 438 bp, Glycine max
  unsure (1)..(438): unsure at all n locations
ctcagcttgttaactccactccaccncaccgaccaacagccttatccattctcgctaagaagaagaagcggccaaaagaaaaacaaaagtcaaaacacaaaaccagaaccatgatgattgtggcctcggcacttgttgtcgttgtcgcgttgtgcatgtgctgggtgtggtgttgcaggaggaagaggcaattggcgaaaaggagcaagtgggcgatctcgaagccggtcccactgagcatgaagataatggaaaaatcaggaccgttcgcgttcgagaccgagtcanggacatcatgggttgctgacctcaaagaaccctcttccgcagccgtggtcgtgttcgagaagccactcatgaaactcaccttcgtcgaccttctcgctgccacgtcacactttggaaaagactctctcctcgcttcaggcaggtgtgggc

SEQ ID NO: 127376 - DNA, 422 bp, Glycine max
  unsure (1)..(422): unsure at all n locations
taagatgagagtgctgggtctgactgcagatgactggggaaaaaatggactgcaattgtcatgtgaagacaggagagggaggaatgcttgaacagagcccacatccgcagtctgttttagcctagagcttgttagttgttacccctcctgtctntgacactgacaatgacctttaatnttttagcttcagcttgccttagtagaatccagtgtgccttttgattgcttacacattggctggtagtgtttaaaagatgaaaacactttattttgttgcaatgtcacagttgcaagttttttgttcaatgctttgcctgaacgtattctgatgtggctacatcaaaattggtgaggctactctatgttggtgccggtgagccacttgactgtatcctaccctttccttgcacctagactgacca

SEQ ID NO: 127377 - DNA, 478 bp, Glycine max
  unsure (1)..(478): unsure at all n locations
tgctgtanagttatcgtgaaagaaacatacctctgttttcaattgttaatggcaattctctgtctctgccagttaaactatagtcagtacatgatatctagctatgcataatccttggttcattcaatgttgatcaatttgaagcagaataaacacaactacagttgttattttactttgtaattatatatactagactttcaagacattcaggctttcatgctgccatttcctctgcacctagtccttgggtttcacaacagtgtcagcagaaatgatgctaaacccggctcgaatttcctttccgtatgatcttttgccctgacaatcccttctcgtactgagactcacacctctctcctttgtattttatcgatcatgggtttctttaatatgggagaacactacagatcaagagaatatataagcaatagatatcattttctcattgacttctaaactctcaagatttaatgct

SEQ ID NO: 127378 - DNA, 439 bp, Glycine max
  unsure (1)..(439): unsure at all n locations
gaagtcatctagagacatatttatctgagataaaagctctaatcatatgtagcgagtgtaagaagtcaagacacgtcaagtttgaatgtctctagacctgtataagacaaaggaccagaagaactactttaagtcaaaagacaagaaagtacttatgagcacatcggaagacctacatgacatgttgttcgatgaagagacataagaaaaagcaaaantttgcttgatggctgatacaacatcagaagaatcttattcgaatttagatgtggtgggaaatttcgatgacctgaaatctttaaaattagcttaccatgatcttttcttcaactcttccatgctatctaaagcttacaaaaacccgatgaaaggctcatcaagatatcaatctcttaattgaacgtgatcaagacagtaaaaactatgataccttgaaaga

SEQ ID NO: 127379 - DNA, 459 bp, Glycine max
  unsure (1)..(459): unsure at all n locations
agcttctcanagacttatgtaattgattactatatttggtaatggatttaagcagggagttatatggcactgaagatgtttcttatcttagaaactatcttcctacttgtatatgatgatgcatgatgtacacacaaatagactaagaataaaaagcaacaagtaatacaaatgtcactcaacaaggagttgggcatgtaaaagttaaaaatattctatgttagtccccctatctctaacaatctcccccttttggcgttgatgatgccaaactttaattgccattgagtgcatttcaagaggctttaaagtagggacttctcttgatacaccacctaaatttttttgttaacactatggccaagagaagtgtcaaatcatgtcatatcatcatcatagtagagtggtcgaatgaataaataagaatgtatgtcatgtgccaatgcaatgacaatgcaa

SEQ ID NO: 127380 - DNA, 492 bp, Glycine max
  unsure (1)..(492): unsure at all n locations
aagcttctaatgtgtcggtcatatggttgagacctattgtgttatcctcaatgttctgaacatcctttttggccctttggaaacctgtttgattaggaattggtcatatgagatttttccaaaagagagatcaccatattacatttattgttacttgatacatgtttattatataccctaatgaacttgtgaccatatggtagtcaaattcgagatgctaatgactcaganaggggtcacaaaattgtaaaacgagcaatcgtaacttgaaaccaacatctataaaaataatatatatgcatatactcattatgtatgaatcgagataatataatttgaggagtaaattcttatatatgcatcaagatagtataaataataaatggttaattactanttttaatagttgtcgttatcaatcccgctttgtgtgaggagcatatatgaagagcagtgttattaaatagtggctatggtgccatggtggaatgg

SEQ ID NO: 127381 - DNA, 439 bp, Glycine max
agcttaccagaagcgccaatcagtggactctgttgctggtgatattgcctgagctatcatgagtaaagatcgtttacccactcattaatacaactagcttattgctagcaaaatcgagtcatattcatagtcctgatgctttcaatgttaatttccttattgtgagaatgcttcttctgatgatgagatggcttttgatctgaggatgaatcttcttcaccctgaaaaggatcctgcagtgcaagattgaccaaagttgaccaaaaaaagtcatctgtgtccatttttttacaaaggagtacactttttcgaatggaaacgaccttctaaggagactgcattccctactagcaatgtgttgattgatattttagccaaattctattgttaaagggtaaaatttgcaactttatctttattgctttctagtcaaattcta

SEQ ID NO: 127382 - DNA, 488 bp, Glycine max
  unsure (1)..(488): unsure at all n locations
tgacttttgcgggttgatttcgccttagtttcactttagttattattcaattcaattaagaaagagaaatcccaaagagaaacgtccgattgattntttttgctttattttactaaaaggtattttttgattattatattattattttacctcttttttgatttccaacgtgattacggcacgaccgaacggttggatttcattttaacagaaattaacgaatattacaaatcaaatgatcggtgaaaatttattttattttttgattaggcgagaaatgacttaaataaatgacttaagcacgtcaaaagagggtacggaaagtaaatgaaacgagaaataaaagtacacgaaacaaatggtgaccaccacgagtacatagaatgaattgaaaagctcggttgggggtacttaccggntgaagaccgaagaanaacgaagaacgaatgatgaatgtcgaagaacggttgaaatcttcgcgtattacc

SEQ ID NO: 127383 - DNA, 451 bp, Glycine max
agcttcaatccttgatctgagaacggtgtcttcatctgtgatattatctcactctaaaatgagctcatcttgtggaaaaaagattaattaagtaccaaattgaaactctaaatactcacttaaaaaaataaagaattttttatttcgtaaaagttaatgtaaaattctatcaaaataggatgccatttgttgcattttacaggggtagggtgtataatgattgtgagtggaagcattaagttaattttgtaaaagttgtgaaaattgtggaggaaaaacaagtctaagaacaaagacgagaaagctgattcgaccaaagatctgacaaatctcttgaaaagattgatggaatcagacaaaaatgcaatattattttcatataatttctaaggaaagccataagttaattttatgaatcattgagaccaaacacaaaaccttgaaacaagtg

SEQ ID NO: 127384 - DNA, 445 bp, Glycine max
  unsure (1)..(445): unsure at all n locations
cttaatgtaatataactggcaaagtaagcagaanaagtaggcaaaccttatacttgacctcagtcttaccaattaaccacaagtgtacttactacttacttggtagcctcgatatatccgtatcctcatgtgaaataatgtcttttctttcaccttcttttacactagaaaacaagttgagtcgagtaatgtctgtttacataataacgtgtaaatcctgcaagtgatatctcacctctccttgtgtcacactattcatataataaaacctgagtattaattngaattagctagtatctcctttaatgttgaaacgaataatcttcagacagtgatcacaggtgcaataaagtgctcatcaacatggtcattgaaattctctgagtaagagtaaaaccattatatagtgatttatttacaaacatgaaagtgtaacttaaaaaat

SEQ ID NO: 127385 - DNA, 446 bp, Glycine max
  unsure (1)..(446): unsure at all n locations
agcttctagtttgttatttcatctctatccttctaacttaaaaaaccttatactgattgacgcttcaagagttttacaccggactttactattcnttggtgntttgttttacttctccattaataaaaaaacacatcaagtcacaaataacttttaagataattattctaaaagtcaacaaatttactatatgaccaattgtgattgaatgataatgtaaaaatattttataaggatgtttatgagtctgaattaatccatgatccaaccctgctcaatatagatccaattatattcggattggataatgggttgtaaattgtcaacttgtaatccaatccgacccggtcatataataaaaaatattaatattattaataagaatatactcaagactaaattatgactttgagttcttaatttttaaatctatgatttggtctcct

SEQ ID NO: 127386 - DNA, 368 bp, Glycine max
  unsure (1)..(368): unsure at all n locations
tcgctgttatggcattgctcangaaacactatctaatatattcttattgagacaaacgcatctagtagtctgtttctttttttattatatatttatggggttctcaacgcacgttaagtggttaacagggttaattttctcctttgtgtgcatctacattatatgttaagaagtggtaagccacaataaataagttgatacaatttgttctgttaacagagatggctcagctggtttggcgtcctcttcaggtgcagctgaggtaaatattcattatctgtgtgtgcttttggtttgtttagtctcactagcctaagttatgtgagctatggtgttaataatgatgtaaatgtatgccttggttgtta

SEQ ID NO: 127387 - DNA, 441 bp, Glycine max
agcttgtaatcgattacacaaatactgttatcgtattccagagcatattcttagataatgttcttagcaatcacatatttgtatgtggttcatgaatggctatcagaggcctatacatatgtgacttgagacacgaatttgctaagagtttttcagaacaaaaaggtcttatcctcttaaaagcacattgtttatcctcttacaaattccttgggcaaaacacttgtgattcaataaggaattatttgagtgctcaaattgttcaatctatctctttcaagagagatttcttcttctcttcttctttattctgaaaagggattcatagaccgagggtctcttgttgtgaaagaattctaaacacaaaggaaggattgtccttgtgtgtttagaacttgtaaaacgaatttacaagatagtgaaactctcaagccggttgct

SEQ ID NO: 127388 - DNA, 466 bp, Glycine max
  unsure (1)..(466): unsure at all n locations
cttgaattggtttagacatgattgatacatgatttgggacttgtatgaattganttgagcaagattggatgaggggaagtgtgattttcgaaatctgcacttatgcagaattttgctgtcaaaataagtgcagcaggattntagcttggtgcagaaaatgcttgtgtgtggttggctgtggaaagagtaatgtaaaatgagttctggatgtttgctagtagatcccaacggtcacaatgtaggcttatgcactatagacttccagtaaaattttggagtcgatccaacggttaacgaattggatcgaaggaattgttactgtggtctttaagtgagaaaagctgtgattttggttgatgtgttgagcaaaagtttctgcctttgctctgttttgcttggctgtgatagcttgtgctgtttgaatgttgctttgcttggatgttgtggaagcttgagaggattgatg

SEQ ID NO: 127389 - DNA, 224 bp, Glycine max
  unsure (1)..(224): unsure at all n locations
ccccccccccntttntcccnaccncnttagatgtctgtctcgtcgactagacgcgcgactatgcaaaattatgttatactaatccagccaccgtgaagcaaatggataccctactcgtaggctactcaatttggacctcgaaaatcaatccttctcaagcacagccagaggtgtctgtcgatctggcataaggagcaactccaccgcccgatatgatgaaactg

SEQ ID NO: 127390 - DNA, 305 bp, Glycine max
acccggtgttgatagatactatgatatgggctacgtgagagtacgtgagctcagttggacgtgggcaacaggggatggtgggtttatgcgcgcattgtggatgtggaaaacttgatgtgcaccatcgcccgaccgccacctagtaccacatgtgatgggtaccccataatcctacaagcttgagatgaggaagtgtcgaatggtgaaacttcctgcttttattgttgaccacagaatggtacctgtagatatgtcacggcggtcaggagaccttgaggacctcaagtggagtgctattgcccaaa

SEQ ID NO: 127391 - DNA, 345 bp, Glycine max
gaattgatgcaattcttccaaggagactccctgaagattgggccgcagatgcatgagaatgccctatggttcttatgagccttatggtagattttgggcccatggactaagtatgaccccacttatctttgtacatattatatcacggtttcattatttctacgcgcttgatttagggcttcatagagtaaggagggtaccctactaatgtaggactttttaacccttgcattttaagacacctacacttttttttgtttaatgggagttttgtcatttcacatgcattaagtccactatttgatgtgtgtgtgtgctgggagagacaattaattgaattgggac

SEQ ID NO: 127392 - DNA, 309 bp, Glycine max
  unsure (1)..(309): unsure at all n locations
tccatcacagcatgaccacagatcaacctccatttcctatgtctcacacagacctgngtatagggcctaatacctcaatgtttgtgcaaaggtgtaggtgtcctgcgtgcatagaacaaacaaatattcctaactacgaatgtaatagatagctagacacacaaaaaaacacagtaacacagcaagggttatatacaaatatggacaaaataaaagataaaaggaaaaagggaacataaataaagaagaagacacgataaaacattgcacactgatcaaatggcctaactctctaacaagtccccagtg

SEQ ID NO: 127393 - DNA, 473 bp, Glycine max
  unsure (1)..(473): unsure at all n locations
ctgaggcatgcaagcttcatgaaaagcanaaaaggtaattacattttctcattgacattngaattcaggcacatataagacacaaatacatagaaaagtcggtcaccgtagtccaaagcagatcttcaggatggaaagtaattaaaaaaagcttaggtaaaggaaacaaattatgcaaatatacagcataccgtgcagcatattctgagaaatgtttcccaggttgtcgctgccgtaaagtgtgaagatcaccgcccggacaatattccattaccaaacacaagaatcggtcagtctcaaaatgtgtatacaaagttggtagaaacggatggtccagcaactgcaatatctccctctctgtctgtgctctagtcagcttctttctgcttgctagcgatgccttatccataactttcattgcaaaataacacctagttccactcagctctgagagatacacacttccaatatca

SEQ ID NO: 127394 - DNA, 171 bp, Glycine max
cccaaccatttgtcatagatctttttctgtagttttgcagcgcgtattctcataaaggtgaaaagaacatatgtgggatcaccttttggcttgattagcgccaaacaagaacgtcccgctagagcacagacgggtaaaaatacggaaccaattacgttttgctcgatgacc

SEQ ID NO: 127395 - DNA, 473 bp, Glycine max
  unsure (1)..(473): unsure at all n locations
ttaagcgacgcagctgcagcttgccctcatagaatgcttacgaactattgtgtgcctttttgctgacttcacttctcttctagctaggtaagggccaaatccaaatgcctatatatagcaacagataccatttgactttgcattctaataatggatataaccaaagagaaatagaagataattctttctattcaaaggaaattaatatcaataagtatagttagtaacacgtagaaactagtaatgaagaaataaagctttgtgaaaacaatagcgcactttagaatcttacaggtagttcgagtaattatcagcacctttgtattgaaagcttacctaaaatttcacaactttaaaggccggttttgaaaatggcaattacattatacatgcatgactggtagtgtcataaaacgtcataattaaatattggtgtggtgggttagtcatttgtcaatgcccncattataaat

SEQ ID NO: 127396 - DNA, 480 bp, Glycine max
tgaccctgcattgctgcgccctggtcgaatggatgttcttattcacatgtcctattgcactccctggggtttcaggcagctagcttccaattacctcggaatcaaagagcattctctcttcgaaaagatcgaggaagagatgcagaaaacccacgtgactcctgctgaggtagcagaacagcttttgaagagcagccacatcgaaactagcctcgaacagcttatagatttcatgagaaagaagaaagaaactcagaaattggaggctaaaaagaaggaacaagaggccaaagaggaacagcagagaaaggaaattgatgatggtggtaaaggagaaaaagttgacagtgatgataacaataatgaaaagaaaagtactactacctagttaaataacacttcttgaaacttttgattaacatcataccttaatcaaaaactcgaagactcatatttatgagatttatctctatttatatg

SEQ ID NO: 127397 - DNA, 464 bp, Glycine max
  unsure (1)..(464): unsure at all n locations
ctgcagctttgtctanatatgctggtgacataattgctatgtaatcatgctccttcctctattatatttcacgataataaaaaataaaaatacttctcccaattgggcttcctgtttgatggtaaatatagaaaagccatatcaactctacaattttgtaatcctaagggatggaaagataaaaacaaatcccgttgagcattaagctaaggaatttgagctatttccaccaaaattttgtgaagagattgtggcttacaaaagaatggacagtggtcactgcctttgatcttgaaaactccttcaggtggattttgcctcacaagcttctcttggacatctggtgaaagcgcacgatcatccaatgtttgaatgtaaaaccggcgaccagtaccatatttgtcagcaaatagagacagtttctccattattggaccaagaaggctatgtctcatggaaaccat

SEQ ID NO: 127398 - DNA, 285 bp, Glycine max
taactctaggtatgtatctcccatcaaaagttaaggactaatattttcaagtattaagatctattaaaggtatagtctctcctaatagatatttttttatacacatgaacttgagaatcaaatctcacatatttaagggataagattatttattaattatgtcatattatgttgatagtcttttgtttctatttatactaatatttttagcatgtacattgcatagaataaatatttgttttttatatacataaaaaaagataaattaggagggatgatctatta

SEQ ID NO: 127399 - DNA, 434 bp, Glycine max
  unsure (1)..(434): unsure at all n locations
gnatatgaagattgggatcatcataacatcgaacggctgcattgtatccatgtgcgctccaagctcgaaaaacaccctctatagcatatgtgataaacactacactaggaaaccccttttcttcaaaataagtctataggaacatgacacgacttttaatatgtgttaacaactccaaagagtcagggctcaatatattcttcattggattcgatagacctaagagaatgtattgtaacaaagtctgtgcaaaatgaatctacaacatataatattaaatgaagccgttaatgcattctttaatgatgtatcaaatcatgagatatctctacttctgtatggaacttcatacacatatgtgtgaagcatggcctaatatcacataagactcaacttttaaccgtagtattcattcggatttaatcacaatatct

SEQ ID NO: 127400 - DNA, 456 bp, Glycine max
  unsure (1)..(456): unsure at all n locations
ttaagtcaccgcggatgcagctagagatctacctcatgtgttttttctatcctnnagattagcaaagaccttctttagttgtgcttcttgatgaacaatcttctcacttttgatgcatagatctctataggatatagcaagctcatcaaaagtgatttcactatatgtatcacttgaatcttagcagattcgaactcccagcgagtgcattcacatctttgtcagaatcactttattggtcactctctggatcatcagaccgacatacagaaagtcctttcctctgctttttgagatgagtgggacattcagctatgatgtgcccatagccttcacacccatggcattgaactcctttgctgagactgggtttctcatctgacccttgatggtatacactacctttcgtgatgacaaaagggatgtgccggacatgaggtatctgcctcctgccca

SEQ ID NO: 127401 - DNA, 232 bp, Glycine max
tttactcggcagtgaaaaggcgcgatttttatcatacacttagttcttcctgcggacgcactccacacgtttgctgttcatggcaataactcagagtatgagttcagcacgtatacttatagaccacatcatatatcaaacgactggtgatgtagatgaaactcgtgatcacattataccctacgggtcgagtcttgagcatcatatagtctcactgatggaggtgatgtat

SEQ ID NO: 127402 - DNA, 457 bp, Glycine max
  unsure (1)..(457): unsure at all n locations
gcagcttgaattctagaaaanaatttcttatttatgttctaatactcatgcatcttttacattcaaaaccggaaacttagattcctaggcatgagtcatccttttggcactttagtctagcttctacaaactacccacacactcacaatgtgcacaatttgtttcgcaagctaagttccacaaaatcatgcgcaaatgccattgaggtatttcaccaaacacttggtgggcgcatgtttaagcatgaaaatcaagggaatgagggcaatgtggcatgccctattatctcagaatgcaccctaggcctaaggtaatcccctacaacccctcaattcaacaaaaacaagcaataattcaaggataatccctcacattntgagcaaatacatgcaacttaagcaccaaaatacatcaatggaaagccagagagcccaaaaatgagggtcttacttgttgg

SEQ ID NO: 127403 - DNA, 387 bp, Glycine max
acatcatatctatctttgggaagacccaatataagacatcatctgagactaacatatggaagattacgtcaatattctttgatctttcatactggcccaatctacatgtgtgtcactctgtctagacataatgcatgtcgagaaaaatgtatgtgataggttaattggtacccttcttaacatcaaaggcaataaaaggatgcgttgaaatgatcgcaagacctggttgacatgggaatacgagagcagttgcatccgatatgagaaagtcagagaacatatctgcccccatcatgccacacaatgtcaacaacagataatagcagtttgtgtcaatgactgcttagtgtaatagtcccacaaggatactcttcgaatataagagcc

SEQ ID NO: 127404 - DNA, 459 bp, Glycine max
gcaagcttcgtccgcagatccctcttgaagactatgcctatactaaacaacattattgtgacaacataattaaaaccaaaacttaatccgcagatccctcttgtaagattaagtttcgatcctgcttcaatcaagttctaaggcaacagtacatttcccaatgctaaagtcacctaactatgcacacaaatggatgattagaccaaaagcatacaaacatgtagcattgaaggaagcatagaacacagaaaacataatcaattagatattaggtatttacattagttgttcattagaaatccccaactagggtgcttagccagccattacaaagaaacccaaacaataataatcttacaaaacctaggtttcaatgaacaagctgatcctcttgatgtttctagggcttttttcccgaaatagacactgtggtgtgctctggaatctgtgccctttctt

SEQ ID NO: 127405 - DNA, 316 bp, Glycine max
  unsure (1)..(316): unsure at all n locations
tctntgaataaagttctccagcctcactgttataacaatattgctttgtgttctangtattcatccaaatattgaaaatggttctaatgccagatatcacattagaaaagagagtaatgaagcaagaattcaaggatagaggagttagaactattacaccatttcaaccttgcaacaaagtccttgaatttattatctaactacctttgtcttccctcagaaaccaattgtgccagatacaaactcttttcatcgtgcactacatcctgcaacctacattccacatatacaccaatgataatgaggaaatgattaa

SEQ ID NO: 127406 - DNA, 462 bp, Glycine max
  unsure (1)..(462): unsure at all n locations
atccttaagcaccgcggctgcagcttggaaattgacacgacagcctcccatttttcttcataaccctgaaaacccttagtttctcactttgtccactccattgcgttgatacctcagactttntttctctatgggtttcctctgtgccctattaactcgccgcaccctctccctatcccttacttggtgccctcagtcttagttcatctagaaatttagaggaactaaaactgaaattttttaattttaaagggactaaaaacatgttttatccttttttctctatatattaaagcaaatgtggttgtcacttttttataattacttgaaactcttgtgcttgataccttgaacagcctattaaagtgatgctcttgttgatatcacatttactaaacacttgacttatgggtcacatgatctctaattaattaaaaaaatgggcatatataataaaattgt

SEQ ID NO: 127407 - DNA, 483 bp, Glycine max
actaagcttaacaaaattatacaagaatttgttcattgttgagtgaacttcccgtttacatgatgataaaagtattgaagagaaaataagacaaaaattcgaagacaataaacaggtaataatgaactaaccaaaatgaaaaaaaaaaaatgatgaatgaacaaaatagagagctgaggttgggcttcggggccttgcagatgcaaagaagatggtgctaagccagcagctgagtctgtgatttggttaacgagatggtagtatacatggggaataggttgcatgatcagtgactgagaggggcagactcgagatttaatgattcgggccaaatatgaaaattaaaatttatttaataaatatattaattagcatcaaaattcatatattatgtatttaattatgtgtttttcaaattcatttaagaacatataatagagtatatatttgtagaagcaaagatattttgatggtttgatgatg

SEQ ID NO: 127408 - DNA, 442 bp, Glycine max
  unsure (1)..(442): unsure at all n locations
agcttgaagaanagactatattatgtatctttcttgngtatagcaatatctctaagggctactgtgtctacaacttgcaagctaagaaactcgtcatcagtcgagatgttgaagttgatgagtacgcttcttggaattgggatgaagaaaaagtggagaagaacgttcttatacccgctcaactacctcaagaagaagctgaggaagaagacccaggtgaaccacacaacatagagatcaagaactatcatcaccagagtctactccaagacgagtaagatctttggtgaacatatatgaaacttgtaacttggccatacttgaacctggaagctttgaagaagcgtcaaagcaggaagtatgggtcaaggcaatggaagaagagatatagatgatcgagaaaaacaacacatgggagttagtaaatcgtcctcatggaaaa

SEQ ID NO: 127409 - DNA, 263 bp, Glycine max
  unsure (1)..(263): unsure at all n locations
ngtgcgaatcanatcactcctgcattntatctctagcattctttctntctttctttacccactcctcacgtttggttntttagggaaaaacaccataactaaacgcgccacaaggcatccttatcgcaccagatccaaatctagaacgatgggtgatcaagaggagacacaggaacagatgaaagccgacatgtcggctctgaaagaacagatggcctccatgatggaggccatgttaggaatgaggcagctcatggagaaaa

SEQ ID NO: 127410 - DNA, 380 bp, Glycine max
  unsure (1)..(380): unsure at all n locations
ttaacttgggtttctacctttgtgatcatttagtttaatgtgctaagttgtttcaagtttggtctttggcaagtgtgtacaaagttagtacctatcactttctatattttttgttggccacacctcgctatgaagactaanagcttcaagtctttaatatgttagttattaaatattcttggaggtagatgttgaaggtacttacgtctggccttgtgggagagctcattttcttgaaggctatgtcagtttttagtaaaaggctatgtcagtttttaacagtgttactttattgctatgaaaaatgttgtctttgagagcggtgatgctcacacaatacttataaacaaagtatcaataaatcgtgtatggaacgacac

SEQ ID NO: 127411 - DNA, 468 bp, Glycine max
gcaagcttatttgatgatgccaaagactcaagtcttgaatcaagattcaagcaagtttcaagaaccaaaaagtcattcaatcaagattcaagtgaagattcaagagaagactcaagatatgcaagaacctcaagaaaagcatcaagataagtataaaaagaatttttcaaagaaaagattgaatagcacaatttgtccaaaagaatttttcaaagaaaaatctttatcaaagtttttactctctggtaatcgattaccataaggcagtaatcgattaccagaagcccaaaacagttttataactgttttacaaagtagtaattgattaccatgggcatgtaatcgattaccaatcttttttaacattgaatttcaaatttcaagagtcataacttgtgataaaatatcttcaaaatagtgtaatcgattacacaacttttgtaattgattacgagtggttttgaatgt

SEQ ID NO: 127412 - DNA, 275 bp, Glycine max
ctcagctctatccaagcattctggtggtaaactccttctttctaggcttattctctattggatggtgcctcccctatcctcttctcctgtgccttccgctgcatctccatggtgaaaaatcaccattgaatgacctcattgaagctcaaagatccagcctccatagaagctccacaggcacgcttgcatcaagtggtgtcagagcgcaagagcttcaagaacgtactgcttaaacctccattgatatgttatgaataacgtctcttacagagaag

SEQ ID NO: 127413 - DNA, 421 bp, Glycine max
  unsure (1)..(421): unsure at all n locations
ttagacaatgaaggaaagctggagttgctgcacatgatgtccaacgttatgtcaaagaataagatcgggctgcacaatgcacaaggcaagataaagtgtcaaatgaagaattgaagctgcaggattcacgatgtcggatacaatgtccaggacatcctgcccganaatactggagttgctgaaagcattgaagttgcaggatccacgatgtcggacacgatgtcctgacatccggcccgaaaatactggacatataaatctgttatatctttaacagattattgtgcagttagcaagagataagatgatctatctttaggaacgaattaaaagataattaaagttcgaattacaaactataagagttcgttcagggattaaagattaaagattaaagataaaaactaaaagatcaaacttg

SEQ ID NO: 127414 - DNA, 391 bp, Glycine max
actcagcttgttgggcacactggtggatgggagaaaagaagaagattgttgcgttagagagagagagagcttgtgaaatatctttggagctgagtgaggagagagagagataggtgctttgtggatattaaaaggctgttttcctttttctattattatatggagactatgccacatgtctctatttgagtggagctataagggcccgctttctcttttgattgtgactcatactgagccacaagcatgagaatatctgaccttagacacgcttaagatcctgtctcggattgcgtgccgctactctgggtgcactacataacgtatatctgagttcatcggagcctgatttcctaaggttgccatacatatatatcaaaacgctcataat

SEQ ID NO: 127415 - DNA, 469 bp, Glycine max
  unsure (1)..(469): unsure at all n locations
atccttgagtcacctgcggcatgcaagcntttcatactgtcgtaaacaaactacggattgtctgtatatcaaaattaaacttctattactgatgtttgtaatgtcatagattaatttaatgtattacttcctagcgttttactttgtaatgggtgaatattacgtttgtggacttacccacgagtcaaaatttggtgcacggatccgttttagcgaatacaagtgaaatgaaaaaaataagtttggatctgtttaattagtaaaacggggctataaattgatccgcgattttctttttctgactggagcttattctgtatttgtgtgagtaattctaatatttatagcaacttaattggaaagcacttgtattattctgtgggtagaaaaatgttgcattggcatgatttatgtggtgggcaatanataagctaatctagttatgtctgtgcacacagatgatgtatgt

SEQ ID NO: 127416 - DNA, 488 bp, Glycine max
tcatcaatagattataaatatgtgactatggaatgagtttcaataatcattaatcatcaaccatcaatcatctatgaatcatctattgtttcaatctatacaacatcatctctcaacatctttcaatcaatctttcaatatctgtctacagaattttctgagtcatttctcttcatctttttaaaagttattgatcaacactttctcttccaagaaaagttctttgttcaaaaaattgtgctattcatttttttcattctcttctccctttgccaaaagaacgagggactaaccacctggattcttttgtgtctctcttctcccttacaaatgattcaaaggactaaccgcctaagaattcttttgattcttcccttccccttaagcaaaagatttcaaaggactaactgcctgagatatcttttgtttaccctttacaaagactcaaaggactaacggcctgagaattctttgtcccaacacactgg

SEQ ID NO: 127417 - DNA, 444 bp, Glycine max
gatccttaagtcacctgcggcatgcaagcttattccttgcttcagaaactattttgtcttgttttgtttaataatggcattcgtaatgcctatgttttgcatgtttatctgacaatctatatctctggctttatgcttatagaacgtgaaaacaaaacaatggtttaattcaaagatcgatcctaacattttatgttccagttcttgaaaaaagacaaacgcacaatctaacttggtattattttgcacagtaacaattctttttctccatcatacaatgctctggacatatatttttcccatgttgtggccttgatcctcgttgtggatctaagaattgcagcttgagtatggtatgcaactctgtattgccaatgcaccgagggatattgttagcaatcaggaaccagaaccatcaccactggagaacaatgaagcatcaat

SEQ ID NO: 127418 - DNA, 475 bp, Glycine max
  unsure (1)..(475): unsure at all n locations
ctcagctatctgcttngtgcttcttgatatattcgtaaaggcatttagctgatcattataatgccattcattataggagttataaagctgatttggtaattgaaagacagggagagagatatataaagttaatttggtaattgaaagaaagggagagagataggttgtgtgttcgaatctgtcctactataaaaaactgacaaactaacaatttacgttagttgatgtaaaaaatgcatttattataaaaattgggatgctgagcttgttctccgtattaatttgggtaacctacacatggtgacttagataattcagacagaatttgtggagaatctaataaacttgtgtttggaacatatattgcaatttgcgttttagtattttccatggtgttctccatgtcagatatcctcttcacagcattgtccttcacaatttagtatctttttttgttttntatcagctcagcatg

SEQ ID NO: 127419 - DNA, 449 bp, Glycine max
  unsure (1)..(449): unsure at all n locations
agcttgaatagaacctggcataaatgtatattatataaataaaaactagctctagtacccttaatttaaacatgtgatgttacatgcctttctagaaggaatgaaaagatatgcctcagcttgacggacatgatatataagtatagtagagtcatcaaagaaaataccaaatatattatctttgggatagtaggcaagatatgttactataggtggtggagacattatagttgtcaaagtctgcgtaaggcaaatgtgtgacatacattaagttaaatataaaaataacatcatttttcttaacaataacattaggttaaatataatatgacaaaaacatcattggtagtagtaaaataaaagcaacaagcgtgatctcaataaaaagattaaagaaagaanaacataggacacagaaacaaaatttgcattgagttttttttcccata

SEQ ID NO: 127420 - DNA, 476 bp, Glycine max
  unsure (1)..(476): unsure at all n locations
actaagctttgagaattttggtcggcgctaagcctgactctgtcatgcttagcgccactntgcttctataagttntcctttgaataaggctaagtgcgtctgtgtgctaagcccttgttatgtgttgagctaagcgccctgcaacgctaagctcaactccctcactgtcgtgtttgtggttaggctaagtgcatcctgtgcgctaagcctgagtgttattctgttgaggctgagctaagcgcgtcatgccgcgctaagctcagactctcttctatttcgaaaattgtagacttaggctaagctcagttgtgcgctaagcctattctacagaaaaaaatattttctatgtcctcatgctaagcgccagtccgctgcgcttagcacctgagtaaaatntcataaggtgcgctaaacgcccaatcaatatttcaggtntatttttatgattttgtgaaaataacctgtgctaatctctt

SEQ ID NO: 127421 - DNA, 264 bp, Glycine max
tgtggaaggagtcttgacccgagatcatatatctgccacttctatgcgcccggggaactacgctgaatgagaaatgtatattaaacaagcgaacctagagtctaatctgtcccttagactagcaatcacacattctatctaggataaaacaaggcgatgacagcgacaataaaaatacgatacactgcacaccgggtgatactacagtggagcgacatgcgatgcaatcagatatataaattctttgttatgatatgaatctat

SEQ ID NO: 127422 - DNA, 455 bp, Glycine max
  unsure (1)..(455): unsure at all n locations
agcttataaanagggaagctatttttatactctgttcaaagtaaaaatgttgtttctacttaaaagcccttttaaattcttcacattgatttatttggtccctctagaactatgagtgtgggtggaaattactatcgcttagttatagtagatgattactcaaagttcacatggacttcgttttagaaaaccaaaaatgaagcttttgatgttttttgcaacttgccaaggtgattcaaaatgaaaaaggtctcaacattgtttcacttaaaagtgatcatggaggtgaattttaaaatgattcttttgaaaatttttatgaagaaaacggaattcaccacaatttttctgcccctagaacaccccaacatagtggtgttgtggagagaacaaatagatcccttgaggaagaagcacgaacccttctaaatgaaacaaagttacctaagtacttt

SEQ ID NO: 127423 - DNA, 188 bp, Glycine max
tgatcaatacaagagccttcgctataagcgattaatacaggtagatataagtccattgattagatatggtagagagagatataagaagtgattaggaacatgtaagacgaggatatagagaagttgagcgatcacatctgtcctgatagaaaaactgacaacgaacaaccactatgaatgaaggaaca

SEQ ID NO: 127424 - DNA, 399 bp, Glycine max
  unsure (1)..(399): unsure at all n locations
tgagatctataatttacttagctcctttttaatctccatattaatgttgcgattggtgnttatgcatatgcattgatttgactttgctaccccatattgatttgactctgttacctgatataacagtaaccaagaagtacgttttccttaataaaatttctggttgtgacacattaataaagctatattcctctgtatgtgtggtttttgaatgttgattacagagtggcctgttcatgttcacatggttgtcatattaatgtctgttttagatctcacatttgcttatttgaaaatgctttgtcttgcttgtgtgtggcgcaaatgccgcacgatcgaagtaaccatataaaacatcattgtccatccttaacaaagaataatctaagtagctttatg

SEQ ID NO: 127425 - DNA, 205 bp, Glycine max
  unsure (1)..(205): unsure at all n locations
ttattactaaagagtttcctttcaattaataaggacttgcgcaaatattgtagaagaagcctatttgcttcagaaagtattagttcagggccctntgtgtatgcaactatgccttaaaacaacatttgtggtacttgcgcaatcttactcctttcaagtgtgatcattctttctccttgaactccgcatcatgccttaatgacaa

SEQ ID NO: 127426 - DNA, 415 bp, Glycine max
ataaacataaactgaatcgaattttataagtcacaattaacttattcgctaattaaaaagtctttacaaaaaataaatgaaagaaatgttataaatcaacttgatttattttcttttaaaaaaataatctttcgtacatatatattcaaaaaatatttttcataacactacattctacattatgaaggccatttgaatcatgccttttttgataaattttgagatattctaatttaataaaaagtaaataattcgaaatttgcacttttttactttatacatcatctctctaaaatcgtgaaaaaataatacatgaacgatatatcatgacgtgtcacccttagatgcactatatttttgtaatattctaggcgttaacattccaacacgataggtaagggggtttaatatggct

SEQ ID NO: 127427 - DNA, 440 bp, Glycine max
  unsure (1)..(440): unsure at all n locations
tgctatcatgtataccataccttgtttattatatataaaaggcccgaaanntctagtacacacttgttaaattcttccaaaaaaaataaatggttaagctagaaacatgctgaccacaaaagtagattttccaatatggcaatcacccaacaagctgatcttgatgttcaccaaatctgaatcggagtcatagacgccagtattggttgcagcggaggataagacgtcttcaactgtggccagcggcgaataatatgggtccctgaggggtagttaccggtaatgagatgggcttcctgcgacagagcaaacaacaagtctgttccaaatgaaactgaaaaagtggccaacgaaatataccgtgttgaggaataccctcctgacgtcgacacaaacgattttctggcacagctgagacatctttctactggtgacatgaa

SEQ ID NO: 127428 - DNA, 485 bp, Glycine max
ttaagtcacctgcggcatgcaagcttccttgagaagctagagcttagctacacacattcttctaataactaagctcacctccttaggaagagaagctagagcttagctacacacccctataatagctaagctcacccccatgacaaaatacatgaaaatacaaaaaaatcctactacaaagactactcaaaatgccctgaaatacaaggctaaaaccctatactggtagaatggccaaaatacaaggcccaaaagaagaaaaaaaaacctattctaatatttacaaagaagagtggacccaaccttgacccatgggctcaaaaatctaccctaaggttcattagaaccctaaggccttctttatcagctctagcccaatcctcttggagcctcttgctcatggctctggtaactggtccttttctagggaggatagcatcacattatgacaagctcagtcttaactgtttcacaagccgggagct

SEQ ID NO: 127429 - DNA, 479 bp, Glycine max
  unsure (1)..(479): unsure at all n locations
gtgtggaagagtcagtcttcctacctttatttgttttctcagagnggcacctggagatatgtcgcgggggtcaggagaccttggggacgtcaggtggggtgctatttcccaaaaccaagcttgaccaatcccgacccaacccaggcataatcagtcagtgagaacctgtgacatacctaaacaggcgagctcctggcagtcaaccaataaaagaacaaagaccacaaagcatggaggcttgtgtggtggctggccagctatggatcttgagtgatatctggaatatggcctctggtaatcgattaccaagggtgtgtaatcgattacaaggcttaaaaatgaagacaggaagttaagatggcctctggtaatcgattaccaacggcgtgtaatcgattacaaggcttataaatggagacaagaagctgagatggcctctggtaatcgattaccaacgggtgtaatcgattaccaggctt

SEQ ID NO: 127430 - DNA, 356 bp, Glycine max
gtctcatgtattgtacaaaatgttacattgacaaaaaggtctcttatttaaattaaaaaaattatcttaacatttgtggacattatttatggttgtaccgatcttgagggggtggactgtggcgccgcactcatttattttgctttccaattcccactcttccataagtacttgacgcaattgggtgtctactcactaaatcaaaacgcatgatcctgcttgaaaatggacttgcttatctatggtcaatcaacaacaattttttattatacaaaataaccttgttttatgatgcaactttgatgctcttccaaagtatttggctctttcactttgttaacagatataaatttcaa

SEQ ID NO: 127431 - DNA, 297 bp, Glycine max
actcagctgtaactgttatctgttgaaatgaggtataatggcatcttcttttataacataaagattatactagttcagtagtataaagggtgatccttacctttatttaatgcatagtttctatggtcatgctagttcaatagaattagtgacttttgactctgttgaagtgatggttctttttggagcatcgtcatggataattaagctttgggatttggaagaagcatagagtaagttatttagcatattttgaactctggactgtataatgtataatgacgctattcatatttg

SEQ ID NO: 127432 - DNA, 464 bp, Glycine max
tctccggacccaagcacctgagctgcactgagtctagcctaaatcggctctgtctttatttaaatccttcacgcggccccccaacccataaatcggctccgcaaaccgaaggtgacaaatccactctcataattgcgggaggcaattgacccatctatgaccacgctcaagggtaggggcgaataacaagaaaagggggaccatgtcgcatagcgccatgagttcagaatacaccctatgccaaggccatcccttacaacccctgaatccaacaaaaacaagctccaatccgaggagacatgccttacaatttttaacaaacacatgcgatatagggcaccaaaatacatcaatggaaagctacaaagcccaagaaagaagtacttacctgctggagaccaattatagagcaaaacggaatcaaaaacgcccaaaatggtgacctaaaggctgcaaaatccgtg

SEQ ID NO: 127433 - DNA, 308 bp, Glycine max
gggcacgattggatgagaggaagtgtgattttcgaaatctgcacttatgcagaaatttgttgtctaaataagtgcagcacgattctggctttgtgcacaaaaatgcttgtgtgtggttggctgtggaaagtcttatgcacaatgagttctggatgtttgctagtacatcccaacggccacaatgtatgcttatgtattatagacttccagtaacaatttggagtcgatcccaacggtaacgaattggatccaaggacattgttatgggggccttaagtggagaaagctcggattggttggtgttttgg

SEQ ID NO: 127434 - DNA, 163 bp, Glycine max
gctgcaagcttgacttggagtgttacgactggtttgtttgatttttttataaaaaattcatccgaaccaaactttaaaaacacatggttcgatttggtttgattttcatctaaaataaaagttgaattgaaccgaaccaaaccaaaccaattttttgggggtg

SEQ ID NO: 127435 - DNA, 482 bp, Glycine max
ctcagctgccgtagtggaatggggatgcacgtaataatatacccccattataatttgttttgaaacagaccctgtttcgtaaattgtttttaaaagaaaccccatacagtaaatttgtccccaatcacttgcaaacacacgtctaaactactagggaattaacttacctctaccacacttcgctgccaatcccaactaacccatatgcaccaacacttgaccaccgtacatcaccatcatttagcagcagccattgcgaagagaaaatagaaaataaataagaaatatagtaacaaccagcattggccactgctttcatttcccttttcttttcgtaaactttccctctcccttcttttatattgcatcctgtgagagtaacacgaaggatgagaagaaatgaaatgattcgggtcctatgagactaagaaaggaagaaggacttcacatgacagtgcgataaagagaacacagttcagaaa

SEQ ID NO: 127436 - DNA, 384 bp, Glycine max
acttgtcggatccattttgggcaaaattggatgacggcaccagtgatttccaaaatatgcactattatgcacaattttgctattgagatgagcagcataattctgtgcttgtgcagaaaatgcttatgcatggctggctgaggaaagggttatacatattaagttttggacgttttctagtagatcccaacggtcaaaatgtagacttatgttctagggacctccactacacttctctagtccatccactcggtgaactaattgtaactaaaaaaatgttactggggtatctgattaaacaaagttgtggtattggtgtatgttttgggcagagttctctgactctaccctgtttctctggttttgatatctcatgatgtctgg

SEQ ID NO: 127437 - DNA, 319 bp, Glycine max
cgcagaccctcattcgttcgcttctacataacagagcccaacctgcctagaacttcaaatcctcataactctcgtgcgacttagccaaattacttcaatcaaagcccaatcttcatcttttacaattctatacaaagcccaccgattataattagctgaaacaacctccaatggaagaatcttcgaacaaaacataagggatcctcctccaccaccaccactggaagccaccaccgtcatagaacctgcggtgacccaccagcaccaatatctccttctctgtcatctcctcagtcatgcactttgtatatccttcgat

SEQ ID NO: 127438 - DNA, 433 bp, Glycine max
  unsure (1)..(433): unsure at all n locations
agcttatgattccatttcccgggaattcttgtattgtatgcttaagtccattggcttcccagcccagttctgtacttggatcatggaatgtgtttcttccacttcctttattgtggcaatcaatggatccatttatgaccacttcaaagggtagcggggtcttatacaaggggatcctctctccccttatctgtttgtgctttgtttggagtacttttctagagatatgagcagcctcaaggatgatgccaattttaaatttcatcccaattgtgcaggtattcaactatctcatttggcttttgtagatgatattatgcttctatctaaaggaaatgtcccttctgtgtcaactatgtttgccaagcttcagcacttttgtanggtttcacggctttccatcagctctgataaatctgccatataattaact

SEQ ID NO: 127439 - DNA, 298 bp, Glycine max
  unsure (1)..(298): unsure at all n locations
aactcagctgatccattcgacagataactgtaactcggaatttctattgagcccgnacatatcgagatgctccaaagtgaacacggaagctcgtatcaaattcaaacgacaataacttctgtctcggatgtccaatagagtcccgtaatatatcgcgacgctccaaatcgaaagaggaagctcggatcaaatgcaaacgacattaacttttaacttggatgtctgattgagtgccgcaatatattgagaagcctccaattgaaaagcgaagctctaagcagatataaacgacaataac

SEQ ID NO: 127440 - DNA, 488 bp, Glycine max
  unsure (1)..(488): unsure at all n locations
tctcgaccggatccttaagtcacctgcggcatgcaagcttctntgggacactgaacaatcaatcaactcctctttcagaaccatgctatgtgctcgcgactggtccctttcttcccttcgcaacttgagttcattattgctaccccatagagctccgcgaaatttgttccggccatactcttccttgcgagccctcttggtctcttgttcaagggctcttgcgggaattgcattctcttcccgtaacccggcacactccttccgatgacatgcggagacaaaatttggtcattccgcacccctttgccattcagacacagtcgtgtccgatggcacacagagacaaattatggtcattctgcacccttcgtcaatcacggccgacaagcccgttgacacgcggagatttacatcatctttcgcactcacaagatctgtcatactgacttttgagtcacgctgatgggcggaaatacctgagtgggtat

SEQ ID NO: 127441 - DNA, 311 bp, Glycine max
  unsure (1)..(311): unsure at all n locations
tcagcttgcgctacgccgggaactcctaattattcttcatgcagcctatggcacccgntcagagggagtcctcccaggttccaactccagccacgactcgcccggccgacaatcccaacgcaacaaggaactttcccctgaggccaattccagaattcaccccactcccaatgacgtatgaagacttcttgccgtctatcattgccaaccaactggccgcagtaactcccgggaagatcttccaaccccctttcccaaagtggtatgtcctaacgcatcttgcacgtaccacgggaatgccccggggcatt

SEQ ID NO: 127442 - DNA, 415 bp, Glycine max
gaaccgcagcatcaagcctgcacaggcggtgcaaggacccttattatatatgccctcctcactagcactggaatatccggagcatactcactaatttgcttcctatgacctggatcacgcacaatcccatttgggtcaaactcattaaccacatggcgtggcggttctaattcggcttcttgttgtacaagattcacattctcagtgcttgctctatcatccacaaatctcctgatctctgaaattaaatgatcttgagttaatactcagttaacatttaacatcattggaatcaaaacttagataagaatagtttttcaaaataaaagcaatatgcttatgattgatcaagagtatgaacaagcattatattatattgaattaccaccattatataaactaattacattagata

SEQ ID NO: 127443 - DNA, 274 bp, Glycine max
  unsure (1)..(274): unsure at all n locations
agcttgaagcctagcaacggagtgacacgagatctcttattgatttctcatgcgcagngggccaggatgcatgggagatcctgaaaacctctcatgaaggaacctcttgagtgaacatgttcacaatgcgactaatggacactaaattctcaaacctgtacatgatagacgaatactggattcatgacatacacataacattcttgaattggccaaagcttgctctggctagtgtgaaagaaagacttactatacgcttgagcgaaagactctt

SEQ ID NO: 127444 - DNA, 274 bp, Glycine max
agcttcatgtcaatatgttctcatcataaatattatttagtaaagcatacaacaaagtaatgagatgtttgaacttgctcatatgattcaaattatactatcaaaattgtaggcattatacaaggcaagtgcactaagatgaaatagaaagaaaaaatttaaatctttacaataaaaaaagaatgtataacattgcagacctgccagtatagggaccaatgcaatgggtacatggctgctgaataacaatagacataatttactactaaaaaag

SEQ ID NO: 127445 - DNA, 447 bp, Glycine max
  unsure (1)..(447): unsure at all n locations
aactaagctgctcggcggcttcttggaggctggatcttngagaatctttgatttttctttatggngactatccaccatggagatgcagcggaagacaaacgagaagaggtgagaggaggcgccatccactatggaataagccatacaagaaggagcttcaccaccaagatgagccttggataacaagcttggagaggatgcttccttggatgacaacatagagagataggggagcacgaaattgaaggaataatagagggagagaagcggaactttgaagtgagtctcataagactttcattcatcatagttacaactagtgttacacatgctgctatctatagactatggagcttctcttgagaagctttcttgagaaaaccttcttgagaaacctctttgaaaaagaattcttgagaagctagaacttaactacaccacccccct

SEQ ID NO: 127446 - DNA, 190 bp, Glycine max
tccccagtcgagttgggcaagtgctccacaacaacaataggctgccctcctttcaaaatgctgctggactaagcaaggcatatgttcctcctccaatacagaagcaacaacatccacagtcacaacaaagacaacaagccactgaggctcctcctcaaccttccttagaaaagttagggacgcaaatgac

SEQ ID NO: 127447 - DNA, 357 bp, Glycine max
  unsure (1)..(357): unsure at all n locations
actcaagcttccatcatttgtggtgcgggccgaatagcacggatggtgctgggcatatcgttgagctacgngaggcggtaattgaggttttggccaaacacgagtttaggtcacgacatgagcatccacttctttcctctatgccccagtcggcccggaccttctgtagcttgtgttggcaaaggcaacatagatgaacttcccccttttaggcctacctcaatcctctcgcctatgaatactatatccgccaagctagagggcgtgtagcctactaacttctcgtattaaaacactgggagtgtggacactatcatggtgatcgtctccctgttcatcatgggaggtgctgcctga

SEQ ID NO: 127448 - DNA, 451 bp, Glycine max
  unsure (1)..(451): unsure at all n locations
ctaagcttttatccaggctcatcttggtggtgaagctccttctttctggcttattttctagtggatggcgcctcctctcacctcttctcctttgtcttctgttgcatctccatggtggaaaattaccattaaaggacctcattgatgctcaaagatccagcctccatagaagccccacatgcaagcttncatcaggctttcaaccaccttcggtagccacggaagggcccattgttactgcccctgagttctttatcctttatttgcaccacctcccacgccttgcggaccttctgaagtgtctccccgttggtcttattgaaacctcgtgaaatgacaggcgcgagctcttcctctagcggtgcccctctcatagggtacccaagttgccttatagaaagaacaggattgtaactgatgcaaccccttgtccccataagggaaaatttgg

SEQ ID NO: 127449 - DNA, 372 bp, Glycine max
  unsure (1)..(372): unsure at all n locations
agcttctanactttatacaagaatgattctctgttccacttgctggacaagtggcctcagatatcttaataaggggggggggggcctaattaacatagcacaaactatcatctccatggaggaatatattcaactgtggacccaagtgataaatcaccgatactaccgaatttcttacctcatgatctagatttcacaatcatgtctattatattctgaccatgataatcagtggcatgcaaaggaacacaaaatgctatactcacaaacatactgttgtctatcacacccttgtaccttcgtgtcagacgccgaacaacccgcttgagaattccactatcctgttatttcctattacgaatactcaacaca

SEQ ID NO: 127450 - DNA, 507 bp, Glycine max
  unsure (1)..(507): unsure at all n locations
ttacggacacttagaatactaagcttcttatcaggctcatcttggtggagaagctccttcttttctgtcttattccctagaggatggcgcctcctctcacctcttctcctttgtcttccgctgcatttccatggtggaaaatcatcattaaaggacctcattgaagctcaaagatccagcctccatagaagccccacaagcaagcttccatcactgctgatgttgttgctgagggctggaccatctgaggttagggtgattcttctatccagggatgtatctgttgctggagaggtcataatagttctgctgtggttgattttgcttctgacgttgaggaggtctattgtaaatatttgcagcataagcttcaggctgctcaatcgctccaagttgctgcatggaaggagcaaggtctgtatggtggtcagcatatgagcacaaaccacacacccttgtaacaggtacaaatttctgatncaaggccagctgggttaccaagttaac

SEQ ID NO: 127451 - DNA, 307 bp, Glycine max
tcagctgtggcctcccatagcaccatacttcttctgtgttatacccatccctcaacataactcaggacaccatcaatgagccaccacatagactcggttgcaccggaggagccttcacataaacattggtcacaatttcgagcgcttgataagatgtttcaaagactttttacagctttcacataaggtgtagaggatggacaactcactagtatatgttcttctactgacactataaccaggtgcccttccaccacaagctttgatttctactgcaacattgattggaccaccccaacaaaatggg

SEQ ID NO: 127452 - DNA, 443 bp, Glycine max
  unsure (1)..(443): unsure at all n locations
agctntacattcttgagcaaactcgtccaattattcatctactntatcctaaagggctttctcaagctttaagtggtctatggatacactgttgaaatatcttcatacgttttataagtttttgagagaatgggtgagttagatcaaagttcatgataggctcttaaaagacatggggtcatcaaaatttacctggtcgtcctagtctgattcggatccttcagaagctaagtctgccattaggcatatgtttccttctttatcatcttcatcagatgaggtgtcggctaaatctccccacattctcctatgccccttcttttctatagtcttaaagaattctctttatcctgaccttttcttcaaatctggaccttctgacttgaagtggccaagatttctgactcatagcanactatggaacttttgtctctgtccttctt

SEQ ID NO: 127453 - DNA, 460 bp, Glycine max
  unsure (1)..(460): unsure at all n locations
ctcagcttatacaagaatattgtggcctctttacagcttgatggtcgtgttatatacttgcaccctaacatacatgggggtatcctggctcgaagggaccaaaaacatcatatcgaagccctcagtactcatgggattggtaagttatgttattagctgttattacaagtacgttgtgctagaaatttgttgtgttacattagagttgtgatcattcagtttgtgagattgtatttttttgcttttgcttaaagttttccttttcaggtacttttgatgttgtggtggtgaacctgtacccattntacgataaagtcacatcacctgggggcattgaatttgaggatggaattgaaaatgttgacattggtggtccaaccatgattagagctgctgcaaaggtggttatttaactgaaaatggcactcactccactttgaataaatttgaatgatgacaa

SEQ ID NO: 127454 - DNA, 115 bp, Glycine max
tttttttataccagaaaagggtttcctatggccactcctaaatgaatacttaatttattgaccatcggctcccccggaacaataactcgctgaccctttccctctaccttacttg

SEQ ID NO: 127455 - DNA, 373 bp, Glycine max
  unsure (1)..(373): unsure at all n locations
ggacctaaaatctcagcttcatcttcattcagaggaagggttaggagtcattgttgatctacaagaagatgatgactgcagtttcttcgtaaaaagattcaacacattcctatgaaacaaaggataacaaagaaagatcgaccttcttatcaatgaaaagaagagaagattcatcttctgttcagaagtgtcttgaatgtaatcaaccaggacatccgagagctgattgctctggttgtaagatgagaatggaaagatctgaaaggaaaaccttcggtgatgaaagagaaaagaaagcttacatcacttgggaagacaacgatatggatgctntcgaagactcataacatgaagtcgtgaatctaagtcttat

SEQ ID NO: 127456 - DNA, 311 bp, Glycine max
agctctgaggcccagacagaccattcttatagttcaagcctgatattggaagacaagttgaatgcttgccacaggtcaaaatacatcttgctcacggaattgagcacgatcgaatacaacatgtgggccatcattgaccaatacaaagagaagttaattctatctgcaacccatgaacaaacgttagaggatgatcactctaagtatcggcttgcaacggaagggaacagagaatatattattcattcacaaaacaatattgatggatagcacttcattaatggacaaactccaactctaccaaccagcat

SEQ ID NO: 127457 - DNA, 390 bp, Glycine max
tgggtagacatgatacatgtcagggtttggttgtttcaaggataaaagggatgccccacattatctccatgacacaaatgcaaaaatgatgaattggaaacttcacgcaaaactggtcatgcatgcacgtatgcggacactcaagcgtcaaatttttatggtcatgtgatgctagggctcaggattcatttcctctattttagtcaacccaatatttccaaaatatgctcttttatcaatttatgcatttatcctagtccatttcgggcgtccggggaaattttacagcattcaccctttaggtgtagacacattcttcaaaaattggttatgatcaatgaatttttttcatagacaaagttggaaatcatctctttccaaaagcatgtc

SEQ ID NO: 127458 - DNA, 201 bp, Glycine max
taatcggacactatctaatatgcaagagtcaaatgacatactacaatgaaagagagctgatatatataccctagctgaaataatacctgagtcaagaggtaatccactctcatattcatcagactacaccctgaacaaataaccctcatagagtggaaacagtctacgccacctagactggatcatgtacagtggacatgc

SEQ ID NO: 127459 - DNA, 99 bp, Glycine max
atgttccgattgcaatcatactgacgcttggaatatattttaatgaattttcaataactactgagtgactgctttactacaaataatatacactatact

SEQ ID NO: 127460 - DNA, 483 bp, Glycine max
  unsure (1)..(483): unsure at all n locations
agcgacctgaggcatgcaagcttctntgagaaaactttcttgagaagcaagagnnttgcnacacacacccatctaaaaactaagctcacctccttgagaagcttccttgagaagctagagcttagctacacacccctataatagctaagctcacccccatgacaaaaaaacatgaaaatacaaaaaaaatcctactacaaagactactcaaaatgccctgaaatacaaggctaaaaccctatactactagaatgacaaaaatacaaggcccaaaagaagaaaacaacctattctactatttacaaagaagagtggacccaaccttggcccatgggctcaaaaatctaccctaaggttcatgagaaccctaaggccttctttatcaactctagcccaatcctcttggagcctcttgctcatggctctggtaactggtcctttcctagggaggattgcatcacctcgctaagtgagctagagaga

SEQ ID NO: 127461 - DNA, 560 bp, Glycine max
  unsure (1)..(560): unsure at all n locations
acatcttcttaaccttggggattcttgacnccatacntattgnangcacatgccccactggtggattccaatagtgtagcaaacctttcactcaacacaagggtttggaagaaccatnncaaacctantncannaaatcttttgtaaagaaagaagatgaaanntcttctccatttcatgtccctnntcttcaccaaccatggtcgagcccatcctttnntaacccaagaagccccatcatgccctctttttggataaccccaaagggnnntgctatgannctgaagnncacctataaggggaagganntctcttgattgggaacccatagggttcagaaaatcaagaggggatgnnttaaagtgggttgaaggggaaaaggggttacctagaatgagggatatagggcaatnggaagcattcannatcgcaattccattatgcatgggcgatatctaaccaagatatancctatatcaattcgtagaccctttatgaaagggcccgcataacaatgagatcttcttcagaaacctgtgcaaggtttgagaatctcgaag

SEQ ID NO: 127462 - DNA, 488 bp, Glycine max
gaaactaagcttggccaaaaagggtgcaaatcttttcacttcgtataaaccgggaaaacatatacaagacgcataagttaattaaatacattttattcgataacatgcataagcttaatccgtcgaatgtataatagtctacacttagctacaactattacctagaaaaaacttactggaatacatattcagcgtcaaaacaaagatcgttccaagtctataaacgaaaaatacgcaagtcggagctagcataatcaatataaagtataaatgactatttttggaacactcattcaattacatatataaacttcaaaccccaatagtaaatcctatcaccagcattggagacctcggagtggctctactatcaaaggtgcctaacagctatgtaccaaacaatttgctcccacagacacaacgttcgagatcatcatagaatccaaacgcaaacaacacacaaggagtgatgtttcacatttctaaac

SEQ ID NO: 127463 - DNA, 131 bp, Glycine max
acaaatcggcaaaaacgctatgctacggaactgaggaagacacaatgccgtggacaagatcacatactgcagccatggaccccgaaaattgtacacgatgatggtcaacatactaaaatatttaccctctg

SEQ ID NO: 127464 - DNA, 247 bp, Glycine max
  unsure (1)..(247): unsure at all n locations
acctgcgattgaaggacagatgattatttctggaggacagaacactgaaatgattcgcctgccgcttgtgatatatcacccaattgcttcgcatcattgttaacacaagagacttagtgctcattcagattacctatagatgacggagactgtaatcatgctcagatacgacgcttgctagcaacatgcgaaattcaatccgatctatgnttcatcgtacaggaagttgggtccgatagcatgatga

SEQ ID NO: 127465 - DNA, 197 bp, Glycine max
agcttctagccaaatggacttaccttgaattaattcctttgatagcccctttgagcctattttcccctttctttgttttgaagctcattacatgccttaagtgaaaaaccatgatatcaccttactgttaaggaattttggagctttggaattgttttcgggataagctgggaataactgtgtgtgtggcggggggg

SEQ ID NO: 127466 - DNA, 467 bp, Glycine max
  unsure (1)..(467): unsure at all n locations
gctggtacctctttcttactacattaagaatcaccgggttgagtcttctctatggctgtcttactggtttagctccatcctctaaatntatccgatgcatacatgtggatgggctaataccaggaatgtccgctagggtccagcctatagccttcttatgctttttgagaactgataacaacttctcctcttgctcatcagcaagggaggcagatataattactggaaaacttttgctatcatccaagtaagcatattntaaatttgatggcagaggcttcaattctggtatgggcggctggatagtantaaaaagagatggtttctcagcttgtacctcataaagaaagtcagaggtatataaactttctaaagcatggttagttctatctgactctagaaaatcaatctcaagagggtaaacatcaccagacatgtaatcaatatcaaattcagattcactctca

SEQ ID NO: 127467 - DNA, 458 bp, Glycine max
cgacccgggatacttagagtcacctgcggcatcaagcttgaaccggagatttttctatgtaaaccgggccacttgagcttgatagacattcagggtcactctccttggctgtttatccacgaccgtgtttgctctagctgctgtatgacatcgcccttgaatacgacaactatgagatgcctcacacaatcgaagaacatcatcgtgcagttgctgctgtctcttagccctgcaaaaaaaatataattctctttgcgtttcgcctcctagaagtaatgtttatctcctaatctatgggagttaaatcgccagcgacagatctcctttacatactagacaagcagaactccctttatcccatttctaagaacaatgaattctgcagctcctaagtatggacacaaatcatttatgcatccgataagaagagtgacatgacgccttagaataaactaaac

SEQ ID NO: 127468 - DNA, 281 bp, Glycine max
gtgtctcacatcattcacattcttcaaagttatgacaagtgttacacacgtttctatctatagcctagcacatgggaagcttccttgagaagcaatgaacgtaaattctcttgggacgctataggaataaagctctcatgataagctcgagaggggctactcacactcctccaatagctaatctcacccccatgccaaaatacatgaaaatgcaatggctagcttccttgagtcaagaacgtagctttcttgtgaagcatggaagaaagctttcttgagaa

SEQ ID NO: 127469 - DNA, 454 bp, Glycine max
  unsure (1)..(454): unsure at all n locations
agcttgatgttagtgttgaatgcattatatgtaacagaccaaaagcaagaaattaggtgcatatagagctatgacatcttggaattgatacatacagacatttgtgggtcatttcatacaccttcatggaatggtcaacagtattttatatcattcatagacgattactctagatatgcatacttgtttcttatacatgaaaagtcacaatctctggatgtgttcaaaacatttaaagttgaagttgaaaatcaacttaacaaaagaataaattgtgtcagatctgaccgtggtggtgagtactatggcagatatgacggttcaggtgaacaacgtccggggccttttgccaagtacctagaggaatgtggaatcgtcccatagtacaccatgctagggtaacctagcatgaatggtgtgactganagacaaaacanaactcttatagatatgg

SEQ ID NO: 127470 - DNA, 391 bp, Glycine max
  unsure (1)..(391): unsure at all n locations
aatctagagcttagttacacacacccatctaataactaagctcaccttcttaagaagcttccttgagaagcttctttgagaagattcctagagaagctagagcttagctacatacacctctctaatagctaagctcatctccttgagatgagaagctagagcttagctacacaccccctataatagctaagctcacccccatgccaaaatacatgataatacgaaaaaagtccctacaacaaagactactcaaaatgccctgaaatacagggctaaaatcctatactactagaatgaccaanataaaaggcccaatagaaggaaaaacctattctaatatttacaaagataagcgggttcatacttagaccatgggcccgaaatctaccct

SEQ ID NO: 127471 - DNA, 273 bp, Glycine max
  unsure (1)..(273): unsure at all n locations
atgtggatgagaaaaggacgcatagaaaataggtttgtaaacgcgcacagagaataaaagataacaaatgaggttctggaattaaaaagccccctggaggcaactgaagggttggngagtttctaaaacttcctcaaatttatgactgttccgcttaacgcgtctaggccttttttcgcactatggaaaacgtcccttggtggtccctcagattttaaatttcaaatataaaggtcatcctgggcgcctaccataagagcattcgtcaagtgc

SEQ ID NO: 127472 - DNA, 489 bp, Glycine max
ctcagctatggcccatatgctgcactgatgtggaagattatcatattttctattaactacagatgaatggaattctcgaattacatcatgcttaaactctaagccaatgagatttctgattcctgcgctggttgattcagacaatgatataggcgttcttgcagagtcgtctacctcatccttggtagaaggaacagggacagtggcataaccagacactgaagccacaggcaaagagctagtggtggtaatgctatcgctttgttcttccaatcgagtaagcaactctgaaggcaccttagctggtgactctgtttctgcagatatcaaaccttttgcaactaaagagcttaaaaggtgtgcaattggattaaaggattattggtatacttgatgtctgggctgcgcactgctgcattaaagaagctggtggagagtaatccctagtggccacctctttaaggattttgaaaacaatcatatcgtgga

SEQ ID NO: 127473 - DNA, 128 bp, Glycine max
actatgcgtcatctactaaacaatacgccatgggatgataaatttctcccctaacagagtgccttggattatacaattccactgaaagcttcaatggaggataacaattccattcttatgggggggct

SEQ ID NO: 127474 - DNA, 476 bp, Glycine max
  unsure (1)..(476): unsure at all n locations
gcccactccatcattaggattattatctgtcatctcanacaaacacatcaaacgtaacacgacaattatagttgttgtttgaatacctcacccactcaagtgtatcacacaattatggcttttctctaatgaaacactcttgccttttaccactctaattccccttgagttcttaggcaattcaagagattatggccacaacaaagaacaattcaccaatatgtgtaaggtatggctagagagacaaggaaaaggttaaccaagataaaggctaacaatgtttttaggcacaaatgaaggaaataaaattcataatttaggaattcaagtaacaatccttcatgcaaccaatatattaccttanagagaatattttttttaaagttctgcaagcatgaaccattcagcctaattntatgttntntaattttgcttatacgagattctacttcttctttttttataacaaagagatc

SEQ ID NO: 127475 - DNA, 282 bp, Glycine max
tcaaatcgaaggatgaagaaactcttaggcaattgcatgaatccaccgatatttctcagccaacatggacaattctttttatagaagtcacgccggtccataatgagcctttgtacggcctaacaagtcttgttgtgatggagtcgcataaaaaagaaaccatgcaccatccgttacgtcttccgcgccagtacaaccgacattttgattcagccaggaaaacgataacccacctatgcaaaataagtatttgttaaccgtctctatgcatatttcattcaa

SEQ ID NO: 127476 - DNA, 486 bp, Glycine max
  unsure (1)..(486): unsure at all n locations
tgttcttaagcaaaagctaactaatgcccncatacttgcattgcctaactttcaaaaatcttttgaaattgagtgtgatgcttcaaatgttgggattggggctgtgttgatgcaagaaggccatccaattgcttattttagtgaaaagttaagtggtcctacccttaactattcaacttatgataaggagttgtatgccttagtacgtgctttgaaaacatggcaacactacctttatcccaaggaatntgtcattcatagtgaccatgagtccctcaaatatatcaaggggcaaggcaagcttaacaaaaggcatgcgaagtgggtggaattcctagagcaattcccttatgttatcaaacataaaaaggggaaaggtaatattgtagccgatgctctttctcggcgtcatgcattactttctatgcttgaaacaaaattgattggtcttgaatgcttgaaaagcatgtatgataatgatgaaac

SEQ ID NO: 127477 - DNA, 509 bp, Glycine max
  unsure (1)..(509): unsure at all n locations
ctaagcttctcgggccatcctgcgaagcaaacattgaaagttttnttaccagtgggacactactcttaaagcaaaaatggcatataacctcctcccataaatacaaacatcaatgtaaatttagagcaagcttatgcgcatatttccttacgaacgttctcttgcacaagacatttaactaagaaaaatgcacccatatacaatcaaggcagcttcgttacctagattatttacacgtacttccaaggtgtatttgttacttacatcacacacatctccttggctaaatttacatacatgcatactcaaagcattttggggtaccaaaaattgcacatgtgcacatcttggtatttctaatacctatacatacacaaacttcatgatgaatcttgactatctacacaataaggtgctacattccatgctctgnttcaagttttgctacctaaagccgcatgcaaattcaagtataatttnctttgctgactaaaatggtattcaaatta

SEQ ID NO: 127478 - DNA, 495 bp, Glycine max
  unsure (1)..(495): unsure at all n locations
gtcccgggatccttaagtcacctgcaggctgcaagcttgaatacatgaaactcgtaaacttagcaaagctaagattcacttaattcgctcaagttttcattgtccagtaaactgccagtgttacactactttgttcattttgtctcagattattcccttttgattcgacaaccttaacacaaacatcttcagagctttgatccattgagagatctcagctagccgatgtctaatagatttggcacttgatacaaggccactattatgcagagagagtggggacaagaaatactttctgtaacatatctttggagaagtataatctgccagtgttgcctagtgctcagagctgactttgattgtacaaatcaaaagaaacattaacaacataagacaaaaggatataagaatgtcaagaagagataatntaaatcttcccttntgtgcgctatgacantgagttcttactaaacctatagacgttactttctgatg

SEQ ID NO: 127479 - DNA, 504 bp, Glycine max
  unsure (1)..(504): unsure at all n locations
gcttctaagaaagctacctagtctataaatagaagcatgtgtaacacttgttgtaactntgatgaatgagagtcttgtgagacacaactcanagttcaacttctcttcctttttcttccttcaatttcgtgctcccccctccctctttctctccctctttcttttcctccattgaagtatcctctccaagcttcttatccaaggctcatcttggtggtgaagctccttcttccatggcttattccttaatggatggcgcctcctctcacctcctttcctttgtcttccgctgcatctccatggtggaaaatcaccattaaaggaccccattgaagctcatagatccagcctccatagaagccccacaagcaagcttccatcaagtggtaatcagagcacaagagcnttcagtaggtgctccttaaacctccattaatatttttggcttaccttctcttccattggtggttctctcatttttctccatgtatctcctcacatgtc

SEQ ID NO: 127480 - DNA, 247 bp, Glycine max
  unsure (1)..(247): unsure at all n locations
acttatctgaaacaacaacaactactaaaagctntgttttagtattggtgtaatttttctaggccttatctagattcctactggcatagtagatggcgtgaaacaccttctcctttctttggcccaaaattgcccccaccgctattgtactagcatcacacattcattcaaacgggtatggccatcgggggcaactaccataggagcactagtccagtgcttctttcaccaattaaaagcacttcaa

SEQ ID NO: 127481 - DNA, 448 bp, Glycine max
  unsure (1)..(448): unsure at all n locations
aaaccgcagaatgacatgtgctcaaaggtcttttccctcattntcttgattctgttcgttcgtgatagaatgttgacatttgggggttttaatgtccgatttgtgattgaacttggtgttgttgaaattggacagaaaatgaacaaattgatgtattttaataaaacttgataattaaattaaattttttaaaaaaattgagattaaattgaattttttaaaataatttgagggtcaagttgatattcaagtcttaaatttttaataaattaaaaatcattttaaatcttaaaataaattgttaaaataaataatttttaattatgtaataattcattattagatggtaatgtaaataaaatttaataataattaaattcataaagttatatcataacttacgtatcaggntgttttatttctttctattatcttatttatntatata

SEQ ID NO: 127482 - DNA, 330 bp, Glycine max
  unsure (1)..(330): unsure at all n locations
acgcatcagcatgaatcaagcccaggctattgtgcaagcaatcaatggggcaaaacacaccaaatgattataatgatggatggctcaaattctcaccaaagtaaaatcatcactttcaaattgagctttcaaaactatcatgacatgtagagaagaaataaggatttcaagtcacaaaatgtccaaaacttttattttcaaaacaattacccatttcttgaacatatcctataattcnaagaaaacatgcaaagtcgtacgtgcacacgaaattgacccanaatattaaactgaaaatccgacgaaactaacaacattaacattctttgc

SEQ ID NO: 127483 - DNA, 508 bp, Glycine max
  unsure (1)..(508): unsure at all n locations
ntcacctttggtcctcctcatagttgttgcatgagaaaatatgctctattntcatctcccactccaagtaggcctccggatcattctttcctttaaatggaggaatgttgagtttaataccatcaattcggttntgtctaggaacaccatcattccctcttctcctcctttcttcttcattatgatctctattctccatttgatccaacctctcatggagcgcatcatctcgttgtttcattaacctctccaaatgttgcatcaaagcttgcattnggaattgcgaaagccccactccatcattaggattagtacctgacatctcaaacaaacaaatcaaacgtaacaagacaattatagttgttgtttgaatacctcacccactcaagtgtatcacacaattatggcttttctctaatgaaacactcttgccttttaccactctaattccccttgagttcttaggcaattcaagagaatatggccaaaacaaagaacaattcaccaa

SEQ ID NO: 127484 - DNA, 444 bp, Glycine max
agcttatccttatggcttgcctctggactttactccccgttccaccccggaagatttaagccaagcccctactttcgaggggcaactcccaccttatgacgactatctcgggcaagacgatgaggaaggagatacccatctcggtcccctgctccacctcaaagatccgtccccccatgaattaccccaaccaaacatagtccgccatatcccgacttcacccacacccgtaaaagaatctgttcccttcgtggaagataagggaaaaattgaggcgcttgaagagaggttgagagcagtcgagggcctcggcaattacccattctcggatctagcggacttatgtctcgtacccaatatcatcattcctcccaagttcaaagtaccggactttgataagttcaaagggacgacatgtccgaaagggcatcttcggatgtattg

SEQ ID NO: 127485 - DNA, 495 bp, Glycine max
  unsure (1)..(495): unsure at all n locations
gctatgctgcaacatctacatagatctcctaactctaacatgcaaatcngccacaacagaacaattatgacctctccagcagcaggtacaatcccgggtggaggaatcatcccaaccttagatggtcgagtccttcacaacaacagcaacaacaacagccttattttcagaatgttgttggcccaagcagaccatacgttcctccaccaatccagcagcaacaacaacaacaacaacaacaacaatagccccagaaacaacaaacagttgaggccactccacaaccttcccttgaagaacttgtgaggcaaatgactatgcaaaacatgtagtttcaacaagagaccagagcctccattcagagcttaactaatcaaatgggacaattggctacacagttaaatcaacaacagtcccagaattctgatagattaccttctcaatctgtccataatcccaaaaatgtgagtgccattacattgaggtcgggaaagc

SEQ ID NO: 127486 - DNA, 432 bp, Glycine max
agcttgtgagttgtgatatgaaagataaggatgtttcttcattctattttttttttctgttaggaggcagagggagtactaattaacatattaaattatgcaagtggggtcattctgccctctaagttttccggtttccacttcattcaagacacttcactataaatacagttgacccatggatcataaaagtaggatgtaaaacacacaatgttcatcctcttggccctgaataattaggtcataacttcatggctataaagaatctaggtttatctcactaaaaggaaagcaaattgcctagcaatgacaggttcattgacattagagctgcgtaatttcttgttaaaatattaacattcttttggccctgaaatatgaggtcatagcttcatgggtatacaagatctaattgtcgggaaatctatcaat

SEQ ID NO: 127487 - DNA, 398 bp, Glycine max
tctgcaatgcttcaacatgtcctcgttgaagcgcgtatggatgtcgtggacgaagatgtagcgtcctccgcatgggtcgctcttgttgtcggcggttcggagggcacggtcgaaggggaaagtgggttccttcggttcggaaactcgctcagggaagccgaggtttttacgaggttgttggtgttgttgttgggattggaaagtgatggggactgctgggcatgggcggtgggttggggggaggacgcaatggaataatgagcgaccaaaaatgcggaggagcaaacaatcggatgagtttgggtgatttcttggcggaacccccacggccgctattgatgggtcatgacaaaagctcacaacctcggagatggatacaatagaaacgatcagacaat

SEQ ID NO: 127488 - DNA, 482 bp, Glycine max
  unsure (1)..(482): unsure at all n locations
atcttaagtcacctgcggcatgcaagcttgaagtgagaaagtgtggaagattcattcttcctactnttattcgttgaccacagagtggtacctggagatatgtcgcgggggtcaggagaccttatggacgtcaggtggggtgctatttcccaaaaccaagcttgaccaatcccgacccaatccgggcatagtcagtcagtgagaacctgtgacgtacctaaacagacgagctcctggcagtcaaccgataaaagaacaaagaccacaaagcaaggaggcttgtgtggtggctggccagctatggatcttgagtgatatttggaatatggcctctggtaatcgattacaaagggtgtgtaatcgattacaaggcttaanaatggggtcaggaagttgagatggcctctggtaatcgattaccaaggggtgtaattgattaccaagcttagaaatagagacagtatgttgaggaggtctctggt

SEQ ID NO: 127489 - DNA, 478 bp, Glycine max
  unsure (1)..(478): unsure at all n locations
gcgtcactaacacctatacaacgacaacattgcttgtagcccgctcgttgatgggctttttttttatatataaaanaggagtaaaattntaagttatttcgttaggggtatattttaaagaatgataaaaaaggagtaaaactttttttatatatagtttacgactttaaaagttataaacccgttttccttttattaatgtttaagttaatttttttaaaaaatatatatataatctttttatgttttctttctttttaattttttttttaaaaattatttaaatgtataataaataatattaacttgagttatttattattatattgttttatgattctattggatatcctattaatttatcttaatcttttattatttaaaacatgagatatatcttgaatatcactttatgaacaatattttggtgactttaacattagataatctatcagtataatacatcttcattatatac

SEQ ID NO: 127490 - DNA, 454 bp, Glycine max
agcttcttctatatatagccttcatcttaatatatatgttatctttcaacagttggattcttcactctgttctttgtctgaggtcttgagtctgttgaagtgtttaatgcaagcactaaatgcatgtcccttcttgatgcaaagtccatgctaataggatagagtgtcttgtactttaatagggaagtcatttcttttatcatagtgggtttgcaacaacaaagcgcgccattcgatgagaatcaacatcttccagattgagggcttcttttattcttataggaccttgacagatccaaggagaatgtttaaaggatgaaagaatctcaaaagtagagtattaaatgaaggtcttaaatacactacttaaatgttatatctgatcatcatgtgactgagaacttcatacacatggacagatcatgatctgatagcatatcagatgcaactttta

SEQ ID NO: 127491 - DNA, 447 bp, Glycine max
  unsure (1)..(447): unsure at all n locations
aagcaatattctgtaattcgtattaattatgtgcccattcttcttgaaatttactatcttgtaggggtgggcatggatttgattttcataagtccaatccagatccatttaaatggattggattttaaatccagatccatattttgtaaaaaaaacaatttggattgtttggatccatcttaaatccagttttaaaatcaaaaaccatttttgcctgaacttaatcgaggcaatttttggccgatgtcgggcgctgtactttttggtcgacattggtcagagctattttcagctgacatcagttaggatgactatnnttggtcgatcttggttaggctattttcgaccgacctcaaccgggacaatttttgatgacatcggcctgtgcattnttagacgcgtgtcgactatggcattttttgttcaatgtcggtcaacgatgtttct

SEQ ID NO: 127492 - DNA, 434 bp, Glycine max
  unsure (1)..(434): unsure at all n locations
agctnttcgattcattctatgcacccgtagtggtccacattgtgtttcgtgcattttgattctcattttgtttactttntataccccctgttgacatgcttaagccattttacttaagtcgtttctcgcttaacttaaaaataaaacaaatttccaccgaacgtttgaattgtattatccgttaacttcggttaaaataaattccgaccgttcggtcgtgccgtaaccacgttggaaatcaaaaaaagaggtaaaaataatataataatcaaaaaaaaaaaatatctttttagtaaaataaagcggagaatcaatcggacgttttctctttgggatttctcattcttaatcgaattgattaataactaaggtgaaactaaggctaaaattaactcgcctagtcaagctcgtccacaaaaataggcttttgaagt

SEQ ID NO: 127493 - DNA, 440 bp, Glycine max
  unsure (1)..(440): unsure at all n locations
tccagaaggcggtgccttctggaaaacttcctggaaggcccaaatgggtctgattgctattttcacccctttttactaaatacaccccttgccttttttgctgattctttttccgtaacgttacggaaacttacgaattacgtaatcatcccttttttgccttctggaatgttatggaactttacggattgtgcatttacacttccttttgacttccgacatgccacggaaattcacgggttgtgcaacaatgctttcttttgacttccgacatgccacggaatatcacgaattgcccagcgatgggtgccaagtacctcgaagtagtcaagagagggtcgcatcccaacaatggatggtccccagacgaaattagggtatggcgcatgcccaccagaatgactntacagcttgctcaccaatccatcacaagggccgat

SEQ ID NO: 127494 - DNA, 384 bp, Glycine max
ataacttaatgccattaatctagggaattaaaaaaacttaatggctgagtgtaactgaaattgtggcaaccaaaagtcacccccaacagccaacaagtcagccaccatttggtctcccaaaaggctgatgcctaggttgccaattgggcccttattacaacttgaactaaacctactaaagcccttttagttgattaacccaaaacatatttttggtcagccaactttacaaggattgggccattatttagacaaactaaacactctaaaattgagacaaagtggtgccatttagtcctcatccatttgggccatgatacaactcacaaccttggacttttctccttgaaacttgggcttgtattcaaatagtatggacagcac

SEQ ID NO: 127495 - DNA, 369 bp, Glycine max
tcgtaccttcgcgcgcagaggtatgaccatgcgactttctcgagagctacggtcgatcaatctcgagcgtctcgctctataatgttccatggtcatacctccgcgcgaagaggtatgaccattgtactttcttgagagctaccgtcgatcaatttcaacagtctctatgagttatgtacgctggtcgtacatctgtgcgaagaggtatgaccattcaactttctagagcgctaccctcgagcaagctcgagcgtcttgatatattatgtcccatggtcggaccttctcgcgaagaggtatgaccattcgacattctcgagagctaccctcgttcaatttcgacagacgctatgaattatgtccactggt

SEQ ID NO: 127496 - DNA, 392 bp, Glycine max
  unsure (1)..(392): unsure at all n locations
agctnttaagtgaaatgatgtgactcttcactattgaatttgaatttcaacgttcaagggcactggtaatcaattaccaaaacattgtaatcgattacagttttttgaaaataattggaacgttgtaaattcagtttgaaaactttttcaaactcattttgctactggtaatcaattacaacaatctggtaatcaattaccagagagaaaaactctttggtaagggtttgtcaaaaatatgtgctattcaagttaaaaaattttaaactatctgatgagcttctttattttgatttatcttaatttgactgatctgaactgacctgatctgatctgcttagattttctgagctgatctctgatctactgactctgatgctgatactagtgtc

SEQ ID NO: 127497 - DNA, 476 bp, Glycine max
  unsure (1)..(476): unsure at all n locations
aatgttttccatatttataccaaacacgaaaatataatattgccattctaattttttgagaataatttataataccttaaaacaaacacaagcaattggcatgtgacattaacattaattccgtttgttttcatagaaatttgaaaaaagaaaataaggtgaatagaaatacggtagaaattatttttctcaatcatttgcttatgaaagaagagaagtatttgcttgcgaaagaattatcacatgcgataggaatatgagattattaaaagggtcatgcaattgtgcaatgcaagtcaagatgtagtgttaggcgttaatatttttttaattattaatatacaatntatatgacttattttggctattatcattggctattaagtattatggattgtagctctagccttanggagcatttggtcagggagaagtttttcatgtcangggatcacaattcctgagaatcatatttc

SEQ ID NO: 127498 - DNA, 434 bp, Glycine max
accttagatagatgtgtgattttgagttctttagtggaatccctcttgcaatgagaaaacttgtaatctatgcaattgaatcacatacccatttttttcgttaagactgattgtggctgacgatgaacaaatctagttgtgtaactggtctaacaaaggctaggtttgaagtcatgtgatgaactgacatgttgttgaaatccaatgttttgctggtccacttgtgaactggttgagttactgaaatctctcatctttaagagtgagaattggatgtagctcaaggttggggtgaattaatataaaaatcctttgtgcactctttccttttcttttcctttactttgatatgcacaaatctgaaaactgttgttggtcaaatcattaaaatctttcgtcttactaaacttagcaacaaaaccatacattgtttt

SEQ ID NO: 127499 - DNA, 508 bp, Glycine max
ctaagctatgttaattggcaggaaggtcagggctggcggcttaatgttatatctacccaagtaagggctttaggcccaatatataaaaggtccaaattttttttagtactaatatatctcaaaaaaaatttattgtaaaattatatttgaaaataaattgtaattaaaatattataagtatctgttactctttttattgatacgcaagtaacaattaatgagcaacaactcttcatcaatatcataggtgtgttcaaaaaaaagaaatttaacagttaatagttaaagaaatccaaaagtttttctttcatttctattctctttattggctttctattcaattataattcattcttcttttctcaatgtctttcatacttctttgtcttcacatgttgacctccttaattatataaaaagaataaattattttccagatacgtatataacttatagaataatgttaacaatacccgtatcaattgcttcagttgataaggaagttttc

SEQ ID NO: 127500 - DNA, 436 bp, Glycine max
agcttacactaaaccaatgcattgtcaatgttagtgttgagtttggtagaagctatgtataatatcatgttagcgtcgacatggatgacattacgtgacatgaccattgatattagcattgattttagtgttggtgtaagccaacactacaagtcattaaatgtataacaataattatagacattagtatgccatttgtctcccctccttgccttttgaccttcaattttctctctccctttgctttgcaaaaaaaaatctctctccttcttcttatgcacctatcccccaaccttcacaccaccatatttttcttgcccctccatgccaccaccctactaaaaatattagtgatccacttgcctccctattttcacttttgcctttcaattttctctttcacctcctcatttgtgcaccttaaccgccaccacac

SEQ ID NO: 127501 - DNA, 456 bp, Glycine max
  unsure (1)..(456): unsure at all n locations
tgaaggccaacaccaaacannaaaactagaataaaacaagccagattaaggatgaaatgaggataagaaacttaatcccaaagatttatccttgattaggcattcccatctaacaacaagcaccaaaacgttgcataaattgtgtatgccagtgtttccctctatagtcacccctccctctaattgacatatttgaaattgctcaaaactctgctttgggatactaaggttgttgaccaaaatatattttcaacaccagttatagctattatacaacaaaaattgatccttagaagttagaagcagcataaaacacaaaacaaacctgaaaatcttgagatttagtggtctgatcaacaaatgatgcttgcagcgcattagaaactgaatgcgtgtcaaccccttcacgaataaatcccaaagaaagaagtcattntccaagctcanagaatcacg

SEQ ID NO: 127502 - DNA, 484 bp, Glycine max
  unsure (1)..(484): unsure at all n locations
agtcacctgcggcatgcaagcttgtaggattatggggtacccatcacatgtggtactatgtggcggtcgggcgatggtgcacaacaagttttccacatccagaaagcgcgcataaacccaccatcccctgttgcccacctccaactgagctcacgtactcccacgtagcccatatcctcgtttttctcaacaccgggtccccatcaatcctcccaagcttccccaacatcaaagtaatacaaaattcaaacagcacaagctatcacagccaagcaaaacagagcaaaggcagaaaactctgcccaaacaccaaccaaaatcatagcttttcacatacgaataccccaggaacatttccttcgttcccattcgttaaccgttggatcaactcgaaatttttactgaaattctctagtacataagcctacattgtgaccgttgggatctactagcanacatccagaactcattctgcactactctt

SEQ ID NO: 127503 - DNA, 489 bp, Glycine max
  unsure (1)..(489): unsure at all n locations
ttctgttanaagtatatagttagtctctgatcagcatatccagttaagtttatagatcatgaaacttcaaaggtgacaaaataatatacttttagaagccacattaagcaacaaacctgttgtgacacataggcttgtatcatgggaatttattttaaaaatgacacgagtattacttgaatttaactaatctttaaaataaaacagtaatagaagaactaatttcaagtatggtcacatcatgttccttggcttggctgacctttttttttgtcttcaatagaagaaaatgtgttgcacttacatttagaaacaaaaactgaacgtttctgaaggaacaaaatggaaataagattttggagtaaggagaaagaacaaggaacaaggacaaaaaagagagcatagcatagaaacaagagtttatttgaatctgacctttagctttcaaaggaactgccagttcacatgaaaccaatggcagctgcagct

SEQ ID NO: 127504 - DNA, 427 bp, Glycine max
  unsure (1)..(427): unsure at all n locations
agattattgagtctaaatgcatgcaggttgttggttattttatgggtcttgttccagacagcccaaaaagtgtcgtaaaagtaacagatcaagtgacaaatacagagaagtggttttcagctagtgaaattgaaggatctcctgctgtaaagtttgatctttctctcaagaagcctataatattaatgccgcggaagacagatagtcttgagtaagctgaagaatttagttttccctttcacttataacttctctaaataataggtttctcatttatttatcgcatcagacatagtgtgctgcatagttgatgttaatgggacactcaatctaatagcgtaagcttgtaagtaatggctcaagcgtggntttcatccctataacatcagntattgatatttcttggacgcangtttttgaaacctga

SEQ ID NO: 127505 - DNA, 529 bp, Glycine max
  unsure (1)..(529): unsure at all n locations
cggacactatgaaactcaagcttgagaatcaacananagatagattccatagcttacaatggctagaccagtgagggtcaatatgaagttaaaaagcttcaaaaggcattcccagcatcccctacatgccatctctaccaataacagtactttaatccctcaaccacaattcaaaaaggagaccaatgccctgtatatattttctgcagaaacagacaggcacatctctatagtatcagataagaaataaatagaaactataacatcaacgataacacctgcagttcaattagaattttaagagacatgataacttcaacttctccgtttacactttactgtctcaaaaagacagaaattaatatgcatatttgaatttcaattgagagagctcanaagtacttctactcccaaaataacaatgttttccttcttcattttgtgcactggaattcagaattatgaattagaattcgcanaagcaatttctctaacttttatcctaacataactctaaatgttngatttc

SEQ ID NO: 127506 - DNA, 457 bp, Glycine max
  unsure (1)..(457): unsure at all n locations
gcttntaaatacaaattctaaaatttcatattgtgtcagaaatcaatctagccactagtaatcgattatatcttctggtaatcgattaccagagaggaactatctatattttgaaaagataattgttcttaaaaaacttttgtaaaatatttcctttagccaaacttgtgcagcatcaattatggaattctttctaagatcttaactaagtacatcggtcttcttgcatttctgaattcttgacttgaatcgcattcatctttggcatcatcaaaacttcataacatatatgcttctataatctccccctttgtgatgatgacaataatctgaaatcaagctaaatgatataccattgataatgcgtgctcacaacccttactctcccttaagattggatntatgcctaagttcatgataaattctacccttaagtttctcttcctttggcaacatc

SEQ ID NO: 127507 - DNA, 513 bp, Glycine max
  unsure (1)..(513): unsure at all n locations
aagcttggatattcaataacatcagatacctaaatatcagactttatatattgatttttntatatacatatatacatcacgttcatatgattacgaataggaatgaatggagatggagtgatggactggaacaaaatcaaagtaatttaaatttattatcgaatgctatctgatgtgttatgtatgtccttgcatggccgcaaagtaatttttttttaaattgaggtccacaacaataaacaataattgcatggccgcaaagtaattttttttttactcattgcgaccgcatcccaatcataattacagtcacttttttttttttgtaattatccacatgtaaaaagatgttnttattcactgcaattacaacaacaactgcaatataatacctgcacggttgcattgcatgagaacatgtgtggctaaccccaataagtgtaataggttctgatctttgcactaagcttgaaatgctgcattngttcatgggaataatgcaaaagatgaaag

SEQ ID NO: 127508 - DNA, 470 bp, Glycine max
cgacccgggatccttaagtcacctgcggctgcagcttatgacggaaaataaattctattcttatcacttaggttatggtgcgcttacaggaaagaaatgtggtgaaagtgattgtaccaatggaaacgaacgagagatatcgttttattagaaagctatatagaaatttgtataaaatccgtgggatccatgctatgagatttctgcactaaactgagaagaaatgcgaagaaagaataaaatataaacgttaatatgtttccaaaactaaccttctaagctaggagcacttttttaattcatcaggcatggaacaaaatcaaatatagcgcggacaaattcaaatatgggaatatgcctagcataatataaaattgaatatgcctatgcctattaaaagttaatttccatacagcatccaatttgatggcagtaataatcgagtatatatatatatatatatgtatata

SEQ ID NO: 127509 - DNA, 514 bp, Glycine max
  unsure (1)..(514): unsure at all n locations
atacggacacttgaaactaagctgtataggctctgaaatggcattcagcagatcttgtattattatataataaaaatcttagtgtgcaatatctgctgttataatatgatacttggcttttgcagatagatggtaatgatttatttcttgctatgctttcgctaggaataaggggcctagtactaaactgaattctagaaggaataggaagctaggagttagggagctatgagttaattattattaatagtggtgcagtagatattgcagaggtatttttcggggaaactcattgtacacgagagtgctgagacactattttcagtaatcaatagataatagctggttcctttgtctctctctgcgtctctgtgtactgttgtgagaattcttctatgtgtggataccagctgtatcagctttgtctatctgccccctgaatgttgtgtttaccatctgagtcttgtaacataatactttacataagtagctctgacacangaatatagtatgc

SEQ ID NO: 127510 - DNA, 456 bp, Glycine max
  unsure (1)..(456): unsure at all n locations
tctaagtcacctgcngctgcagcttangagacgagtcacagtatcgtctatctctttctccgacttagctttggtgatatcggccgtgtcagaggcagctgtcactcaccaaaccaaattcaatgagtcatttttccaatcaaaaagaaaaaaactcttctatattggaaagaaccaaaaatgatgttatgcatgacaacaaatgcataccttctttagttcggccttagggggaggcccttcatagtaaaaacttggtactggatttgctttaattaccaagttctttctcaactgcttgatggctgcttcttgctcttcctatcattggtaattattaaataaacaataaacaagttgtttgatcaattcaatgtgcacaaggtaacatggcattgggaggataaacataaaacaagaaaagaccactgtacctttagccttgcctcatactgg

SEQ ID NO: 127511 - DNA, 456 bp, Glycine max
acagaccacttgtactgatttatttactatcatatataatacatacatatttttgccgagcaaaaaaaaaaaaaagaaatcctccttaaaataaccaaagaaaacaaaaaacattaactaagaaaatatctcccagtcccatgacatatctgtaaaggaaacccctctaaaaagacaatgagctaagatactgctcattggaagaattctccataaaggtgacagtcacattaaattctaaacttttccattattcccatttcccaaaaaattattcctactctgattgctcaagtgatggtaccaaagtacactctatatattataattaatgtttgaatcataagaaaactcatcttgactgagggaaaaattaacaggatcttacctccatgatcgatagatggcctggagatcatacgttggattccaagaaccatcaactataacaacacg

SEQ ID NO: 127512 - DNA, 450 bp, Glycine max
agcttgggtttgggcaatagcaccccacctgacgtccccaaggtctcctgacccccgcgacatatctccaggtaccactctgtggtcaacaataaaagcaggaagtttcacccttcaacacttcctcatctcaagcttgtaggattatggggtacccatcacatgtggtactaggtggcggtcgggcgatggtgcacaacaagttttccacatccacaatgcgcgcataaacccaccatcccctgttgcccacctccatctaagctcacgtactcccatgtagcccatatcctcatttctctcaacaccgggtccccatcaatcctctcaagcttccacaacatccaagcaaaacaacattcaaactgcacaagctatcacagccaagcaaaacagagcatatgcagagaactttgccaaaacaccaaccaaatcacagcttttctcact

SEQ ID NO: 127513 - DNA, 430 bp, Glycine max
  unsure (1)..(430): unsure at all n locations
cctcttaggcacttctctctctctcgaaattgctgaggaaaattatttccgtgaagaaaatccaagccgaggcgcttccgtaacgtttccgtgagaaattacgcgaagattctcgaccgttcttcaagattcatcgttcgttcttcgttttcttcaatcttcaacgggtaagtacctcaaaccgagcttttcaattcattctatgtacccgtggtggtccacattntgtttcatgtatttntattctcgttttcattttctttttatacccccttttgacgtgcttaagtcatttatttaagtcatttctcgcttaatctanaaataaaataaatttccaccgatcgtttgaattgtatcatccgttaattttggtaaaatgaattccgaccgttcggtcgtgccgtaaccacgttggannatcaaaaag

SEQ ID NO: 127514 - DNA, 462 bp, Glycine max
  unsure (1)..(462): unsure at all n locations
agctgttacaatcagagatgaaatggagaggattctntcgttgacatccacatccaggtacacatcaacaaacctatcaggaaacaagacctaaaaattggccaaggtcatgagaagttgtaggcaaggctttaaaaaacgatccgcaattagcaattgtccgcaatttaaaactttggctggcttattagtttcagcaaatacaataaaaaacaaaaacactaaaccagctccaagctttcttttctttacaatttccaaataccataaatcatattctcaacgggatcaacagtcatcatataaaagaggcaaaaaaacaaaagcagaagaggcaaaaaaacaaaagcagttcataaaccaaagcaattcaacgggaatgagaatttcttccattntcaagaatnntttttttcatatntatgaattatgaggacttctacanagttcaaagtggataga

SEQ ID NO: 127515 - DNA, 448 bp, Glycine max
  unsure (1)..(448): unsure at all n locations
ctcagcttttggaagtggtctngagcttaataaggtccttctatggtgattntcgaccatggagttgcagcgaaagataaaggataagaggtgagaggaggcgccatctactagaggataagccattgaaggagaagcttcaccaccaaaagagtgccttggataagaagcttaaagaggaagcttcaatgaaggaagagaacgagagagatagagtgatgcaatcctaccccctaagggcatnggatagattactccggacagattgggcctgaaatgcgagagaaggcgctacggtcctgatgatccttatggtatattccaaggcattgacttgggctaagtatgaatacactaaaccttgtattctagatcttagtgtattttgctatgcctcgcattatgactcataatatgtgtccgcccatgcttatgttgacagatcacc

SEQ ID NO: 127516 - DNA, 444 bp, Glycine max
  unsure (1)..(444): unsure at all n locations
ttaagcactgcggctgcagctataacatgatttttgtttacatctcctgtagcaaaaattgacagatcattcaacaaagacaagggaccaccaacttacagaattcaaggtcaatcttgccatctaatagggagtttattaccaatgccaggaaaacctcctaaattttctcacttgtatatctatggtacagagaataaaatccaaaatagaattggaggcttaaggtaaactataattcttataacagatactaaagtcataataataaattgttttttcttaggttatattaacttacaagtttaataatgcagatttgggaaccaacttgatccanagattgttgccaagttaaaagatatgttttaccatcataatgtctttgctaaatctttcggaatggcaaaggaaatatttgagaagaaaaaatcacatgatctg

SEQ ID NO: 127517 - DNA, 431 bp, Glycine max
  unsure (1)..(431): unsure at all n locations
gcattgtaacatgaaggggaaaaaagatagagaaaccaaagtgtcaaacgaaaatcctgctttggttgtcctcgtcgacagagtacgttattattgttttacttcattgttaattttgttttgatagtgttgctttgttctttgagtgctaatacataatgaatttttaagactattcctaattcaatactcatattctctcagattgatttaagattttttttcttcaaagaaccaaatcaatttactctttcttgagtttgaataactatttaggtaacagattgattatttatgtctttttgtatttatttatttagtaagtatttttattntagttttgatttattcgtaagtatttagttcatattttatantttattanttacaacttgtaaattggtccttcgtgtttattggagtcatttgct

SEQ ID NO: 127518 - DNA, 271 bp, Glycine max
tactattatctataccatttttatggcattatgaatgacacgatgaagtggcataaaatactaagagagttcacttacatgtggagaattctcagaaaaaaaaaaacttcattcaaaaggataaagccatcaaactaatacttccaaagaatataatgttttgtaaagacattttcagataatacacaatatttcatttggcgatatcagtataaatcatctctcaaccacactattttaattatatatcggatcactacttttgaataca

SEQ ID NO: 127519 - DNA, 428 bp, Glycine max
  unsure (1)..(428): unsure at all n locations
ctgcaaatnccaaaactgtaactaaatagaagaaacaactattctcataataatctaatgcatctgtgcatgcctgatcataatatcggtcaactgtcaatataaagttaattcaatggttgaaagagttaaagagaatggtggaggaagataacgtgaactcaaattcctttaatttacatttttaacaaaaattaataaattaatattcatagataataaacatgtaatacctgccaacttaatattctagtattccagcatgaaatatctcgcattcactgcttggagaaagatcggaaagttgtcatgatatgacatgtatgatcacgcgttaataactataccttatgaagcgagtaaatgggttttctctgataacattaatagaaccttgaattaaattgcttacagatttacttaggagc

SEQ ID NO: 127520 - DNA, 408 bp, Glycine max
  unsure (1)..(408): unsure at all n locations
agcttgttagatagaagttactactggtctattttgttagaatatatgtattagacacanaagcatttagctgctgtatgaatgaattaaacttgcacttgttctcttttgagtgcatttttctgatttctgggtttgtgaatctcttgtgccaacaattggtacctagagttgatttgatcatgagggactgtgagagaaccttgagtgtagagagaaattggaaatcaaaaacagagtttgagagaacccaatcccttttcagaatacccaactttttaaatggcttccaacaatgttccattactagcacctcctgtattcacaggaaagaacgacgaaatctgggttgtgaagatgagaacgcagttcgaagcctttgatctttggaagcaatggaaacaactg

SEQ ID NO: 127521 - DNA, 393 bp, Glycine max
cttccagagtgtatctcgaaggaggattgcttctggaggaagtaacccatgtcgcctatgcaagctagacagcaacctcctccccctatttcctataagaaggcaaaaggggggtgttcaaagggttccagattcccctggttatatgtttcaattgttttgggtgaaaaaaatcgtttcctggaagaaaatccaagcctaggtgctttcttaacgcttccgagaggtttccgttagcaaatccgtgaaggttttaatacattcttcgtcgttcttcattcgctcttcgatcttcaacgggtaagtttccaaatccgacactcttaattcaatacttgctttttggctttcatctatatttcgtccaattacagttaccttttcttccgtttt

SEQ ID NO: 127522 - DNA, 350 bp, Glycine max
accgcagctgcacctgcgcgcatatcatatagcctgttgtttatattttatactccgatcaatgcaaaattccaacagtatgatagggacctactaatcttttgtatttcgaaatctaagagcaatatagtactttcaatacaaagtcgatagaccaaacgtggcgttatgtggatgagcatttactgaggtcaactaatccctaccacctccaacatttcaacgagatctgctacaagcgatcgaattctaaattcctaatcactagaattccaaaggagggatttgatgctaagtaagtaagggggacaaaggactgacatatacctatcctccttatattactctcc

SEQ ID NO: 127523 - DNA, 444 bp, Glycine max
  unsure (1)..(444): unsure at all n locations
aaactcaactgatgctcnggttggctcatggctgcataggctgctattgttcatgtgtctattctatccccggcgatgatgatattctctctagaaagagtgtggcgtctcgccaattgtgcaacattgccgtcgccatcaacaaggccatgttggccactcatacctaaattctaacatgtctctatctttgttcttattgtcttttcttcacaactacgcaattcccatggatttcatcaacaatgtggttttcagattttgtagtcaggtgagagagaataaactagcatttagtcgaattggattgaaacattcatgcaagtgatgcaaccacaaatatgttgatgtatctgaataatgaatgcacagctagcgatgtgttaaggcagagttgttccttcctattgttatattccagacgttggaaatagaaatctttta

SEQ ID NO: 127524 - DNA, 325 bp, Glycine max
  unsure (1)..(325): unsure at all n locations
agctntattaaatagccaccacaagctattcttcttttttgttaagtatgttaagtataatttaattttataattcttatatgataaattagaatacaaaatatagagagtaaatatttaacttcatacattaaacaacacgctagattatattagcatattagcaggagttgaatatagtgaaagtagttaatcttttaactatatatgaaaccaatgtaagctgagggcagtgctgtaacatattatattaaattatatataacatattaaagtaaactaataatattatttaataattgaataaataaaatttctataattt

SEQ ID NO: 127525 - DNA, 446 bp, Glycine max
  unsure (1)..(446): unsure at all n locations
aaactaactcatcattatatgaactatatcctatgtcacatctttcttagtgttgtgttcctgtgtcctctagcatgaggttgtacatagtcatccacctattcatctgctcccccgaacacaaagttcaagatcatcacatgatccaaacacaaacaacacgcatggagtgagttatcacattcctaactaatgaagagaaacaagataacattgtggtatatatatcatataaaaaaatacaactgacttaagcatcactcacgtnttttcaccactttgtcgcataatattacctcgcaacaccacacatttcattcattttcacaacattcacgtactctatgatcactacacaatatcatgaaggctatcaatatctatcaatacacaagcgttattcaatcattacacttatactcaatcctatatgctatgtggtacca

SEQ ID NO: 127526 - DNA, 473 bp, Glycine max
agcgatctgcatgcatgcaaccttgagatcttcttggaattcttatttccctcgcaagcgtctcgagctcaccattttggtcaaacaattccttatccacaccatcaatgcttgcctcaacctctatcatcttgtgtgcttcccctccttcattgatgcgttttttcgttagtgatgactcacaaccagcctccaaattttctgtactgaagagtctgtatttttgaagctcaatcttctgtttagtaatttcttcttctgaaagtcttaacttctcattcacagtcattagttcttgttcatatgcattaattttggtataaagatcttcagtattctcatttcttgatcccctagttgaaccatctgcatgttcctcttcctgcatccatagcttttcttttacctcacggagctcagtttccaactccattattcttctgtttatccctagatcactaccattccgtgag

SEQ ID NO: 127527 - DNA, 421 bp, Glycine max
  unsure (1)..(421): unsure at all n locations
actccttccaaacatgtacgaaactntaatcctaagtggtgttctcgatcaatacatataagactggttactgtgatgatcagaggtcaacatttgggaacgacatcatacgatgcctgcttgacaagcatagatggttaatagctttacaagataagagccgaagacgattatggaaacagaacccaagactacaactaaaatattgaactatgtcaaatccatgaatccatacatctttgaagtgccatgtgtctcttcgaagtgcggcaaatatttgttctattatagggatcaaagacatctctgaggatatacaatactcacacaccttgttcatcctacaaaactaaatccccttggtaagtgaggttaatataagttcactaacgtattatagagccgagaagactctctatgt

SEQ ID NO: 127528 - DNA, 425 bp, Glycine max
  unsure (1)..(425): unsure at all n locations
aatgttacgaaactntacagattgcgcaataatgtttcctttcgactcacggcatgtcacggaacttcacggattgcctaacgatgggtgtcaagttcctcaaagcggtcatgcaaaggttgcatgccaccaaacattggtccctggacgaaattagggtatgacagttgcccctctttacttaccttttatcggagataggaggaaagtaaagataagacaccgatttcgtccatcttagccaatgaacaagccaacattttcctgatagcatatacaaatgaaaaagttgaggtagaaactttntctaaatttgatacctcttctagtgtttcatcaaacgatgaagaagataagccttatgatgttcttcaaaattatcatacgatttcantttagtgccaaaaatataaagaaaaatataa

SEQ ID NO: 127529 - DNA, 497 bp, Glycine max
  unsure (1)..(497): unsure at all n locations
aagcttctcgggcctntcctgcaaagcaacatntgtgaagttagtttaccagtgggacactattcttaatacaaaaatggcatacaacctcctcccataaatacaaacatcaatgtaaatttagggcaagcttatgcacatatttccttacgaacgttcacttgcacaagacatcctattaactaagaaaaatgcacccatatacaatcaaggtagcttcattacctagattatttacatgtacttccaaggtgtatttgttacttacatcacacacatctccttggctggatttacatacatgcatactcaaagcattttggggtaccaaaaattgcacatgcgctcatcttggtatttctaatacctatacatatacaaacttcatgatgaatcttgactacctacacaataaggtgctacatntcatgctnnttttcaagtgtttgctacctatagccgcatgcatattcaagcatattatccttcactgacta

SEQ ID NO: 127530 - DNA, 460 bp, Glycine max
  unsure (1)..(460): unsure at all n locations
agctngtcttcccaatctgtgccatatatatttctttatagtggacaagccttaacaacaaactgtggaaattcttaaaaaaaatctgcaatgttgttgaatataaataagtataaagttagtaacatgatggatctccatctaaattatcctactggattataacatataaattaatcatttaagatgaaacaaatttaaaaagttgccatggaaaaaatgagtaggattaacaagtctgaactaaagtagacacattcaaaaaacatatagactaaaatatttagccatattctatctacacacaattggattggaatgtttcaataatagtagatttctgtgcttgattaacttttgaggttttctattgatgccgatcaacacatgcagatgaacatttcagctatttaaaaatattgggagaaattgatgtaagtcagatgtagagtgacacata

SEQ ID NO: 127531 - DNA, 438 bp, Glycine max
cagtcaccatggctttctgatgaaagagaaataaaatgtcagatgaattctactgtgagatggaagatccaacttataagcaacaacaccaaccttgtttaacacctgtaaaggaccataaaaccaaggggagagtttttcattaatccttttagccaaagatcttctcctataaagttgcatcttcaagaacacccaatcaccgactgcatattctatgtctcggtggcatttgttggcatctgctcacatgatatctagagacttcaacaaattttctcttagagtagccaataattcattccaagagatggctagtttattgacttcttcaaagcgggaaggaatggtggatcccttgtaaatgtgatggggatcatgtccatacaaacctttgaaacgagacatcttgctttaagcgttatgattagtgttaaa

SEQ ID NO: 127532 - DNA, 436 bp, Glycine max
  unsure (1)..(436): unsure at all n locations
agctntctaaagttntctggttttctaaactcttgaaaacttgngctatttattctttttattctcttctccctttgccaaaaagaattcgccaaggactaaccgccttaattctttttgtgtctctcttctcccttttcaaaaagaacaatgaactaaccgcctgaattcttttgtgtcttccttctcccttgtcaaagaattcaaaacgacacagtctgagaattgtgacatcctggaaatttctacccaaaattttgtaaacgatgcattttgaatgattatatatataagtattattcagtgtgtgtatatatatatatatatatatatatatatatactcctggcagaagtaggtatattgggggaaagatacacgggttaggctaattaacgaagagaaatccataactggatagttataggttaattct

SEQ ID NO: 127533 - DNA, 368 bp, Glycine max
  unsure (1)..(368): unsure at all n locations
tgaaatngaacgagacaaaggagggtgagaagtggaactttgaagtgtgtctcacaagactctcattcatcaaagttacagcatgtgttacacatgctttctatttatagcctaggtactttccttgagaaatatccttgagaagctactttgagaagctcttttgagaagctagagcttatctacacacacctctcttatagctaatctcaccttcttgagatgcttccttgataaacttcttgagaagctcccttgacatattagagcttagtttctcactcccctctaatagttaatctcactcttcttgggatgatatgctatatcttatctacgcccacccgtcatattatctgagttcaccc

SEQ ID NO: 127534 - DNA, 356 bp, Glycine max
ccgggatccttaagtcacctgcggcatgcaagcttaacctttgggcccatttttcttttatcgcaaaaggagggcatttccagagtcgtgaagcgtgtctctacgtgtgggtcttcaaaatttcaggtatgggtggacttcttactcctttgattatccagggtatggggttttgggagatatgatggcgagtcttgctaggtttctgctttatgatgattatttgtgaagaaatttgtggaaagcatgtttaacttgccatgtttggatgagtaaaacatacccattcatgtttaaggtttttatgatagatgcttgtgatacttatgtgttgaaattgcttatggataactgct

SEQ ID NO: 127535 - DNA, 491 bp, Glycine max
  unsure (1)..(491): unsure at all n locations
gctgctgtcgcgtaaacctaaaacatcattgtttgtatatctcaaattgggctaagcgtgcacgcacaggctaagcgagtcatgcattcccggtaagcctgtggtgctcgctaagcggattatgcaggaaatatcctcctgcaaaactctctaagccctatgtggcatgctaagcccaataatatctctgaagttgcaatttcattattgggcttagcgcacaagtttgggcttagtgcgcaaaaaaaaaaatcaaaatttcttgtacttctatttgggtatgtctcctacgcagcaagcttagtgcgcacttacacgctaagccttagtgtgcctcaatgattgtatatttgtgttgggctaagcgccagttgcacgctaagcctaataagctaactgttctgttttgttgtcaattgggctacattttggttaacttttatagctaacacattttgaggcatgtnttggctgaattgattgcatgaccg

SEQ ID NO: 127536 - DNA, 143 bp, Glycine max
aggaggcagagctcgtgcatactgaagctaaatactcttcatgcgatgtgcaacacggaagaatcttgtggaatgcactggggccgctgggataatcaatactaagggggcaatggtgaatattcggggatttagagaactgt

SEQ ID NO: 127537 - DNA, 399 bp, Glycine max
acgacacaaaactaagcttctaaagcaagctacaccacatcttaattctatctcacctcatgaatgaaagctagagttagatacacccacctatcatagataaactatcccgcatgtctaaatacataaaaatacaaaaaagtccctactacaaagactactcaaaatgcccgtaaatacaacgctaaaatcctatactactagaatggtcaaaatacaatgtccaaaagaagaaaaatcttattctaatatctacaaagataagtggactcaaccttggcccatgtgctcagaaatctaccctgacgttatataaactctatgggtcttctttaacacctctagcccaatgctcttaatgacttctatacaatacctctgggggaagatatacattaa

SEQ ID NO: 127538 - DNA, 340 bp, Glycine max
tacttatcgtcagaaaaaatggttgcattttttacgaaaatcgcagcaacattgtagcgaaaatggagaccttatcggagaagttagcacaatttgaaactagtagatacaattcaccgcgagctcagtcagaggtgtcttacttctggcatctagatcacttcaacacctcatttgagaaactggatgtgccatgtctgaggctcatacaccaccggggatattaagatacgcaaccttcgagatcaccactccaatatgaaaggtccattgtcatcttataaggcagcttactggtcaatgagcccaaatgtatatacttgcaccttttccaccctct

SEQ ID NO: 127539 - DNA, 295 bp, Glycine max
tgagaggatggatggtgacccggtaggcgagtataaactatgttctgggcgtcgtgggagtacatgagctcacatggaggtgggcaactggggatggtgggtatatgcgcacattgtggatgtggaaaacttgttgtgcaccatctgccgaccgtcacctagtccacatgtgagggtcgccattttcttcagcttatataggaagtgtgaaggtgaacatctgtttattgtaccacagagggtccttgtattgttcggggcacgaacttggactatgtggggctttgcaaactgc

SEQ ID NO: 127540 - DNA, 288 bp, Glycine max
agctacaagtggctcgattgctccttgttgttgcatagaaaggcaaaggtctgtctggtggtcaccataggagcacaaaccacacaccctttcaacatgtacagatatttgattcaaagccacttgggttaccaagttaacctatgcattcaatatgccttcaagcgttttagtctcatattatgcagcttaatatgtatctaacttatgcacactcttaaagactttagcatcatttctgagcctaaactattgataagaggaagccttcttctctattaaatatct

SEQ ID NO: 127541 - DNA, 469 bp, Glycine max
  unsure (1)..(469): unsure at all n locations
actcgataacttagcaatactaatatttactcaattcgctcaagtttccttcgtccaatggactgacaacgttacaatactttntcattgtgtttcaaaatattttcttatttttcgacaaccttaacacgagcatctttaggctttatatagatctcgaagctttgatccattgagagatcccaactagtcgttgtctaatagctttggcgcttgacacgaggtcgctactatgcaaagatatcttcagagatgtacatgttttcagtgtcgcctagtgctcagagctgacttntcagtgtgtgctaaagacgagacattataaatctttccttttgtgtgctaaagcacgagtttcttactgatattgtgaacgttactttcttgtgattgatcttagttcttgaggattgagtaactattctattgctctttgcatttcaagccaagtgtcaaagcacttgtcttc

SEQ ID NO: 127542 - DNA, 455 bp, Glycine max
  unsure (1)..(455): unsure at all n locations
atccttagagtcacctgaggctgcagcttgagccaaatcctgactcaccataatccttgttcagggtgagaatgtcaatccttaccctcggaagcaaaaaaagaatagaggggaaatttccaatcaaagaaaaagagaaggaaaatttccaatgaaagcaaaaaaagaaaagaaggaaaattccccaatcaaagagtgggagaaagcaaaaagaaaagaaaggaaaattcccaatcaaagaatgggagaaagtaaaaaaaggaagaagaagaaggaaagaaagctcctgatcaaggatcgaaagaaaacaaaagaaatgtgcagagaggtctttggaccggacaatatctgaacaatacagaattgccaccaaatgaacgaanaaagaaggaaagggaaccacgacctanaatagtcttcttcctttgataccaaccaaaatcccgtgcgctagc

SEQ ID NO: 127543 - DNA, 482 bp, Glycine max
  unsure (1)..(482): unsure at all n locations
tgtatgggttggatgttgaattctggttgttcctggtttgatggtgcggagggtgaaccangtgatgaagtatcttttggtgaggtagccatggagaagcagagcgtttgtaatgatttcgtaaatttctgagagctgttggggaatgcagaaaacgagattaacacgaaaatataagtttgaatgaggaatgtagagggacgtgtgaagcaacggtcgaatttgctttggttcagtagtgaacgtgctattaatgttaagtgattcgtttgcgcacgttcagatatcagtagttgctacaattcctctagcagacaaatgcccagcttgcccctcagtttttcaaactgttntgcatccaatgcctttgtgaaaatatcntgctattgttcctcagtgtcaacatgctccagtgtgataactttatcatcaacaagctctctgatatagtgatgtctaatgtcaatgtgcttggttctgct

SEQ ID NO: 127544 - DNA, 476 bp, Glycine max
  unsure (1)..(476): unsure at all n locations
ttaagcaccgcngctgcagctcagggattgggtacgggtttcgtctatcctgttctctttctgagcctgtgacagcgagtggttcacgacgcggaggctctgatcggagcaagcagcagggaacacgctctggccgtcggagaagctgatcttctcgacggaggtcacgcagcactcctgccagctgagctcgccgagatctgcaaccacgtcctccagcgccaccgccgcgaacgccgacacgctctcgctcaccgttgaccgcggcagatccaccagatccagcgactccaccgcttgcaccagcactttctgcgcactaaatcgacttaggtttttgcaatttctcgaaacgaaaacctattcgagaacattctcttgttcttcgaagattcgcggagcgaanaacacagatcctagactattaccgcaacctatatcttctcattttacttaattagtgttgtataaaaaga

SEQ ID NO: 127545 - DNA, 464 bp, Glycine max
  unsure (1)..(464): unsure at all n locations
tttcttaatcaagcaaatagaatgggttttcgtttacctgctgttcgacgggcatcattcacggccagccaagcagcttcaaaatctgtacaagttccaaagggctatcttgcagtgtatgttggggagaaacaaaagcagtttgtggttcccgtatcatacttgaatcagccttcattccaagatcttttgtatcaagctgaggaagagtttggatatgatcatcccttgggtggcctcacaattccttgcagtgaagatgttttccaacatataacttctcacttgaattgagaccacaaatctcactgtgggagactcacatagattagtagacattttacacaataggcatcttctcaacttgtaaagattaccaatttttgagtaatgacaacaaatccaattgctatgcatttctttttatcaatggcattaatgttcacttncttctgctagctatt

SEQ ID NO: 127546 - DNA, 442 bp, Glycine max
  unsure (1)..(442): unsure at all n locations
agcttaactctcctttaaaccagccaagttgtgttctgagcattctagtaacaggagacttccttccagtcctttccctgaaagcaacctgnggtctttctttgaatcaaaacctccacgacaagacaaagtattgtctcagaagtttcttaatgattttgcatcggaagtgaaggtagcaatgcttccattttaagcatggagactcaagaaccttctgcaatgttcagttaaagaagtatggggactcaagaaccttctgcaagtcaaaatcacctcttctctctggcagtggagggaaagttaatcctgggtatgatgtctcaaatccttctagcaactgttaacatatcaaaattatcaaataatgagtgttttttctccctccattggtctaaaaggcanaagatttgcattaagtaaggacatgatgtttaatatt

SEQ ID NO: 127547 - DNA, 508 bp, Glycine max
ctaagctaacttgcagaatatatgtggaaagagtttttcttcttgtatttcgcttattcatgttaactaattgagaagaaaagaaaatgaactttcgaaaaaatatagcagttagatgatgttggtctattttttccccatctttttaagtagaagttagatcaaattacagaaacccgtaaaaggaaaaggactttgtttataataaagaaataaaatataaagagcttgaaaaagttgtcttttctatctaattggctgctttttggtgacgtctttattactttttttttccctttttctttttaataaatcaatgctctctaatattttcaatggttttatatttataaattttctcagtaacatgaaaaatagccaatctcctacaaaaaaagtttggttatatataaacttcgaatttcgatttcatttgcaaagtaacttttcaaattttattatttgcatattattaaactacatttaatcaaattaatttgatataaat

SEQ ID NO: 127548 - DNA, 473 bp, Glycine max
  unsure (1)..(473): unsure at all n locations
ggatccttaagtcacctgcggcatgcaagcttatccttatggcctgcctccagactttacccctcgtgccaccccagaagatttaagccaagcccctacttttgaggggcaactcccaccttatgaagactatcccgggcaagacgatggggaaggagatacccatcctggccccctcctccacctcaaagatccatccccgcatgaacaaccccagccgaacatagtccgccatatcccggcctcacccacgcccgtgaaagaatctgttccctttgcggaaggtaagggaaagattgaggcgcttgaagaaaggttgagggtagtcgagggcctcggcaattacccattctcggatttggcagatatatgtcttgtacccaacatcgtcatccctcccaaattcaaggtaccagactntgataaatacaaagggacaacatgtccaaaagggcatctccggatgtatagcc

SEQ ID NO: 127549 - DNA, 478 bp, Glycine max
  unsure (1)..(478): unsure at all n locations
ttgatggtgttgagaagaaatcacatgtttgtcatcatctttatagttgagaatgtgaatgtatgtatacatgattttgatgatgtcaaaagaagaatcaaacaagactcattttgcttcaagattaatacaagattgtttcaacaaacaaagccttgattcaagatttcttcaagatcaagccttgcctcacaatgaaaggtttcatgtcattcaaggcacatgtaatcgattaccaatggtttgaaagtgtgtaatcgattgcacatcatatgtaatcgattaccagagactctgaacgttgggaattcaaattttaaatgaagggtcacaactattcaagaaaaataactgtgtaatcgattacactaattctataatcgattaccagagaggattntcaaggaatatcgccaacagtcacatcttatcannttggatttgaatggccatcanaggcctatatatatgtgtgact

SEQ ID NO: 127550 - DNA, 399 bp, Glycine max
  unsure (1)..(399): unsure at all n locations
gaaagcattttagagggctataggatgtataccagaaggagtcatacaaggctgatattggagaatatatgctgccatacatatataattnttttttatcaacttatggaagggcgtcccatgacaaattggtgttatttggtggaaaccttgatttgattagctcatatcaatcggaaaatggttgatatggagaagttatgttgtcatatatacttttttttatgaactattgtatgaacgtccaatgacataactttgattggatttatttggtagaaaccttgattaaataaaggattgcttccaactattaagtgttatctcgcagtatcttctctcctacaataatttccaacgagtataattctcacgcgttctaaaattgtatactccact

SEQ ID NO: 127551 - DNA, 471 bp, Glycine max
  unsure (1)..(471): unsure at all n locations
ctctatatgttctcttttttttcaccaacaatattgcattggctttgagagatgaggaaaaaaggcagcgaaagataatctatgaagaaactaagaaagtactgttgtttatttggggggaataatagatatgttttctttctcttccgaattctcttatgtagataggtctaggtattagttggcgactatttattttatttttctttacaaactttgatgatatgctcttattttattttacacacacaagatgtagggccatgctttgttgtatacactatnggattttcaggtctcttatttgtgttatatgtgctcattaatgtctcacagcatcatagttgtagcacacattcatctttatttttatcaaatttcacacattggatcaatttatgaattttgtacttaaatcccctaacgactgcangcattttgacccttggcataatgatctcaacaatgtgc

SEQ ID NO: 127552 - DNA, 446 bp, Glycine max
  unsure (1)..(446): unsure at all n locations
agctgtcatttcatctcatcaatgtatttttattataagaacattcagtggctttccacctacatcaaaaaactctctcanagttgaatatcatatccagaaaagctatgtaagctaaaagatatgcaaatgatgcatatacaaagcataatataacaagtgttctgatgagtttaaaacaagctcaaaatggacgccttaactatgctttcaagtgagaagcttcagaagatgtaaaagaaacccatctgttgattaggtaagtgcttccctttgaagatctaaatcttatcatgtngtatagacatcaagaaggccttacacaaaagatttatcataatctacagagagctcacaacatcataatgaagttgcaccagagtctacattagaatgatgaatatcttgaccttgaagagctgaacatcagaatggcttataatgca

SEQ ID NO: 127553 - DNA, 477 bp, Glycine max
  unsure (1)..(477): unsure at all n locations
ntatgtcccaactcaacaggtaggtgacaagatttctatataccaattggaagggagtaagtcctatatgggctttgtatgttgttctgtatgcccataaagcttcatgtagttnttgggaccaatccttccttgattaagcaactattttttcgaagattttcttaacttccctgttagaaacttcaacatgcctattggtctgaaggtggtaaggtgaggctaccttgtgtttgacattacagtgtcaaaggacttttttgagtaggcattacaaaaatgggatcctccgtcacttattagtaccctgngtgtgccaaaccttgagaatatatctttctttatgaagcaaataatggtttttgcatctgcatgttgcactgttattgcttccacccattctgtacatagtcacaaccaatntaatgattcatgtgagtagatatggaatgacctataatctatcccaaagcaaac

SEQ ID NO: 127554 - DNA, 435 bp, Glycine max
  unsure (1)..(435): unsure at all n locations
tctaagtcacctgcggcatgcaagctttgagccaaaatcctgactcatcatatttcttgacccagggtgagaatgtcaatccttaccctcggaagcaaaaaaagaatagaggggaaatttccaatcaaagaaaaagagaaggaaaatttccaatgaaagcaaaaaaagaaaagaaggaaaattccccaatcaaagagtgggagaaagcaaaaaaagaaaagaaggaaaattccccaatcaaagagtgggagaaagcaaaaagaaaagaaaggaaaattcccaatcaaagaatgagagaaagtaaaaaaggaagaagaagaaggaaagaaagctcctgatcagggatcgaagganaaacagaagaaatgtgcagagaggtctttggaccggacaatatatgaacaatacagaatggtcaccaaatgaacanaaaag

SEQ ID NO: 127555 - DNA, 478 bp, Glycine max
  unsure (1)..(478): unsure at all n locations
actcagcttaaccagggagatggaccattaagtgctttttgtattcttgacaatgcttacaaagttgagctgcccggtgagtataatgttagttccaccttcaatgtctctgatttatctctttttgatgcagaaggagaatccgatttgaggacaaatccttctcaagagggagagaatgatgaggacatgaccaatagcaagggcaaggatccacttgaaggacttggaggacctatgagaagggctagagcaaggaaatccaaggaagctcttcaacaagtgctgtccatactgtttgaatacaagcccaagtttcaaggagaaaagtccaaggatgtgagtngtatcatggcccaaatggaggaggactaaatgacaccactttgtttcaattttagagtgtgtagtatgtctaaataatggcccaatccttgtaagatggctgaccaaaaatatgttttgggttaatcaacta

SEQ ID NO: 127556 - DNA, 352 bp, Glycine max
  unsure (1)..(352): unsure at all n locations
ngcttatcgtcaaggtgtggagagtctttttttattgaatctttatcagacagataatgagcttaataattttgttgtgagtgtcttcagtgtatgtactattgataaactggctaggatcgggcagactatgggtcgtgtcctgaccaggctgctgctttgttgggagatgaattagcttgcaacgaaaacacagtggggggtgttctgaaggccctcaaaatgctctttaaccggagagtggtgtaacccccacaaggagtcgctcgagaatggtttatgatgggcagccgggtagttgcaccttgcttattctaaaccataacgctaatggtgttatggattatctcaa

SEQ ID NO: 127557 - DNA, 446 bp, Glycine max
aaaccatgaaggataaacaaaatcctaccttcaagtagatgtctatagctctgtacagaccatcatgatttggtctagcaaaatcaggaatggattgtgacaaatcaacaaaactagagagaccaagattaggatcatgtgcaatttctccaagataaccatccaccaacttgccgacattcaataaagacctacgtgctaaaatatatttatcttctcctccgtgtttctcctcaacaacctccataccacagcttcccttttcgtgattcatatattgattcaaaataccttgtaccaaatgaacatcatatgtggtaatctggagagaccttgctggaatcaataaatctttgacacaagcttcgtcccaattgaggctaatgctcttcatcaatatctctcttgatgacatcgttattccgactaatatggccactctcaat

SEQ ID NO: 127558 - DNA, 440 bp, Glycine max
  unsure (1)..(440): unsure at all n locations
agctntgacaatgagctagctctattttcgtacntgaatattacattaagtaaataacacacgttaaataaatatattaattctattaagtatatagctatacacaagttaaatactatattttgtaaaataattttattgtgagttttatctttcaaatattttcttactaaatattacttaattgttcagattattaaatatataaaaaaatatttaatatacaatcgtgatattaattaaaaatattaaataagagctgttatattctttgacagacttttatgctcatatttacaattgaataaaaaagtaaaatcaanataaaaccatcataccttctagttacctgtcaaaaatctaggagagacaaataatataagttctttccctttatatctctccttggtacttcaagacccacgactgaagcaagagtc

SEQ ID NO: 127559 - DNA, 501 bp, Glycine max
actaagctatacatatttaactatatacctatatatgttcaatttctcattttctcacttccaaaccgaaaacataatctcaaattatttattctaattaaaaacacaaagtaaaatatttaataattactgatatatttacataattagaaaataaaaattgggtgcattacaaatatttcatgaaaactaacaaagaaagttatatataataaataaatatttaccaaattaaaaatcaatgtaaatattatattggatgttgatttgaagtaattattaaaagagttacccttagttacatgttgtaacatgttatacatactatgtctatattacagcatgctattaagggtagtcatgtcaataattactccaaatcaacatccaattaagggtaaccctagcaataattactccaaatcaacatacaatgtttacatctgatttttatatgataaaagtattccttatatacgacactcttgacatgtgacttat

SEQ ID NO: 127560 - DNA, 421 bp, Glycine max
atgattgacagttagcttagctataatgaagcaacttacaagtttgtctgcatatagaaaaactagtgaaatgaaatgatactacaagagcagataatgaaaggtaagataactttattttcaatgaaactgatagttacttttcattagtagcatgcataatcaaatcaggatccaagaaggttataaaaccaaaaatctgaatgaaagagatggttagattctggtaactctgccaaaaataattatttatctaccaaaaggattcatgattaacagttgagccatggaaatattaaatgtaagaaaattatattacctgatgttttagagtagctaagctcttagtatgcattggagattgaggaatcacgccgctggatggagggattccaataagtccacacagtatggtctggca

SEQ ID NO: 127561 - DNA, 385 bp, Glycine max
gttctatcatccacctactaagcagttttatgtgactatggatgttactttatctgaaacagaaatgtttttctcatcaccctcatccacttctactcttcagggggagacatactctaaagagatgaatttgatggttgtccttcccgacgttgtcatgactagtaaaaatccttccaatatgggcacaggttctgcccaagagttatctgctcatataggttctgcacctcaatgtgataccaccagctcattggcacctcagagtcccacaagatccccttctacttctattgtacccaccaatgattccattgttgctgatgtccctgacgtatgtatagattctaagggtgatgctaacaattaattatgaacatgtttt

SEQ ID NO: 127562 - DNA, 318 bp, Glycine max
  unsure (1)..(318): unsure at all n locations
agcttgacaagaagactctctccttattgtatatatatatgnnattngaatgaaataaaagctgagttaatgagtgaacaactttcttcctcacaaaatcacagcctgtggatgtcgtatgtctttctatttttcatgaatttttcttttacagaaaaatcaaatgattttttttttaataaaaggactaggaagcctgatttgagctctttatgtgagcttcattcttttcttaaatgcgaaatctaattagtcttggctcattttttttttgttaaantacttgatttatggttggtctcccaatgtcattttcac

SEQ ID NO: 127563 - DNA, 494 bp, Glycine max
gctgagaggatgcttaatggaggataagatagagggtgataaagagagaggggggagcacgatattgaagaaagataaatggagagaagttgaactttgagttgtgtctcacaagactctcattcatcaaagttacaacaagtgttacacatacttctatttatagactacgtagcttcctcgagaagctctcttgagaaaacttccttgagaagcttctttgagaaaacttccttgagaagctagagcttatctacacacacccctctcataactaagctcacctccttgagaagcttccttgaaaagattcctatagaagctagagcttagctacacacacctctctaatagctaagctcacctccttgagatgagaagctagagcttatctacacaccccctataatagccaagctcacccgcatgacaaaatacatgagaatacaaagaatatccctactgcacagactactcagaatgcatcgaaatac

SEQ ID NO: 127564 - DNA, 430 bp, Glycine max
  unsure (1)..(430): unsure at all n locations
agctttcccaaaaattgctaaagaaaaaactatatactactatttatctaaaattatctcatctaaacaaacatttcatctatttgttgctctattttttcggttcaagattaactatggccttgatgcctaaaactaatccttaatggagagttctgcctggctggtgtggaagtctaaggactctgaggaacaaaaaaatccttaatttgtagtttttaagttctttcctggcgagtctatattgaattattgatgggttaaaacagagttgtctatctagccagaatgccagttctaattatattagctatattaattctgaatattntgggggtgagtcttactgcaatgataaggtttgtcaaattaatggtcacaagttcaaatcttataaacagtctcaccacttatgggtgtaaggctatgg

SEQ ID NO: 127565 - DNA, 495 bp, Glycine max
  unsure (1)..(495): unsure at all n locations
actcagcttgcattggaatgcgaaagccccactccatcattatgattagtacctgacatctcaaacaaacaaatcaaacgcaacaagacaattatagttgctgtttgaatacctcacccactcaagtgtatcacacaattatggcttttctctaatgaaacactcttgccttttaccactctaattccccttgagttcttaggcaattcaagagattatggccacaacaaagaacaattcaccaatatgtgtaaggtaaggctagagagacaaggaaaaggttaaccaagaaaaaggctaacaatgtttttaggcacaaatgaaggaaataaaattcagaatttatgaattcaagtaacaatccttcatgcaaccaatatattaccttaaagagagtttttttaaagttcttcaagcatgaaccattcagcccgatgtttttgttttttttaaatttgcttatacgaaaatctgcttctnttttttttttttata

SEQ ID NO: 127566 - DNA, 350 bp, Glycine max
  unsure (1)..(350): unsure at all n locations
agctngcctanagaggtccaggaaggacattgcatcctaagaaactagttccgctccggagtatgacagtcatcgctttaggagcgctgtgcaccagcagcgcttcgaggccatcaagggatggtcgtttctccgggagcgacgcgtccagctcagggacgacgagtatactgatttccaggaggaaatagggcgccggcggtgggcaccactggttactcccatggccaagtttgatccagaaatagtccttgagttttatgccaatgcttggccaacagaggagggcgtgcgtgacatgagatcctgngtaaggggtcagtggatcccgtttgatgctgacgctatcg

SEQ ID NO: 127567 - DNA, 507 bp, Glycine max
  unsure (1)..(507): unsure at all n locations
ctaagctgcatgctctccttttctctagaagcacanattattcatctccatgaagcctgtttcacagcaagaaagatatttgttcttagcttttagttttactagatatggcatacttcaaagggctacatgacagctgtaattaagatgaccctaaagccaaattgattgtgttttctgttgaaagttcaaaaagattactttatctagcatacttttgcataactaattaattacatcaacttataattaattagaaattgttgaagggttacattttatgaagttgatatgcagatgagaataattaaaacctatgaaggacatggaatggtcaaacaaaatgagtatgcaacaataatagccaaacattcacatgaaaataaggttgcttttctgcttcacatttttcccaccctcattccaattgtaaaatactcttgctntagcatangtccttcaagtatgtatttaacaagtatatatcacccaataacatatacgaga

SEQ ID NO: 127568 - DNA, 441 bp, Glycine max
  unsure (1)..(441): unsure at all n locations
agcttccnctgcaccaaatgcctttttctattaatagccatgcaaggggagaggtttagaggtcataactaaagaaggagaggaggaaacacaaaaagagaaagagaagaagaaaaaaaagcaaagctgaggcgttgccaaatcgcaaccgtggatcattccctacatcatttctctcgctagccttgtaccccacgcaacagtcgattagtttttcttaagagttgaatgtaatctatgtacccttataggccctctgtgatattatgtgtgtatatatcttctcccctttatcngatggaatttcgtctcattcgtaaggcttaattctagtcgatcactagtgacatgaaatttgtttttttagtgagactggaaggcattanacaaaaccaaaaatgaaaaaaaaatcaattcataactattggatcgagtggcctc

SEQ ID NO: 127569 - DNA, 482 bp, Glycine max
acttcctggctttattgttgaccacagagtggtacctggagatatgtcgcgggggtcaggagaccttgtggacgtcaggtggggtgctattgcccaaaaccaagcttgaccaatcccgacccaacccgggcatagtcggtcagtgagaacctgtgatgtacctaagcaggcgagctcctggcagtcaacagataaaaggaaaacaagaccacaaagcaaggaggcttgtggtggctggccagctgtgaattttgtgtaatatgtggattgtggcctctggtaatcgattaccaaaggtgagtaatcgattacaaggcttaaaattgaggacaggaggctaagatggtctctggtaatcgattaccaaggggtgtaatcgattaccacgcttgaaaacgaagtcaggaaacttatggagcctctggtaatcgattaccaacctgtgtaatcgattacacagatgaatgggtcactggtaatcg

SEQ ID NO: 127570 - DNA, 446 bp, Glycine max
  unsure (1)..(446): unsure at all n locations
agcttatacttattacctagagttgattccttcttgattaatcattaatcctataagtatttaatcatatccaatattcattaactagtgtcctaagacattaggtatctaaaattaaaatataacaaataacttattaattactatgataattttaggttaaactattatatttgttcttgagaactttgtattaatatatcaagataatatttaatgataacatccatatatacatacattatttatatatgtaatttaattaataaaatctatgtaaaatggttacttggtaaggaatagaataaaattgccaagaaagcgaacggctttctagtttctacaatgagaccaacaatgcttgactgtgtcaaagtatgttcctcttgttccacaagctataactcattnttntatgctatgattgctggtgctcgctacatata

SEQ ID NO: 127571 - DNA, 504 bp, Glycine max
  unsure (1)..(504): unsure at all n locations
ttcccttactaatttgctctaattntatattcagacccgtataatattgcattaaaaattacgtaagcacttccctacctgcaattcctgaataatttagtcatacatccaccatccgttaattgcacaacagcaggtaaatattagtttctaaatgatatgtgatcatgttgatattttgactaagggagagattctttttatgtgggtcttcctacattttgcaaccatatgcatgctcgtcacgtagtcatcttaataatatgctttatttgagtaggctattattaggtctactaactaacaatcaaccctacattcagtggttcgctttccaatggttacgaataatttaaaatagagtaatagtattgtttatttaaaactgtgttagtttctcataatatatttctctccatcatatntatttatcacacatttatgtcctttatctttttatttccccttctattgtatagtttattggtaaaacatataatttct

SEQ ID NO: 127572 - DNA, 435 bp, Glycine max
agcttcggtattcaatttcgagcctctcgatatattatttgattccatcagacacccgagtaaaaaagttattgtcgtttgaatatgctcagagcttcaacattcaattacgagcgttccgatattttacaggactcaattggatagccgagcaaaaagttattgtcgtttgaatttgctcagagcttcggtattcaatttcgagagtctcgatatattacgggactgaatcagacatccaagtaaaaagttattgtcgtttgaatttgctcagaacttcggtattccattttgagcaactcgatatattacgggactcaatctgacatccgagtaacaagttattgtcgtttgaatttgcttagagcttcgataatcaatttcgagcgtctcgatatgttacgggactcactcagacacttcgagtaaacgtta

SEQ ID NO: 127573 - DNA, 487 bp, Glycine max
  unsure (1)..(487): unsure at all n locations
agccctttgtgcttgttcattccacccttacgcacccttcttcaaacattcggtcataggacttgctatagtgctaaaattctggataaagcgtcgataaaatgatgcaagaccaaggaaagatctcacctccgaaactgttgtagggctcggacaagtcttgatagcatccacttttgtttgatcaacggatactccatctttagacaccacatatccaagaaacaccacactttcaaccaagaaatcacacttttccctcttcccatagagtttttgtgctcttagggtctcaaatatttgtttcaaatgagtgaaatgctcctctatagatttgctatacaccaatatgtcatcaagataaacaacaacaaacttacccataaaaggcttgagtacttcgttcatgagcctcatanaggtgctaggtgcatttgtgagcncaaatggcataactagccattcatatagaccatgcttagtcctg

SEQ ID NO: 127574 - DNA, 455 bp, Glycine max
  unsure (1)..(455): unsure at all n locations
agcttganatataaagaaagaaattgtctttttatgcacctaacatattcctctgcaaagatttgttaactgcttataaaatataaatagattctcatactgccagacaaacaatttaaattaaagttttgaaactcgttaaacatgtaaaaacaatttctaagcttcgagctaatagcttaaacttttggggaagtattccttgacattgtaacagagtttttatgaccaagtacttaagaatttgtttccttcaacccccattcttcataattaaattaaagtttatcagacaataaagtgactcatgcattgttgatgcttcaagcacaaagggatttcacaagacaatgcatgttacacctataaaatcagtgttgtgcttcctcctaatagtttatgcttttagttccgccttgaccatattgaatgggaacttcaaaatcgaagagact

SEQ ID NO: 127575 - DNA, 467 bp, Glycine max
  unsure (1)..(467): unsure at all n locations
cttcgaatctctaccagcaatgttgaaacacaaggatttttttgtttcacaanaatctattacatgctcagaaatgtgagaacaaaaatatattttctcttttttgtttaaggtaacaaaaaatattatttagcgtaaattatttccagtaatttaatcgtacatattgttacatctttattatcacgtaagagaatgggaatcttacattctcatggaaacatttaaaataatttctcactatcttcttgctcaacccatgtatttctatttttatttcacataccgttttgcaattaataaaaataattatctctcaatcatatcaaattgccttattctttttacatgtatattcgattctcttaattacttatagtcgtatacgggtatacctttgacctatcatctcttattcctattactacactaaacttcaatatgcttttgtaaaataaattatcact

SEQ ID NO: 127576 - DNA, 60 bp, Glycine max
agcttaagacaactggtggaagcgtattatgatatgactgcgaccgactaacacatagag

SEQ ID NO: 127577 - DNA, 174 bp, Glycine max
  unsure (1)..(174): unsure at all n locations
tctcttacctattcaaactcaaaagagaattatgtaaaggacaganaagaagaacttgggtccagaagaagtttctcacactagagcactccaccatcaacccttaccccgaaccacaaacccattacagaaagacactagactccaatatctgctggagggagaaatgggggg

SEQ ID NO: 127578 - DNA, 408 bp, Glycine max
  unsure (1)..(408): unsure at all n locations
agctntaatgcccttaagtttgaatctatatttaacattcccataatgtattccctaacattccctttgccttgatacttcatggaaatcaggttctgaaggagagtacttatttccaccttatcgctttttgcaaagcacttctcaatatcagcaaggaattcgttggcattaattatatcatatgaatcacgacccctaaagacctcaggaatgtcacacttaatgatcataaaactaatgcgatatgagtgatcccacttctcatgaagtttcctctgttcaaaggtactataatccgtaggagaatgggggttctcaatccttaatgcaaggtctagatccatgcaaccaagaataatttacatgttctctttcccatccttaaatttgcaccattaaaaactg

SEQ ID NO: 127579 - DNA, 449 bp, Glycine max
cattcttggatggccttgattctcttaaggtccactaggaccccatttctaccaactacagaccctaagaaaactatattatcttcccaaaaagtacacttctctatatttgcatagagggtgtttttcctaaggactgaaagaacttgccttagatgtcctaagtgatcatctatgctcctactgtacactaaaatatcatcaaaataaaaaactacaaatctacctatgaagtcccttaagacatgatgcataagcctcataaaggtgctcggtgcattattgagcccaaaaggcatcactagccattcatacaaaccacacttggtcttgatagcggttttccactcatcaccctctttcatcctgatatggtgatacccacttttaagatcaatgtttgaaaagatattggcaccatgcaactcatcaagcaaatcatcaagtct

SEQ ID NO: 127580 - DNA, 471 bp, Glycine max
ctcgaccggatccttagcacctgcggctgcagcttgctagcgttatgcagacggatactcacatgctagctatcatcgccaagtaccaagaagagttaggtctagccgcggcccacgagcatagaatcgcggatgagtatgctcaagtatatgcgaaaaaagaggctagaggaagggtgatcgactctttacaccaagaggcaaccatgtggatggaccggtttgctcttaccttgaacgggagtcaagaacttccccgcttgttagccaaggccaaggcgatggcagacacctactccacccccgaagagattcatgggcttctcggctattgtcagcatatgatagacttaatggcccacataattagaaatcgttaggaaacttgtatggtctctcagaccttgactggatacgacttctttttttgaaataaaatgagttgatcccatgtttctactccaaaaagct

SEQ ID NO: 127581 - DNA, 475 bp, Glycine max
tcagcttctcctcgtttccctataatagggggaggagggcgaattttatgttcaaccctccaggtatctgagaattacttaaaattagtgagaaaaattgtttccgtgaagaaaatccaatccgaggcgcttccgtaacgcttccgagacatttccgtgggtgatttcgcgaagatttttcaccgttcttcgttcgttcttcatcggtcttcggtcttcaactggtaagttcccgaaatcgaatttttcaattcattctatgtacccttagtggtccctacttgtttcgcatgcttttattttcatttcatttactttccgtacccccttttgacgtgctttagtcatttatttaagtcattttctcgcctaatcaaaagataaaataaatttccaacgatcatttgaattgtgacatcttctaatttctattataatgaaatccgaccgttcgatcatgctgtaaccacgttta

SEQ ID NO: 127582 - DNA, 361 bp, Glycine max
  unsure (1)..(361): unsure at all n locations
agctntctttgagtttcctgatctctttcttattatcacttgctatgaggatgtcatccacatacaagagaaggtaaagaacacgtactctcccattttttaggatatatacacacctgtcatatttgtttcaaatgaagccatatctgattaagaactcatcaaattttaggtaccacattcgaggactttgctntagtccatacaaagatttttcaacaagcacaccttgtttttcccttcttataaccttaggctggtcatgtaatggtttcttcaatttcatggaaaaagtgtttacatcagctgtaagttcaatcatactgattaccgactaattgatctataacaatgctccact

SEQ ID NO: 127583 - DNA, 375 bp, Glycine max
  unsure (1)..(375): unsure at all n locations
ctcagctcaactctcttcaggttctnttataatgtggctttctgtctgttctcccttcaccaattaacccatattcgtaatattaatctgtgcacgcttcgtgttcgattaattgactctgagcctaacttgcgttcatgcttaatggacgaaggagtaatcggtgtatgtgttgcctaatcacgtattgacagccctaagttgattctcgcttagtaaattaaaatatggttggattaagtggttaactgttaaggacgaattctccataacctatgacaagagagtggcttctgaatcaaaggaaacaacccgttctttaatactggtcatattgtatgccaattcactcgttctttattcataagacaaaca

SEQ ID NO: 127584 - DNA, 418 bp, Glycine max
agctttgaaagggttgttatttatcttctctcttagccaatctgctggcttagcgagagcgtccgctaagcgtaacactcatgggctaagcgcgaggaagactctggaagaagatgagctatacaggttctctaagcgcatcgcttcatcagactaagtgcaccgcttcagttcatacttatcttgattaagtcttctcttgattgctgaatcttgagtcttgaatcttgatcttgattattcttgactcttgaatcttgaatcttgaatcctgaaatcaaattcgctcttgatccttgaagtgttcttgactcaatcttgaactcattcttgaatgttatcatctttgttatcatgaagtgatcttgactttgagctattgtcatcactttggtatatcaaactccttgaatatctt

SEQ ID NO: 127585 - DNA, 475 bp, Glycine max
  unsure (1)..(475): unsure at all n locations
gctagtcccaaatttggacaatgccttacagactgtgcttaatccgaagaatgtgagtgccatcaccttgaggtctggcaagcaaattgaagtgcctccaccagtatcagcacctgcacctgcacctgaacctgtcaagcctcattctacacctgaaaaagaagatgagatagttgcacacaagaggaagctttctgattagggagctaacaaaaattttcatgcaggtggaccttcttctagtagctctaacttgcagcagcctcctatccctcttccattcccacctagagcaattccaagcaaaaaaatggaagaagtggaaaaggagatcttggagaccttcacgatagtagaggtgaacatacctctgctagatgccatcaagcagattccaagttttaaaggagctatgcacccacaaaaggaagctcacaggcaatgataggattagcatgngcagaaatgtgtcatc

SEQ ID NO: 127586 - DNA, 429 bp, Glycine max
  unsure (1)..(429): unsure at all n locations
caagcttgtgtaatcgattacatggttntggtaatcgattaccagtgacaagctttgaataaaaatcaagagatataactcttccaatggttttcaggattttctaaaggttataactcttttaatggttttcttgaccagacatgaagagtctataaaagcaagaccttgacttgcatttttacaacaacaacttacaactttttcatatattcttttacaacctttgaatctctttgaacatcttcttgaacttcttcttcttcttcctttgccaaaagctttctgagttttctggtttccaaactttgttctttcacagaaaacaaaagtgtgctattcatctttttcattcccttctccctttgccacaaagaattcgccaaggactaaccgcctgaattctttntgtgtctctcttctcccttt

SEQ ID NO: 127587 - DNA, 482 bp, Glycine max
gctggcccggtaccttctacctaatggcataattcacccccctccatgattggcaagcgggtttgtttttatgttgggcccgtcctcttgaaaagtcaaccacccagcctctatcaagctttggaccttgcttttcaaggccaagcactattcgatcgagtggcctgtggtcctcgcattgtatgcgcaggtcgcgctagggttataccattttgggaacagagactggaatatctttctcgagaccaccacggccaattggttggcgatgaaagatggcaagagttccccatatgtcattggcaaaaaagttcctcatcgtgtttgcgccaaagtgagcgttgttggccgggtgaggccgagtcatagccaaagcctaaagagctcccccctgtggaggtgtgggcgcccttggttgggtgagtgttgtatcggaagaagcctcggtgcgagccgacaaactcgagtgatgttgtgcatat

SEQ ID NO: 127588 - DNA, 504 bp, Glycine max
  unsure (1)..(504): unsure at all n locations
gctngcatgctctaccttttctctagaagcacaaattatagcaactccatgaagcctgtttcacagcaagaaagatatttgttcttagcttttagttntactagatatggcatacttcaaagggctacatgacagctgtaattaagatgaccctaaagccaaattgattgtgttttctgttgaaagttcaaaaagattactttatctagcatacttttgcataactaattaattacatcaacttataattaattagaaattgttgaagggttacattttatgaagttgatatgcagatgagaataattaaaacctatgaaggacatggaatggtcaaacaaaatgagtatgcaacaataatagccaaacattcacatgaaaataaggttgcttttctgcttcacatttttcccaccctcattccaattgtaaaatactcttgctntagcatatgtccttcaagtatgtatttaacaagtatatatcacccaataacatatacga

SEQ ID NO: 127589 - DNA, 400 bp, Glycine max
gcttaacgaatgaaaataaatacgcatgtatttattttcttgaacgccctattgaaaccttatcatgacgtaataggacaagcttttctctaaagacaattatcctaatgacacttgcacccatatatatactctaaccgcatttcctcacatgaaagagcctaaccctcctattctcattttcaattccttcaaaaaattatacaatgcaagcgaccttacgactgatatgcaaaccacactaacttacttctcactattcctagagaggaagaatttaattgctctaccttgttatatgataaccgcagttctaacctatatgctccaaagcaattatggacgataaacacatacttataaaatacagattacaaagacccactttatttctatgata

SEQ ID NO: 127590 - DNA, 434 bp, Glycine max
  unsure (1)..(434): unsure at all n locations
gacttctatctatatagctcactgtggaggtatacataccgtgacgtaataccactcagatatgtcgatgctggcactatgatcctgctctctctgtctactcatgaggactctttgtgtatgaactctactatctccaaacacatcacacacaccacaggcagaggcgcagagaaacatacagagaaaggagcaacaactactgcgcctcctatgcctctacccttacgtcatgcttatgtatctctgtctttatgatttctggagtcangaactccttgaatgacgatctttggccttcttgcgtgctttcatgtttcattcttntcagccacagactttgtagctgctgcgtgtggcttctctgacacttaacgtatgaagctctgtgtgtcaatatgctgtgttatgacggacaccacaactattattgt

SEQ ID NO: 127591 - DNA, 410 bp, Glycine max
atccttaagtcacctgctgcatgcaagctttccattcctgatgatgcggattcttaaactgtcctcatactactacaaattctctgcatggtacctgaaaggttgtctaataaaagttgctgctctgaactacctttcatattgacaggcagaaagaattccaatatgtaatcatcatcattagtataagtactccttagcctaattgcaactgcagcattcaaattatacttgcgtgcatgatggacaagtgggtattcactaaatatcatatgtcctcacatcaggatagaagaaaggatgattcgattgaagagctttcccagctatacctgtccctttctcaagacgatgtttcatgcatgcacggacaaatcctctcattgctctatcagtaatatagccagccg

SEQ ID NO: 127592 - DNA, 435 bp, Glycine max
ctcaggctcgatggtggttgacccgtccatggattgactatgctggtgtctaactctgggcctttcaatagtcccaaaaacaacattctctgcacaatatttgggtgcccctgaccccggcgttgaatccgatgctcccacagcattagacggctcgcccatttgaaaggtggatgtcgccgactatgacatgaacttatccatatcaaggtacattgaaagcaagtcctcctcggcgtcatcggagaacgaatgcccattaccagctccaacaacaccaaagtcactgtcgaagctaatatcatccggttaagtgagaatctccgaatgagcacgcctatgacctctgtgtctcgtgggagtatcaagcattctgttaatatcatgactaatcccactagaatccgtggacattccatgtccagaatgactaga

SEQ ID NO: 127593 - DNA, 382 bp, Glycine max
agtcacctgcggcatgcaagcttcctctaccggtgaaaaaacattgtctgtcatttcttgtaaaaaaattgcgcaatgtcggctgaaaaacatcagttggggctgtttaactaccgatgctggctactgttttttctattccgcccctgaataatacttggacgatgtcgatttggaaatgttcgatcggagtcatccggtcatgcttctttataagacctcgatctgtcatcttttcctggccgacgtcggctatcattattttcgatcaatatcggcgaatcatgctttatgccaaggtgggctaacgttttcgtggctcatgaaatgagagcatgccagtgtcggccgaaacacaatctcgcacgaaaaaccctattcg

SEQ ID NO: 127594 - DNA, 506 bp, Glycine max
aactaacttgccaattagtatacccataccagaataatatatttttgccattaacctagggaattaaaaaaaacttaatggctgagtgtaactgaaattgtggcaaccaaaagtcacccccaacagccaacaagtcagccaccatttggtctcccaaaaggctgatgcctaggttgccaattgggcccttattacaacttgaactaaacctaactaaagcccttttagttgattaacccaaaacatatttttggtcagccaactttacaaggattgggccattatttatacaaactaaacactctaaaattgagacaaggtggtgtcatttagtcctcctccatttgggccatgatacaactcacaaccttggacttttctccttgaaacttgggcttgattcaaatagtatggacagcacttgttgaagagcatccttggctttccttgctctagcccttgtcataagtcctccaagtccttcaagtggatccttgcccttgctc

SEQ ID NO: 127595 - DNA, 473 bp, Glycine max
ctgcacgcgtgcgcgctcaagctgttttatagctcacactggatgtatgtttcatttgaaatcggatcaatataaattggttgtgtatttttctctatctttcatctctttatatttttgataaagattctttgtaaaatattgtttagttgctcttaataattcaatcaaattctttaataatggaaccttagaattaaaggatctatatattaacaaaacaatctatatctctaagtcaactcaagaatcaaggtgtttggatcttacaaaaaggggtttaccaaagttttaaagaaagtattttaatatccaactcaccccatcttgggtataagtcattttattcaacaagagtcacgcttgctttcaaaagttacataaaatgttcctttttggatgaaatatatattacaacatcaatatttcttcagtaacagccagcttcagctgcttgtgtttatcttttgcaa

SEQ ID NO: 127596 - DNA, 521 bp, Glycine max
  unsure (1)..(521): unsure at all n locations
ctcaagcttctagccacatggacttaccttgaattaatgcctgtgatatctccttatatccttgtatccctttactcgcttctatgtctactacaagccttaagagaaataccatgatatcacacatatccttaaggaattctggagctttggaattgttttgggaataactgtgaggggttatcgtttcattagacaactctgtctgtcggctatgcttcatgatgtaaactgggccatacctgatgcactctgtataatggatacaatgtgcacatgctgaatgacatgttgtttctcanacgctatttctcaatatcattaatcttgtatacccacttttcgacaaaaaaaatattctatataagaaaataaaaagctatacagctgagtgaataagatcttaaatggcacaagaatgatgaaactctcggttctactcttcatgtataattnttaactgtacttctttgtatatactcattttttcttaaatgcacttattacccttgctcctctat

SEQ ID NO: 127597 - DNA, 443 bp, Glycine max
  unsure (1)..(443): unsure at all n locations
agcttaganaagccattgaattgatgggttttggacacctagattntgtgttgcggtggtttgaagcttggctctggtttaaacatgtttgatacatgatttgggacttgtaggatttgatttgggcatgattggatgagaggaagggtgattttcgaaatctgcacttatgcagaatttttgctgtgaaattgtgcagcagaattttgcacaagtgcagaaaaatgcttgtgtgtggttggctgtggaaagtctagtgcagaatgagttctggatgtttgctagtatatcccaacggtcaaaatgtaggcttatacactatagactttcagtaaaattttggagtcgatccaacggtaacgaattggatcgacagattgttaccggcgtctttgagtgggaaaaactgtgattttggttgatgtgttgagcagagttttctg

SEQ ID NO: 127598 - DNA, 449 bp, Glycine max
  unsure (1)..(449): unsure at all n locations
cagcccattaagcacttctctctctctcgaaattgctgaggaaaattatttccgtgaagaaaatccaagccgaggcgcttccgtaacgtttccgtgagtaattacgcgaagattctcgaccgttcttcaacattcatcgttcgttcttcgttctcttcagtcttcaacgggtaagtacctcaaaccgagctgttcaattcattctatgtacccatggtggtccacattttgtttcatgtatttttattctcgtattcatttgctttatatacccccttttgacgtgcttaaggcatttatttaagtcatttctcgcttaatctagaaataaaatanatttccaccgatcgtttgaattgtatcatccgttaatgttggtaaaatgaattccgaccgttctgttgtgccgtaaccacgttggagatcaaacaagaggtaacatactaata

SEQ ID NO: 127599 - DNA, 447 bp, Glycine max
  unsure (1)..(447): unsure at all n locations
agctnganacaactcccagtagcattaacgacaatcttctatcgatttagaataattcaaatacaaactcgactatgctgcataaaagataaaaatttcgtcacaagaaaatcacattatcataaattcataactcctcttaacaacaaaaaggctataaaactaccatgtaaaaaaatgagttagattttttgctaagatgaagtatgcatgtaaaactaccatataaaaaaatgactacgtaaaaatttaaaaaaaaatgtttgaggtataaaactatataaaaaaagtagaataatataatttgaggggcacaatgcttatttggtcctgaaacaagatgataaccctaataagaatgggccatatatgggaaatgtgactgaggatggtcccaaatgatttcctcccaagaataaaaagaaggagatcagctcatttattcac

SEQ ID NO: 127600 - DNA, 471 bp, Glycine max
  unsure (1)..(471): unsure at all n locations
aactcttcacattttngtaatggttctctcaatcaagaatgactattctcttttaccattggcaaaggtgcttctctggttgttctgttagtctatgtagatgacattttgcttgctggcccaagtgctacatgtgttcattctgttcaggccaagcttcaagccttgttcaaactgaagatccttggttccttacaatattttctgggcctggaagttgcaaagtccagcaagggcattgttttgactcagagaaaatatgccctttctcttttagaggatactggttntcttggctgcaaaccatcctctcttccaatggatccaaatttanagctcgacatgctcagtggtgaattgctgcccgatccctcaatgtacaggtgcttacttggtcgtctcatgtacctcactatntcaatgccggatattacattttctggtaacaagctaagccaatacatgcagcat

SEQ ID NO: 127601 - DNA, 472 bp, Glycine max
  unsure (1)..(472): unsure at all n locations
gacccggatacttaagtcacctgangatgcagcttcaaaaaaagatggcctcattatattttttatttccagaagggaattctatcaatagacctccaatctttaatggagagggataccactactggagaacccgaatgcaaatttttattgaggcaataaatctaaatatctgggaagccatagaaatagggccttatatacccaccacagtagaaagagtttcaatatatgtgagttcatcaagcgaaagcctaactatagaaaaacctacagatagatggtctgaagaggatataacacgagttcaatacaactttatagccaaaaacataataacaactgccctgtgaatggatgaatatttcacggtttcaaattgtaagatgctaatgaaatgtgggacactcttctataacacatgaatgaactacatatgttataagatctatgattaatgcactaactcatg

SEQ ID NO: 127602 - DNA, 456 bp, Glycine max
gcctatagacactatatttctaacatgtttcagttgtatgtagcttgtgtcttcttcacagatggggcatgcatgatgacccttaacactgtaaccgctgagattcccatatgctggaaagtcattaatggtacaaaaaatcattgcacgcatttcaaaagtctccttgcgaaacccatcaaacactaaaacccccttgtcccacaactttctcatgtcttcaatcaacggacttagataaacatcaatgtcatttcctggctgtcttgggctcgatatcatcatagacaacatcatgtattttcacttcatgcacaaccaaggaggcaaattgtaaattactagtagaactggccatgaactgtgttgagtgcttaaattgccatatggattcattccatcactggcttgtccaagcctaagatttgtgcgtgtttcctaaactccgaatacaaa

SEQ ID NO: 127603 - DNA, 427 bp, Glycine max
agctttgacaatgagctagcagtattttcttatatgtatataacattaagggcataacacaagataaatatatatattactattattaactatactagcattcacaagttaaatactctattttgtaaaatacatttattgtgagttttatctttcaaatatttgcttactgaatattacttaatcgttcaaattattaaatgtattaaaaaatattttatgtacctttgtgatatttatcaaaaatattatataggagctggatattctttgaccgactcttatgctcatagttacgcttgaataaataaggacaatcaaataaaaccatcaaaccttctatgtgcctggcataaatctaggagagacagataatataatgccctccctttatttctctacttgcgactcaaactccccgactgaa

SEQ ID NO: 127604 - DNA, 496 bp, Glycine max
  unsure (1)..(496): unsure at all n locations
actaagcttataacatatttaactatattacctcanatatgttctattttcttttgtctcacttccaaaccgaagacataatctcaaattatcgattctaattaanaacacaaagtaaaatatttaataattactgatatatatacataattagaaaataaaaatagggtgcattacaaatatttcatgacaactaacaaagaaagatatatataataaataaatatttaccaaattaaaaatcaatgtaaatattatattggatgtcgatttgaagtacttattaaaaggttcacccttagttacatgttgtaacaagttatacatactatgtctatatatacagcatgctattaacggtagtaatgtcaataattactccaaactaccatcctaacaatggtgactgtagccataataactccaatcaacatccagagtctacatcaagtttttatatgataaaagtatttcttatgatacacctctttgacat

SEQ ID NO: 127605 - DNA, 442 bp, Glycine max
  unsure (1)..(442): unsure at all n locations
catgcaagcttncccaacatcaaagtaaagcatcatttatactgttcaaactatcacagccaagaaaacagagcaaaggctgaaaactctgccaaaacaccaaccaaaatcacagcttttctcacttaaagaccccagtaacaattccttcgttccaattcgttaaccgttggatcgactccaaatttttactggaagtctctagtacataagcctacgttttgaccgttgggatctactagcaaaaatccagaactcattctgcactgctctttccacaaccagcaaatgcctagtatttttctgcacttgtgcaaaatcctgctgcacaatntcacagcaaaaatctgcacaacatgcagatntcgaanaccacacttgccctcatccaatcttgcccaaatgaaatcctacaagcccaaatcatgtgtcaatcatgcct

SEQ ID NO: 127606 - DNA, 368 bp, Glycine max
  unsure (1)..(368): unsure at all n locations
tatatcaagacgctcgaaatatattatcgaagctctgagcatattcaaacgacaataactntttacttggatgtctgaatgagtctcgtaatatatcgagatgctcgaaatggaataccgaagctctgagcaaattcaaacgacaataactgtttactcgtatgtccgaatgagtcccgtaatatatcgaaacgctcgaaattgaatgtcgaaactctgagcaaattcaaacaacaacaactgtttactcggatgtatgattcagtcatggaatatatcaagacgctagaaantgaatgttgaagctctgagcaaattaaaacgacaataactttttactcagatgtctgattgagtccctttatata

SEQ ID NO: 127607 - DNA, 425 bp, Glycine max
  unsure (1)..(425): unsure at all n locations
agcttcttttggaccttgaacaatcaatcatctcctctntcagaaccatgctatgtgctcgcgactggtccctttcttcccttcgcaacttgagttcattattgctaccccatagagctccgcgaaatttgttccggccatactcatccttgcgagccctcttggactcttgttcaagggctcttgcggtaattgcattctcttcccgtaacccggcacactccttccgatgacatgcggagacaaaaattgggcattccgcacccctttgccattcagacacagtcgtgtccgatggcacacagagacaaattatggtcattctgcacccttcgtcatcacggccgacagcccgttgcacgcggagattacatcattttccactacaagatctgtcatactgactttgagtacgctgatggcgg

SEQ ID NO: 127608 - DNA, 445 bp, Glycine max
  unsure (1)..(445): unsure at all n locations
tgcagctcacgccgngaactcctctaattcatcacccatgctgcctatggcacccgttcagagggagtcctcccaggttccaactccagccacgactcgcccggccgacaatcccaacgcaacaaggaactttcccctgaggccaattccagaattcaccccactcccaatgacgtatgaagacttcttgccgtctctcattgccaaccaactggccgtagtaactcccgggaagatcttccaaccccctttcccaaagtggtatgtcctaacgcatcttgcacgtaccacgggaatgccccggggcattccatcgaaaagtgcctggcccttatatacaaggtccaacatttgatagatgcggcgtggctgatgtttcaagaggatcggcccaacgtgaataccaacccgcttgccacacatggaaggggagcnggtaatgcca

SEQ ID NO: 127609 - DNA, 441 bp, Glycine max
  unsure (1)..(441): unsure at all n locations
agctntaagtattgtattcccatttcttttgtacaaattcctcttcctagtgccatatatttttttttgtccgccatccgccattaacaacattggataagataagtagctgcgagaacaacctcccctccaaaactttttggaacatttttttgaaacaataatgccctagtttgatttaataggtacctattttttctttctgccatgccattttgttgtggtgtttggacacaagaaggctcatgaatgattccttcccattgtctgactttagtttctttatggatacaccaaattgattcttaatcaatgagatgaaattttgaaagacattgcttacttcagatttgtgtataagaagganaacccaagtcacttgagtacagtcatcaataaaagtcacaaaccagcaagccattgacacatttggaataggag

SEQ ID NO: 127610 - DNA, 327 bp, Glycine max
  unsure (1)..(327): unsure at all n locations
tcgtcatatccactaacttgcgatagataacatttgcccaaacatcgcgtcattctacacatttatatantatttgtagctgtgagaacatccatctcgccttactgttaaagaaatctctataatactatccatgccctattaatgatgaaaacggaccaatttcaggtttcatgaaggccaatcttgaatggcgataagacacaatagcgctcatctcagcatccttacgcttggcgcactgtacatgcttattgtatccaccatgctcttactgcgacagagagtctagcatatcaccgatatcgctgactcgcgctttgcgcg

SEQ ID NO: 127611 - DNA, 445 bp, Glycine max
  unsure (1)..(445): unsure at all n locations
agctntctaagttntctggtttccaaaccttgttctttcacagaaaacaaaagtgtgctatatcttttcattctcttctccctttgccaaaaagaattcgacaaggactaatcgcctgaattctttttgtgtctctcttctcccttttccaaaagaacgaaggactaaccgtctgaattcttttgtgtctcccttctcccttttcaaagaattcaaaacgacacagtctgagaattcttttaattcttccatttcccttaaacaaaagatttcaaaggactaaccgcctgagaactttgtcttaacacattggagggtacatcctttgtggtacaagtagagggtacatcctttgtggtacaagtagagggtacatctacttgggttgttgtaactaagaacaagagagggtacatctctagtggattagttcaagtggagggta

SEQ ID NO: 127612 - DNA, 490 bp, Glycine max
  unsure (1)..(490): unsure at all n locations
tgcgttggatgctaaacaattatttttataaataagttccatatgcttggatgcctacaaagacatatacacatgaagtttaaaataggattctgtaatcaattttttatttgatgacgtgtttcctataaaattcaataaaatccattagttcatacaaaatttaatataattattatcattaaaatcatagattttttaggggttagaaaccatctaataatgtgtttagttttaacaaaattatctaatgagataaaagataaaaaatatttataaagaattttaagatgtgtaaattatgtggtagaatttatacgtaatattatagttatatggttactattatctaagaggcttaagaaaaatccgtccaattaatgtcaaatgattgagacaattatccatattaagaacatggttaaaaaattaccttgcctagatatctcanatcccaagacctcattaataatagaaaatgatgaatatt

SEQ ID NO: 127613 - DNA, 449 bp, Glycine max
agcttgacatctcttgtgctatatgagaattcttgtctgcatgcacagtgttccttcttcaatctataacatctcttccttatactgtttcacttttgctcaaaaccatcttcatggaaacttaccagctgatgttggatttactcttcctaacattcaagcgtaaagcaatgtaaactacaattggatctcgtggcacaacagaagcaataaaatgaacatgggtaaaaaataaaatgaacaacaacaaaatgctttataagtgtacttaaaagaaaacacttgatttaaatctataattgtatcaggaatactcatactcaaattcagaaccttcatttaaattagttttgatatattctttgtaatacaatttttcagcacttgaataaataacatcaagatatttgtgaatagagatgactaacattcacgttttctaaattact

SEQ ID NO: 127614 - DNA, 511 bp, Glycine max
tctcctattaacatagaacaacaaattacgccttgcctattcttgtctcctataccaagttaattgaaatatacatgtgtgcatgtttgttaaatccctattcatcactttgtcaattgattaagctattacaatccaatgccttcaaaataaagacttagtacatgttatagggaagatggagttccttctttctttctttctttctttttttcttcttaaaggctggagttacttcttactgtgtaacataaatcaatataccaaagaaatgttaaagaatacctttttttaacctctttttttattgtgttataatttttttaggttgtaatatattttatatgtcatttacttgtcaaacaacaaaccacctatgcatgtataagcaaaaccaaataatgctaataacttggccttaaatcatttttcatgaaaagatgtttcattagtattaagagatgacttatacatgcttcattagtattaagagatgctaataacaaacaat

SEQ ID NO: 127615 - DNA, 428 bp, Glycine max
  unsure (1)..(428): unsure at all n locations
ctgcagctatagtattgagggaaaaaaacatcatttatatttgtacctttcaagtaacgaagaattctttntgcgacttttagacgaggagaggtagaaacaattatgaggaagaggtagaaacaattatgaaaaagcatatgaaaggaagtatgataaatctaatgttgaatgttttaattgtcataaatatggccattactcttgggagtgtaaaacaaatgttgaagagaaggtcaatcttgttgatgataaagaagaagttgaagagtcaacactactactatcacttaataatggtgagaaggaagacaaatgcttatggtatcttgacaatggagcaagcaatcacatgtgtggatgcanagagaaatntgtggaacttgatgagaaggtgaaaggaaatgtttcttttggagattcttcca

SEQ ID NO: 127616 - DNA, 243 bp, Glycine max
ccaagggatgttcttcatgcacttcatttataaactatgcacgggtgacactgcttaaatgctgcctacatttagccatgcaaggatcttttgagactactgcgctcgaacgatctcatgagactaaataatgagtcccttggtgcgacaatgctcgcttgccctaatctttatgatattggacagaatatgctcgctgtatatttccttcaacgaactcacattagaacaattgttcacact

SEQ ID NO: 127617 - DNA, 376 bp, Glycine max
  unsure (1)..(376): unsure at all n locations
gggagaatgtgaatgtatgtatacatgattctgatgatgtcgaaacaagaatcaaacaaggctcattctgtttaaagatcactacacgattgtttcaccaaacgaagccttgattcaagatttcttcgagatcaagccttgcctcacaatgaaaggttgcaagccattcaaggcacatgttatcgattaccactacatgtaatcgattactaatggtttgaaagcgtgtaattcaattacacatcatatgtaatcgattaccatagacaatgaacgctgggaactcagattntacatgaaggttctcaattgatcaagaataacaactgtgtaatcgattacactaattctgtaatccattactagagaggatttt

SEQ ID NO: 127618 - DNA, 384 bp, Glycine max
cacataaaactaagcttctatccaggctcatcttggtggtgaagctccttcttcttgtcttatctcctagaggaaggcgcctcctctcacctcttctcctttgtcttctgttgcatctccatggcggaaaattacacattaaaggacctcattgatgctcaaagatccagcctccatagaagccccacatgcaagcttccatcatgctttcaaccaccttacgtagccacggaagggcccattgttactgaccctgagatctttatcctgtttttgcaccacctagcacgccttgcggaccttctgaagtgtactcccgctggtcttattgaaacactctgaaatgacaggcgcgagctcttcctctatcggtgcacctctcat

SEQ ID NO: 127619 - DNA, 462 bp, Glycine max
  unsure (1)..(462): unsure at all n locations
acccggatccttaagcaccgcagctgcaactgaagtgaaggttatatataatatatatatatatatatatatatgagaggttgaccacttcaattttcaaggtgaggtaatcgtatgctctatttgtgaagtgtggatgcatgtttcttcttcttcagaacagctaaaactttatgactcttgcatcttttgctttagtggcatttaagttatctataaggaagaatgaagatatgttcaaattgctccatacaattctcttttgaaggataggaaatgtatgtcttacttcatttactatctgtgttttttgatacagctgttatgccacctcaattgacttttattttagttnttgactttttgactctctcattctatttaataaaacgttaaatttgctaaaagatcaaataaatcttaaatacactaacttgttaatgagccttttaatctctctag

SEQ ID NO: 127620 - DNA, 460 bp, Glycine max
gtaatggtatttgtaggaatgcaatggcagcaatggttgaccgtagattgctaccatctgactctgttcatccatattatcatgtgaatacttatataaattgttatgcacccattctggaaccaattaatggagaagatatgtggcagcaaactggactcccaactgtcttaccccctcaagttagagtcccaattggcataccaaagaaggctaggagaagagaaaatgatgaagcaccaaaacctcataagctaaagaggacaaacacatctttgaggtgcagtaggtgtggcacatttgggcacaacaaaagggtgtcaaaacatgacaatccctaaatcaaatgctcctccaaagaaacctaaagttgcgacatcaataaataagaaaaacaaaaccacttcaacaagtcagcaaacccaacccttcagcactcaacaatctcatactcaaccac

SEQ ID NO: 127621 - DNA, 386 bp, Glycine max
aaccagagggacgctctgatgccctttcttatcatttcacccttaattttggcactcatttaccacctcatattttttgtcgagtcatatatgtgcatttgcatcctcaccaacaaacaagattagaacctatcatccatctacaaaaagattttttgtatcaatggatgttacattacatgagcatgaactattttttttcttgaaaacacttcattcttcacctcatagacaggggggggtgagttggaggtacaaaatcatgatagacttgacaaagatatcaaattatgtgatgttatgccaacaacaacagatgatggaattctagataatggagatgagaacatggacgatcatattcagacatatgtaaatgagaatat

SEQ ID NO: 127622 - DNA, 310 bp, Glycine max
acccaccattcattgctacgcgctcaccacccacatcgtgggacgcattgttcacgaagacatcggcgcctccgatacatgtgagaaacacatactctttactccaccgctcgttatcacacgaacgccaacaacagtggacggattgatctacaagatataagaaacggatcccgacactctagctgatattcacactctttgtacatgcaagaacatctggctaaattccggcgaatgcgtctatactgagcttttgaaatccactgtgtaatggatgagacacatgttcagcgaactcgggacaatt

SEQ ID NO: 127623 - DNA, 457 bp, Glycine max
  unsure (1)..(457): unsure at all n locations
acctgangctgcagcttacatatattaaatggcttgcatatttgttcttatctctacctgctcaattacctcttctggcttcagaagttcagttgccctgccaactttggtccctgaaagatacaaatagacgatatgagagacatggtttataagtaacgtgtttattcaacatggaactagcacccaaaattaaaaaaacaaaacattttcatacaatcaactgatctggcagtgacaaatacgtggttatatagatgtccttttcattcatagtctcacccccaagaaacactaattaaagttaaaaagtaaacttaattaatgaccataggcctnctctgccaccacaataaccctaagaaaatntaataacaataaataaaaaagtgtcataaccattagaagttttcaaccaaatagagctttgcatgttgctacaacatgcagggtaaaa

SEQ ID NO: 127624 - DNA, 437 bp, Glycine max
gtgagttgtgaaagattgatgaccaagtgaatgtgcacattgcaaagaagaatgaaagttatactaagcaagccaacatgaaaaggaaggaagtggtacttgaacctggtgatgatcctggacatttgagggcaaatgttttccaagaaggagggaatgatgagaatcatgaaactggccaaatacaggctaaaggcccaagtggagaaggacgaatgcccaagtggagaaggacaaagcccccaagtggagaaggatgtaagcccagaggcagagacactatcatgactattaattgttgttgaaggcccaaactaatttgaaggcctaagttaaataagtttctagttataatttatttttattgtaattatggcccaaactgtctataaagcccatgtctattatttatcttttgttcagctacactataagta

SEQ ID NO: 127625 - DNA, 445 bp, Glycine max
  unsure (1)..(445): unsure at all n locations
gctnggttaaggtacttacccgttgattttcattatcgatgaagaacgaatgaagaacgtctaagaacggttgaaacctttgcgaaattcttcacggaaaacgttacggaaacatttcggaagcgcctcggcttatattttcttcacggaaacaatttttccaagcaaattctaaagagagaagtgcctaaggggctgaacccttttcttcttcacttcctcccctatttatagcaaaataggggagatgcttgccgcccagctcgcccaggcgagccaggttgcttcctccagaagcaacagccttctggaggaatcttctggagggcccaagtgggcttgggtgctatttgcacccccatttttactaagtacaccccctctgctttttttggtgaatactttttcgtaaagttacggaaacttacaaatttcgtaacgatac

SEQ ID NO: 127626 - DNA, 465 bp, Glycine max
  unsure (1)..(465): unsure at all n locations
gagaatgtgaatgtatgtatacatgatattgatgatgccaaagaagaatcaaacaatgttgcttcaaaggataagcatttgcttcaagatttatacaagattgcttcaacaaacaaagtcttgcttcaagattctttaagatgaagccttgcctcaaaacaaagtgtttccaagacatgaaagactctataatcgattaccaggcaatgtaatcgatttccagaagacagggttgagaaatagctgttgaaaaaggttttgaattttaattttcaacatgtaatcgattaccatatgtgtgtaatcgattaccagcaacgaaactctggaaattcaaattcaaaagtcataacccttcanattataactgcgtaatcgattacgcacacattgtaattgattatcagtggaaagtgttcagaaaatctgccaacagtcacatcttttcattagatgtatgaatgg

SEQ ID NO: 127627 - DNA, 410 bp, Glycine max
  unsure (1)..(410): unsure at all n locations
agcttcctcgggccatttcctgtttagttttcatnnggagagatagttctaccaagaaatgctattcttaaaacgaaaatggcatacaaccctcccccaataacacaaacatcaatgtagattaagagcgaactcatgcacatacttcctttctaacattcactcgcacaagatattcttcttactaagaaaaatgcacccaggcacattcaaggcaccttcggtacctagatcacttatatgtacttccaaggtgtatttgctacctacatcacatgcacttcctttgctaaatttacatacatgcatactccaagcattttggctaccataaattgcttacgtgcacattgtgggatttctaatacctatacatatacaaactttgtgaagaatcttggctatctaca

SEQ ID NO: 127628 - DNA, 435 bp, Glycine max
atgaatgatgctctcctacaacctacgaaaaggtggaaggagataaactgttcaggctcaaggttcaatcaaacaatcatactttcagctcaaaatgggtgcaagggataaatcaatcatgcataacgtaagctttttagctaagtgactatcttcaatcaaaacatagccttcatcatcttcaatttcatgcattcattccatactcagagattcatgcaaaaataattactcaatgttagacgttctctcacaattaaagatcacactctcaccggtgtgtgcctaatgagtaccttcacaatcaatctgtcaaactgactaacatttttaatcatgaacctaatccatgttctttctcttctaatcactgcacactaattcataacatatgatttacgcattccaattcactccaatcacgcaatcgatcac

SEQ ID NO: 127629 - DNA, 437 bp, Glycine max
  unsure (1)..(437): unsure at all n locations
agctngtagcacaactggacatgatatatgttanggtttggnntannnaaaggataaaaggggacgtcccacattatttccatgacacaaatgcaacaatgatgatttgaaaattttatgcaaaactagtcatgcatgcacctatgtggacactcaagtgtcaaacttttatggtcatgtaatgctagggctcaggattcattttctctattttagtcaactcagggtttccaaaatacgttcctttatcaattagtgcattcatccgagtctatttttgggtgttcgaagaactttcacagcatttacccttctagtgtatacacattttttcaaaaactggttatgatcagtgaactctttcaaagaaaagttggaagatatgctcttttacaagcatgtatgtttttagccggataacttttatttttattatt

SEQ ID NO: 127630 - DNA, 469 bp, Glycine max
tgatcactgatatgtacgcgctacttctattgcttcatattcatacatgtaatatgatatcaacggacacaattaagaggataaaattgaaccgcgggcctaaccttttcactactttgagggagtatagttttccgtctggatggacggacggatatacattacaatacacattatgtgagaaactatgctgtctctcgtgtatacgcatgggtctgtcgtaatttctttagcatgtatctttattggttgtgtaaagtataaataaaatataaaaatagtatgtaaatttaaatagagctagcacttagcattgataaactctgattgaagaaattacagtgatattatagtttgatacatgtataactaagattgttcgtcatattataaaagttgttttggacgaataactataaatttaatggtgaactaccatgtactttgtgtcactgtcgtctcaatcttt

SEQ ID NO: 127631 - DNA, 372 bp, Glycine max
gcttgtccaagggcatggatgtgaccagtttcctgtacctatcttacaatgtcgccaagtggcggctcttgtagttcctggaaggtaccactggatgtggtacttgcgcaccttcatctcacaagggattgtcttgttctctctctgacgcgcacacatctactactgatgggattgtgatgttatggcatatgtttcattatctctgtcttagtcctgggcgtttaattacgaattgtcgaccatcatttgatgcatctatcctgatcgatttcatgcgtcggacgaactttcctatcattagccccttatgtgtgaacacactgttttcttgggcgcgagaatatcctcatcctgtgcctccacaaacct

SEQ ID NO: 127632 - DNA, 432 bp, Glycine max
  unsure (1)..(432): unsure at all n locations
agcttagganaatatcatacgatgatcattgtagattttgactcttattaaatccatacataacccacatactaaacatttatagaacattatatagatatcgagtagtaacacatacaaggtataaatctatataatcaagttacaagtctctcaatgttcaaaccaaagcttctggtacatcttctggagcatgatgagtacacctgtccatcatcttaacttcaggtatagagaatcctctagttctagatattaaagactaacttaatgcatgagtctactgccatcacttcaatgttaagaaggaagataattaattccgagctgaaataaaaccagagtatagaggtgatccataaatcttctcgcttgactacacactctacacataacttctttaatgtgaaacaatctacaacacagagaatg

SEQ ID NO: 127633 - DNA, 410 bp, Glycine max
  unsure (1)..(410): unsure at all n locations
aatcatctgagtgctaatatgctgtagatcctanaaccaacgtggcatgatatacattattaaaaattaacaaattctactttttctttcttctccttggatagagatcattgtctcccaatctacaaaatacaagactaatctcacttatgatatattattattaaataaaaatttataaaaaaaacttacatgtctttgttgttttttagctatcaattaaattaataactaattttactaaattttctaattcaacaagcaaacacaacaaccttcaacttaaaatgtagaatatattttcagttctaaattaacttttaactatgtttttttctaagcagactgatcatctaatcattttgtatttggcagaaattaacatgaataagacaatgatgcaatttaat

SEQ ID NO: 127634 - DNA, 447 bp, Glycine max
  unsure (1)..(447): unsure at all n locations
agcttctagattagtgtaccaaatgaccgctgccctttgctagctatcttggaagaagtacatcaacaacttctcatccctggaatacgcccccatcttgtgacaatacattttgagatagttcttaagacaagtcgtccctttgtacttatcgaaatcaggtaccttgaatttcggggggatgacgacgtccggcactaagcaaagatcagtcatgttcgcgaacggatagtcgccaaagccttcaacagcccttaatctctcttcgatgagatcgagtttcccccctgcagacaaaaatattggttgtgttgggtggttttgaggttctcccgtgaggtttggctgaggtagtgcattgtgtgccggcccctcgacggggaacgaagagtangaatcgatgtctccttgggcatgctctcgacgatcctcgtggacctcgtacga

SEQ ID NO: 127635 - DNA, 503 bp, Glycine max
tctcatgggaagtttctcaagaaagcttctcaggaagctacctattctatatatagaagcatgtgtaacacttgttgtaactctgatgaaggagagtcttgtgagacacaactcaaagttcaacttctctcccttttcttccttcaattatgtgctccccctccctctttctctccctctttcttttcctccattgaagcatcctctccaagctgtttatccaaggctcatcttggaggtgaagctccttcttccatggcttattccttaatggatggcgcctcctctcacctcctttcctttgtcttccgctgcatctccatggtggaaaatcaccattaaaggaccccattgaagctcacagatccagcctccatagaagccccacaagcaagctgtcatcaagatccctccaccttggaaaggattagacctcaaatcccgaggattttcatactctaggctccttcccttcacacctcgtaagagaacaataacacatg

SEQ ID NO: 127636 - DNA, 484 bp, Glycine max
  unsure (1)..(484): unsure at all n locations
tccttcagtcacctgcggcatgcaagctntcaactttgaggtacatatcgggctatccccttatcaacctcccacgccgaggtcacacacaaccaaataatacaggtatcatcatggtattagtcatagcacaaaagatttttgggacctaaaagataagataaaagagcttataaaggatgggtacttatcctagtttgttaaaaggccgaacaaccaccaaacaggagcaagacccagagaacagcaagaggagcaacaaaggaatcacgatgcaaacagaagaagagatagaatggaagatcaaggtagacagagacaccaacaacatcgacgcgagcgacaacctctacaagaacaggaacccacccaacaaatcagaggtgtaatcaacaccattgcatgtagattttccaatgaaggacaatctaaccagtcccaagaacgtcatcttcatgccatttaagacatcgacatcaatttt

SEQ ID NO: 127637 - DNA, 481 bp, Glycine max
  unsure (1)..(481): unsure at all n locations
gagctaaatcctctgttggttcttccttgtatgtacttgatgtaaatacctttatatctatttaatgatgttttatgtgttctctatgctatcagtacgtcattttagatagctntttccttgatcacatagatgcatgctttgttaggatcattcaacagtgggaactggtctgattcttagaacttgataggacatggctagtttatcttactatcatgagggatcgtggtacggtaacctagttgtttgtatgtttgtcttaatgcggttctggtcaagtttagtccaacaagagggatctgaggacaatgcttgatcaggattaggttagactatcacgagggatcggggcttagcatttcatgagacaccatagaacccattagcattgttgagtagagaatattcctataacattatgaacctaatatgaagaccaacacgttgtctaattgtctttacacatcattattcacgt

SEQ ID NO: 127638 - DNA, 452 bp, Glycine max
  unsure (1)..(452): unsure at all n locations
agctntgatttcctttgttccggagacctttcttttctcatgtgcacccaaacccaatctccgggttcgaagacaaccttctttctccctttgttggcttgttaagcataacttttatttttcctctcaatttgatctttgactctctcatgaagcttcttcacatagtctgcctttgcttgaccttctttatgcttaaaaacagatacattatgcataggcaaaagatcaagaggagctagtgggttaaaaccataaacaacttcaaaaggagaacaattagtggtgctatgaacagctctattgtaagcaaattcaacatggggtaaacaagctttccaagtctttaagttcttcctcaaaactgtcctaagcaaagttcccaaagtcctattaacaactttcgtttgcccatcggcttgtgggtgacaagtggttgaaaataacaactt

SEQ ID NO: 127639 - DNA, 477 bp, Glycine max
  unsure (1)..(477): unsure at all n locations
tggtcttttttgttcacggaagtccgattanagcgcataatatgccgagacgctcaaaaatgagcaacggaagctctcgagaaattcaaatggtcataacatatcacacggaggtccgattccggcggatagtatatcgagaagctcggaattgcacgacgaaagctctcgagaaattcaaatggtcataacttttaaaacggaagtaagattcacgtgcataatatattcagaaagttgaaattgaacaaccgaagctgccgatatattcaaatggtcataacttatcacacggatgatcgatgcatgcgcataatatatcgagacgctcgaaattgaacaacggaagctctcgagaaattcaaatggtaataacttctcatacggaagtctgattcatgtgcataatgtatcgagaagcttgataatgaacaacagaagctctcgagatattcaaatggtcataacttgtgacac

SEQ ID NO: 127640 - DNA, 316 bp, Glycine max
agcttgtaatgaaggaggtagaatgactttcttgcttggtaccacaagcgagcaatatgttgatgcaccttcaatactccattcttatccattgacactcttatgtgcatatgccacagcatctccattttactgcgattgattgcattttctggattcttacaaaacatgaccattggtccttttttaatgccacactttggctttgcacttgtagcagcattacaagagtgcgcggactcatattcttcacttccatcacatacaatcgggtcaccaaattcaaagtctcttatatgtgccatattaccactgc

SEQ ID NO: 127641 - DNA, 415 bp, Glycine max
tgttattcaaatttacaatatcatgaagatgttctattgtctgaaatctacgggagcaagatggtcactgaccaatccctattatatgagttaacataattgcctagggaaggtgtgcctttcgatgaggcactgattgatgaatggaaattctatttctctgtgcatgatgcccgcccgttggttcgcaccaaccaagcggatatgaccgcaaggcttcttgcctggtcattggcttctgaaagccgatcctcattattaataggtcgcgcttgcttctagacttagaccttgccacgttttgagaaacctcttgcattggccttgatatagctgcaagagatggccattagtaaatcgatgctatgcatggatgatgcccatactatctatctgtacctttctcacatcacat

SEQ ID NO: 127642 - DNA, 400 bp, Glycine max
  unsure (1)..(400): unsure at all n locations
ctacttttattcgnggaccacagagtggtacctggagatatgtcgcggcggttaggagaccttggggacgtcaggtggggtgctattgcccaaaaccaagcttgaccaatcccgacccaacccgggcatagtcagtcagtgagaacctgtgacgtacctaaacaggcgatctcctggaagtcaaccgataaaagaacaaagaccacaaagcaaggaggcttgtgtggtggctggctagctatggatcttgagtgatatctggagtatggcctctggtaatcgattaccaagggtgtgtaatcgattacaaggcttataaatgaagacaggaagttaagatggcctctggtaatcgattaccaagggtgtgtaattgattaccaggcctaaaatgggatca

SEQ ID NO: 127643 - DNA, 450 bp, Glycine max
  unsure (1)..(450): unsure at all n locations
tgaaaatactaagtatttattacctatacttaacagaaaatacttataacactacaaaataaccataaattgggagagtttgatacaatttgtacaagttttatacacaaaagttagtcgttttcaccgactaacagctatccgtcagactcacgggtccggtagcatgcagtgactaacgtcatcatctgcacctttgtcaactagaggcaagcgagcctgttgatcgagactattttagtctcacaactttgtcatccagagacggaaagtccaatgacatgcggagataccttatagttatccgcaccttttgtgatgcgatcctaccccccaagggcattggatagaagactccaagaagattgggccaaagatgcaagagaaggccctagggttctcatgagccatanggtagatttcgggcccatgggctaagtatgagcccac

SEQ ID NO: 127644 - DNA, 437 bp, Glycine max
  unsure (1)..(437): unsure at all n locations
agcttatagaatctataatangagatcaatgttctttgtagaatcagttcatgcttgctttgctgagcctaatgctatttctccacgacaggatattttatataatattggaagaatctttataacaaatgcacattcctggacgagtattctaacggaaaacgagaaggaagcactgactatcctcctctagaagtcaaagcacataatgatcttccacaagaatggatagcttcaagagatcatccccttgacaacattattagtgatatctcataaggggtaacaactatacactctctcatagatatatgctataacatggcttttgtatctatgattgaacctaaaaatttaaatgacgcccttatatatgataattgaataatagctatgcaggaagaactaaaccaatgtgaaagaaataactgttggga

SEQ ID NO: 127645 - DNA, 417 bp, Glycine max
atcattgattcgacttcttctagttgatcttcaccgattccgttatcatttcctttggaatgtcggtcatgaatattcatatgttctgaagaatctgcgatatcatctagcatattctttcttgaccagatatcattagattcatcagaggtaacatgaatggagtcctcgatattcatagttcttttattatataccctatatgctttgcttggtaccgaatatccaagataaatacctctctcagattgtgcatcgaattctgctagattatctctaccattatagagcgctaagcagctgcataccaaaacatgtcgatgagaaatattacgttctctaccattatataactcgtatggcgttttctttaaaatggggcttattaacgccctattcatgatgtaacatgcagta

SEQ ID NO: 127646 - DNA, 437 bp, Glycine max
agcttctcttggaccttaggcaaatactcaattcatcctttaagatcaaattgtctactcgtaattggtccatttcctctctccggagcttaagctcactgttactgccccatagagctcctcggaatttgtttcggccatgttcttccctacgggcctttttggtctcttgttccaaggccttggtggtggctatatttacgtctctcagatcggcgttctcctttcggatcctaagagctactgatttgaaattttctttgactgtttgggctttctcgagttttgtcctgagggcctgcacctcttcgtcctcctctagagctacaacttccacccccttatcggttctcaaattcgggagccaatccagaccttgcgtgtatgctttcaaacacctatggtagctgccgatgggcccgttgctactgcctctg

SEQ ID NO: 127647 - DNA, 514 bp, Glycine max
  unsure (1)..(514): unsure at all n locations
cagcttcttcttatgagcattcattngcctgctgctcccatgcttatnagtctaacaaatttagcagagctaactntcctgtttgtaatgataagtggctttaaaagattatcacacatagctcatcaagttacgagcctttccccaccataccttgtaacaggaaaatcagccatgttcagttgtctgttcataaattttctcttgcactgccattgatcggaatccttacctgtttttcaaatataagtttctttacaagatttatcacacaatgcatcaaactatttaagaacctccaccataccttgtaacaacaaaatcatccatgtttgacctgttcataaatattctctgttgcaccagcatgattgagatcatctggtcttcgggaataaaaatacataggtccctacaacactcaatggcattatatgttccaaaatataccagctttttacatagaaacaagcacatcgctactataatgaagatttgaatgagaccccagaat

SEQ ID NO: 127648 - DNA, 442 bp, Glycine max
  unsure (1)..(442): unsure at all n locations
tctactggcagctaatggatgatgtcacacgctgataaataaggaataaagaggaaacagatcacaagcatgacctgtcttgctaactaattcacccgaaggatatttacaaaaagaaaaccaataaaagccaagaacatggatgaataagataacttacatcagatacatccaatgaagcaaaccttgtacctcgaaactcagtacattgaaaatagtcatacaaacttttagttatgtccaccacctgaacagaatacgaagaatggcatatttacttacaacaatgtacacatagtattaaaaatattcatttctttatatggcacaaatccatacatgggaaatagaatgaagcccaaatacataatacaacatatgaatgatacgacacaaatacagaatatcataaattcttaanaattaaagatacaatacagca

SEQ ID NO: 127649 - DNA, 499 bp, Glycine max
  unsure (1)..(499): unsure at all n locations
actcagcttgactaattctgctgcagattttcttggagacttgtaaagcaatttgtctcccagactcaagatgatgccactatgtgctttttcgagcaagatctttttgtctttaccttccatcttcacatcaagattggtttcaccattcaaagcatctttgagaccttgatgcacaagaagagccctcatctttaatctccaaagaccgaaatcattctgtcctgtgaatttctcaacttcatactttgtagatgccatggctgatcatcccacgttcaccacaccaatttgttgtgcaaagtatcacagaaatgatacatagaaaaatcagaagttctttcttatgatgagtttcaaattacanagagtttttctagagagaattgaaaataatcactctcaatctaaatagtagttgagctatttatactagtctttacaaatggacaactcactaattatagtattttggtacaactggtttaactaccagctt

SEQ ID NO: 127650 - DNA, 452 bp, Glycine max
  unsure (1)..(452): unsure at all n locations
agcttgaaccttcgattattctctgctagtgaacaactgcggtacacttgaacttgaatagtcttcaagggtcactctccttggctgcttatccacgatagagtctcctctaactgctgtatgagattgcccttgagtaggaaaactagaagatgcctcacaagatcgaggttcttctcctggagttgctgctgcttctaagtcctgcaaaaaatttataattctctttgtgtttcgtctcctagaagtagcgttaatctccaaatctatgggaattaaatcaccagcaacagatctcctttacatacaaaacaagcagaacaacaattatccaattccaaagaacaataaattctgcagtaattaaatattcacacaaataatcaatgaatcagagaacaagaatgaatcgatgccttcaaaatatactanactctccaaatagaaataag

SEQ ID NO: 127651 - DNA, 398 bp, Glycine max
  unsure (1)..(398): unsure at all n locations
tagagaggaagcgaatcacagagagaggggtggcgtgggaattgaaggaaattanggagagaagttgaactttgaagtgtgtctcacaagtttcacattcatcaaagttatgacaagtgttacacatgtttctatttatagcctancacatgggaagcttccttgagaagcaaggaaggtagattccttgggaagctagaggaagaaagcttcatgagaactagagaggggctctccactcctcatagctactcacccatgcaaatcataaatcatggtacttctgacaggaagacttctttaacaagaaaagctttgaaacagagtggtctccatttcataatactacccatgcaaacataatcaaagtctttcaaactctaaatctgaacaactaa

SEQ ID NO: 127652 - DNA, 143 bp, Glycine max
agcttgcacccatgggtcgcgtgttatcttttgttcacgacccgaaacagcctaatcctgcgcctatggttcactgctgataagctatcatggtcctgccccatcgcaatatggataagcttctcacgctctgcaagaggctg

SEQ ID NO: 127653 - DNA, 422 bp, Glycine max
  unsure (1)..(422): unsure at all n locations
tgctcactatgatgctctaccatcacctcgtatntctggttaactgaaaacaccagattttattccttgatcaagtataaccacatcattctgctatgctcatgtacacatgatgtgaagtacttgtacccacccactgatggcacctccatatgaccacacacatctcaatgcacaacactgagtacattggaagctctcattggctaatgggaactaaatgaatatctttggtgcttgccaatgagacacacatcaaacaccttctctgggacatttaatgctggctgacctataaccatatgattagttactaacatattcagactttctaaatttatgtgaccatacctgaggatgccaatacagctcaatctgttgatcttttgaacctatatacattgtcactctgctgccttaat

SEQ ID NO: 127654 - DNA, 430 bp, Glycine max
  unsure (1)..(430): unsure at all n locations
agcttgcttcacaatctccccttttttgatggtgacaaacctgaaatcaagagacacatacaagctatatcttctaatcgatcactcacttaattctccccctntgtttttgagtttaagcttcccttgaagttaagttatttaattatgtgttcttgatttaatcccaactttctctcccactttggcatcaacaaaaagccaaagtgcgtgtagagacataaaatcatacacaaactcataatcatccaagcattttaatccatacaacaagcaaggaggacaataattcatacataaactatgcaaggaagataataattcatccattaatcataataaaatgtcagataattagaaagtcatccaagataaccaaactanaacaactaatttagaaagcaatatactaataagtgtatcaaaacat

SEQ ID NO: 127655 - DNA, 410 bp, Glycine max
  unsure (1)..(410): unsure at all n locations
aatgctttccaagatggagagaatgatgagaatcccanagctgccaaaatacagggtcctatgaccaggggtaggaccaaacagttagaggataccctccaacaaatagtagcagccatacttgacaaggcctaagtggagaaggacgaatgcccagaggcactcccaagaatcttgattgttgaaggcccaaactaatttgaaggcccatatccaatattttctatttattgtaattntaattaaataaattggtggctgaatcctatgccttttcagctgcaccaatttcagttaaattagtaatttaatgctacactatatgtattcaactcattntgaaggaagggactcttggcatttttcataaaatacttgtgtcttttgtgagagcttctctttgggtccat

SEQ ID NO: 127656 - DNA, 445 bp, Glycine max
agcttccatcgtcatataccaaagtgtaatattccattgccatccttcaatgctgcatgcgatcaatcccaaagccttatattttcttattgtacagaataatcgaagtttttaaataaaaaggggcgaaccctaggatcaatattttagttgattgattaaaatgtcaaatgactccactactgtcatccaaaactgtcaggtgattaagtcaaacaaaatgtacactctcagagagtctctgaagggatctgcaaaagataggatgagattgcatgaattatcacgtctttcagaaagagacggtcaatctgtgtttttcataaaaaaaaaagaaaaacacacaaacataagaaatcacaaaagagggaaagaatgtcatgagcattgcatagttttcatgatacaaaaccttttgtatttaatgctagatacaagcctacat

SEQ ID NO: 127657 - DNA, 456 bp, Glycine max
  unsure (1)..(456): unsure at all n locations
tgtcttcacanataaatcnaaatcaattntctgatcntctatgcccagctccagcttctttctncccatatcaactatgcagcttgcagttaacatgaatggccctcccaatattaccggaatgtcattatcttcacagatatccattaccataaagtcttgtcggaaaataaaatgtttcactctgaccagcacatcttcaattactccatatggtctggtaatggagcggtcaacaagttgtaaagtcatcctagtgggcatgatctccaactctcccaaccttttgcacatggagagtggaattaagttaatactggctcccagatcaataagagcttttcccacaatgacttctccaattgaataaggaatggttacactcccaaggtctttatgcttgggtggaaagatcttttgaatcacaacactacaatttccttccacaacaatgtt

SEQ ID NO: 127658 - DNA, 463 bp, Glycine max
agcttgtaactagatgctattgtcctacaacttatgtttctcaaagggcatagaaagctggactgcagcaatctcaaataaagatatttggtctacctgtccgaccttcctttgttaagcctgtccagccaaaggtatgtaatattcttatagccattacttgaatttattcgcaaatttacttacaattctggaattggaatacaacatgatgtgctatatatattattcccaaacaaatgtcagtggattgtttgaatttatgctgtaggatgaactaaggagagaattaggaatggatgaggatcttcctgctgtattattgatggggggaggtgaaggtatggggcccattgacgctactgctcgggcacttggagattcattatatgacgagaatattggggcttccgtaggtcagatccttgtgatctgtggtcgtaataagaaacttgctaataaa

SEQ ID NO: 127659 - DNA, 321 bp, Glycine max
  unsure (1)..(321): unsure at all n locations
agtaccttttaatcttctaagaccttttttggttntcttagttatcaccactgtcataccctaatttcgtccggggacctttgctcgatgacgtgcgaccattctttggtcctcgtgaggtgcttggcacccatcattaggcaatttgtgaaattccaggatatgccgaanaaccaaaaaaatattgatgcacaatccgtaagtttccgtgacacaccggaaatcaaatggaagcatcgttgcataattaagtgaggttccgtaacattccgtaagtcagaaaggggatgattatgtaatccgcaaggctccgtaacatta

SEQ ID NO: 127660 - DNA, 461 bp, Glycine max
  unsure (1)..(461): unsure at all n locations
agcttgccaagcgtttttatgggccattccatattatataatgaatgggaccagttgcctataagctggcattaccagagaattctcgcatccatctcgtattccattgctctatcttaaaacctttcatcggatctccgacatcagaacaggctatgcaccttccgcccttggccatggacaaccaaccaatcccagctcccttagctatcttggctcacaagaccgtaccctcgaacacaagcccaaaacacctagtgttagttcaatggcagggtcttcatcctgatgaagcatcgtgggaagaatggtcaaccattaagtcccttcatcaccttgaggacaaggtgttattcgaagtcggtgggaatgatacatctggcagaaacaagttacaaatagcanagcccacaaggcaaagtaatgctcccttgcacctgaaggactacgtacttgatagt

SEQ ID NO: 127661 - DNA, 498 bp, Glycine max
  unsure (1)..(498): unsure at all n locations
actcagcttttatccaggctcatcttggtggngaagctccttcttctatggcttattccttaaaggatggcgcctcctctcacctcttttcctttgtcttccgctgcatctccatggtggaaaatcaccattaaagaatcccattgaagctcaaagatccagcctccatagaagccccacaagcaagcttccatcacttaccacccactctgtcatcatgccgagactcaggaagcccaacaggtttagccttctctaagtattctgaacaaaattcaatggcttcttctgcaatgtacctctcaataatagatgcttctggatgatatagattctttgtatacccttttaagatcttcatgtatcgctcaaccgggtacatccatcgtagataaacaggaccacaacattngatttctctgaccagatgcacaatcaagtgaatcatgatgtcaaagaaagcacggggaaaatacatctccaactgggacagtataa

SEQ ID NO: 127662 - DNA, 405 bp, Glycine max
gaacaaaaccagaagaattcttaaagaatgtgtgagtgaaaattgactcatggctaaagtaaagtaacccataatggtgaaaaggtctggttttcctctagattgtctctactctctagttaaactggggttagttacgtatgaataatgtgatcataatcttatgatatgcatggcgaattattttaccttttttatgacaaagtgcaggtaacaatttaaaacggacttttgacattcctaaatgtggtattaaaccattccaaatgtttcaaaataaattgtccattttgactggttctaggcaaaaagtatgagaaagaaatattatatttatgctggatacacactgtatgcagactttgcagaggtggctatatatacacacacgttagcgtatgcctc

SEQ ID NO: 127663 - DNA, 256 bp, Glycine max
  unsure (1)..(256): unsure at all n locations
agctgatgatcttgggatgttgctcacgccgaacactngtgcgtgngaggaactggcgctggcgatcatggnggaagtaaggtgcaaggatgcaatcaggtgcacactttctgcgttggtacttgcatgcagcacaggcctgtgtggcgctgttgccatttcttggtgttgagattctgttattggtgttgntgctgttagggctatttgtgttcatggcttcttggggaggaacaataataggggtgtgagattt

SEQ ID NO: 127664 - DNA, 332 bp, Glycine max
  unsure (1)..(332): unsure at all n locations
agcttccatcaagtggtaatcaaagcacacttgttcttttgttggngctccntaaacctctattaattttttgctttaccttctcttccatctgtgtatctttatttttctccatggatctccttacatgtcttgtgctaaaatctgttaacatgattccttatagtttcaccgaataaacttgctatagaagcttgatttgattttgtataggtcaaatttaatgttcctgcttttgtaccatgaattgtgttgagttaggctcccttgagctttgtctcgttacttttggggctgaaacctaaaccataaaattcttacaagaatattaa

SEQ ID NO: 127665 - DNA, 432 bp, Glycine max
  unsure (1)..(432): unsure at all n locations
aatcatcctgcttggacgaatgagaaaactggggcaaatgaagagggtgaggatgagggagaaacccatgttgtgactgacattcctatacggccaagttccccaccagctcaacaccatcattacttagccaataacaacctttctccttacctaccacccagttatccgcaaaggccatccctgaatcaaccataaaacccaccttccacacaaccaatgctaaacaccacctttagcacaaaccanaacaccaaccaaggaagggaatttgcagcagaaagccagtagaattcaccccaattctggtgtcctatgctaacttgctccattatctacttgatactgcaatggtagccataacccctgctaggtttcctcaacctccacttttcaaggatacgactcgaacgcaatgtgtgcttatcatgg

SEQ ID NO: 127666 - DNA, 329 bp, Glycine max
  unsure (1)..(329): unsure at all n locations
ctacatatacccctctaatagccaaactcactcccatgccaaaatacatgaaaattcttagatacacacacccctctaatagctaagctcaaccacatgccaacatacatgaaaatttttagatacacacacccttctgatatctaagctcacccccattgccaaatacatgaaaatacaaaaaaagtcctactacaaagactactcaaaatgccctaaaatacaaggttgaaacccgatactactagaatgaccaatacccttggggggtagcattgcatcacttattagctaagctcttagaggagacacttacctncttacactta

SEQ ID NO: 127667 - DNA, 457 bp, Glycine max
  unsure (1)..(457): unsure at all n locations
tctctaactgtaggacactctacgccagtatcagntctatttatcttcgnacctacatggncctttagctataagcaacatcattctttagtacaataatgtaccagtgtttggtggcacccaatatagtttgtcgatactgtcacaacatgcccttntgtgggcgagcgaggcaaggctcatgggtgcgctnttcaaaggtggaaagatgcgcggagtcgccaccaatgtttatttgtggaaaacgtcggaaaaatcgaaggaaaccggtcataaagaatattccaagttcgggagttgtatttacgcttgaggaaggtattagcacctctcacgttngtctcagaggacaacagccttattttttnttagaattgtggaaattggtgtaccttaactattattttgtttttattntttgaagtcgacaaaagcggagctcttgctcctacgtacc

SEQ ID NO: 127668 - DNA, 457 bp, Glycine max
  unsure (1)..(457): unsure at all n locations
agctngagaaagtgggttgaacattttcttttatttatcacccaaattaaacttatggagtcaaatttcaggtatctctaacagttttggtcttttggacagagattaacttttgaggatttaatcacaatttaaactgttcaccctattttaacatgcttaagttaatattgcaaacaaaacatttgacttatttaaatgccaatgaaaatgctatttgttgacatttacacactacaaacattgtacccgaaaaagctaaaagtccaacattcagtgtgtatttgtggctgtgaagtgcctacggtggccaacatttgaacttgaaacgtggactcaactttaagcttattgctttggttggtccaaaattgcataacgtatgtcaatgcctagtaaaaaatatcccacaaaaatatcgaaacatgggagttaaaaatcccatagttcgctttgt

SEQ ID NO: 127669 - DNA, 459 bp, Glycine max
  unsure (1)..(459): unsure at all n locations
ntctcataagtcctaaatgacattncaagttatgattaacttattntaaccttcatttaccacagaattcagatttaaccttccaactctcaaagcctcactctntttccactcataacaccacattctcactttctaaccctaggttaactctacccttcacctctatcagttttccataagcaatttcagcacataagcatcacaagcatcatcataaaaaccctaaaacagaatgggtatgtttaactcatccaaacatggcgatttcaacaagctttcaacaagagtcttcacaaataactatcatgaagcagaaaactaacaaaactacccatcatatctcccaaaaccccatacccacganaatcaaaggagaaagaagccacccaaacctgaaatttcgaagtcccactcatagacacgcacttcacgaccncganaatgctcccctttcac

SEQ ID NO: 127670 - DNA, 285 bp, Glycine max
  unsure (1)..(285): unsure at all n locations
tgcaagctgttgcattcactaattagcatttttttattcttaatagagtgnagctacaaggtctaactatgtggccatatatcaagtgttgtgacatctaatcctggataaattaatcttagttgcctataaagaggcagcaaagtgagctgcctggcccaatgtggattgtgggctataacaagccaagtcaaaaatgcctagattctaatcangcctctgaaacgaagtctaagttccgcaaatcccactttttatgcttttggcgggttttgtatgctaacc

SEQ ID NO: 127671 - DNA, 421 bp, Glycine max
  unsure (1)..(421): unsure at all n locations
nntatgaatttccttganagcttcggatttatggatatagttcttcatacattttcttacgngttctgtttatccaatactcaatgatacttagctcttcaatattgcatgttgctgtctctccttccacttgggaaggtgtagaaatcttcacacaaatttgtatacagcaacattaatagaaaatggatcttttggttatttgttttctctctcttactgttgactttctgcagttgcatattactatttcttcacaagcaaagtaaagcgaagcattgtttatggagatcagcctagaaacaggtaaattaaaaaactggtaaatctatctagtgatgttggtcatttgatgtattgtgtctaataatcttgtaaaatggtgggtttgcaggttggatctgtatctacctgccaatat

SEQ ID NO: 127672 - DNA, 476 bp, Glycine max
atcctcagagacgaccgcggcatgcaagcttctcaaggaagctacctagtctataatttttatagcatgtgtaacacttggtgtaactttgatgaatgaaagtcttatgagacacacttcaaagttctacttctccccctcttttattccttcaatttcgtgctccccccctctctctttctctccctctttcttttcctccattgaagcatccttccaagcttcttatacaaggctcatcttgggggtgaagctccttcttccatggcttattccctagtggagggtgcctcccttctcctcttctcctttgccttccgctgcatctccatggtgaaaaatcaccattgaaggagctcattgaagctcaaagatccagcctccatagaagctccacaagcaagctttcatcaccgggcatgtcttgatacgaccacgcaaagacatcttgatactcttcaagaagagttatcaag

SEQ ID NO: 127673 - DNA, 426 bp, Glycine max
  unsure (1)..(426): unsure at all n locations
gatgtggaagtgttgaagggtgaatctttctgtctttattgttgaccacagagtggtacctggagatatgtcacggnggtcaggagaccttggggacgtcagatggggtgctattgcccaaaaccaagcttgaccaatcccgacccaacccgggcatagtcggtcagtgagaacctgtgatgtacctaagcaggcgagctcctggcagtcaacagataaaaggaaaacaagaccacaaagcaaggaggcttgtggtggctggccagctgtgaaacttgattgatatgtgagatatggtctctggtaatcgattaccaagggtgggtaatcgattacaaggcttaaaaatgaagacagggggctaagatggtctctggtaatcgataccaagggatgtaatcgattaccaggcttgataacggagtc

SEQ ID NO: 127674 - DNA, 340 bp, Glycine max
ttatcttctctatggatatggtgggaccggcaagacatttatgtggaaaactttattatctgctgtgcgctccaatggaggcattgttttaactgttgcttctagtgggattgcttcattattattgcctggaggtagaacaacacatctctaagttgtcatacctgtgcctgcaacacaaaattcaacatgtaatattcatcacgggagtgacttggctgaattgttgcagaggacaaaattaataatttgggacgaagcttcaatgtgtcacaaatttagttatgaggcacttgacaaaagcttacaagacatcatgtacaacgacagaccttttggg

SEQ ID NO: 127675 - DNA, 471 bp, Glycine max
  unsure (1)..(471): unsure at all n locations
nttatctcctcctatctatctatcctctctaacttaaacttatcctcacttccgaccctccatagaatcaacctgttcagctggtgatcttgatttagactttgattgactatctttagatccctccaccataatgattcagtgttgtccctcgaagctccatcaagactcctccaacctccgtacttcgattcaaggactctagaccaagtctcctcctgattctgaaacatctcccatttccactntcctaatagagatgcattgaacgatacaatatccttgactcccaacccacctagctccttangcttacaaaccttttcccacttgatccacggaatnttattntgatccgctgcaccaccccacaagaaaatcctttgtaacctggttagcttactaaccaccnnttctcggacccntgaaaaagatanaaagtnaatngaatagatgtagcacggaattatg

SEQ ID NO: 127676 - DNA, 446 bp, Glycine max
agcttcagtccctgagaaactgatttctattatacaacagggggtgaagattgctgaaaaccctagccctgcaacaagtcctatggaagtagacacggagatggacaagaaaatccgcggtattgtgagtagcattctgaaggatgcttctgtgcctgatgctgagaaagatgttccaacatctttcaccccagatgtttctgtgcctgatgtcaataaagatgttccaacatcctccgctccaaatgctgaagccctcccttcacccagtgaagaggaatcaacagaagaagaggatcaagcctcagaggagacccctgcaccaagggcaccagaacctgctccaggtaacctcattgacttggaagaagtcgaatctgatgaagaacccattgccaacaggttggcacctggcattgcaaaaggttcaaagccgaagggaaaac

SEQ ID NO: 127677 - DNA, 384 bp, Glycine max
  unsure (1)..(384): unsure at all n locations
atatttaatttcatcataagctgtgaattaaaagaaaataggcacataagaatataaataactacatgtatgaaattatttatagtaatcctactgttcattatattttggataagtactaaaaacatttatccaaatttctcttctatacattccttcccaataatggtaaggtcatcctcctgcacactatcaattgattgcattggctgttgtgaagattcaaaatattaaattttccctatcttgggataaatatgaaacattaaatntattattggaccatgactntgaaatgaaccaggaacgatcagaagaaaatagcagaacttgacagatttaagactaacaataacaagttccaaattctcaanaatatacgat

SEQ ID NO: 127678 - DNA, 449 bp, Glycine max
  unsure (1)..(449): unsure at all n locations
agcttgcaggatgaacttcatcctgcanatatgtttactttatgatctatgactatgcaaatcactttctacgatgatagagtagtttgggatgcttgtttttggtgggcagaaaatggagaaagcatgaatattcaatatgccttcctaagttttaccaaaaagttttagttagaggaaattcgtgaagaaactaaactgaaattatgatcatgtcatgtcatacgatttatttttttctagaatgatgatggaaagatcagaaaacatctcatgcaagtaccaatctttttttttcttgaatccagttatatcatagaattgagcttatagactgtagcatatactatacaagtctacagttacaaaaagccagaaaattattcatctttgaataagatatttctttgcacaatgtttaagtgtcaaataagtattttggataaagc

SEQ ID NO: 127679 - DNA, 482 bp, Glycine max
  unsure (1)..(482): unsure at all n locations
ctcagctgctgccttggaggaatgtcttgcgctagatagcangattaacccttcttaatatgnatgnanngaaatatgtagcatgaaatgccttgcaaaatgttgaataanatacctttgcaaatatgaatatatgtagcatgaaatgccttgcaaaatgttgaataaaattcctttgcaaatatgaatacatatagcatganaatgccttgcataaatatatatatatagcatgaaaatgccttgcatgaagtgccttacaaagtgtttggatgggtagcgtanaagtgtttttcanaatatgtgtatntgtgagtaggtagcaaaagaagccttccaaaaaatgtgtatatgtataggatgtagcatgaaaaggtttgtcaaaaaatatgtacatggatatgagttgtaaaatgcttctcacaaaatntttatgtgtgcanatgcatgtgccatanaataacatggccccatatgattat

SEQ ID NO: 127680 - DNA, 461 bp, Glycine max
agcttcgaagggaagagagagaccgatcacttatctcattttatggtcttaaaagaagagttagccgcttgctcaaggtccaaaaggaacttgactcagcgtttgtgcgagacagagaccaacatgttagctatcatcaccaagtatcaagaagaactaagcctagccacagcccacgagcatagggtggcggacgagtatgccctattgtacgcagaaaagaaggctagaggaagggtgatcgactcgttacaccaagaggcaaccatgtggatggacctatttgctcttaccttgaacgggagtcaagaacttccccgattgctagccaaggccaaagcaatggcggacacctacgccgccccggaggagatccatggacttctcgactattgtcagcatatgatagtattaatggcccatataattacgaaccgctagggaacttgtattgtcactca
